United States Patent Application Publication US 2008/0039413 A1 - sequence listing, part 8

SEQ ID NO: 965 - DNA, 199517 bp, Mus musculus
  misc_feature (1)...(199517): n = A, C, G or T/U
gatgtacctcaagatccagctgtaccacgtttgagcatatactcaaaagaatgcatcatcctaacacagagaccctagttcaaccatattcattgctctattcataacgtgaaaacaacccagatgtccctcaacaaaagaatggttaaaggaaatgtggtacatttacacaatggagtattaccgcactagtaaaaacaaaacaaacaaaaaattgacataatgaaatttgcaggtaaattgacaaaactagaaaaactaatgagtaggtaacccagacccagaaagacagttattgtgtgtattcccttttatgtggatgttagctgtcgataatagccaagctacaatccatagaaccacagaggataggtatagagtaagaagccagtgggaacagatagatctttaggaaagggaaataaaaatagatatagatggaacgatttgggctggaatcaaaggatcaagttgggagggagagaagggggattatgggagagaaaaccgagacagctaaaattaagggccatttgagggataatggaaacctaatactgaacatctaaatgaaattgctgaataatgggggaagacagtcccaaatggctcttgtcaccaaacaaaacttccagtattggaattgggttacatgtaattgagttgctcgcccaaggggccctgcagaaatcactgaacaactcaggctcttgccaagactgtaggttgctctctacaaactaacagcaaggccccactgctgaagacacctatacaacccatcggatgtggaaatgatgagctggcccctatatagagcctttacccctatggttcagtgtcaggaaagacactgaatacttcgtacactgactgctctcaaaagagaaaaacaaaccagttagaaactttttgtctataatggtgcattgctagcaagacatctagggcaatggtgccacaatgcttgtgggaatagccaatcactccatgagatgggtctcaagacctggggtaaacccaaatacttgtctttttaaaaatgtgacgataaaatatctaatgatatcccactattctcataggttagtgccttatggggtcatcaccagagaagtttcctcctgggaacatatagggacccacagctaggtattgctccgtgggagaccttggaacacccagccatgaatgagaagcaccatgtatacacagggtctgcattgggttcctctgcgtatatattatggctccaagtttactgtttttatgggattcctgagtgcaaacaagtgggtctcgtactcttggcttcttttccttctgtcttgtccaacttcaatgttgttttgtcttatattttgatatatttgagaagatagtaagtggaaacctaaaatagagtaaaagttaacatcagaattgccttttaaaccttctgggagagggccagtttttccaatggcatgaccctgagtatatggagttacatcctaggtcaagttcaggaatgttgaccaacatataatggaccccagtttgtgtgtgtgtgtgcctgcacttgtagtttttagttcttggatggtggttaatttggttttcttagttttgttctgtccagtgtttggtgattagggacggggacgaacaccgggaaggacttgaggaagatgaatatggtaaaatatatttaaattgaaaaattgttttaaataataaaaacggagaagtaactgaaattcttcacactaaattcagcctgagttcaatagctatttatttgaatttctgataatttagtccaaaccttacttcctcagcttttaaaatgagacaaaatatgtatcccaaattcaggttcagtatgttcactacaaataaaatttatatacttatgctaaaaatcaaaattatctcactaaattagtctctgatgtgatgattgatacacacttctgtaaaaacttgttataggatacatgcttactttcttagccaccactgaaatcttctatccttaggggcatctgagcccaggggcctgaagtatacattgggaaacatcaaaatactcactcaccattcgccaccctaagtagaactcaaagacccaattttaaagtcactgattactttctaaccttggaacatctgccaaagccacacaatagaaagtctcaccaccttttggctaatagcagtgacagactgagtttatcttatgctagtactagtgagtgaataaccctgaaagtaatgtcaaggtaaagaaggttaactgtgtttcaattccagccaataacagaaatgcacagctttctattttgttcatcattgaacaaaggcatgaatattcttctcggttgccctttagtttccagtttgaagtcaccaagtatgggcctacatacacacacacacacacttattaaagcagcataaagtctcactttcaaatgtattaagagaaattcaagagattctttacatcctaatactttagttcttatatcctagctatcaaatcccacatgaattttcagcattaaatagtgacacgcatcaagtttcagagatttattcatcagtgtaataaactccaaaaaaaaaaaaaatcaacatgatttcatgcattcagagacatatttcctgcttaagtggaaaattgtgcggatggcttctgaaagaccttcattatcagcagctttacagtgaacttcatagtttagaagtctgggccttctttcttcagtttgctgtagtccacattcacagagtagaacttaaaaacaaaacaaaacaaaaaacattttatattgccaaaaactgacatggcacagaaattttagaatttgatgatgcaactttctcaataacaacttataaataaaaaattttagaatatttcatgatgtaaacttaattcacaaaaatttactttatctaaaattgcagtctttcaggatagttttggtgaggtaactaggcatccaacctgaagcttaagtatattctactagctagaccaatagagagaatccactgcaaaatgagtaactattaattccttcggatacatacttctatccttttaagcttctagttcatctagattatttatattcaggaatctctaacagaaggtaaatatatagacttttcgccttggttaaggaactgctggattgcacaagaatgatccacatacggtcatatatttgaatacttagttaccgaggaatgacctctgataggattaaaggattaggtgtggccttgctggaggaaatgagtcactggaggtgggttctgaggtttcaaaagcccatgccacaccaagttctttctctgcttgaagatcaggatggagttcatgtgtattctccagcaccacacccccctgcaaggatgccacaacagccttgctgtttgttaatggaccaaacctctgaaactataagcaaggtcccaattacatgttctctttcatgtgatctgcctctgtcatggggtctcctcaccacaatgtaagagtgacgaagacagtttgtattaagagaggacttaagagtggttgtcaaagttcaaaggcacaggagtagcttagcctatttgagggcctacattcatccttttccattgtgaaaaaatatactaacaagtagttcacaaagatctgttcccaaacagatttcttcaaacctcttttacttcaaacacagactgctcacacagcctaaggtgacctcagtgttctgtctgatgatgatcttaagagttgaggttttccatcttcctcccaagcactcgactgaaagccactacactcagttttaaaggtgctgagggctgaacacagggttcggtatgtgctaagttagtaccttaccagcacaaccccttccccttacttgagttttaaaaaagaaaaacctcgaaattttaaagcatattaccatttcatcctcaggtatatacacacagacctagggttttgtgggatagaaaatcttaagtaaactatcaatattctttgctctgtcttaaaaatcagtttagcaagacaacagaatactagtctctaaactgttcacatgttaggatatttacagatagatatgaagatagatatgaggtatagtatatattataaagaaaataaacatctagtagatgtcaacaattattagctgttctgtttatttaatcacctcagtcctttacattcccactgctttataaacatctaactgaatatgaattacggcttacttaaaactgactaacctaaaaggctggagttagcttaatggctgaaagcatgtaccacccacctaaaggctcacagagttcagttcccagcacccatgtggggtggctctcaacaacctctgtaacctcaatggactgtgacacccatagttttagtaagtaccaataattaggtgcagttaacacatactatatgtattcaaataataaaaataaatctttaaaaacaaagttacagggctggacagatggctcagtggctaggagcactgactgttcttctagaggtactgagtttaattcccaggaaccacatggtggctcacaaccatcagtaatggagtctgatgcccctttctggtgtgtcttaagacagcgacagtatattcatatacatcaactaaatctttaaaaaaatattaaaccaaaccaaaccaaaccaaaccaaacaaacaaaaaaccaaagctacagctaggtgtggtgagactggtagagtacacctttaaacccagcattcctgaggcataggtaggtggatctctgtgaattcaagatcagcctaaactacatattaagttccaagacagccatggctacttccttaaaccaactgttttgccagacatgatgatacatgcctttaattccagcactttggaggcaaagaggcaggtatctatgaatttaaggcttgcctggtcaacacactgagttccaggggacagccagagatatgtagagggactttgtctcaacattttttccccctctctcaaagctaacaggcttttgatgtatggctttgtacttaaatttctctacacaagtaatttttaagtttcctttatgttttcacatccatgtctttgctatttgctgtttttcttaacagtgtttacctcaagtgcatcctagattgctgtatctgatctgggcttttgagcatttctttccttgatgtatttctaggcccctagtccttaaatcccatctttgtctaatctcttattgttacattcacttttcctttgaggaaccaataatctccttttatgcactcaatactcatgtcctcttgaaatgtctgttcaaattctagccccgatgggataaactgagcatctggaaggtaattatgtcgtaagggcagagccatcagaactggaggaaaaagagacagagcatctacctcttttcctcctatagaagcagagatctcacatcctgatctcacactccccagctcccaaacttctgttgcctaaacttccctatctatgagacttatcatagccacctcaaatattactgtcttaccatcacagacctttcctttttattcatgttgttgtttctaagttaactactccacattcacttcattccaatcttaagtctgatgagaagcccttataggtcacttttgttctcaagagaaaaggaaagaataaatctcatctcacatctgtcatagaaaggcatacagtgaaatctaatttctctgggcaggataaagaaaactccctttaattcttttaggtgatgccaagtgtctttagacccagcactcaggattgaggggcaggcagctctctgagttcaaggccagagtgagttcttagacatccaaggatacatacagaaaccccatcctcagaaatttctcttaggtgacagaaaaattaacaatgttacctagtttacctcactgcttgggtacagaagcaaaagtagacatcattcgttcaatgctttcaaatcctagattgagttctcttcatctctatttcaatatggcaactctcttcccttctaccttttattagctacaggtacacagtgctgctcaaactatgccacaaataactgggtctaagacagaatttctctgtgtagacttggctggcctagaagttagagatctgcctgcctctgcctcctgagtgctggaattaaagctgtgtgctgccatctccagccaactcttaacaatagggtcttaaaacagcagcattccacctccaggtaacatggccttacatcagcctatgtcatcattttccaaagcactggtaactagtataactattagaatcatctggtacattttctgaaaaatatttacacaatattccaatatactttttggttaaacatccaaactctagttcttttttctccttttttaaacgttagatgcagatatatccctcccccgaataactggtacttaaaattcctaagacaaaattacaagtgagaatatctgtttactgtttcttgagtacattgttaaaaatacgtatcagacattctgtttcagagtggctagtaaatttcctgttgtatctttagaggcagcaacttatcttaaaagccaaattatagttggggtaagcagaaagttttaagcaaataaagagtaaatcataaaagctgctataaatagtactaaagggcacctatctctaccacagacacttcccccaggtgttagtcaaagaagactttgtgtctcttcctgagtgctaaggtaaacaactactggctgcttagaaacagctgatagtataacatatgggatactttaaatagataaatctgtatgacatgaaattatatccaaatatagcaatattttggtaatgtgagggtcttcatgtaaaagcatttacgtataaagtctcatttgtgaaatcaatattctgggcgaatgaacacattctttcaaaacaaaaaccaaacaaaaaaaaaatagctacacagagcactcctctgagaaaatgttaaaggttaactatgaggctcatggcaaaatttaatttcaactttcatctcttcctactaatccacaccaaaaatacttgaatcatagcaagaagaaacagccaagcaaagcacccaagagaccagagttgcccacacatcaacagcagcagcacctgaagattaggcaactcaaaccttcagtcccagctaactcaacggggcaggggctcttcacgttcaatataataaaaacaggatttcacttgcatatcccatttcaagagaactaccatatagccacatctgctacaatatgctttcctgcaatttttaaccactttgtaccttaccttatattgttcattgggacccagtttgttccatggctctgggttgttctttctgtcccagctaaaatggataaaatattgtaattattatagtaatgaaacactacttacaatagtattttaaaaatacttccttagaagctagtactttgaataagtcaatctcactttttattaggcattactttcattacagagctaaacagaagtagagtttataggtaaacaagcatgtaactggtaaaatcacagaacaccactctttgggatatctgtctacatccctgtctttataacagaaatgtttgtatttggcttttatcattttccaactaaaaaaaaagaccagtttattgaggaaaaagtaggttacactcacatacaacaggaatcgtggttacgtatttcataaaaagcaactgctgtcaggcatgatggtgcatgcctttaattccggcactagagaggccaacctgatttacacagtgagttccaggacggccagatgtatagtgtgaggatgcctccagccataacataaacaagcaaacaaacaacaacaacaaaaaaaacctcaagtgctatccaaccttcaaaatgtaagagttggtattagcaattctacttgaccaatatgaaactacaacttggggaggcgagattgagatgagctcacgaagccagccaagtaaaagtcagcagccctgggctgactgcaaagctacaaactgtagttgtttctactctgtgacttctcccgtgactggggcccccagccagatgattagccatccaaatattaaagcatttacactcacctgacatctggattaaacagtgccaagcgcatcacatacagtgctgctccagtaccccctgctccaataaatacgaagagaggaatcaactagaaacaaatagacaaagaagagtagccatcatcacatcccttgatcttgtccaaataagggcacactggttcctttctatataagccaacctctaaatctgctatttggctaatttgtcctacaatgggaataacggttgaacttggattgaagcagtgtttctttcaattgtattctaaaggcatgatctctgtaaaaagacatcaggatggtgttggcttaagagtccaacttccttacatggattaaattatatgaacaaataatcctatcaagtacattcacctctgtaagtcttgaacagcattcccattaaatttcattgcttccctggaagtaacgagatatacttccctggtaggctgggagcggaatctcttcgggaactactgaaaagtggcccttaaaagttctgtgagccaggcaatgtggcgtacacctttgatccagcaactgggaagcagaggcaggcagatttctgagtttgaggccagcctggtccacagaatgagttccaggacagccagggctatacagagaaaccctgtctcgaaaaaccaaaagttctgtgaacataatctctgtgaaataaagagcataactagcggacagaaatgcctattaaaagcactagttttaggaatgaactctgaaaacagactgcagttaattttgctgagtatttagaaaaccaggcttaaggcaaagatgaaggcccatcagtgggagttttaggtacacagcatcctctatcgagctatactggacgaaagtgacaggtcaagaaaacttaaatcaattttgccagtgtcaagttttccaagcaaagtggggattacacgatgacgatcccttgcacttctgaaggtttggtggtgcaatgcagtgactctaaaagccgcaaagagcagcataacaaacttggcctctcttggattctaatcactcaacgtaccactcacccctcttgggaccaagtaatctgagagccacagtgttccaacactcagaatgtttacctttctccctgatctctgccaccttctgcttcaggcaacctcacctccaccccaggtagaggcttcaagcaatcaggtcatcccaacaacagaatgtaaccccaaggaacagagaaaagagaacgtccccaggggacacgggcaggagcaaccacagctaagaggccaccctggcaaagaccgtgaacttacgctgggatgcttcttggcttgcccgaggatctggcggagcatgtttgcggcacaggcctacctacacgcagagagaagattaggacacacgctaagccgcttctgcaacctggctgagcggacgtccaaagtcacccaggacctcctacctgaaggacccctggcgctgagggcagcctgcagcaggaaagcccggatgcggctgtcctctaaggtgcctgaataggtagtcagccctcgcgcgattgccctaaatgtcccgaccacttcttcgcatttttgagttcatgatccatcagttctccaccatgcatctttttgataggtttatttttttattttttgcatagcaggcagagcgtctcgactggtgagacaggcacttttcaggacggcatgcgtatagaccagggtcatccggcggtccgctggcagtgcgctcggcgggcgcggcttccttagcggcgcctcccggccagggccgcgcgtggacgcgcttgggggcgcgcgtgtggggcgcgcgccgcgccgcccggagggccccggagggagctgccaggcgcctctgcaggctcagcgcccagatcccgcaggacaggtcgagtctccagccgccggggtcaacggctgcggtttaagactgcagctgcttcctgactttcactggcgcttagggacagaagttgaaacactagtaagtgacttaaagctggccatagtttctacaatgtgatttctagattcttaggtcgtggcactattgaagagttgtcgccccccaaagaagttttgcaacatgccaccatctctttttggtccagatattgaatccttaaaagtatcttcattggccgtgttgctgaacttaaccttttctaccatcctaagtcaatgttcatttatctctttgcaaatttacttttacccaaaagttcttccttggggcaggtttaatgggcactttcgaatcacagccaacaatttggactccctacacatgttaaaacgtttcaaataataaggagagggtttcgccgaaactgctaaactgaacaggtagcattagcccagtacaggcttcaggtggcggtgtataaggaagacaattcacatgaaggcatgaagcacacagtctaccatttaaaagggaaggcaaagtaggagccacatccgaggcagggaccacttatgcaaggactttatgttcaggactttcagaagttcaccaataagattatatggttgaaaagaattcctttggctatgaagaatggagtagataaaagggctattgtagttgtccatgtgagagaatttttagttgtcctgggggtggggaggaatgtactgattggggaaaaaaaatcaccaaaaatatcagagaaaattttgtggtatcaacagaacttgatagttggatggttatgggtgaatgagtgaaaaagaataaaaaaaaaagagtaaatcagaactttagtggtgagcagctgtgaacatatccatgccaattactgaaataatggatgagtgtgtatgcaaaacccacggtatttctcgagagcagaatactctagaatatctagagtagacaatagatggagtggttttgtttcttaggaaatgagctgtatgactgctaaagtcaagtcactttactttcctcactctgtctcctcagtaggacatagagtgagaaaagactcaggatcaaactgagcaattcaagtatgtttgtttgaataaaacaaggagggggccatggatgataaactgaaggttatgcatataaaggctggcatggtttgttttctctctctctctctctctctctctctctctccctctctctctctcagaaaacttttgctaagtacctactctgtaccatatcttgttgcttttgcttttggtttggcaggcctctgactcaagatcctcctgcctcagccttccaagagttggcattgcagacatacacctccatgaacaacattcagcttctagggatttagtattgaggggaaaaaaaaatacgtaccatgttgactaagaagagcaggaaataaacagataactttatataactatagatgtgccactaaaataaataacagtgaaaagtgacatgggagaggcagaggaaagattactttagctagagtgggcaaggaaagatgcccctggggatatcatctgagttgaaaactagacgaaaagaagaaattaccaaggtatgataacaaacagcaagaggcatgagtgactggtccagacatagcaatggaggagagaaaaaggagatcaccgagagagtaacaattttggtaatcctttatatactatggtaatgagtatgcttatattaaaaatcagtacagaaagtactcagatgtaaacaggagaagtaatggtagtgagtacagcgaggctgctagtaacagaatttcatgacaggaggacctttgctgaaaattttatttggaatgataaatattggtaataaaaagtaagtagatatatagaaatgccatgattcaaaagaaagtctagaaatttgctgttttgttgatttttaaaataatcttattagcctagttcctagacataataatttgacaaccaggtgaagccttttgaaatatcaataaagcagaattacacaatataaatttgcctaaactgtacccaactaacaggtcaaattgtcaacacttaaattttgcatattaaacttaggggaaagaatattctagctgcattttaattagggctggagacaatagtgctaacaatttagaaaagccagtgtaaagggggggattgcaaacttcagtgtgactttcagcagtagggactttgcgtgtagtagattatatcatttacaaattcctcatgctaaccctgagggagagaggtcatctcactgcctcagtagcatcagctttgatcaggtgactttctttagtaagacatggaatgtgagaattccatctgtcacacagaactgttggctcccatgtgtgctactctctctcttctcttttcccatcatgacaagatcaagttatgttccaaacagtggctactttaccagcttgaatgctgtttggaaagagccgtcgtgtgtctatgataggcatgtatagaaagtaggaaagaaagctttactgtttaaaatcatagtaattgtgattagcagtgtagtctgtctcaaaaagaattacacctttgaccagtgatgcagggttcaaatagaaaagaagcagactacatattgccaaaggaactcttagctttgggttttaaaaactgtgactgtttgagatatgaattgacattacatttctccagtcctctagaggaaagaatcaggcagaaaaatatgctgtgcttatgaactccttacatggattcaagccaagaagcaaggaagaacactgacaaaatcatgctctagttaaagactaggtaactctgtggcaacgtatatccaacagcatgtcaatgtctgtatacagtcctcatcctcttcactataagtatccagtatcaagtctctgttctactgtagaaaattatgtgtgtctgttgtagggcagttaaaggtggtgttaattcacagaccttcagaccgatcaaaaacaatcctagaaaaacaaaccacctagaaatcacagtattggactgggactataactcagttctctatcacttgcttagtgtgtgtaagaattttagttccatccgtagcactgaaaagaaattttaaagacgataaaaggaggggaaaaataagaaaagaaaaactaagtcaggaatgacagaaagagaaaagataataagagaagaagcatctacagcatcatttgtagatcttagactgagttaggaataccgacagatggagttttaggttctcccagtgctgaaggcactttgagcacagatagtggagacctgagtgtcttgaagagagtcattttggagagtccgaaatgattgtaatttaaaaaaaaaatgacaattgttttatattggcctttgttcacatatttaatgctttttcttggaaaaattatatttagtcctttggctagtgtcaagctcagacaggtaacttgatttggtcaatgaagcatgcaccattaaaaataaaaataatataaaaagaaggctgaggagatgtcaccataaaagatgcttacctttcaagtatgagtacctgagatttcatccctagaactcaagttcagccccattctccaatcctagagaaaacagacagaccctagaagctcccaagatacaagctcacaaggctggaggatgaagtagccaacaggaaggaattctgtctcaaacgaggtagaagacaagcgtcaatccttgatgatctcctccaacctccacctgactgccattatgcatgtcttcacaaatatgcatacacactcggaaatataaaaagaaagaataatataggaattattaaagctgtgacaaagtatcatatcatatagacttattgagggaaaaggagccttgtagaccatacatataaaatgttcttaacaacacaggaagaaatgaaagcttatattgttgagttcatagtgtatggaagaaggggagtgtagcatggtggcacttgagattcctaggaaggagacatgggaaatgaagctgaaagggtagctcagatttgggggagttggagatttagagttttatcctttaggtagtgaagattcaaatgttatatttaaccacagagtaaagcaagtgcatggtgagagatcttctgaaaacattaaaacccttgggaatggaagtcttggtttcccagggaagccagttgggctcctcagaagatgctaccaacaatgggtgactaacaaagggaggatatgctcagagctgacttggttcctggagtttcctcaaggcctcaccaaatacagtgaaacaaacatagagtatgaagtactctatgtactgagttaggaatactgacagatggagttttaggttctcccagtgctgaaggcactttgagcacagatagtggagacctgagtgtcttgaagagagtcattttggagagtccgaaatgattgtaattaaaaaaaaagcaatgacaaaattttttatattgtccttttgttcacatatttaatgctttttcttggaaaaattatatttagtcctttggctagtgtcaagctcagacaggtaacttgatttggtcaatgaagcatacaccattaaaaataaaaataatataaaaagaaggctggggagatgtcacagtaaacgatgcttaccttcggaagcaatcggaaacctacccctgtgacttccctggcaccctccagtgatttcctaaactttggtaaaattcctccagtttcctataaagacttatatccctttgtctatggtcaccatttatgtaagtggtcaactcctttcacgaagtaagaccactgttacctattgcattattacaatgtcagtggtggtctctgtgtggtgacgctttcagacctaacaatggcataggatcttaacaaatgaattgggataccttttaccatttcactttgagatttgtaacatgtttatttcttgttcttttgttttgttttaaaattttaaatgatttaaaattttaaaatcatgtagacaataattttctgaattaaatgaaactatagcctgacatggtggcatatatttataatcccagcattttagaaacaaaggctggaaagtcaggactttaaagtcagcctcagctacatatgagtgtgaggccagactaggctacaaaagagcatgtcttcaaaacaaacaaacaaacaaacaaacatcaaccgatcaaacaaacaaacacacaggttttgtatggtgaatacctctaaatccccatcaatggcacccaagataaattagtgctcttgtacattttccttgaagatttaagcctagaagattctgaaagttattgtgattatgtgttgttattaatgcatgacaataaagaaatagcttcttttgaaaaatataatttaataactgaaccatagaatacaattatattaatataaattgaagacagattcatatttttattcagtttgcatttaggattttcattatttttctagtagataaaatgacaatttgagttatttttatgataatacaaatacaaaaccttcacttgttaaagattctgcagctatccttaacctaaaaacaaatatattcttctactagcatgacactttagcataaactaccactaattataaaccttctattagaaaaatgaagtattttggacttaaagtttactctcagtgttataaatcgcaaagcttcactactataagtttaaattaaatatttgaaatactttacgtgcaaaattcaatgaatattaaaaagcagagacacagcaagtttgttcatactttttatttgaaacatggctacataatattttaggaaaaatgtgcttgtcttgtttcgaataggacatgaaacatctaaacttcatgtagacttcagattatctcattttccatccttcttctttgatgccatttattatctctcttcattttttatttcctttatggattcctaagttcattcagtcatttgctcatgagcatgtattggatgcttactaggtactgtttgctgtcccgagtgggcagggaatctgcatacttatgtgtgtatgtatcagaggttcgtgtctggtgtggtcctcagtcactctccaccttcgtttctgagatagtctctcactagcctagagcatgtggatttggttagactagctggccccgagctcacgaatcctccttacctcgtttcctcttgttcgggtgttataggtgcacagcactgctccctggtttcgtatgggcgttagagattgactcaggtcccctgttctacagcaagcactttgccactgaaccatctctccagccccgtgagatcattgtggaatcactgaacctagaaaaaatgtgaaatatctcctgttggagacatgataagccaggcaagatatatgtcactcttaagatcaagaaaacttgaaaatgaagagtctgtaagatgagagtttatataatggaaacctaagggcttattctcaacaagtatgtaaaaaagaatgtataggaagaaaagaacagtggttctcaacatgtgagttgcatatcagatatttatattataactcgtaacactaccaaaattacagctataaagcagcaatgagaatagttttatggttggggtcaccacagcatgagaaactatattaaaggattggcccattgggaaggttgagaacttctctagagactacgagcaaatgaagagcaggacaagagtgaggaaatagcaaaccagaaccgaaggtcagtacatcagttagggtcaagcagagaagctgacctcgtaagctgcatagttgtgtggttacatatttattattttgaattgctataatatggcctgtggaaaacaacttccagtgctacctgaggtcagcagaggagtcagttgggaaaagaagacatgaagcagacaaaatcaccttagacacatagtgagtacaatcacataatgagtatttgtttcttgtttccatatttccaattcaatgtatgggagtctcacaaatgactctatcgctcttcttacaaaactaaacacaatcttagtccagaagaatatacgagaaaggaatatggcagtatgaagagtattaactatccttgatgaggtcatgcattctagatatactactctttaaccccattgagtagtttgccctgatgtctccttcacaaactggataaatcacaggaactcatagcacaatgcgcaattttcctgtttattgactggcatgatgggcccagattgaacagggagcagcctaagcctccgatttagtaaaatcagcttgcactctgatagaagcatccttccaaaactgtcttctgaacagggtggtagtggcacacatctttaatgccagcacacaggaggcagaggcaggacgatttctgagttcaatgccagagtgtgttctacagagggagttctaggacagccacagctacacagagaaaccctgtctaaaacaaacataaacaaacaaacaaatagacaaagacttctatgccagctgagctatgttatcaagataagaagccactatagtgtgtctaagatcatagcaacaagagccactttcatatctaatccatttgtttttggtaagtagcagtagacactctttgctaacttagaatgtctattatctagaaaaatgattccacctcaccaaagtattgctcccaagtggcactgtaactgtgtcttcaaaacataacctcacctattgtattagggaaattgtttacagtaccgtacagtaaggcaatcaaattccatgcttatgatccaattttcatagttgatttgtcataaaatgagtttgctgagcagaatcaatactatgccaagcaggcaatcaagtcaagcccatgtctacagtgttggagccattataacaaagcagtgtctcgttcataatcatctatgtcctcttttatcatggtgagcatccatttgaaacaatcgctttcatgctctttgtcaattttgaaatatttgtacatacacatcttctctagtcctctttgtcaactaagttttctagttctattcttttaaaattcttggttatgtaggcacaatattaaacaagtgtgtgtgcgcgcacacacacacacacacacacacacannnnnnnnnnnnnnnnnnnnacacacacacacacacacacattctctcacacaaacttatatctggatatttttccttctacataaattaatattgtgatgaaatgttagaagttctgcttctggtgagattatctttcactattgtcactcaatactaatctaccatggtactatagtgacttgctttctagtttgggtttattgacaatgtttcatgtagatgagcatctgaatgtcagatttcttcctcagttaattggaaattggaaggtgttaaggatctagctcaatggtttagcatgtgtttgatctctcccaggctctgtgttcagtctaaagtactaaaatcaaccaaccaaaccaatagaactgcatgtgcgaaactgtccacagaatggcacgtgcagacaaagaagggaagggacactggtaaaggagtatggactatagttatctgtgacacttgctcgccccgattactcaagctttaagatctagtagaacctatgtggcttgctctgttcctttctggcaatggcatgctgctgttcacctacagtcttgtagctttgttgtcacattgctgtggggtcctcttagatccaacacaactcagatactaggtgaatgcagctgagaagatttcactttagtcagctgctgctgattagtcagggccacagagcatgctccgagctgaactgggaaccatccaccccacctgatctagagactattacagagctttgaagcttgataaccatgaacatgtgtgccaggtttcagttacgtatttaggaataagggacgtccttaggaacagccctctatggtacacttgtcccctttccattggttgggtcattccactctggcaggcaactcacctatcattcatgtttcaacttgccagccagggtggcagttacccatatacttctctgtctgtctgtcttgtcttgtctctttctctctgcccagcaggatatcagttacccaggaaggtctttggaacataaactttatttgacattgattcagaatggaaattttattcaaaatggcttcagtttggttccttcttgcaagacaacatccagttattgattaaataaaaacatatgtagcatgttaccatgctacaagaattcacagaaatattgagtcacatataatagttgaagaacagttcacattgcagcctagatctattgtagaaccccctttactttgagcccttccccaaactagaaacattttgggttattaatggtacccactgttttcatgggattaaaaaaatgtaggagcacatgacttgcccagtgaaccccagagcccagaaactcctgcacctttatgctttatgctgctcagtgaggttcaaggcctcaggcaagttcattcatgtgaaccaaaaaatacagaatcactccaacgtctacaagttcccagagttttacccactgagccgagtaccagatcagcctgacaaagggtccagcatcaagctcactcctgggccccaactgttgtgtatccatattcagtagatgtactgactggtaaagggctttccctgatgaatccagccaattaaagctggaagaggtacctacttcacatgtgtggacagcaaccaaaagctacagagatcacacataaacaaaaattgatggtgctatcaaaggcataaaataaaatgtcagtatttgaccctaaggaagtaaataaaggcatataggctctcagaaaaaagagtttaagctcctgaaacatcgaggaaatggatggctgtcagtgattgaagggtgggtagaatgggagatgttagtgaaaggcagcaaagtgccggccacacaggcagaatcaggtctggagattacaaaacagtgagtagagttactaatagtgaattttgtgttttaaatttgctaacagactcgatcttaaatgttgtcattacaaaaataaaataaaaaaggaaaaaaaaaaaggtagctgagagtggctaggtatgatcctctctgctctatagaggctggtttagaaagattgtcctgagtttgagtttagcttagactacatcagaagttccaggccaacattagctatagtgtttttactctgtctcaaaataaacaaacaaacagtaaaagggtgatctgaagagatatgttagctttattatggtaatcacttcatagtgtttatatatgtcaaattagcatattcagtaggacatggtggttcgttcctaacatgctagtaattgcagagctttaggcaagaaatcctgagacttgagccattctggtcttcatagtgacaccttgtctccagaaaataaaaccagagctgcagatatgtaattcagtggtggaatacacatctagcatgtctcagaccttagatttaaacctctgtacgtaataaaataccaccttatcacattctgtacctgcaccttatagtttgttaacctaaatagagctgcatatatggatgcctataaatccagcaggggtggtatcggcctgtcatcccagcatgtgggaggcaaaaggaggatcagcagttcaatgcgagcattggctgtataatgaattcaaagtgtaccatggatatatgagaaactgtctccaaagggggctgggggtgggtagacttttatttatttgggggacagggtcaaactggcctggactaacactgtagtccaggctggtcccaatctactcgaaatcctccaacctcacactgctgagtgatgggagtagaggcgcaagccaccatacttatcaagtgtagtttttccaactttgttgttgttttgctttttagaagtgaaaagaaaaccattggctgacagccgtgagagatgctttgtaggatctatcccactccactgatctctgtgcctgttgttatgccacggactgttttgattattcatttagaactgaagcaatgtgagctcttccacttctgtctgttttaagattgtctggggcttgcatgcaggtttttttaaaagttgtatgataatccaaatcttgtctttccatagttgcttaaatagtctagcacgacatactacatatagtcctctttatttttattaatttcagtatcatagtacatagacacagatgtaggcaaaacacccatacactaaaaataaaggctaattttttgaggtcactattatgggtacaatcctgttttttgagctttctgtcactgtgactaaagtacctaaaatagtcagtcaataagagcaaaggttctatggtcctgaggcttcaatttaagttcccttctctggattatgctgcccttaggccctaggtaactcagtatgccagggagaattatgtgacagaagaaagctgctcaatttatggtggccaggaagcaaagagttctcactcctgtaacaaggttccttcatgcctcacacccatggggctatgaatcagaaatggattaattcactcatgatccaattgcttcctaaagactgtgaacactgctgctttaggggccaggctttcaatccatgagtttttggtggacagctaagaagcaaaccctaataaatgaaaatacatataagtacaatttttgcacagtgatgttaaatcactgggactgaagagatgacagtgtttttgtttttgcttttgtttgtttgtttttaaacagaaaagggactatgtagagggatttttttaatctatcaacatgggactcatttgaataatcaaaacaatacgtggcataaaaacaggcacagagatcagcagagtgtgatagatcctacaaagcatctctcacatctgtcatacagcagttttcttttcacttctaaaaagcaacatggctactctggctggaatataaacaggcccttagtactcacctttaatcctaaataatggaagtaaagttagttagtaggaggaagcacccatgtgtaaaagtgatgtctaattgaggggcagacaaaatgacaagtcacagaaatgcttgacagaatatgataggcccaactctcatgagaagagagaggaaagggaaggtacttgggggagaagtgtagtgagagagagaggaggcagttttactgggagagttttacagagacaagttaagcagaacaatttagtcagaggccaaaagagaagcctgatcatcttggagaggaattttgaacccaaacagctgagttcaaccagctagccagagtcagccaagaacaagaaagggtgagtttattcagcagtaagtctcaaaggctgaaaacattctaggcctagatatgattctacagaggctagaaacttccagaactaggcctaggttagcagactgaggcaataagcctgggagatgacagttacatcaagcaataaaagattctttagcatggctcagagagcacttgctgctcttgcagaggatccagcacccacattgggcagaatatagctgcctgcatctccagttataggatgaaatgccttctttatcaaaacttccaggagtagctgcacaatgtgacatacaggcatacagaaagacatatacacttaaataaatgtaagctaataaagagaacacatgaaaataatcagctcattctttctgtaatctcaaccagaatgactttatcagctttatcaaagaaatatcagctctctcaaactatgaggccctagtaaaatatgcatacatttacttgatttaagtttctcaggctttcattcctagaactagaagagttagttgatgtcagatgatgtagattgtacagacttacagtatatgggttgacttatgcttccctgaaatccatgaagccacagaacctcctaatgcgatcttgagacattagggtacttgtacttaaggtaataaggccacattggagtagggtgagtcctaaatcaaatgcttactattcttacaagaaggtgataaatatagacatgcagaggagaccaagtcaagagagaagcagagattgcatttgttgtttgaagcccagaaacatcaagggccactaggaactagaagaggcaaaaaatagattattctccagagtctctagagagagaatagctttgtttactacttcatctccacactgctgacctctagaactgtggggaaataatttcgtgttatcttcagccatccactttgaagtaattttatagtattcttagaaagctagtgtacatattgacagtcctaagttggacactgttggaagagatgcttgaatatgtgaaggtggctttggaattggagctgaaatattgtttagagtataatagaaacagcttagatgtccttaagaaatagtttgtggaaatatggagatctaagtcaatcctagtaaaacacattctgtacatctaaaggtagtcataagcacagataaatatttaaatatttacttctctcataaagattcatgaagaaatggagcatatttggatggaccctgaaagaagggtcatccttcttataaatgccagaaagtgtggtacaattttgtttttctattggccataaagaagaaacctttataaagtttaaatattaagctgatactttttttagtaccattggaggtgcaaaatctagcagcagctgagagtcctcctgggaataaacacgtcaccaagtctctgtaccttcaaacagcttcccagatactttacaaaccagagacgaagccagagaaccaagaaattgctggttctgggtgtgatgaaagccttaaccaaagcaagtgattgatgaaagggctcatttggcttctgctcccagaccatagtatatcattgcaagaagtcaaggtaggaaatcaaacagggcagtaaactggaagcaagagctgatgcaaagccatggaagggtgctctattgacttgctgcatataacttgctcagcctcctgtcttacagaacccaggactaccacctcagttggcccaatcatatggaggcattttctcagttgagacttcttcctctctgatgactctacattgtgccaaagtgacatttaactctccagcatagcatcctttggaaagtctttataacttagaaaagcccctgcattaaaatgtctataataagatcagcttctctgtactacagtttgctgctacactacaggtgattagctactgtcggcttctgttgccaaatctcttcttagggccaaacacaaatcacatctgcagtcccatttccaagagactctgagaccgatacagatgaacaggatagatatgagtccaatttcgacaaaaaggaaaggtctaattacactgacaaagagaagtctttgatgttgcaacctattctcaattcttcagatagcctccttaccaatcgatatactcaatgctcacagacttgtctaaaatttcaacctgtggattcaagatcactggctgttggcattgctcaatgattttattagaacaccgattctcagttagaggcatgaatgaggttaccactgttggcttttcttttcaaaggacatttggcaaaaactttttagatatcacaacttgaataaaggtgagctgcttcggcatgttgttgctagagggaaaaagctggatcatctacagacacagggtcatcttctacactacattatttagcccaaagtatccatggtgcctacactgagaaatcctagttttgagtaacagagaagctgtatttcttgacaatgaatttaaaactctgaacttttgctcatcactcacactcacacacacacacacacacacactatttaaatacacatttaatatttatttattatatttaaatatacatattggctgttcttggcattgctttcatctcaggccatttatttattttttgctccatctcgatggtctattagaagaagtacttgttgcccgtagactgtgatcaataatcacatgtgataatttaactaattatttctcattacaatatcttcattttattggcaataacaatttccctgctttttgagccaagccatatcaaataaatctttattttatagggtaaaattttatttcttttttattacctaaacatattagtgtgccaatcggattttttcaacatgctcttagccctgggaatttctgtacttttaaaaaacatctcccttcactcttgacacccaccccagtttagatgcatacttaaactttttgtgtatgagtataaatataaattgctctagaatgcttttcctttgtgtttcctcctctctgaatgtgtgtattctttctctggttgtccagagtaacaaacagtaatttacttgattatatattcagttgtatctcaacctgtggctgggaaaagacaataatcattttggtacattccttaaattgctatatatggtatttattaaatatgtttcaatgaaaatatctttgaagagtttcctcctcattgcattcggtgatttgatgtctataaatttcacaatttttcaaaacatttcatttcccattctaaacatactgacattcaacatgtatttgtggaataaataaatgagtttaattggtttcattcaaacctttgtgtaatatcaatataagatttgccatatttgtattatgttcttttttcctcttagtaatactgagtactgtggtttatttatatggatgtcttccaatcaaatgtggttggttactcctgtaacctttgtgccactactgcaccagcatatcttggaggcaggttgctttgtctgaggccagatctcagtgtttgtgcttgggaggtgctgatgattacgtttctcgtcctctcatagtgtgcagagcaccttaaccttagccattagggatggaacttctagttgagcaccagtttaatgttcaataatataagtagtgtcttcagcagtagggatttgctatcaggttgtagagatcaagtaacaatagtctgtgatacttgaagggttgtatggaatctgtccagtgactcaacaggagagaacccatttgtagcactggagttttcacttggtgagataagctatctagttgaggcattgtctcccccagtatatgggggagtaaatatattctatttcatttccttgcatattgtatttgctttaaagagcctctatgcttgtagatttctgttgtaacacagtccccagaatgctgttttcttagtgaggagaattggtgaagagaattctgagtgcttgggagactataagacaacaagacaagagtcttggagctcagtttcttcagaacacagaacttgcttttggactgcttcgtgctcctcccaggtgtagtgaataggagtgagtttatttcagcttatccatcacagctaactattgttatttgtttattaccaccaaggaaaagacatttttgacatgtgcagctttccttgcaattggactctttactcttgtgattcttaactcttacagtttaaattttctgatgttctgaataaagttagctattgcatgagaacttagtctaccttctttttaggttctgttatcccaggcccctgtagagtggtaaacagtttttccatatattttttgaaggggtctttagtgttagttgtcttctctatatttcccacccccattagacttttttttcactagcatcttaacttcaccttcagattcgttcattagcctattaaagccagtcctgggcttggctcctgtctgccttgtttctgaggcttacttacttactggagttacacaaaatagttgtctttcttcttttctttttaacttatgttcctaactttgaaaaatggaatatttgtctttttgagtcctagttacctcacgcaggataatttttgctatgtttgtccattttcttgcaaatttcatttttcttaacagctgaataatattccattgtgtaactataaaacattttcactattcaaccattagcttatggacatctataatgtttctaaattttggtgattatatagagagcagcaatggacatgaatgagcaaatatcaacgtctgagtggtgtcttagtcagtgtttctattcgtacacaaaacatcatggccaagaagcaagttggggaggaaagggtttattcagcttacacttgcacattgctgttcatcaccaaaggaagtcatgacaggaactcaagcaggtcaggaacttggaggctgaagtggatgcagaagccatggaggagttctgtttactgtctttcttcccctggctttcttatagaatcaaagaatactagcccagggatggcactacccatgatgggctaggccctcagtgcttgatcactatttgagaaaataccttacagctggatctcttggaggcatttcctcaagggaggctcctttgattactccagcttgtgttaagttgatacacaaaactaggaagtacaagtgttatagtcgaatcttgaggtagatggagactcagcttcgtgaggaacctgtactctgatttccatagtagctgtaccagttttcactcccaccagcaatgactagttcttaggcagatggatggaactagagaatctgtgaatattcttaaagttactgagttccggcgagggagcgagtgcgcgcatgcgcnnnnnnnnnnnnnnnnnnnntgtggtggaattccttaagttactgagttccggcgagggagcgagtgcgcgcatgcgccctcagcttcggctgcccagggcggcgtttccgcggcggctttcacttcctccttgtcggagctgtatccgggtcgctgttctccctattgtctctgacagaaggccctccgctgtgcaaattctgggtcttttgttgcttctggtgcaggctaataaagttttctttttatttccagtttttaccggggcagttcccctcgcagggcggccggttcgggcctagcgcccctggccggggagcgcgggggaaggggcgccgggcgggcgggcgggcgggcgcggggcgtggggagggacagtagcccacccccggggtcgcccctgctcggtcggcgcagcgccctgcctcggtagctgctctccgaccggtctccttggtcctctgcgcgtccctgctgccttgcctctcgcagccttccctagctctccaaacgaccacctcacggattccttagtaagtgtctccgaggcctcagccccgcgccacttctcctttcaagtcaggcggtgctgagcagggagggccgggtgggtcctgcaggacagacagacagacggacccttgctggaagctgctccgtggtcccttggcttccgagatagcgtgcgtggccgtacgttgtctgagtgagggattaccgagtggtcagaagttaggcgggggtctgcgaggatgtgggctgtttgcattggtcctggcctaacgtcaggggcagccaggctctctgcatccagcgcccccaaacccaacttttcccaccaagctcagtgtggagaagtcaattggagattccgtgcagtgcacgaagtcatttctatttcccccagcatcacagttctccctgtttggtgagattgtaaaatgattgtaattttttctcttaacagtggatcgcagctccaagaggaggcaggtgaagcctttggccgcttctctcctggaagctcttgattatgatagttcagatgacagtgattttaaagttggagatgcttcaggtaaatgtttgctttctctccctttcacagctttctgccgttcactgcatttttaactttttaatttttttttgagacttttgattaaaatgttcatttactgtgcacacaaaccatttattttggtcatttaatttctcacattaacctaagaacctctcattagaacctactatggcttctgcttccgtccagatttactcagatggttagctggtagggaggaagccttattcaaaaaggagaaacatttttcccaatctataccctaaactatatttatgcttatatactcgagtgaagacttgaggtaccccagatgtagaagagtatattatgaataatatggaccacaatattcttgcgcagtgttactcccatatcagccccctaggcatacttaggggagttctttttgtgcacgagctcgctaacaatgaagcccaaggaaaccttgtgctttaaaacagcaggtaccgtggcccagtgccttgagtgcttgcttattccagttagtgatgtgaagaggtggtgaacttgtatgttcacatagtttaaaagcagagagggaacattagaggttttctttgtgcattcttcttctgtgtacttaatgtattaagtttcagttaaggcaacccgagaaacagaatgatacaggctgttgtatctgcaaagcatcagtggacacctgaacattaagacctttttgtatttcgctcccattgatgaacatttagataaagtataagataaaagcctgtctgagttcagctcttctgaggctcttatcttgaagcagtgggagcatacgcagggcctttcacaggctctgctgctagaccacacttgcagtccgtctgacatagtttaatatcccatcatgcaccagcccctctgacatgttaccgtcccatcaggcagtctgagagtttggaacgtcttgctccttttctccgacactctcacctctctttttaaaggtggtgagaagagatgaaattagtttgcatcagccaggtactcctggcacatgcctttaatcctagcagtggggaggaactctgcgagttggaaggcagccagggctacagagtcaaaccttgtcttagaaaacaaacaaaaaattccttggattgtgttactcttaacagcatcagcagacagtttgcattgtgatttgctacagaatctcgtttaactttataatagctcatgtaggagatactccttcacagtcatagaggaactgagtttaaaggactgctcatgacgttcttcagaaactgatagccagtgggtccgactacgctaaaagtggattgatagaatctcaaatcaaaatggcctggcaattgtggcaactaatgagttcacgccagccgtcaacactcaaaaaattacctcgattaactgttttctaaccttcacgttgcagctctttatctcctatgtagttgattcactgaggtttggtactttcaaagaaggaaaacaaggaaagggaaaggaggtaaatgacttcttcctagggttgactaacaggagtattctttgctgaaaggtagtactggtgcataggtgaggtttaaaatgagaagttgctaccgtttaaaagataggaatcaatgaaacaaactccgacgtttacgttctgtaaatgttcaaaagtggtttggtttcaataaatcctggtttgatagttttattgttttgtttattaaggtggagtcattcccagacatttctctttctgagggatgaaatagtccaaagataagtttataagctacctgaaaaagagtgtatggtattaagccaagccaaggttccagaagggatgttgaagatgttgaagggacgttatatttggcaaatgtttgatccctaaaagaactaaaaacttcatactatttgttgcctcttaacatataatccccattcgtctactgccctggctcctggcgagtatatgtgagctaagatttcaggtcataagtttacttttgtagcttctgcatgttactgtgaaaaagagctagtggaatatgattttattttaaataatagtcaatggcaggtgagtcttctttttccatttgactcagatgtgttggtgttcagagaggagatattaatgtatgctagatcagcactatttcctctcatagttggttgaggacaataaataaatatgccctcagttagggcacagtttaaattaaaataatgacctccagaaaagccatatatagaaatgttaggtggaaccatatacaagtgacttatttttgtaggtctaaaccagcccaatattggaaattatgtggtttagcttagataaatagtttatttgatttgtgcctagggttagagatgattattattattttttatctaaattgaatgcttttgaagatgtgagcagttagtaatcttattattaatataaacttggggtgtcctggcctttcctcctttctttgctatataacgggagttaactagattttgatgggttatttagttagtgtagccattgtgcctaggagtaatctagctggaagagtcaggttgaggtgtttgtagttctttttggtagttcttttccgttaacctgatcaaatgatattcattagcatttcactcaatacttttccaaatgttacagtgaaatcacaaataagtcattagattgctattattaaatgatggttaatacaggggtggttgattctgtgtatagttccagtcaggagaaagaattattttagaccagattgagaaatagatggatagatagatagatagatagatagatcaattccattgaggaatgagaggaggagtgtgaactaagaatatttagagaaaaacaattttggtgagggaaacattaaatgttaaggtatggagatgcggaaatgttatttctatttggggtagaacatacctagaaaatagtgagaagatggagatcttattctagatgtgggattctcagaatgccttggtactgttggcattttgtgttggctaattctcttgtagaggtttgttctgtgtagtatagtgtggtgtttatagcatctttgtcttatacttgatgcctgtagtgttgtagtgtcttccctacatgttgtacctgctgtgtgactgccagtgtttttaggaactagtgcatgcatgtcttttgaggcaagagttgtccttattagagaagctctagtttaaatttccccagaatctgtaactcgagtcagtagagaatgagttgggttgagtgatgggcttcagaatcagttaaaggtgactttaggataactcaggattaaccagcaaactagtggtgtctgtcttatttactatgcttatttatggtgctaattcttgttgctctgtacctatgaaaagaataaagtttatggaattgttgggcagagattatatttcatagttttaaatctctaaattgtactgattatatttattttttatcatgaagaaaaaatgagctttgttgtaatgatactgatgactgttgattattgcattcatattatctgaatattgccaagggatttttgaaagtatattgttaattctgtaactgaaaaaaaattccttaacagttgaaatgaatgttactttgagagatcctgaaatactgtgtgctttgaaggttttttttgtttttgtttttttaatttgtaactaaattaggaataggagtttgattttaaagttatttttatatgttaaaaaatttcattgtagatgtgggattaatttactctgttcttatgcataagataaattttcagaatatatggataattgacactattcattttccttctttctttgcttttcttccttctcttctttccttttttccacatgaaatgttaagtttggaaggcagcatggggtagtttttgacatcatggaaatagaaatgtttttttcttttgcagcctttaaaaatatagccagttgtggaccttgttttctcattgtggttattcatccgtgattatgaataaatatctcttcctcaaatgaatatgtagaatatggtagaatatgtaccaaaaaatgactagttatgaaaaagttatattcccaagaccctggtcctgttgttagattagattatgactaagatgttacattctgtgactaaaacgttgggctagtatttgtatttggagaagaatgtcatgttcttgtaataatctattgacaagttcaaaggtaaaacagttgaacttaacattgcactgtgctgagacatggttataaaacaaaaacaaatcaaagaatattagtttacctctacatttgacaataattgcatgagtattgacatcgaaaataaaatcacaacttcgtgatatttgtaaagtttaccaggtgttacaacgttgagttctcaccaggaatctgtactagtgagctttagggttgttttattggctgataaattattgtgttaaaatagcttctagatgactgatctagaagattagaacctttccttcttgtctgctgcttagctttcttgatttcggtgttgcttgtgttgtgatgttctttagttactgtgcacaagggcttgcctttgaagtatttagtggaatctgcttatttttcagaagaccattattataaaaattgtagaaattattgctgattttaggtaggtctgatttttctttgtaggttaggtttaattattatgaatgatttaaaaattcaaattttcataatgatttgtagaactcttgagctgaaaacaagtcactttgctttgaagttatattgagtctatactctttaaatccaaaaagctcagagagctataagaatttcttaactttggcagagacttgtttaatatcaaaacctatttaaaatcaacttaatttgtgtcatatctcatactctgtaaatacttatactttatattgttgaactattgtatttgattatagaatagtaccttataggcgtaaaatgtgaaaatttccaaatttaagcacacatacctggctccagaggtctgaaacctaaggaattgattggcttggatagtagtgcacttttgccctgtgtaagtttctttagaatacgtgtggttttgtttttcttcaaaacactattaaataagctgatagtcttgagattgataataatttctttgagtcattcaaaatctgttttcatttcttacatgagctaactaacacacaggatagtttgattattagctgtgtatatggggcttcttaggtgatttagatatactaattaatttttgaaccttaaattcctagttaaatttacaggtcaaagaaagttaaattcaaagaaattaaaattgtatggaagcaataatactttatgctattttagtatttctattttcttgattatagatgcagacaatttgtttttctataaattttacagttgtatacaaatccttatctccctctttttttttccacttccatttatgctcctgtccaaatatttcaaatttttatttgttggcttgtctgagacaagattagaataaaaattgtgctgggttgctgtggactctgctgccctaggtggggatagaaacagcttgctaattaaaggcttgcatgagctactcaataaccatagcctactcattcagtagcaggtagctgatcatttaggatagactcatttctttgtcagcgttttccattcaagcgcatctagtagctggaacttagaaggctaacatgacacatgacacaagcagtgtcctgtttatcagggagactgaaatcttctttcatcttccactgttttatgtgccattgtattgtctagctttgcttttgtactgatcagacatctgctacaagttgactaccatagatctttgcttgttttgatagataaaaagtttaatagacagttttacagggctaacattgttttgcttgagatttgatttattagtttaagtatgcatattatatgaaagaaggatgtaaaagaataataaattattatgattaagttacagtcaacttctcattaaaacatacatttagaaaataagtaattatctttaggtcactatactgctattagctatttgatataaatcagtgctactatgtttaaggtatattctaacatacatttcatttctcatcttcattagttcatcctggattaaatcatatatcaactttgttgacttattatttaatgaggttgggaatgtctaccatcctttgccttagatttgtttatattgttttgcaagttatccacaagttttggtggtttcatttgtgtcagtgttgtgtgtgtgtgtgtatgtatatacatatgtgtggtttttttctcatattttcaacagattctgaagggagtggtaatggaagtgaagatccttcaaaggacagtggagaaggttcctgtagtgattctgaggaaaacattttagaagaagaactgaatgaagatattcaagtaaaagaagaacagcttaaaaattctacagaggaaataatgccatcagacaaacagttaattaaaatggaaaagaaggaagaagaagaaaacggagaaagacctagaaagaaaaaggagaaagaaaaggagaaagaaaaggaaagggagaaggacaaagagaaagcaacagtatctgatagtgcagctgcttctgctgctggcaccacaccagccacaagccctcctgctgtcacctccccttctgtccctaccaccactaccaccaccacggaggaacaagtcagtgagcccaagaaatggaatcttcgtcggaaccgtcccctgttggactttgtatccatggaagaactcaatgctatggatgattatgacagtgaggatgataatgactggagacctactgtagtaaagagaaaggggcgatcagcgtctcagaaggagggcagtgatggagacaatgaggatgatgacgatgagggaagtgggagtgaggaagatgagaatgatgagggcaatgatgaagatcatagcagccctgctagcgaagcaggtggcaagaagaagaggagtaaagttcttagcagaaacagtgctgatgatgaggaactgaccaatgatagcctgaccctatctcaaagcaagagtaatgaggtagagcaacccaatttttatatctgtctgtctggggaaagggaattttctaaatcagtacttattttattaagtggcatccttgaatttttatttggatgtaggagtgaatgaacaccctgaatttaacatttattcatttggtcaacaaacttttaattaattcactatttgtcaacattctcctggatctgtagtctccatttccaaggaaaatatgtagagatacatttttctatctgtagatttgggaaatgatagttttctattcccatttctatttctgttcatagatgctaactggcaaagagtggattaggaaagtagaggctctttcttcaaacatagttttgaagtaaggcttttgcgtacattagaagaaggtaacatcaagctcatttttgctctctcagacgttcagagagttgttttaaaagttagttatcagctgtagcagtcctcagtgtatttccaatctttggtttatgtgtgtgacagtaaaatgtactttttttctcctaacgcatccttaatgagcaaattttctgcaaagaagtaaaaataaaagcaaacattttgccccatagaacaaacatttctatcctgaagcaacagtaatgagtcctgccattgaagttcttctgcaagttaggtttgtccattggtccagaggcaacgttcaagacttcagttaaacatatctgtgtctctgtctgtgtgcctatgtgttttccttccaaaagaaagattgagttgatgtcttacatgtagatgtatgttacatcacatgcagaactgtactatgtcatttctgttattgtgtttatgtcaacaaaatttgcttcaccatttttttttttacatatcattgaggtatcttaaactggtagagtttctttatgctttattttttcttattttttctgcttacagattttcaaagtagtaactgtctattttaattaagcttattatagattttgtgggcttgtttctcttaaataatgtgtagcaaactctcagggattccatgccagcagagatgaattaaaagcttatatttatatgataagcactgattaattcctagattgctcttattcccatgaagaatgttgcctgctttcaatgctatcttaattttttttttttttttttttttttttttgctatcctaattcttatctttaggtaaaggaaaactcatttgaggagatagtatggcactatttaaggttgtagcatgaactgtaacatgctgtcttggcgtatttatggatatttgttaatatttagattgggcatttgttcagtttattttttatagcatttagcacttatatctattgactgagcttacttttggcagcatatctaatgtttcatgtttaggttactattcacagaagtcatttaataatagaaaacttctgaagaagactcacgttaatacacagggacacttgtaaaggtgtagaaaagtatttgttttaataacctctacttgatactatagcttaacaggctaaactttataatacattttaagatcatatatatgtgttagtgtctttttcttcttctagtgaaaacatttacatagtctggtaaataatgagacctatatttaagtagtgcccacatagactgacctgtagaaaagtgcccacatagactgacctgtagaaaagtgcccacatagactgacctgtagaaaagtgcccacatagactgacctgtagaaaagtgcccacatagactgacctacggaaggctgatttctctagaacagcctgtgtaaaactttgttacagttttatatctattttaattccttaataattttcatgattttaattacatttaaattataagataaactaaatatcaacttttacttaagaaattaatgtttagattattacttatgtttagattttctgtttatatagctcttgtatttataagaaagatgtttaaagtttatttttgttgccttatggctaatagttttgtcagtctttctagttacccattttaggtaataataataactaaatattcattgtagttaagtttgtttctgaaattttatatttctctattttgcctgtaggtgttgagaaacctgtaggtctactctagagtagagacagccaaaagcagggctttagaaatatacacaagaatatcatagctggtagccttttcttattgcaatgtcaggtatatttacagagaaatgatatacatcgtctatagggaaatgatgctcttgaaccataacaattttcagtttcttaggagaattcactgtttttgctcagggcccatttataactcacactctttgatggcttcacaatacctagaggagtgcttctaaaacatattggctttaggatccctttattaaaacgttattgaagacttggagtatttacatagactacatctgttgacgtttacaatttcaagttaatcttagatattctaaaaacaaacacaaaaacaaaactacactaaagatacagaaacaggcaaggtggcatcatgagatactttactttactgtgcactttctgcaagagagcttcctgggacatacttttgccactctaaagtgggtggagcacttgatgagttacattttctataaattggtgactgttggcttttgcctttgtagtttgtaaattagtacagtttggatagcagccctgcagtatggctgtatttttttcatccttcatttggaaacttctgagtgtcactaataccattttgtccacccatttatctctgacttaagtttttcaaagatggatagtgtaacattttcagaaaacggttctcaatttcaagacattgaacctagagttgtagttgaaaatttataaatggaagaaattctctcagtagaatttctagtcttgttttgttaaggaggaaatatttctttctcattgaggaagaaattgtagaagagtttggctcttggaatactgttttgataactacaaccttatatttttggcttagtataagaatttgtcatataaggttcttttatgcttaatgatagatgtcatttgatgtttgcagttaatatgtaaggattttggcaaaatttatcaaattttaagtaggaaaatattaaccctttctcttgaaaaaccatctgtgtttccatagagcaagtatgtacaagtaaatcaagcacaggatccaatgaatacaaagcattcacagttcttgttacatactgctgaagaagtgtgtgtgcttgggatgtctgacttactagttagttatctctttgcacattttgtagaaaaaatttgctgtaagtcctattcaaaacagttttggaatattgtacaaacatttgagattttttttaaatgaagattttttttaagatttatttatttttattatatgtaagtacactgtagctgtcctcatacactccagaagagggagtcagatctcattaccgatggctgtgagccaccatgtggttgctgggattcgaactctggaccttcggaagagcagtcaggtgcttttacccactgagccatctcaccagccctacatttgagaatcttaagagctaaactttcaaataaaacattgatcacatgtttggtatagcatttttttaattatgttttaaaactggtaccatttaaagtatagtggaattgtctctattgaatttaaatacaacaggttcaatttagtccttttgtatatatttataaacatcttatagaatatatgacataaaatatgttttagagtgcagggagatctgtagacaatgtttcatttttaggcaactgtgtatttattaatttttagattggcatacaggccattggggtttgcccgagaatcttcatacattatactgagttctcagttgcttccctgtactctgcctggttcccctcctctctttacatgcgcccttttcttctccatttagaccctttgcttagcttttacatataaatatatttccctgtgtaatctcacctcctgtaagttcttttctttaagattaactttaaattccaaggagaaaaatgaaataatcattgaattattactgtagtgccttctttttttctaattttgagatgttttcttttgccatctataacttacttatctaatttctatttttgtgtaaagcttcattaatttttttgttaaaggttttagcccagtttcctttgaaagatgacacataccttcagaaatatggtaaaaaattcataggaaactggactctattattttgattataaatgttcttaaataacacttaaacagtaatgcatatctgctctattaacagacactaagattatgttttcaaaactttgatttaggttttcccattgaaccattgtggcccgctgttatggaacactgtggggctgcagttcccgcttcctggcagtacagctgggacaagcgtctctggatcagaggatcctaaccagaagtcactgctgttttcttattcccaggcactagagcacagtacatgttgagataattggcagagatagcttagtcattgttcttctgcataaaaccagaaaacagagaaaattccatttctccccttggcagagggaaaagccagggctcatcacagaagtgacagattactgattcagtttctacttcaagaattcagtttcttcccattcacaggtttaatcgtagaattctcatatatttctctcttaagccattttctaaggcttagatgtaattctatcatacagatgttgacagtccattaacacagatagcacaggtagcctcttaattatcagactctgggccgggcagtggtagtgcacgcctttaatcccagcacttgggaggcagaggcaggtggatttctgagttcgaggccagcatggtctacaaagtgagttccaggacagccagggctacacagagaaaccctgtctcaaaaaaacaaaaacaaaaaaaaatcagactctgtttcactaggtcgtttcctagctcatgatattcaacaaaacaaaagacaagtgatttagaagtgatggcctacggaaacgtttggagttaccactgggatggtgaattatagtgctcatttgggcttgtcacttacctctgacgttcaaaagagctcatcccacccttgcctaatgcttaggtgtcagtccgtgtttctgttatgagccatgtacaggaagtatagaggagaggaggaagggcatgggtaatgccgcactgaggacctttagtgctttatggagtcttacaatgacctttctggccccttttaatttggtcattctcattttacaaacgggaacactgtgttcgacagctgtaatgaaagctgcaaatgaacccaggatgttcattagctaccaagataatgtaagcacaggagtttctttacaagatagcctcacttcgctttccccgatttgttttacagcggtagtaattttagatactattcataaaatgagtcaaaagaattatttcttgtgacctttcaggatggtcagtgggtgttgtgacatatgcctgtaatcagagctagtgagaagtagagacgggaggactagaagttctaggccaaccttgggtacataggaagatcaagaacatcttgagatctttggatcttgtctcaaaaagctcctccccacaaaatatttaaacatatcatttacaatttttattgaaatgatggttccaagtgttatctttgagagtattggtagaatttaaagtgctataaaccagcaaaaaattaatatgaaattaaatatagttagtgactgaattaaatatatttagtgactgtggctggaactatcaacaattttgcttttgactggctagctttttttttattagatattttctttatttacatttcaaatgctatcctgaaagtcccctataccccaccccccactcccctgcccacccactcccacttcttggccctggcattcccctgtactggggcatataaagtttgcaagaccaaggggcctctcttcccagtgatggcagactaggccatcttctgctacatatgcagctagagacatgagctctgatggtactggttagttcatattgttctacctatagggttgcagaccccttcagatccttgggtgctttctctagcttctccattgggggccctgtgttcgttccatcttatagatgacagtgagcattcacttctgtatttgccaggcactgccatagcctcacaagagacagctataacagggtcccttcagcaaaatctttctggcatatgcaatagtgtctgtgtttagtgactgattatgggatggatccccgggtggggtattctggattgtccatcctttcctctttgtggctagctttgtaaatgaaaatgtccatatataccacattattatgttgattgttacatatcaatataacaggactctttgttttgtttcttgaggtggagtcttgctatttgattcagactggagtttaactcccaggttcatgttatccttcggcctactcctctctgtggctggagctatgtgtgtgccactgtgccaggatgaagtgttttcttattaaagtttacatccacaaatgcaaaaggtttaaatttacaatggatagacttttcatttttgaaattttatccttttatactcatcggatactaaggcttttatcgtttatattgatagtagctagctatctttattaccagtttgccctcgatatttcttgacataaaagtaaagagtacattttcttacttttctagcaattacttaactttttttctgttgtagctgatgtgttcaggctgtttctgagtagttgggtaactctggaccttgtatactttggagtctagagtctctgacatcaaatgcatacttgcttacatgttatctttatcttttttcctcctattttgtatatgtgtgtcttgtctttcctagatagcaactttactgaagtttaaaaaccacatcttagactctgaaagtgtgtatagagctgataattacttgaggattgagtgttccttttttccctagtttaagggccaaagtcaaatgttaagcaggtagagctatttgcatgcctgtgccttcttcctttgcagaggggagaacacatggcacctgaagagagagtaagaggatgtgtaaagggtccttgaacagtggtgtaacattctttgaacctactaatagaatgccacataaatttgaagtacaagaaagtattttgaaccaaaatgagaattgtgtgtattaaattactttttaattaaagcgtgatttttctgatttattttaatattaggactctctgattcttgagaagagtcaaaattggagttctcagaaaatggaccacattctgatttgctgtgtttgtcttggagataatagtgaagatgcagatgaaataattcagtgtgataattgtggcattacagttcatgaaggtaattttgctgttttttttcctgttagaaatggctggttgacatcttattcaaaggaactttaaattgtttcccttttgtactcatttaaagttttactacactattatatgatattatttaattgaaaataatatatataaagtgcttgaaatttgttttattttgtatatatatgtggagtgtgtgtgcgcgcgtgcacacacgacatataccacctaagcccagctttttacatgagcgcaagcactggaccacagaatcgtcccctgagtcctaatgttgctgtattggtgtgtgtgtgtgtgtgtgtgtgtgtgtgtgtgtgtgtgtgtgtgtctgagtgtttccataaggatcctgtgtaccctaggtttacattgagtttgctgtgtagtagaggatgacctaggactgattttacagacttgtgatttcacattctgcctgatgaacattgttatgatctataagccatggatgccatagagtcacaccagtcaaggacagatctcacatggaaggtttatttgggagggaatatacagagactgcctctgggcaagggtggaaggaaaaagggagcagagagaggagggattggtatttcatgaactcctggcaacagtgggaatgtatttggcagttagttagtacgcctgctgttgctcagtccaaagcagtatttctggggcagtgtccttcccttgctttctgggattacatattcctctcacagagctcctcttgccctcatggagcagtggattgagggtcatagtgggaagacctcctattgctctatgttttgaaaccattcagtagtttgtttattatcctgcgtgcttagtgttctgtagtttttaggcatcgtgtagaataaatgtgcaaacggctgatcttttggaacttaatgtctagggaaatgaaggataaataggtaaattaataataaataaataaaaatttaaaaatcctaaaaatgtttgatttggatacagagaaaaataaaactcaacatgtataggaaatgctatgacatctgatacaaggttaacataatttagtcaactcctgggtcatttcagtggtctctcaaatagtcacccagactccccttctctaacccacttagctagcagaaatggtcttccaaaacatagtctaagcagtttgaatcctatactacaccttgcacactccgttctagcttactaacttctgtgcaactatacaaacaccacgaatatgttctcactgcaagatctttatacactttacttcctaggtttagaatattctattaaatacaaacaacctcatgacatttctctttcacttcccttaggtcactgcttattctagaaatagaagcttctaataatccacccaaccctttccatccaggatgagaggatataagggaaatattagtgtggaggtaactataaaataagaggagagaaaatgggtacgtgtctgataaataatagtttagagttagataatggcctaattcatatggggagttacccagactcaatggtggacttcgggaatgccactagcaagctagctcaggttaagaggcaaacagtagcaataataggctgggggtgggtgacttctccagtaaagcacacacacaaaaagagcataagcagagactggagttcagattctaggaccctataaagttcaggtggctatggcagtctttcttttatctccacctcaggagatggagacagaatgtttagataacatggctagcaagaataaaattatcatgaagtttgagttgcattgaaagacagtgcttctatatgtaaggtggagagtgattgacgaagatgcctgaaatgagcttcaggcctcccaatgcacacatgcgcatgcactcacagcagtactcaagcgtgtgcatatagtgatacacccatgcactgcacacacagcatgcatatgtaatatttctacatgactcagtaagtaaagagggaacccagacaaggcccacgtgtaaagctccctgggggcattatattggtgtgcagatgaagcaagagttatgtatggctccagctttggctctggttagcctgctgaatagccatggggtttgtttcttaagcaagataccagaatatggtatccataggtgccaaattaaatcattttgaagagattattccaagaccttcagaatcctttgtatatttagtaactatgtgcctcatgttttttgtcatttactgtttctgtttaatgcatgtattcttttatttcctgtttatctctagatgacacatgtaggttccctttgttttattttgattttctatagcagaattcaatgtcctaaaacaaggaaaactaccattggacttacaggaacttaacacacatcaatctattgatcttagagagataaaatgaaattcaaggaaggagaagtaaaatatgtgaccagatataaattttgtgataagcttttgtaaggagatgtagggagatgtaactagctgatagggctataaaataagggagagtttgtctctataatttagatgttagagtagctatcagtttctatataacaattacccccaaatatagcatcttatttaaaacaatagacatttgtaacttacgtcatttctaatgagtaagaagtcaagttggatattttaaccctaacacttgagaatctttgaatggttctagtgtagggtctttgaagctgcagataaatctgttggtctaggttgcagtccttctaggactggagctagaggctttgttcccaaacttagctatgttagtcctcaactgtttggtgcctattggtcagttccacaccattttccgctctttatgctctacatgctaccccactggcgatttcagagcggtttgttaaaaaacaaaagagctagagatgattatatgagtgatcaaagagaaagacagaagagatggagatggcttttgaaagagcaagtatcttattttacctagtttaggacagacatagtaccactttgctgtgtcacattgtttaaaccaaagctaaatataggaggggccattccaagagtctgccaggcaatgttgattacggagggctgttaaagacagccacaggcatagtatattgcttgttctgtgcttatagaaaggacccagtgggaagggagcattgatagctgatgtaaagaattaaaggacattgcatacaatgttagagggggtgggttccaacacgaagcagagatggagcagatgagagcagccatcattataactatcgaggaaggatggtgtgtgggtatagatgtaagttattagatggggtggttggaacatgtggaagttgttgagtatttattttcttagtaaaataggtagcagaagtgatagtgagcacagaggggacttgaaatttggatgtgattctgtctccagaagtttgtgtgtaagaagcttggttcccagtgttgtagtactgaggttgtggaacctttaggaggtaggagctagtggagatattcttattatgaagtatagcgattgcttttcttattggtttgaaaaatgtctaggaagaatttgtttgtttgtttgcctatagttggaggggatacaatgcagcctgctgggtttgggggcatagtggcaggaatagaaggtagctggttacatggcacactaatggccagaaaacagaacagtgaatgctgcttagcttccattctcctcttatcaagtttggcattcccccccaccctgcctcccaccccggaatgatggcatctgcatttggggtgggtcttccctaccttagttatttaacttaatctagaaaatccctcacagacacacccagagataagtttctttggtgactataaaatctggtcaagctggcagaagtaaccatcactgtgggttcaccttgatcagtggaatgctgtcactctgtagggaatcagatctcatggggctttattggttgccctagaaggggcacagcgggcttgactcgcagtttagtttcttgtacctgtgcccctttagtcttgtgtcatgtggtgtcattgaggctatgactgcaatgtcatgctatttttactctccaaccaccagcctgaatcatgagctagcctttcatgttgtacattattcaatatcaggtattctgttgcagagtcacccaccaactgtacaaagactttgtgatgtttattctcatctaggtgtagttaaaattctcaaaagcagatgtagagagtgtgaacaatggaactgtagcagtactgactaggtttgttgtactgactagtgatgttggtgttgtgatggttgcttgtgcctgtgaatgttattgttgatgtgtcatatagagacttctgttgtgctgaggacactgactccatttacttctcgctatttcattgtcacactgagggtaatttctatttcttagattagtctttgggtcatagtttaggttaggtcatttgaccatggatatcaatttctgacattctgatgctaggatatttttatacatttaattgctgctattttcttattagtttttttgagacaggattttttttttttttttttttttttttttttttttttttgagagagggtttctctgtgtagccctggctgtcctggaactcactttgtagaccaggctggtcttgaactcagaaatccacctgcctctgcctcccaagtgctgggattaaaggcatgcgccaccaccaccaccggcttttgagacaggatcttggtagtctagttgttcatcagacttacagactttctcctgcctcagttttctgagtgctggaattacaggcatgggctattttgctgccagtttggcatttggaagctttttaaaagaagctctacattactagatcttcattttcttccatcagaaattggtttcacctgaacagccctgcagtcttcaatttaccttgaccacttacttaatctcctatgttttcctggtctgtggagatgggtgaacatgcagtttctcatttactctatacttgggggcagggggggatggagtgaagatgctttgagatttcaatgttttacatctttgattctaatgcatctttttgtttttctgtgataggttcttaagtagtgtagcctaagttggtttttgaactccatgcagttgagaccagctgtaaaccctgattagtggcttcccaactcttaagatttgggattaaaggctctgtctggtgtgtgacttgagcccaccaagaaatactaccattgaaaattcagaaggaactttttctctatcctattttttctcttgttatttcttggtactgagaattgaatccaggacttcacacctccttagtaagcattgttccattcagtagtgctctggtccctgtttacttaattttattttcttgttttaagacagattctatgtcttggttactttcgattgctattataagacaccataacttaggcaagttagagaccaaagcatttaataggggttcatagtttcagagagtgactccatgaccatcatggtgtgagcatggcagcaggcaagcaagcatggacttggaacagtaactgagggctcacatcttatctaccgtgggaagtagacagacagacagagacagcacacccctacccccagtgacacaactcctataacaaggcacccctcctaattcttttaagcagttctaccaactgagggccaagtagtcaaacattaaagcctatgggaaccattctccttcaaaccgtcatagtctcctatgttgccagtcacttaatttgccactctccttcctcagcctttcaggtagttgttataatgggcacttatcaacaccctagcggtgtgtgtgtgtgtatgtgtatgtgtgcacatgtatatgtttgcttgttgatttattgattgattattgtgacaggtagaatgtcatttatcccagactgacctagaacttgctgtgtatcttaaataccctgacactctaatcctctgcttcctctcctgagatgtgggattacaggcatgtgcttctccatctggtttgtatctaccagaagccctggctcatgctagacagacacattgtcagtgaactgtatacctacacttcttcctattgttttgaaatcaggaactgtttttttaaataaattcattgttcaaataaacacagatttctataaggataccatgttagttctgctgagatctttcaggttaattaaaggttcaaaaatgtgacctctgttttagataaatagcctcattaaagacaagtctaccttttcaagtagcttttaattttagaaacaactaaaatgtcagtctgaatcaaagcagacaaataagatggtcaagataggtaataatgccatgtgagtcagaaagaaggttaaagcttcataatagcgtttcacgtgtttcttagttaggactttattcctgtgaacagacaccatgataaaggcaactcttagaaaggaaaacatttaattgggactagtttacagtttcagaggtgtggtccattatcattgcaggaagcatggcagcatgcaggcagacatagtgctggagaaggagctgagagttgtaatcttgatcagaagacagccagaaggaagagctctttcacactgggcagagccttagcgtaggaggcctcagtgctcacctatgacatacctcctccaacaaagcctcacttcccccagtaaagccacacctcctaataatgccattcaccatgactaagcattcaaaacaggaatctttgggggccaaacttaattcaacatgtaattcattgtagtgtctgatgacagtgcaagtttcaactcctttggagcatttgctaatgattactagttgtattagtctctttatgtattgctaggcgaaaatacatgacaacagcaacttcaggaagaaaggggttcttttggctcccaaccagttgcatagggtccagtcataatagcgaggaagacaatgctacaggagctgcagacactgcccaactttatgaacagccagtaggcacagaatgaggagtgcttggtactcacttattttctccattttattccgtctaggaccccatcttgtggaatgttacttaccacttttagtgtacctttacaaagggtttcctcacctcagttagctagcctagatagtcctttcatgcacaggaggttagcttgcttccattgtgtctccagatcctgtgtatcagtacaacccagtgcactgacttcttctcccacgtcacagccctgttgtcatagaaggaagaggagggtaagaaagtgtgtgatgctcatggacttattctttcaagtattttttgagagccggctactatttgacatgtaaaaaagtgtatagtttttccactcttgagtaaatcttcatattgtataattaattaactggtcatatgtgtgaacatcctaattcaataatttaaaatgtcatggaatcttgttttcattgtatttattttattattaacataacttgtacagattagtgatattcactgtggtgttttcatttatgcagaaatacttattgattatgctcatttattctgctttctgccctctggtactcttctcagttcctataaattcctcttctaccgccagccaacttcttttaagtttctacatatattaagagaacattgtctttctgtatttggcttattgtctttaatatctttcatttttcatcccgtttaaagacttctgtaaatgttatttttttccatagctgaatagtactccattataagagtacaccatggtttctttctctattcatttattaacagatacctatgcagaatatatattagttactatgaatcgtgccatattaaaacttggcatgcaaataactctggattctgacttcatattctttggctgtgtaggtaggaggtggctaggtggattatagaataggtttacgggtagtttttaaggaccctccatatcaacagtgtagagttgtttcatatattctacatctccacagtattcacttttattatactttttaaaaattgctattttaactggagcaaggtattacatttttgtaggtttgatttacattttgccatggctagtaattcagaacatgtctttcatatatttattggctatttgtatatcttctttggaaaagtttgtattcatgtcattttcccgtgttttttaattagatcacttggattttggctactgagttcttgttttatagtttgtattttggacttctgtcagataaaaacatggcaaaaatcttgtttctttctgttaattgtctctgtactctgttttaatggttccctttgtaccaggaatatttactttgatgtaaccccatttagtaatttttgcttttagagggattggatttagtcttagttatttttctggtgctgtatagaggcaccaggaccaagaaaacttaataaagaaagcatttaattttggagttatagttccagacggtattatagttcatgcccattaggccagaaagcatggtagcaagtaggtatggctctggagcagtagctgagagactacatgtgatccgcaggcacaagctgggtggaggatgggtggagagggagagagtgcatgcactaactgggaatggcttggcctttggaaacctcagagcctacctccaatgatatagctccttcaacaaggttacatctcctaatccttccaaaacatttagactgtggatcaagaactcaaatatatgaagatatgggatccattcttactcaaagcatcacagactcttacctagaaaaatcatggtctcgctatattgaagtattttcagtatattttcctctattagtctttagttctgggtcttgcattcaggcctttgttttgagctgagaaacaaaaatctgtttacagttttctgcatgcctatttgtatcttgtctttcagcagcatttattaaaagtgaaccaagaaaagacacagacaggaacatcccagggcttgctggccatacagtctagctagactgtctgtcttttcagtaaggggatcgcagatctgctgtgcctggggtgctggaggccgcctttaggtcttcatgcttgctcagcatgggcttactgtatgcactgtctccccagggttgtgagactttgtagtactgacttccttctttgttgatctgtcagaaattttttatcttcttggttcacttttggaattcagctatttccaggtcggtcagtttcttaagaaatttccttataattatatattttttcaaaacagtccttagtataaatttttctgatgtcagatgtaatttgccctccgtgggtgtgcactgtaaacttagtaattctgttcattgtcaaaaaaattgaacttgtttctttgatccttgctgttgttcttttcgacctgatttattttttgtttgggtttttattgtttgcttttactaatttagtttatttttaaagaattgaagataaatttgtttcttctttttattttttaattttaaaagattgtttagctagatgtgtgtcttggtttgctgtgtttccagttgtctcaaggacttgtaattttgtgttgtgactttctcaggtccactatttttgtttgttaatttttttaaatgtgttatatagaatcagcaatatggcacagttggtataggtgcttgctgtaaaccctgacatcctgagtttgatctctgggactcatatattttcttgttaaatgcaggtttttaaatgtagatcattggcagtttttgtgttttgttttctgtttttaaataccaagacattatgataaatgtttctaaatacacattaccaataagatccaagcctcaaagggttagtttttaaagctacatagccaaaaggtagaaaaatatacattattgtgtttcattttaagaatccaaattctactaatttgaatcatctatatcttcataaaattcaagacaattataaatgtatttaatatatttcctttaaatatggtttctagaggttacctttgctaaacctgtttcacatttgaaaatagttaacatataagatatgaatttatgctttttaaaatttaacattttccatataaaaaatgagggttttttgatgttcatgttttgaatgaaagagataaatattttaaaatttatctggttattaattagaactagagttggtataaaatggcagattttcagtttacactaaatactaagattatggcagaaaatatgatgacatggtaggtcagatgtcaaatgttctgtgggggctgtgttacagtgtgtcagtcttcagggacagtgcagctgaggacagctgtccctcgactggcagagtacccgtgttctagattacagaggaggacagcctggtaatgacgttcagaatccagtcccatggatgtttgtaggtgttttaaaattctgcagatgtttgctgagtggcacatacagtttttagaacagaattgaaactgagctaaacatgtgaactgctgtgatttgtcctgattttacagaccaggttaataaatttgacagcctcttggggccttccttatcttggtaattgtcttctttgaatacagatttcatctgccttgaaataatttgctttaaaggaacattatattgtaaatgaagtagatttcccttcttgtagtattggattgcttattgagaaaatagattgattgactgactacttttattatgtattttttaaatgaattttttttatactccagactttattccccacgccccatccaccctcagactgtccacattcatacctcctccccacccccctactccatgtggatgtccctaacgcccacccccaccctacctgacctctaaactccctggggcctttagtctcttatgtttatttgtgattgaacacagaccccgcagtcctctactgtttgtgtgttgtgtgtatgctgcctgtttggtggtccagtgtttgagagatcttgggggtccagatttattgaggctgctggtcctcctacagggtcagcctcctcctcagcttctaagtagattttcgttattgctcttttataggtaacagtaactgtaccaatgagaaaattataaattctttaaatttatgattttgtattacaaaattatacttagtcataagcaatgaagatggtggttactaaaatttaatactaaagaaattagtacattttgatttctttgcttgtgtgctaaattagtccctttaaaaccatttctttggcattctcttatatgactttgagtatattgaaatgggctattatagtactcttgaattgcatagggctaacaacttttgtttttaatggactatataagtcatagctgtaaggtgaaaaagagtttttgaaaaattactttcctatttttatatcagttatacaaaccattgaatattttcagaatttttctgtactttttctgtttctttgttggttttacaaaagagagtttaaaaaatacaccgtgttaaatcataactatttcttttccttttctaggttgttatggagtcgatggggagagtgactctattatgagttcggcttctgaaaactccactgagccttggttttgtgatgcctgtaaatgtggtgtatctcctagctgtgaactatgtcctaatcaggatgggattttcaaggagacggatgctggaaggttgatgtcttcattatgttgtgtccatatgcctgcttcatgacttgcctgctttggaattcctttttcttccatgtgacttttgagtcacacacattcttcccatcttcttgacatagaggagtgacttggccatgtagatggatgaggggaggaagaaagaccatctcccaagtacttgcatctgtctttgcacttatcatccctgttactgggaagaagcacatggtagttcctcaggttatgctgataacatccaagactcttaccatttaaatcatgttacctcaagaccacagtctggtaaatagcaaaatttgcacacaggtcttttctcacttcaggagtataacatacagtgactaaagtggagacatttttagaattcttaagaatatttaagaattaagacaggaacaattatgggtcagtgactgtgggattgccccccctcccccatttgatgccctgtcttcttgctggagatgggctttataagttctctctccctactgttgggcaggcagtcctgagagtctttcacttcccaggtctctggtgcattctggagggtcccctcaatctcctgtctcctgaggttgcctgttttgatttttttgttgaccctcagggcttcagtcctttaacaacttaaggatagaattcttatttaagaatcattatttaaaagttattaagattatagtcccaaagtacatgaaagttataaatgaattcttggaagaaatcctagggatgacacacagatgaaggataaccaaaattaaggaattttctcttttctggtattggaggttagactttgtcacaagaacaagttgtaccaagagggtgccagaaaccttttctgctttatcttccagtctttggatcttaaaagtaggtggctgacacagttttcagggagagctgcagctctactttaaagcctgttacacatgcggtaggtgtttattgagaaagaagtaaaaactaatctcaaggttgggccagggttgtgaggtactaagaactgaacacgtggctcttctatagtaatgtgtcctgtctgtcctgtggagaaactcttttcttctactgtcctctatggctttgattacagtgccctgctctactgatggcagaatcacactcactgtaaatgacaagtgctgaggacattctttctgtcaatgcagactcaatattaaagcacggatgtgaggctgcgagacaattacaccagggcttggcacacacacgtagggcttttcactggaatcactctcatggtcaccaacagagcagttgtctcagagaagtgctgacatcatttatgttgtttgtttctctatgagtctggggtggttgactacagtataagaattttccccaatcttgtgtgttttgatgattacgtacctcaaccctgccaataatcaatgctcacgtttttattttgataaataaggcattagaattttaaaaatttacttatttttaaattattatttgaaaataaatatatgtatttatgtctgtgtgggtatgagcacatgaatgtaggtgtctgcagagtccagaggagggttcagattctctggggctggaggtataagcatgtgtgagctgcctggtgtgggtgtgggtctttagcaagagcagtaaaagcagtgtgtgcttaactgtagggccatttctctatcatctagaatgttttagttaagattgcttaatattttactgggcgtgatggtggactcttttaatcctagtacagaggcaggtagatctctgtgagttcaagaccagcctggtctacacagcaagagccaagacagttggggaggtagaaaccctgtctcgcaaaaaccaaaggacaaataaagcagaatgcttactctcttaataatagccacaagaactaccaaacaacatggttttcaccatcgacgtttactttagtaaaattaagaaaagcacacttctcattttatttcacttagtagtcgatccttgagaagtgtagtctcagtagattgctaggacagcaaagagtctacaatgagacttcagaaacttgtgctgaggttccagatctcttgtcacctaagaaaatcagtgaagtaaaaaatagtaagtactttgatatataaacgagaacttgatcatattttatcagtggcatttttggactatggcctacaactgtgggtttagtaacattaatagtttgtgctttcaaaatgttttgcccatgcttatattttttgtttgtttgttttattttttgtttttatcctgttatgactttaggcagatttcataacctcatgactataccttagtttggtagtgctgtcatgtacaacagttcctgggatgtagttgggttttcactctcagtgctgctttaaagagtgctttcttctgagcagggttgttctacttacttaagggagccattcgtggagacagcctagttggtaacttttttttttattgatttttattagatattttctttatttacatttcaaatgtgatctcctgtcctagtttcccctccgaaaatcccctatcccctcttgcctctccggctccccacccacccactccagcttccaggtaccaaagttgaatcaggatcaagttgaccatctaaacagtcccatatcacctaaagaaatagaagcagttattaatagtctcccaaccaaaaaaagcccaggaccagatgggtttagtgcagagttctatcagaccttcaaagaagatctaattccaattctgcacaaactatttcacaaaatagaagtagaaggtactctacccaactcattttatgaagccactattactctgatacctaaaccacagaaagatccaacaaagatagagaacttcagaccaatttctcttatgaatatcgatgcaaaaatcctcaataaaattctcgctaaccgaatccaagaacacattaaagcaatcatccatcctgaccaagtaggttttattccagggatgcagggatggtttaatatacgaaaatccatcaatgtaatccattatataaacaaactcaaagacaaaaaccacatgatcatctcgttagatgcagaaaaagcatttgacaagatccaacacccattcatgataaaagttttggaaagatcaggaattcaaggcccatacctaaacatgataaaagcaatctacagcaaaccagtagccaacatcaaagtaaatggagagaagctggaagcaatcccactaaattcattgtttttaattgctgagtagtactccgttgtataaatgtaccatattttatgtatccactcctctgttgagggacatctgggttctttccagcttctggctattataagtaagactgctatgaacatagtggagcatgtgtccttcttacatgttggagcatcttctgggtatatgcccaggagtggtattgctggatcttctggtagtactatgtccaattttctgaggaaccaccagactgatttccagagtggctgtacaagcttgtaatcccaccagtagtggaggactgttcctctttcaccacatcttccacagcaactgctgtcacctgaataatttttgatcttagccattctgactggagtgaggtggaatctcagggttcttttgatttgcatttccctgatgattaaggatgttgaacattttttagctgcttctcggccattctgtattcatcagttgagaattcattgtttagctctgtgcccattttttaatagggttatttggttttctggaatccagcttcttgagttctttatatatattggatattagttccctatctgatttaggattggtaaagatcttttcccaatttgttggttacctttttgtcctattgacagtgccctttgtcttatagaatctttgcaattttatgaggtcccatttgttgattcttgatcttatatcacgaggcattggtgttctgttcaagaatttcccccttgtacccatatattctaggctcttccccactttatcctccataagtctcagtgtctctggttttatgtcgagttccttgatccacttagacttgacctttgtacagttcacatttttctacatgctaaccaccagttgagccagcactatttgttgaaaatgcggtcttttttccatgaatggttttagctcctttgtcaaagatcaagtgaccataggtgtgtgggtttatttctgggtcttcaattctattccattgatctacctgactgtcactgtaccagtacagagacttgaagttctcatcatacagatctttcacttccttagttagagtcacaccgagatattttatattatttgtgactattgagaagggtgttgtttccctaatttctttctcagcctgtttattctttgtgtagagaaaggccattgacttgtttgagttaattttatatccagctacgtcaccgaagctgtttatcaggtataggagttctctggtggaatttttggggttacttacatatactatcatatcatctgcaaatagtgatatcttgacttctgcctttccaatttgtatgcccttgacctcttttgttgtctaattgctctggctaggacctcaagtactatattgaataggtagggagagagagagtgggaagccttgtctagtctctaattttagtgggattgcttcaagtttctctccatttagtttgatgttggctactgttttgctatatattgttgcttttattatgtttaggtatgggccttgaattcctgatctttccaagacttttaacatgaacaggtgttgaattttgtcaaatgctttctcagtatttaatgaaatgatcatgtggttttcatttggtgacttttaatttcgaatattgaaagtttgaaaactccatctttgtgaagtaaggccattttgaaaaacaaaacagaagcccagcttccttggaggaagataattcattttacttggtttcctattaactttaaagttctattgacagactgtctttggtgctattatactctgaaaagtaatttgtaatgtgttctaaaaaaagacaaaagaaatctctttaagcattgagatttaaaaggaaatatgtgtattagctactcttcataatatagataccttttcatgggccatctgaaaaattttgtaataggctgtctaaatacttgttcatgtccatagtcctatgtaggctagagtagaaattatgggcattcatgtcttttgctgcattgtaataccagcttgatttaagaccaagagagagaaaaagcaataaaacatggacagttccttttgtattttgttcttcattaaggaatcccaggaaaaggatgagtagtgtagagactggctgaagacattctgaaactgatttatcgcacgagtttaactagacagtcctctattgttgtgaattactatttctacatgcaaagtgatttcatgtgtggaaattgctgtgcatgaaataaaaactaaatttttactttacttcctaaatgacttttttaacaaagtaaagcaaggcatatattctaaagagagacttagtgaccatcctggaaacaagaagagccggagttgtcctccttttatcactgttgtaggctattcttttgtgtatttccagtgcaatatggctatgattcatgggtcttctttctactttaataagcattatgacacactggagtagtggttctcaaccttccaaatgctgccactctttaatacaattcctcacgttgtggggatccctagccataaaaattattttcatggctactttataactttagttttgctactgctaagctggagtgtaaattctgttttctaatgaccgtgggtgattcctgtaaaggggctctttcatctcagaggggtcataacctcccagctgagagccactgcaggagaaggatgggaacattagactccttaaacgtcaccacttgcctcttctacacttgctatagttgaaatatccagtcctttgaaagcatttcttgatttgcgaatgagaagaacgatttgccatcagtaggaaacattcagaccctttcatttttattgtagcaaatgttacttgagcaaagacaggacgctaaacctgctttaagtatttcacattcacctgcgtctaagttgcagataatctgtgatgttctttacctgggacacacttaaccatggttctgaggtgaaggaatagaaataacgtagtacagataattttaaaatatatcttaaatatgaggaaaaggtactacacagaaaaagtactttaaaattattctattaatttaatttctgtggtcacataagagtttttcaagaatatattactacttcattgttgcctgattatcaacaatatatgaatttaatcgaatgcattgatagtttccattctagaatgacagtctgctgctgtcttttgatgggtttgtgatacttgttttctgctccttttcccaaccaacatctgtcatcatagctccaagcaaaatggatggtaaagtaacaaggaagattttcttgctgttttgatttcccaatttaattaataagttctaaaatatgtgaacaaaaagtgctcaaaggaacaaaattgtgttagcaataattttcagtgactttgatacatattttaataaggacttacattggtgttctcgtaaataactgagcaaaattatacatttgtgtgccagtcacacagaaatggcagttgagatcttcgctgcacatgttaggaaggtcggtacaaagcaagcaggcagctgttggtttatcagaggtaaactcctgtagagaaaggcggcgtttaatacatcactgcatgaagagaagaggctacacagattacattgagaaagttgctgctggtggagatgctatctttatactgaactccacaggacgcataggggaggttagattaaaatgttctatcacgaaaatttcagaactgtgggggtttttgtacaacaaaaatgataaaaactttagactttttctgaatacttctatagaatgattaagtcttagtcttttaaaacttggtacatcacaaaaccagaaccttttaaactaggataaagcaaaagttgtcagtatagtcccaagattcatagagatttggcatctcatttttatcctttttcttatataagggatgcaaatctggtatttacattccacatagctattcaacattttctttgtctgcaagcaaacagatatgtaataaatgaatagctcagagtgttaaaagaaattaaaaccaacaatttttttttcagtatgcttagagtgaacattttttaaagtgttaaagtcttgtgcagactttacacaatgtagttgtatgtgggtttgtaattttagttcataggctacatagggaatagaggctctcaatgaaaacatgacatctttgaattattataactttgttttgtaccttttctcaaccaccaacaaaagttaaactttctaccaaaactgtttgaagatatacccttagggatatccaacagccttgggggaaagtagcaataaagaacaattaacctaattactgcagaataacttcatagttcttaaattagaatccttaattctaaaagtactcacagtaatgaatgtgcatatctttccttgaatgtgaaagtgatgttttgttacccttgaatagcagtcttatgcaaatatttaagaataacagataagaccaaagtgcagtgaatcttaagtggaaagcaattatggttctaaatctacagtttggcttcttgaaaagtaatgctcactgcagtcatgcttcctgtgattaattatctgctatcattctctagctatgctgggttttttagttaggcgtcttgaggattttttaaaaaacatctaatcatagaatgctttcaaaactattttaaggtggaacatattttatgtttggattttatgtgagaatttcaggaatgcatttgatagcagaattatgtctcttctcttatagatgggtccacattgtttgtgccctatatgttcctggagtggcttttggagatattgataaattacgaccagtaacgctaacagaaatgaactattctaaatatggtgccaaggtaaggtgaactttatgattaactaaaattcaggtttttttgtttgtttgtttgtttgtttacatagacttttgagcttatgacactacagaagtgttgatcagtaagcatgctctttgaggagctcttagcatgaggtcatttattagtgtgttattaatttgttgtgttttgtatttttgaggtaatatctcactgtagctcaggtcagcttcaggcataagcttgcctcttcctcagtactgagattatataaaggggtcgccatgctagatttgattcatatagtgatagttgtttctccagaggctgacttattgattagtctaatttcatataacctatgctgtaaaaatggatattagttgatactgtttctcttctctaggacccagagaaaaccttgttccactcagttggatcaaatgaaatcttacaactttaattttaaaatggattttattaagattaagaaaaagagtataatatccactctttattttgagcatgtgtcagtccattaccacttcaacattttttccattttttattagatattttctttatttacatttcaaatgctatcctgaaagtcccctataccctcccctttaactttttttaatgtaacaagaaaaatgatcacctttcttcaacatagtaaaatgattgtatgtatgtattatgtatgtatgtatgtatgtatgtgtgtgtgtgtggatatgtggatatatggatatatagtatttagaagactaagtgcctagctcctaagtcctcatattgtattatttgttattattgctaatatatcagtttaatttagattgatagaactatttttattagaaagcctggcttacttgcagttatttgcatttatgctttgtgttaaaatgcttgagcattttaaatatttattggattctttatgagaggataatattgtttcagaaatacttttgctgtgagagttttcctgtgacttttgtaggagtgtagcttttgtgaagatcctcgctttgctagaactggagtttgcattagctgtgatgcaggcatgtgtagagcctatttccatgtcacctgtgcccaaaaggaaggcctgctatcagaggcagcagcagaagaggtatgtttattccctcattaacgactgggtgctggtaacagtgttcagaaggcttctcatgtctgctgtgtcctgtagcagtcatgaagcatgagggaaagttttcaccagaccactgatttatactttggaatagtaaatgcctgagtctggtcagtctttagactagaacactggaaagcatatcaaaagcgttctagtgagttctgacagatcaaccatactgcacggtgtcttgaagtgttgatatttggtgtattttatacagaagaattcaactttcttaaggcaatattgtagactttgggtatagttttaactccctaccatttttcccaggcttactaactttagattaagtaattatttgattaaaaagtgtatttttggaactccttaaaaatttaaattatttctaggacccagtgtttaaaatagtttttataccaatataaaatatgcatttctaagttctcatctttggaagtttctagagattacatgcagcataagagtgtaaccttaactatgttaatagttttaatgatccttcttttatatttttttaaatatgagatcatttatatttactttttatgtgttttttttttttaattaggtatttagctcatttacatttccaatgctataccaaaagttcccnnnnnnnnnnnnnnnnnnnnnnnnnnnnnnnnnnnnnnnnnnnnnnnnnnnnnnnnnnnnnnnnnnnnnnnnnnnnnnnnnnnnnnnnnnnnnnnnnnnnnnnnnnnnnnnnnnnnnnnnnnnnnnnnnnnnnnnnnnnnnnnnnnnnnnnnnnnnnnnnnnnnnnnnnnnnnnnnnnnnnnnnnnnnnnnnnnnnnnnnnnnnnnnnnnnnnnnnnnnnnnnnnnnnnnnnnnnnnnnnnnnnnnnnnnnnnnnnnnnnnnnnnnnnnnnnnnnnnnnnnnnnnnnnnnnnnnnnnnnnnnnnnnnnnnnnnnnnnnnnnnnnnnnnnnnnnnnnnnnnnnnnnnnnnnnnnnnnnnnnnnnnnnnnnnnnnnnnnnnnnnnnnnnnnnnnnnnnnnnnnnnnnnnnnnnnnnnnnnnnnnnnnnnnnnnnnnnnnnnnnnnnnnnnnnnnnnnnnnnnnnnnnnnnnnnnnnnnnnnnnnnnnnnnnnnnnnnnnnnnnnnnnnnnnnnnnnnnnnnnnnnnnnnnnnnnnnnnnnnnnnnnnnnnnnnnnnnnnnnnnnnnnnnnnnnnnnnnnnnnnnnnnnnnnnnnnnnnnnnnnnnnnnnnnnnnnnnnnnnnnnnnnnnnnnnnnnnnnnnnnnnnnnnnnnnnnnnnnnnnnnnnnnnnnnnnnnnnnnnnnnnnnnnnnnnnnnnnnnnnnnnnnnnnnnnnnnnnnnnnnnnnnnnnnnnnnnnnnnnnnnnnnnnnnnnnnnnnnnnnnnnnnnnnnnnnnnnnnnnnnnnnnnnnnnnnnnnnnnnnnnnnnnnnnnnnnnnnnnnnnnnnnnnnnnnnnnnnnnnnnnnnnnnnnnnnnnnnnnnnnnnnnnnnnnnnnnnnnnnnnnnnnnnnnnnnnnnnnnnnnnnnnnnnnnnnnnnnnnnnnnnnnnnnnnnnnnnnnnnnnnnnnnnnnnnnnnnnnnnnnnnnnnnnnnnnnnnnnnnnnnnnnnnnnnnnnnnnnnnnnnnnnnnnnnnnnnnnnnnnnnnnnnnnnnnnnnnnnnnnnnnnnnnnnnnnnnnnnnnnnnnnnnnnnnnnnnnnnnnnnnnnnnnnnnnnnnnnnnnnnnnnnnnnnnnnnnnnnnnnnnnnnnnnnnnnnnnnnnnnnnnnnnnnnnnnnnnnnnnnnnnnnnnnnnnnnnnnnnnnnnnnnnnnnnnnnnnnnnnnnnnnnnnnnnnnnnnnnnnnnnnnnnnnnnnnnnnnnnnnnnnnnnnnnnnnnnnnnnnnnnnnnnnnnnnnnnnnnnnnnnnnnnnnnnnnnnnnnnnnnnnnnnnnnnnnnnnnnnnnnnnnnnnnnnnnnnnnnnnnnnnnnnnnnnnnnnnnnnnnnnnnnnnnnnnnnnnnnnnnnnnnnnnnnnnnnnnnnnnnnnnnnnnnnnnnnnnnnnnnnnnnnnnnnnnnnnnnnnnnnnnnnnnnnnnnnnnnnnnnnnnnnnnnnnnnnnnnnnnnnnnnnnnnnnnnnnnnnnnnnnnnnnnnnnnnnnnnnnnnnnnnnnnnnnnnnnnnnnnnnnnnnnnnnnnnnnnnnnnnnnnnnnnnnnnnnnnnnnnnnnnnnnnnnnnnnnnnnnnnnnnnnnnnnnnnnnnnnnnnnnnnnnnnnnnnnnnnnnnnnnnnnnnnnnnnnnnnnnnnnnnnnnnnnnnnnnnnnnnnnnnnnnnnnnnnnnnnnnnnnnnnnnnnnnnnnnnnnnnnnnnnnnnnnnnnnnnnnnnnnnnnnnnnnnnnnnnnnnnnnnnnnnnnnnnnnnnnnnnnnnnnnnnnnnnnnnnnnnnnnnnnnnnnnnnnnnnnnnnnnnnnnnnnnnnnnnnnnnnnnnnnnnnnnnnnnnnnnnnnnnnnnnnnnnnnnnnnnnnnnnnnnnnnnnnnnnnnnnnnnnnnnnnnnnnnnnnnnnnnnntgaaaatgctgtcctttcttcccactggaatggttttggctcccctttgtcgaagatcaagtgaccataggtgtgtgggttcatttctgggtcttcaattctattccattggtccacttgtctgtctctataccagtaccatgcagtttttatcacaattgctctgtagtaaagctttaggtcaggcatggtgattccaccagaggttcttttatccttgagaagagtttttgctatcctcggttttttgttattccagatgaatttgcaaattgctccttctaattcgttgaagaattgagttggaattttaatggggattgcattgaatctgtagattgcttttggcaagatagccaattttacaatgttggtcctgccaatccatgagcatgggagatctttccatcttctgagatcttctttaatttctttcttcagggacttgaagtttttatcatacagatctttcacttccttcgttagagtcacgccgagatattttatattatttgtggctactgagaagggtgttgtttccctaatttctttctcagcctgtttattctttgtgtagagaaaggccattgacttgtttgagttaattttatatccagctacttcaccgaagctgtttatcaggtttaggagttctctgttggaatttttagggtcacttatatatactatcatatcatctgcaaaaagtgatattttgacttcctcttttccaatttgtatccccttgatctccttttgttgtcgaattgctctggctaatacttcaagtactatgttgaaaaggtagggagaaagtgggcagccttgtctagtccctgattttagtgggattgcttccagcttctctccatttactttgatgttggctactggtttgctgtagattgcttttatcatgtttaggtattggccttgaattcctgatctttccagaacttttatcagaatgggtgttggatcttgtcaaatgctttttctgcatctaacgnnnnnnnnnnnnnnnnnnnnnnnnnnnnnnnnnnnnnnnnnnnnnnnnnnnnnnnnnnnnnnnnnnnnnnnnnnnnnnnnnnnnnnnnnnnnnnnnnnnnnnnnnnnnnnnnnnnnnnnnnnnnnnnnnnnnnnnnnnnnnnnnnnnnnnnnnnnnnnnnnnnnnnnnnnnnnnnnnnnnnnnnnnnnnnnnnnnnnnnnnnnnnnnnnnnnnnnnnnnnnnnnnnnnnnnnnnnnnnnnnnnnnnnnnnnnnnnnnnnnnnnnnnnnnnnnnnnnnnnnnnnnnnnnnnnnnnnnnnnnnnnnnnnnnnnnnnnnnnnnnnnnnnnnnnnnnnnnnnnnnnnnnnnnnnnnnnnnnnnnnnnnnnnnnnnnnnnnnnnnnnnnnnnnnnnnnnnnnnnnnnnnnnnnnnnnnnnnnnnnnnnnnnnnnnnnnnnnnnnnnnnnnnnnnnnnnnnnnnnnnnnnnnnnnnnnnnnnnnnnnnnnnnnnnnnnnnnnnnnnnnnnnnnnnnnnnnnnnnnnnnnnnnnnnnnnnnnnnnnnnnnnnnnnnnnnnnnnnnnnnnnnnnnnnnnnnnnnnnnnnnnnnnnnnnnnnnnnnnnnnnnnnnnnnnnnnnnnnnnnnnnnnnnnnnnnnnnnnnnnnnnnnnnnnnnnnnnnnnnnnnnnnnnnnnnnnnnnnnnnnnnnnnnnnnnnnnnnnnnnnnnnnnnnnnnnnnnnnnnnnnnnnnnnnnnnnnnnnnnnnnnnnnnnnnnnnnnnnnnnnnnnnnnnnnnnnnnnnnnnnnnnnnnnnnnnnnnnnnnnnnnnnnnnnnnnnnnnnnnnnnnnnnnnnnnnnnnnnnnnnnnnnnnnnnnnnnnnnnnnnnnnnnnnnnnnnnnnnnnnnnnnnnnnnnnnnnnntatatccttttgttttaggataaaatgttctgtagatatctgtcagatccatttgtttcatcacttctgttagtttcagtgtgtccctgtttagtttctgtttccatgatctgtccattggtgaaagtggtgtgttgaagtctcccactattatcgtgtgaggcgcaatgtgtgctttgagctttactaaagtttctttagtgaatgtggctgctcttgtatttggagcatagatattcagaattgagagttcctcttggaggattttacctttgatgagaatgaagtgtccctccttgtcttttttgatgactttgggtttggaagtcaatcttatcagatattaggatggctactcctgcttgtttcttcataccatttgcttggaaaattgttttccagcctttcattctgaggtagtgtctatctttttctctgagatgagtttcctgtaagcagcaaaatgttgggtcttgtttgtgtagccagtttgttagtctatgtctttttattggcgagttgagaccattgatgttaagagatattaaggaaaagtaattgttgcttcctgttattttagttgttaaaggtggcattctgttcttgtggctgtcttcttttaggtttgttgagggattaccttcttgttttttctagggcgttgttcccgttcttgtattggtttttttctgttattatcctttgaagggctggattcgtggagagataatgcgtgaatttggttttgtcgtggaatactttggtttctccctctatgataattgagagtttggctgggtatagtagcctgggctgcagtttgtgttctcttagtgtctgtataacatctgtccaggctcttctggctttcatagtctctggtgaaaaatctggtgtaattctgataggcttgcctttatatgttacttgacctttttcccttactgcttttagtattctatctttatttagtgcatttgatgttctgattattatgtgtcgggaggaatttcttttctggtccagtctatttggagttctgtaggcttcttgtatgttcatatgcatctcattctttagatttgggaagttttcttcaataattttgttgaagatgtttgctggacctttgagttgaaaatcttcattctcatccactcctattatccgtacgtttggtcttcttattgtgtcctggatttcctggatattttgagttaggatctttttgcattttccattttctttgattgttgtgccgatgttctctatggaatcttctgcacctgagattctctcttccatctcttgtattctgttgctgatgctcaaatctatggttccagatttctttcctagggtttctatctctagtgttgcctcgctttgagttttctttattgtgtctacttccctttttaggtctagtatggttttgttcatttccatcacctgtttgtatgttttttcctctttttctgtaaggacttctacctgtttgattgtgttttcctgtttttctttaaggacttgtaactctttagcagtgttctcctgtatttctttaagtgatttattaaagtccttcttgatgtcctctaccatcatcatgagatatgcttttaaatctaggtctaggttctcaggtgtgttggggttccctggactgggcgaagtgggtgtgctgggttctggtgatggtgagtggtcttggttcctgttagtaagattcctccgtttacctttcgccatctggtaatctctggagttagtagttatagttgactctgtttagagattgttcttctggtgattctgttaccgtctatcagcagacctgggagacagattctctcctctgagtttcagtgctcagagcactctctgctggcaagctctcttacagggaaggtgcgcagatatcttgtatttggacctcctcctggccgaagaagaaggcccaaaacaggacctttctcagacagtgtgttgctttggcagttcccaggtggtacagactctcacctaagcagactaaattcctaagttccttggagtcccgggaccaagatggcgaccgctgctgctgtggcttaggccgcctccccagccgggcgggcacctgtcctccggtccggaaggtggcccggctgtccccggcccacacagggtgctgcctcagcgcctctgtgcttctgcctgttccagaagctgtcaggttctctggcgcaccctctcacctgttcagactaatttcctaagttcggcgggtctcggaccaagatggcgaccgctgctgctgtggcttaggccgcctccccagccgggcgggcacctgtcctccggtccggaaggtggccggctgtccccggcccacacagggtgctgcctcagcgcctctgtgcttccgcctgttccagaagctgtcaggttctctggcgcaccctctcacctgttcagactaatttcctaagttcggcgggtcccggaccaagtttttttatgtgttttttattagatattttctttatatacatttcaaatgtcaaatgctatcccgaaagttccctatatcctcccctcgcactgctcccctacacacccactcctgcttcttggccctggcattcccctttactggagcatataaagtttgcaataccaaggaggctgtcttccctgtgatggtcatcttctgctacatatgcagctagagacatgaactctggggggtactggttagttcatattgttgttccacctatagggttgcagacctcttcagctccttgggtgctttctctagcttctccattggggcgcctgtgttccatcttatagatgactgtgagcatccacttctgtatttgccagacactggcatagcctcatacaagacagctaaaacagggtcccttcatcaaaatcttgctggcatatgcaatagtgtctgggtttggtggctgattatgggatggatccccgggtggggtagtctctggatagtccatcctttcctcttagctccaaactttgtctctgtaactcctttcatggttattttgtttcctattctaaggaggaatgaaatatccacccattggtcttccctcttcttgattttcttgtgttttgcaaattgtatcttgggtgttctatgtttctgggctaatattcacttgtcaatgagtgcatatctcatgactaatttgtgattgagttacctcactaaggatgatatcctccagatacatccatttgtccaagaatttcataaattcattgtttttaattgctgagtagtattccattatgtaaatgtaccacagtttctgtatccattcttctgttgagggacatctaggttctttccagtttctggctattataaataaggctgctatgaacatagtggagcatgtgttcttattaccagttggaacaacttctctgtatatgaccagaagaggtattgctggattttctggtagtatgatgtccaattttctgaggaacctccagactgacttccagagtggttgtacaagcttgcaatcccaccagcaatggaggagtgttcctctttttccacatcctcgccagcatctgctgtcacctgaattttgatcttagccattctgactggtgtgaggtggaatctcagggttgttttgatttgcatttccctgatgattaaggatgttgaacattttttcaggtgcttctcagccattccgtattcctcagttgagaattctttgtttagctctgtacccaatttttaatggggttatttgaatttcttgagtccagcttcttgagctctttgtatatattggatattagtcccctatctgatttaggattggtaaaaatccttttggaatatgttggtggtctttttgtcttattgacggtgtcttttgccttacagaagctttgcaattttattaggtcccatttgtcaattcttgatcttacagcataagccattgctgttctgtttaggaatttttcccctgtgcccatatcttcgaggcgtttccccacttcctcctctattaatttcagtgtctctgtttttttgtggaggtctttgattcacttagacttgagctttgtgcaaggagataagaatgaatcaattcccattcttctacatgataactgccagttgtgccagccccatttgttgaaaatgctgtcttttttccactggatggtttcatctcccttgtcaaagatcaagtgaccataggtgtgtagattcatttctgggtcttcaattctattccattgatctacctgtctgtcactgtaccagtaccgtgcagtgtttatcacaattgctctgtagtacagcttaatatcaggcatggtgattctaccagaggttcttttattgttgagaatagttttaatatcctaggttttttattactccagatgaatttgcacatttccctttctatctccatgaagaattgatttggaattttgatggggattgcattaaatctgtagattgcttttggcagtatagccattttgactatattaatcctgcaaacccatgagcatgagagatctttccatcttctgatcttcttcaatttctttcttcagagactggaagttcttataatacagatctttcacttccttagttagagtcacaccaaggtattttatattgtttgtgactattgtgaaggttggtgttttcctaatttctttctcagtctgtttatcctttgtatagagaaaggccattcatttgtttgagttaattttatttcctgctactgcactgaagctgtttatcaggtataggagttctctgttggaatttttggggtcacttatatatactatcatctgcaaaatagtgatatttttacttcttcctttccaattggtatccccttgatgtccttttcttgtcgaattgctctggctaggacttcaagtactatattgaataggtagggagaaaatgggcagccttgtctagtccctgattttagtcagattgcttcgagtttctctccatttaatttgatgtgggctactagtttgcagtatattgcttttattatgtttaggtgtggcccttgaattcctgatctttccatgacttttatcatgaaggggtgttggattttgtcaaatgctttctcagcatcttaacgagatgatcatgtggtttttgtctttgtctttgtttatatagtggattacgttgatgatttctgtatattaaaccatccctgcatccctggaatgaaagctacttggtcaggatgtatgattgttttgatgtgttcttggattcagttagtgagaattttattgagtatttttgcaccgatattcataagagaaattggtctgaagttctctatctttgttgggtctttttgtggtttaggtatcagagtaattgtggtttcatagaatgagttgggtagagtacattctgcttctattttctggaatagtttgtgcagacctggaattatatcttctttgaaggtctggtagaactctgcactaaacccatttggtcctgagctttttttggtttggagactattaataactgcttctatttctttaggtgatataggactgtttagaccattaacctgatcctgatttaactttggtacctggtatctgtctaggaagttgtccatttcatccaggttttctagttttgttgagtatagccttttgtagtagggtctgatgatgatttggatttcctcaggttctgttgttatgtctccttttttgttttttattttgttaattaggacactgtccctgtgccctctagttagtctggctaagggtttatctatcttgttgattttctcaaagaaccagctcctggtttggttgattctttgaatagttcttttggtttaacttggttgatttcatccctgagtttgattattaactcccttctactcctcttgggtgaatttgcttcctctagttctagagcttctaggtgtgctgtcaggctgctagtgtgtgctctctctagtttctttttggagctactcagggctatgaattttcctcttaggactgcctgcatgtatcccataagtttgggtatgttgtggcttcattttcattaaattctaaaaagtctttaatttctttctttatttcatccttgaccaaggaatcattgagtagagtgttgttcagtttccacatgaatgttggctttctgttatttatgttgttattgaagatcagccttagtccatggtgatctgataggatgcatgggataatttcaatatttttgtatttatggaggcctgatttgtgaccaattatatggtcaattttggaggaggtaccatgtggcgctgagaggaaggtatatcctttagttttagggtaaaatgttctgtagatatctattaaatccatttgtttcataacttctgttagtgcccatgtttgtctgtttagttactgtttccaggatctgttcattgctgagagtggggtgttgatgtcccccactattattgtgtgtggtgcaatgtttactttgagcttcattgaagtttctttaatgaatgtggctgcccttgtttttggagcgtatatattcagaattgagaagtgatcttggtagattttacctttgatgagtatgaagtgcccctccttgttgtttttgataactttgggttggaagacagttttatttgatattagaatggctaatccagcttgtttttctggaccatttgctttgaaaattgttttccagcctttcactctgaggtactgtctgtccttttccctgaagtgtgtttcctgtaagtaacaaaatgttggtcctgcttgtgtagccaatctgttagtctatgtctttttattggggaattgagtccattgatgttaagagaaattaaagaaaagtaattgttgcttcctgttatttttgttgttaaagttgggattctgttcttgcggctatcttcttttaggcttgttgaaggattacttacttgatttttccagggtgtcatttccgtccttgaattggtgttttccctttattattctttgaagggctggattcctggaaagatattgtgtgaatttgattttatcctggaatactttgttttctccatctatgataattgagttttgctgggtatagtagcctgggctggcatttgtgttctcttaggatctgcataacatctgtccaggattttctggctttcatagtctctggtgagaagtctggtgtaattctaataggcctgcctttatatgtcacttgacctttttcccttactgcttttaatattctatctttatttagttcatttgttgttctgattattatgtgttgggaggaatttcttttctggtccagtctatttggagttctgtaggcttcttgtatgatcatgggcatctctttctttagatttggcaagttttcttcaataattttgttgaagatatttgctggccctttaaggtgaaaatctttattctcatctactcttattatccataaatttggttttctcattgtgtactagatttcctggatgttttgataggatctttttgtattttgcattttctttgattgttgtgcccatgttctctatagaatcttctgcacctgacattctctcttccatctcttgtattctgttgctgaatcttgcatctatagttccagattgctttcttagggtttctatctccagtgttgtctcactttgggttttctttattgtttctacttccctttttagttcttggatggttgtgttcaattccatcacctgtttggttgtgttttcctgtatttctttaaggacttctacctctttagtgtgttctcctgtatttctttgagttattatatgagatgtgcttttaaatccaggtctagcttttcgggtgtgttggggtgccctggactggctgaggtgggagtgctggcttctgatgatggtgagtggtcttggattttgttagtaagattcttgcatttgccttttgccatctggtaatctcaggagttagttgttatagttatctctggttggagcttgttcctctcgtgattctgttagcctctatcaggagtctagctctcgcctgagtttcagtggtcagagtaccctctgcaggcaagctctcctcttgcagggaaggtgcacagatatctggcgttcagacctgcctcctggctgaagatgaagtcctgaaacagggcctgtcccagaagatgtgctgcctctgcagtctgcatgctcacctgcacagactggtctccaagggacacaggacacaagatggctctctcacctgctctggtggtcagagccctcccaggcacatctctcccttggcggggaacttgcctggatatctggagcccgaaacagggtctgtcccagaaggtgttttgcttctacctgtcccagaagctgtgtagcttctgtagtctgcacactcaccagtgcagactagtctctgagggacccgggacgcaagatggctccctcacctgctctggcagagccttcccgggtggacacctctcctcttgggaaggtgcccgggtatctggagccggaaatggggtctgtcccagaggctgtgttgcttctgcctgtcccagaagctgtgtcgcttctgcagtccgcttgctcatccttagcagtcagtgaactgacctgtgcagactcatctctgagagatctgggaccccagatgccctccttttatgttatgaaggtagataaagttgcaaaaatataaacagcctttctcataaaatttgttgcctaatgctatagtagttattttgattaaaaatatgtatttgcttaatacgtttaagttaagttgggaagtatttaagagtattctaagttttaattcatgtgatacatttctaaaagtatgactcttaaattttttggcattcacaataatttttaaaggattttaaagagtcttaagaccaagtgtaattaattccttaagtgatttttgaggagagataattatctattcagtaaacttttactgtgcattcatgatgctttctgatagcatgtaagctattttatttgttacataaaattttattttctcataaaaacatttattatgcttttatcttagctagaaaataagtaatctaatgaaaaaaattacaaaaaaattcttgaagatatatttattttaactttaatagatcttcaatagaaagggtatattttgacctttattagtttgttctaccttttgatgctgaggaattgtgctttgtgttaatgctggaagaacactgaacattttcacagcttctggcagacacagaagtatgactgaagcataggcctaggtggattatcaaaaccaacatgctaggtaataggtagatgtgcagaagggcagtgcaataggtctaatagggctgcacagctcatgggaaaccaggggatctaagttcagctcagttaactgaacttcattttcaggatgtttctgttgtagagactttctttcaggtttatgtttgagaggttttccttttatattaagatagtttgggttactttgcatactcacaatacatgttccttttgaagaagacaaaaaacctctttgttaggtagttaagtaaagatctgccaaatagcaagggtacagtgggatgcatgatttggaaactgcttctccttatcagaaggcatggagattaatacaaaaccaaacataatcactatgcagtcactatgtttaagagctaatttggggaaaatgtatagcacaacttgaagtaataaagatgtcaaacttggagtttaagtttcttcctgccttgttgctttcttttatcaattaggtagatactcctgaccccacctggcctactctagaggttttgtttttgtgggtgggtttcttctttcattttggtttttgtattatattaaagcacgtttatactggtttctagttgttataaacacttaatagaattggaactctttttttgtgatatttttcctatttgatcattattataattccaggtggtatggaattcactgtacaggccaggttagtctcaaattcaccatccttttgtctcagccttcttagtgctactaaagatgcatgtcagtgaagccagtgagaattggacatttataaaggactccttacagaatttcaaaactttgcatgagttgttaggatgttagtgagatttgcttttgataatatttattctgttaaaatggaggtgttatttatcccgtttgtacacatgtacattggatacatataagatcccccaatacacactgcctgactgggtctcattgtgtagccagtggtagccccagtgatccttttgttcacctctccgagtgctaagattacaagcatgtgtggccacacccaccttagatttttgaaattaagaagcatttcaaattaaagcatatttatttccttctgctttagttttacgttctctttaggtttcctataaagcgcttttttcttgtttaaacttgtttatcaagttggatgtcatacttttatagagctactttatgaagatagtaaaagaaagcctgaaaagtagaattaaacacctcagtttaatccagtgatatttatcatatatttaaactttttatatagccttggaatatattgctttccacattggtgaagctttgttagaggtgtgcctgggtattttgtactttataaaaatatttcaaattataagaatagccaaattgccatgttttaaacataacatgtgtttttcaaagatgttaaaataaactacagcacagaaatttatgttatgtttcatattatgttttaaagttgctttttgttttctttttattggatattttctttatttatatttcaaaagttatcacctttccctgccccctgaagtttcttattccatccctcctccccctgcttctatgagagtgtttcccaatccacccacccacccattccgacatttctgccctcccatttccctacactgggccatcgagccttcacaggaccgaggacctctcctcccgttgatgcctaacaaagccatcctctgctacatatatggctggagccatgggaccctccatgtgtactccttggttggtggtttagtccctgggagctctggggggtctggttggttgatattgttctttctatggggttgcaaaccccttcagctccttcagtcctttctctagctcttccattggggacccttcgatcagtccaatggatggctgtaagcatctgcctcggtatttgtcagtcactggcagagcctctcaggaaacagccatatcaggctcctttcagcaagcatttcttggcatccacgatagtgtctgcatttgttgactttatcttactaaacctatagtaattttttgttgattaaaatgtcattttggtagtattgaacagtattataatatttagaaaatagtctctaaaatgtataaaattatttgtagatctattgattttaatacatatatttattactctattgagaattttgtacattgtattttaatcttatttggtattttttgtttccaatagatagggaacaggtacattttcttttttcggttattatatggaggctgtagattaaactgccagttgatgcattagctagaggaatgacaaagtttcctcccagacttgcataggagttcacaaaaaactgtgttgctccaaaaagctacacttactaatttaataaaaactgaaaggaagacatttaggaagaatcattgaatttctaggtgaatatgcaaaagataggacaattttaaataatcttagtttatgttatgagtggtctgccactaccctgccccctacactagggtataggatcctcacttctacaaatttctacctttagatagagaatggaagctctgataagatcactttctccttccactgactctttgtctttagtgtaagttaacgaaaggaaaaagtcaggttgtcccgtgtctcaggtcctttagcagcttcaggatagacctcttcattctcagacattatgttcctgggcctcactttttagggagttaaatttaagaaatcacaacattaatcatgttattagtatttttaatcattagtagttgcattaaagtagattacctgtctaagttctaagtagtcttaagtttaatttgctatgtaagtaaagaaaacagtggtctttattgggaaaaaaggtattgtgatggataacaatgttatcatttttcttaaatcagctccaaaatggttatagtgctatatagaaccttaaggaaattttatgtatatcctacttgatattttttaatctctttctccccccccaattccagtcttctagatacacatttcttacttaacttttaaaattagtaggtaagtagtaattaagattatcttagtgctagggagatggctcagattgtaaggtgtttgacatggaagttgaagaacttgagtttagattgccagtacccatgagagaagcacgtggctctaatgctaacactgagggagtggccagctagtcttattacccaattggtgatcagtaggacccatgaaaaaccctttctaaacaatagaagcaaaaaggcagaggtgccttctgcaaaccaatatagaacacatattcactgtagtttttgataattttgtaagtaaataacctttttaggttaagtgtatataggttaaatgcatgtcacttctttttttttttaatagagattatattattttgtaatattttttaggttttatgtctatataaattggtgtctagctcttcaatttttttaattgtatgcagtgctatgtcctttaatatctgtatcataatacagaattacttcatgggttttaaaaaatcttaagtgcagattagaatttcaagattatttcctttttgattttgtttcaagtcttcctgcctgttagtatcatttctataccttaacaagcctaaagaataaatgccagatatttcttaataactatagtagtacaaattaatttttgttctatttaaagaaattatttgtgtcttgactaggattgaggttggtttttaccctactgtttgttaaagttgtttcctcacagtgacccttcctgttcacccccacttgtcttctctcaaatccatggctgttctttctttcactggggactgcgtgtgtttgtatattattaaatatataaacagcctgctctgctcagtcagtataaggtgactaatatgtatattgtttcagggctcagtcagtataaggtgagttatatgtatttatatgtatttcagggctgagcacttggtgctcttgaccacagaagactatttttcctgctctcggcatttcttgattgccttaattgttctttgttgagggttgaggtcccatgaggtttctcccttccacctaggcatgggaacaagttgtggtcattgttgtttaggtcttatttaggcaacagttttgatgagacttgttgggtataacttccctggcatttcttggagatgaaatcttataggaaaatttcctatttttacagtgtttctactccctcttaaattttctgtctgtgagcctaaggtacaggagttgtgttgcacgtgcattacttggggctcagcatcacatggttacttgttctctgcatttctattgcttgtggttttctgtaatgatctgtggtctaatctaagatggacacaatgaaagcatttctaagagggaaactcatagctctgagtgcctccaaaaagaaactggagagagcacacactagcaacttgacaacacatctaaaagctctagaaaaaaggaagaaaattcacccaaaaggagtagatggcaggaaataatcaaactcctgggtgaaatcaaccaagtggaaacaagaagaactattcaaagaatgaaccaaacgaggagttggttctttgagaaaatcaactagatagataaacccttagctagactcactaaagggcacagggacaacatcctaattaacaaaatcagaaatgaaaagggagacataacaacagatcctgaagaaatccaaaacaccatcagatccttctataaaaggctatactcaacaaaactggaaaacctggacaaaatggacaaatttctagacagataccaagtaccaaagttaaatcaggatcaagttaacgatctaaacagtcccatatcccctaaagaaatagaagcagtcattaatagtctcccaggcaaaaaaagcccttgaccagatgggtttagtgcagagttctaccagaccttcaaagaagatctaattccagttctgcacaaactattccacaaaatagaagtagaaggaactctacccaactcattctatgaagccacaattactctgatacctaaaccacagaaagaccaacaaagatagagaacttcagaccaatttctcttatgaatatcgatgcaaaaatcctcaataaaattctcgctaaccgaatccaagaacacattaaagcaatcatccatcctgaccaagtaagttttattccagggatgcagggatggtttaatatctggaaatccatcaacgtaatccattatataaacaaactcaaagacaaaaaccacatgatcatctccttagatgcggaaaaagcattcgacaagatccaacacccactcatgataaaagtcttggaaagatcaggaattcaaggctcatacctaaccatgataaaagcaatctacagcaaaccagtagccaacatcaaagtaaatggtgagaagcttgaagcaatcccactaaaatcagggactagacaaggctgcccactttctccctacacctattcaacattgtacttgaagtcctagccagagcaattcgacaacaaaagtagatcaaggggatacaagttggaaaagatgaagtcaaaatatcactttttgcagatgatatgatagtatatataagtgaccctaaaaattctaccagagaactcctaaacctgataaacagctttggtgaagtagctggatataaaattaactcaaacaagtcaatggcctttctctacacaaagaataaacaggctgagaaagaaattagggaaacaacacccttctcaatagtcacaaataatataaaatatcttggcgtgactctaactaaggaagtgaaagatctgtataataaaaacttcaagtctctgaagaaagaaattaaagatctcagaagatggaaagatctcccatgctcatggattggcaggatcaatattgtaaaaatggctatcttgccaaaagcaatctacagattcaatgcaatccccatcaaaattccaactcaattcttcaaagaattagaaagagcaatctgcaaattcatctgaaataacaaaaaatctaggatagcaaaaactcttctcaatgataaaagaacctctggtggaatcaccatgcctgacctaaaactgtactacagagcaattgtgataaaaactgcatggtactggtatagtgacagacaagtagaccaatggaatagaattgaagacccagaaatgaacccatatacctatcgtcacttgatctttgacaagggagctaaaaccatccagtggaagaaagacagcattttcaacaaatggtgctggcacaactggttgttatcatgtagaagaatgcgaattgatccattcctatctccttgtactaaggtcaaatctaagtggatcaaggaacttcacataaaaccagagacactgaaacttatagaggagaaagtggggaaaagccttgaagatatggtcacagaggaaaatttcctgaacagaaaagcaatggcttgtgctataagatcgagaattgacaaatgggacctcatgaaactgcaaagcttctgcaaggcaaaagacaccatcaataagacaaaaagaccaccaacagattgggaaaggatctttacctatcctaaatcagataggggactaatatccaatatataaagaactcaagaaagtggactccagaaagtcaaataaccccattaaaaaatggggctcagaactgaacaaagaattctcacctgaggaataccgaatggctgagaagcacctgaaaaaatgttcaacatccttaatcatcagggaaatgcaaatcaaaacaaccctgagattccacctcacaccagtcagaatggctaagatcaaaaattcaggtgacagcagatgctggcaaggatgtggagaaagaggaacactcctccattgttggtgggattgcaagcttgtacaaccactctggaaatcagtctggcggttcctcagaaaactggacatagtactaccggaggatccagcaatacctctcctgggcatatatccaacagatgtcccaaccggtaagaaggacacatgctccactatgttcatagcagccttatttataatagccagaagctggaaagaacccagatgcccctcaacagaggaatggatacagaaaatgtggtacatttacacaatggagtactactcagctattaaaaagaatgaatttatgaaattcctagccaaatggatggacctggagggcatcatcctgagtgaggtaacacaatcacaaaggaactcacacaatatgtacttactgataagtggatattagcccaaaacttaggatacccaagatataagatacaatttgctaaacatatgaaactcaagaagaatgaagtgtggacactatgcccttccttagaattgggaacaaaacacccatggaaggagttacagagccaaagtgtggagctgtgatgagaggatggatcttctatagactgccatacctggggatccatcccataatcagcttccaaacgctgacaccattgcatacactagcaagattttgctgaaatgacccaaatatagctgtctcttgtgaggctatgctggggcctagcaaacacagaagtggatgctcacaatcagctattggatggatcacagggctcccaagggaggagctagagaaagtacccaaggagctaaagggatctgcaaccctgtaggtgcaacattatgaagtaaccagtaccccggagctcttgtctctagctgcatatgtatcaaaagatggcctagtcggccatcactggaaagagaggcccattggacaggcaaactttgtatgctccagtacaggggaacaccagggccaaaaaaaaaaaatgggaatgggtgggtagggaagtgggggggaggctatgggggacttttggaatagcattggaaatgtaattgaggaaaatatgtaataaaaaatataaaaaaaaaaaagatgtatctttgatgaggagtgagatctacacttggctgtaggtgtaaagataaatatgtataatgtagttagtaaactggtatttttaggttttccaccaagatccatatttttcacaggtttctagtaccagacatgagtttcctcttgctgaatagaccttcagtccaattagattattggctaccactagtatgcattccatcattgcactcttaggtaagacatcataccatgctgtcagtgattaagttcatagacatcatagctgtgtagaaattgattgcttcactcctgtggaaacttacacagtgccttctagtaccatgaaagctagtcatcaaggaggagtctttcagttcacaaccagcttgaattgtctgggtcctatggctgaaatatatgagactgtatcttcagcaatagagaattaactctgcttccaggagacaactgaggacaatggaagtagactgtgttttgggagtcccttagactaccctgacaggtgaattataatgtaccctttggctagcattgtgtttccatgtgagatactagttataaaaagataaagaaacatacctgatttttgttattgacaaggtctggccttcctcatgtattttttccctagaaaaaaaatatgtttatgcattgctagtgagttaagaacatctcacttacttatgatggctgttgtcattcctatttacaacactattacaatttactattttatttatttatgcatatggaactttagcatttgatcataattcttctctaagtttattaaaattgaggcattacactacaagtttttatgtaagtatacatacatacccaagtaacataacatttttatcaatattttgcaattaatatggtcttttattattttgtagtgctggagtcaaatccaggtctttctcgtggtaggcaagtgttgtgtggatgtgctatacatccaactacagcaaagccctttagagaaaagggtgatagtctgaggttgatagattacatttcaaattcagtaagtaatttttatcatgatgtgtgaatattgcttcctcaatattttattgatgtagccatcactaagagatttgtgaaaagaaaactatttattgatagtttgtttttaaaatgcccattggagtaaaatttcaactcccctttcttttcttttcttccttccttccttccttccttccttccttccttccttctttccttccttccttccttccttctttccttccttccttccttccttccttccttcctttctttttctttttttttttaggatatagcagatccattttttgcttattgtaagcagcatgcagacagattagacagaaaatggaaaagaaaaaactacttggctctacaatcctattgtaaaatgtctttgcaagagagagaaaaacagctgtcccctgaagcacaggtatgggaatcacacctaaatttattaggtttttttgttgttgtttttcagatctcatgtgtgttttctattgacatgtgatggaaatttaggtccaacatgtaaaatgtagtttaaaactttagttaataagcagtggtttttgattagacatgagtagtatttgtttccttagaaattatgcttcagtgaatctatggtgtagttacttgtaaaatatttcatgttgaaaaatttgtatttgcaagtggttatcaatcgaagatttcttcttggctagggatgggagcatgtgtttcttcgtagagctctaggaccccatctgaggacagctgttattaagtgttgattcatttattgcaactccagaaatggattgtatatcttcaggatcagtgataaatctgatttgtcctacttgtgaaattttagtatcttctctaagcataaaattaaaagatatgaggaatatattccattttcttttctttcaaactgcctgcatttttttctaggcaaggatcaatgcccgactacagcaatatcgtgccaaggcagagctggcgcgatctaccagaccacaagcctgggttccaagggaaaagctacccaggccactgacaagtagtgcttcggctattcgtaagcttatgcgcaaagcagagctgatgggaatcagtacggatatctttccagtggacaactcagatactagttctagtgtggatggaaggcggaagcataagcagcccgctctcactgctgattttgtgaattactattttggtcagtatagacactgatacatacacaatctccctgagaataagttgctaatgacagaatgggatgtgcaattagtgttttagaaaatcattactgtgttgtatatgtcagaggcatgcttattttcctaattgtagcctttgtaaattctagtgtttattcttaaatatactttaaattttgtttgaccaatgtaagtttatccaaatgatcatctctatggctagtttgctgctttgtgtatgttttatattagcctttactttctactgaagtaaaattggatatttaatttaaatagagagaaatatgcgcatgattcaaattcaggaaaatatggctgaacaaaagaatataaaggataaattagagaatgagcaagaaaagcttcatgtagaatataataaggtacgttggctaataatgcacagtatcccttagtagatcttatttatagttcttttgtgattttattgtatttctatgtttcagtttgaaattctagagctcttcagctctttcccaaccttcatcatcattttcattactgtcattctcactgcgtgcattcttacaccaggcacagttgtcatcctgcacacatagaaagccatgtaattttctcctgtctttagtgttagttatggctgttgctcctgttggtaggggtagaaactgagggttgaaaaggttgcataatttgtacctggcaacatagtaatcaaggcttagagttggagtttaaaactaacactgctaacctcatttcttattcttaaatgtaaacagcattataggtcttattttttagtttgttgaaaatttgaaaacccagtcttaaagtagtagacttttaaaaattatatgctaattttttaaaaaatgttttccaattgaaaaatttattgtatttcttcctgtctaatatataaagcacggtctttctaaagtgttaggtactaagtagcatgaatatttaaattagtatctaattattgttccaaaaaaaaaacctacccatttaaagtgatgtaattactaggaattaacatccagtactcagcaacattgtagcaaaaagactgttgggagtaaagtcacaagatctgcagccttttggtagttaatgttagccaagagaacccttgggatttttagtgttctcatgaaagaagtgatggaaatgtgattcgatagagatttgatagcaaattatgtgtcaaattatatgccaaactatatatgcatcattactgaaaactgtagaataaaagaaagtatttcccttctcttgagggtgttcaccatactagcaataattatatctttgtttttcagtaattatctgacctgaatgttacaataaatggaaaataaatgtgaatattcttgtttatttatatttgcacatataaaagcttcctaatttgatttactctatttgtagctctgtgaatcattagaggaactgcaaaatctgaatgggaaacttcgaagtgaagggcaagggatatgggccttacttggccgaattacagggcaggttagtttcttttcagttgcgtgcttcaattcttgctctctttgagatttttcatagtacatagttcctacacagaagtcactttgctatttaaataattgcattccatcagagcctaatcccctagggcaatgatttctgtctgagatacttgcagaccactggcagccgctgcctactgagaacctataacttaatttggttctttcatcagctatcttgttggcaattttttttcttttgctcaaattcattgacctgtcacttttgatgagctaagatatgaagcataagtttcctcttagtataatctttattcagtggtattagatttttgtcacaatttttccttcccattcccttcttttgtgaacagattgcatgtcactggtactacaaagagtgattcattttaaaaggtgaagatgagttgcttttggacatattaactttttcctattaataagtacttagtagattcagaaaaggaaatttggagttacttgcagatctagcatttgttttgtctgggtttatatttttatcacaaaattgtactctatagtttaaaatattctgtgataaaagacattttcatttattaagtaacttcacagaggattgaaaattgccttgtgtgaaggcaatctgcacagacacatgtatcatacatgatactgttccagttgactgaacagatgtgagctcaccagggtactaagcagtgacgttgatagatgttcactgtctcagaagccatcgtactacagattagtagagtacaaaagagaatttcatctgcttttttacggagtttagtccaatacgataatttctctaattaacctatggaacaccaatatagctggaatattgcaaagaagcacactggtatttttttgttgtttttaactatactgtgttagatttttaagcctcctctactttcctcattgttctaaggttttcaagtggaagtagtgtaattttcatgaagtttaatgtatttctgagaactaacgagactatgcagttgtagctttataatagaagtagttaagattatcactctgttttctttccctttgctaatataaagcagacttacctctctaagtgctggcttccttagatttagtggcaagtgggggaaatactgctttgtacttccatctttaaaacagcatgtactacttttattccatcaatagaagttgaatgtaccagcaatcttacgagcacctaaggaaaggaaaccaagtaaaaaagaaggaggcacacaaaagacatctgctcttcctacagtgctttataggcaagtaatgaaattataacggaataatagtatctacttttcaactagtatgtactagttagaagttattttacatgcacgaaagtgaactttgtacgtttcagaattttagttaagaatgtttcaggttcatttgaggctctgtagattgaatgaagagatacttgttcttcaggaagataaatcatatatcttgtaaagaactgagaatgaattttcataagctccaacgaacaaagaattctctttaggaaattacaaagttactttaaaatctgtgcctgttatattaaatttaatattttaaatttacttgtaatcaatacttatataattactaattatgatagacatcataataagtaaccatttatcgtatactttagtgtgtaattttgcttttgatctaggtagtgatgaatggtaatgtataaagatgatgaattttatattttaacctctctgttctttcttctctccttgcttagctacaattatttcatttccagacatagttttcttattcactttctgtacttaatatttaagaaaaatttcattgtagtgattttacataacaatagcattttctctaaataaaaaagacctcatttctatatttagacaaatcacttttttatgtaatgtattaattatattaagagagagattagaaaatgctgttgtgcttgtatgtgtgtattgtatgctataagtaacaaaaatcatatgcacatatatgttttcatgcatgtatatctatctgagatatgggagaataaattactgactttgcctgtagtgtaaacgttagtgcatgaacacatagttttcccaactgtggttgattctttggaaaatattaggcatcataccagacgttggagttttatgactgtaattacttttttgcttcagaatatgtttaaagtgatattcttttaattttgtgggttttttgttgtggttgttgttgttagtattaatttttgttattattgctgctttacatgtatattttccagagatattgaaaaatctagttcttttgatttgttgaacattcctgtttctttaagtctctcagacaactttcctatcattctgtacatctccaatataagtacatgctaagttttaagcccttggtgctcattttcttagaagtaaattgacttacctcacaagaagtgttaactgtgtgaaaatgctgttttgaaaaattcaagctctgacttttgtgaaagagacatagaaatgtagattatttatttaagagtatataagaggtttacagttaatggttaaaaacaaagttgttggtaaagaatttctttagaccttcaaggtagttttcaaaattagaatatttttcacaatttatgttttttcatagtttatgtttataaagaaaagctgaactaatgctaaatgaattttaagtaataattgaaagctatattgacaatgcattccctaaatatccccatcctttattgctttatctttagaaaacttttaagcttatattagaactaaactataacattctgtacattatctagaactagcagttggtattgttaaaatgatgggtgccattaaaagcatataaagtacttcagagtcctctagcacacactgtactcctgacatatttagaaggttaaggcaaggtgataataaggtcaaggctggtttggtccataaagcaagattcagcttcagaggaccagaaataccatagcagaaaacagaataatccagatgaaggcttttgaactcagactgttagaaatgagctctgtccctgtggacctcagtgtgactcttacttgctgcttttattaaagttgtggaatttgtaagaagaaccatgatcagcatcttcttttactgtgtgacacctgtaaactgcattatcatctcggctgccttgatcctcctcttacaaggatgccgagaaagacgaaaaacagttactggtaagtgaaacggacaagaaatagttggaattagtttgtttttagcctcaacagtacaaccctgttgtatcactaattcataataaagtatttttcacatttctaattaaatatttgtctttctaacttatatgagtaaagtacaatttttgttgaaatgacttattagtatttttttaatcttagcaatgtataattccttacataaggtacaagagctttctgtgctgtgtttataattttcattttatgatttggtatttctcaaatgctttttgttttttgaaggcaaatgaattttaagtttcattagcccattgtttggaaatccagaaactttgaaagcttttttcttttttaagagagaatcttactttcctgtcttatgttgaagttgttatgtcgttgaggataactttcaactttctagcctcctgcttcctcctcctgagtgttggattgtaggcctgtgccagaatgctcagtttatgtggtgtaatgactcaaactgtagagtttgttgtgttagtaaatactccactaacttaacaagatatccagccctgacaagcattcgtaattattttctcactgacttagtcaggttgaatcactacagatgttttattaaactgtcttttcttgttgctatgttaaaacatcctgacaaaaaacggcataaggttgaagagttaatatttgcttacagttcaggatactggtcctcaggctgagaagtcaacatagaagaatccttatctcctgactacagaaaggacatgcagtagagatgggttttcctacatcaaggaatttagatcagataatcctccacaggactagccttagaatatcccaggtgattctagattctctcaagttgactgttaacaataaccatcggagaggtctataatgaattttatcctaaaattattccaaggaagaaacagatactcagattttcttaaggatttatttatttattcattcattcattcattcattcatttatttatttatttatttattatatggtaagtacactgtagctgtcttcagacactccagaaaaaggcgccagatctcgtttcggatggtgtgaactaccatgtggttgctgggaattgaactcaggaccttcggaagaacaggcattgctcttaaccgctgagccatctctccagccccagatactcagattttaatagaccgattgtcatattatttcagaaaagggaatatgggcagtaaaaaaaactatgaaaagaaattgagaatttcaatgttttgtagtttcatggcatggcgttttattgcctgaatattctagaacaagttttcagtagggttgggaatgaccactcaacagaatgttgtgatgatgagtattaactacagaagtagaaataaaatggcaaatattttaatttgaaaacttgattctgcaaaagcatatctttttatattatagggatttatatatatttgtaaagtgaatttgggtattgcgggaaaagctcagttgatacaatgcttaccacacaagcatgatgatctgaatttgatacccataggccatgtaagctcgacttgatcatgatgcatacttgtaatctcagtactaggaaggcagaaagtgtagatttttatttatttttctgagctttttatgtttgtttgttttttaaattttatttaatcttttattacacttcagattttatccccctcttgggccaccctctgatttttccacatcccacacctctgccctcacagtccccatctccatggggatgtttacacacacacacccccaacccctactccaccagacctccccactccctggggcctctattctcttgagggttcagtgtatcttctctgacttggcccagacctggcagcagtcctctgctgtatatgtgttgggggcctcatatcagctgatatatgctgcatgattgttggtccaatgactgagagatctcaggagtccaggttaattgagactactggtcctcctacagggccgccctcctcctcagcttcttccagcttttccctaattcaaccacagaggtcagcagcttctgtccattggtttgatacagatacctgcatctgactctttcagctgctggttgggtctttcagaaggcagtcatgatagacccgtttttgtgagcactctacctcagtagtagtgtcaggccttggggtttcgccttgagctggatcctactctgagcctattgctggacctctttttccttgggctcttctctatttttgtctttgtagttctttcctacaggagcaattatgggttagagttaagctgacatcatattaaatggagaggtacttgaagcagtcccactaaaattggggacaagacaagaatgccctctcttcccatatttagtcaatatagtattcagagttctagctagaacaataagacaacaaaaagagatcaaggggatacaaattggcaaagaagtgaaggtatcacaatttgcagatgatatgatagcatacataagcgaccccaaaatgtctaccagagaatttctacagctgacaaacaacttcagcaaagtggctggatataaaattaactcaaatcagtagccttcctttatacaaaggataaacaagctgagagagaaattaccgaaacagctcctttcacaatagctacaaataatataaaatatattggggtaactctaaccaaacgagtgaaagatctgtatgatgctattgtttgtaggcttattcatttaggacacaatgacattatgttcaaaaaacaaaacaagaacctaacagttcacaatttttcataattttgttttcctggcagattctcttcagagtatatttaccatgtgaattcttccattgttatttactggtgttttgagataaatatatagcagtttagtttattattcattgtattttggtgttgatttgttaatctataaaatacctttagttgtgctaggaacatacctgtaagaatatttagttagaaagtaacattttgatttttctttctcagttccttttcatgttaaaattttttgttaccattgtacttaaataggagtttaaaagtaaatctacattttacatatttacttacattgtttcagttaatatgactgcatcagccaaaaaaaaaaaaatactttgtatttatgttgtggaatttaggatttaaaaacctcaggatttttttcattaatttattcactttacatccagatcgcaaccccctccctcctctcctccaagttctagtctcccattcccttctcctcccctccagatctcctccaagttctagtctcccgttccctttctcctcccctccagctctcctccaagttctagtctcccattccctttctcctcccctccagctctcctccaagttctagtctcacattccctttctcctcccctccagctctcctccaagttctagtctcccattccctttctcctcccctccagctctcctccaagttctagtctcctgttccctttctcctcccctccagctctcctccaagaagaggaatccccaccttgggtaccaatctggtctggtatatcaagttgcagcagaactaagtgcaaactctcctgctgagacctgacaaggcagcccagctaggagaaggggatccaaacactggcaacaagagtcgaagtcagacaggacccctgctccagttcttaagcaatccatagttgaagaccaagctacgcatgtgctatatatgtgtaggggcctaagtctagatagtgtgtgctgttaggttggtggttcagtctctgggagccctcgtggccccagaatagttggctctgtagatcttcttatgtggtggtcctcgattcttccagctccagtaatcctatcccccactagtttccaagacaccctgagctccgcctaatatttggctgtgggtctctgcatctgtttccatcagctgctggatgaagcctctcatatgatagttacgctaggctcctgtctgcaagcatggcagagtatcaatattgtcaggagttggctctctcccatgggtttgggtatcaggttaggccagtcattggtttgccattccttcaatctctgcttcattaaagatctcagattaaagagtaaaagtaagcttaatctaagtctatagtattgatatatcaaaaataaaaaatttgatagaatgaattaagtgttaaatgtttagagatgtttgaattttaagttacatttgaaagtacacatatcagcgcataaagtaaatatcataaaaataatttaatatactacaaaccagacttttggaaaactacttattaatccttttaaattatattttattaaggatttacttggcctactgagtaaaatgactatcttccccaaaactcagcagatcttttgtagagttttctccagatggtatattcaacacactgtcattaaataaaatgcaaaggtatggtaaaggagtaaaagaatgaatatccctaagaaacttttcagtatatgtcaccttcaaaagaaaggcatcatttccaaagtaaagataccttcttagtcagtgatctgtgacttgtgttggttcacaacagcattgttacatatgttcttgtaatatgtgtatacactgaattgctttttataatatagccatggtagtcattcttacaagagtagaggtatctttctgtttgtcattaccacactacctgtgtgtatttgagtatgtccgtattcatgtatgaatacttttttatatttataggaattatacttaaaatcagaagataagagatctataaccttaatttttcataaaaatttattcaggcaatgctcagagtgtgaccaggcagggagcagcgacatggaagcagagatggccatggaaaccttaccagatggaacaaaacgatcaaggagacagattaaggagccagtgaagtttgtgccacaggatgtcccaccagaacccaagaagattccaataagaaacacggtatttattcttcatttattggtctcagtgacatcccaatgtaaaaactttacgcagataaaaggtttatagcataaacatacactttgaagtcaatcaagtgttcatattgctcttaagtatttctatgaaatcagttttctatgttatatagcgtattatatttaactgaaaatctagtttgtaggttcaggtaaaagcctaatactgatcaccagcctaatcaatgctccactaaaacacacaacattcctgaagcctccctcagcaagtttacctgtcgaggttgcctttcatctctgctttatctcagtcctaacctttccctttgtgttgcaaacctgtgtgctgtgtgctcgtgaacagcatttcctttgtcaagtttgagtctttgtgaattgaggagccaaactctttctctttggtcacctgaaaaaaaaaatttttatttacatttcaaatgttattccgtttcctggtttcccatctacaaatccctgaccacatgtctcttccccctgcttctatgagggtgctcccctatgtatctacctgtctgtttctcccaagtgcaagattacaggcgtatgccaccgccacacctggtctgagctccttcccctttgatgctattctgtgttaccaaaatgttgttttccccagtgccctctgaatagtgtttgttagacattactgtgatggtttcactgagaatagccccggtgtgctcatatgtttaaatacatggtcctcagttggtagaactatttgggaacgattaagaggtgtggtcttgctgtgtcataggatgtaaggaggacaggctttgaagtttcaaataccttggcttttatgtttttttttctcttcaaactattcattttgtatttctttttgcccattttctgttttttattgtagacctgcctaagagtgattactgatagtcatgtgacacctcaatactagtctgtccttaaatctcttctgccaaagaacttagaccattactcttcaatttagccaggcagtttctaaggacaagagcagaaggcactctcagtgttcctctctccctcctgtttggctgttttgagaagtgaggtctcagcaatgagacgtgctagagtcatggatatcagctatggagagctacaaacaggaagcaaaccagcccaagagagagatttatcttacaggcagccagcatagaagaggagagccagctgagccctccgacattggacaaaggaactgcacgacttgaagtttgctcttctgggtaccagtctttcttggggccaatccttcctcactgtggccttgtaactccctcttggcatgaccgagcatattctgcaccattatacgttggaaacttacagtttgtattttgatttttatagaaagttacagttaagagaatgccttaagctgtaggaaagaatttggactatgggcttttaaccagtgttgtggctcaggaagtgtcaggacccatttgctgcttttttgaagcagaggaaaaaaaaaaagaaagaaaaattctgcctcccaggcaggacagggcctgttggcagatttcctggcctgctgaggcatagagggataagaggagctgcaggctcaaggctcggggctgacgattctattgaccttggtggaaggaacagagacgtttctggaatgcgaacaaatgtctgtgtacattttaccaaaattgtttctgttagcttgtggttttgcttcccatgatactatagtataagaaagctatgagaaatacacttgctgctagtatggtattaaccaagcagacctcccataacttcgtcttgcatgttctatctttcctgtaatcatcctcactccccctcagaggactgtttgacttccccacaggctgaaccagttcaaggaataccatggggactttcaaagttggacagagtgcattttttgtttgttttatgatatagccatgagactatgtgggtctaagaatggaatgtagtagttatgaataagatgttcctcataagtcttgggcatttgagtactgtatttctagtcagtgaatgtttgagaaggctaaggaggtgtggccatggcagatgaggcatgtcacttgggccggtagaggttcctgttatccatagtgaaatattgtcaaagttaagagaatgtttcaatgttaactttgaaaaagctgatattaacgaagaaaagaaggggactggagagttagctaagtggtcaggagtgctagctgctcttgcagaggaccttggtttaattcccaagacctatatggttgcttcaaactcaatctcatggctcttgggcctgttcttttattctattatgctgactttccaagcagaagtactggtaatgattctagatacttcttcatgcttagaccatatatgcttgtagcagcttaatcactaccacattctgctagttcagcaaatgggtcattcagtggcacaggaggagtagctcggtatgtggatatcaagaatgttgtctttttttgaaaggagctttgttgaacattaaagaaattgtcagttaatatcttaccatgaaataccaagccaataccttgattgtggatatctcagcctgaaaagcactagagagtggataagatataggggtaaaagcaagtttggaaaaactcctaggaagtagtaagtgcttgcttagcacaggaggggtcccctagacagtggcttcccgattcccggacattctgctgtttttcttgctttctgggatgatgatattcttacccatacttccaagctgtgcttattatgtaagacattaagtgattaagtaaattgctggtggttttatatacatgtatgtgtacagcagtggcttgaaggtttactgtgtgcctagaagtcatctttattgtacatcaaagtggtgaacctagaaggttatttagctcttttgcctttctggagatccagatggatctttatcaccctttccatgtaataattagtgaagtttctcattcctcattcctttataataattaatagaaaggataagtgaataaaaaactaaataactctggtatcttgtcatggataatatgtttattttaggcctgtcgatgtcctcttctctttagtgatagaagctttacaaagggattcctctcattagacaagttggcaaggaaagcctaatttatttcagttcaattaggtaatatttaacctcaaagtggagagatacatgataggaatgaaaattaattcaactactatgaaatccggtgtcagagtagctgaaaacctaaagctctcacacaatcagctcttctgcttacagtgctttttgttgtggttgttctcagattggctggtggaaggatatgaaagccacaatacagcaaattaactcattacattttgaggatatacattcatccagttgatttttacaattctttttaacctttaaacttgagggaaaagattttcaaggttgcttgtacatgagtttctctagattgtaatcctaattaactttaaatgagtatttgagagaaagtacttctaatttagaatgtgcagtgaaatttgttataacgttttgatactaaatttatacccaaagtaactatcattatgtctgctctaaagacttttacctatataaatttgatagttatatttttaagaatcttgcctatttaagtcatataaatattattttaagatgtaaatacgatttttattatcaaatagtcactgttgaacttcccttttaacttctgtgacagggtttcccatagcccaggctgcgctcaaacttattatgtaggcaagaaatcgaactttttgagtatcctgctttaagtctcaagttctgggattaccgatgtgtaccactgcttactgcttaaaggtagtggaatttggggaatgaaggctagtaatgaggtggactataaagtctcatgtaatacccaactttgtttatgtttatttagaacatcagacagtctgtacatcaacccctcaaatcccatgctttaacagtgactttcttttttccctcttgacatctcccaaactggtgcaactattgctctgatttctttttcaaatacttgaagtttttgtcacaagtcttttacttgtttgtttagagttactccaagatatattatttgagtctattgtgaaaggtgttatttctttatatagtagggctactgaatttttttttttttgagttaaccttgtattaaactactttgctgaaagtgtttattggctttaggagttcccagctatcacttttacagtcacttatatatactaacatatcatctgaaaataatgatactttgacttctttctttccgatttgtatctccttgatctcctttagttgtctaactgatctagctaagacttcaggcactcttgaatagatttggacagagtggacaaagcttgtcttgtttccaattatagtggaattgctttgagtttctctccatttaatttgatgttgtctataggcttgctgcaagttgccattattatgtggaggtttgtatccctaattnnnnnnnnnnnnnnnnnnnnnnnnnnatatcagtggtctccattcaccaataaaatgagacagactaggtgaatgggtatggaaacaggatccatctttctgctgcatctaaaaacacacctcaacattcaaatagactctaccacggagcaagatataccaaaatataataagatacacctgaatagcaatctggtatagctattcaatatctaaccaaagagacttcaaagtaaaactaatcaaaagatttggggaagaaacatttcatacttatcaaaaaaaaaaaaaatccatgaagatgacatttcagttcttaacatctctgcctcaaacacaagggtatccaagtttgtaaaagaaacattactacagcttaaatcacatatagacccttacatcctgatagtagtagtcttcaatacccttttctcatcaatagataggtcatccagacaaaaacttgacagagaaggtaacagatattataccccagtcggacctaaggctagttacagaatattttactcaaacctaaaagaatataccttctgctctatttatattcctaaactgatgacttgcagtatgtaattgtaaattatcagtgaaacactgttgcaagtattctctatttttatgtgagttaatagagtcaaacctagtatgacattatgaagttgagaaaatgactgaataatgaagttctagaaaggacaatgtcagggatgacgaaatattttcaagggactctttctgtctttattaaaatgaagtgcttttaaatacttactaatctaatgaatgaataaacacttatgacacaaggttttttcctttatatttatgtttaaatgatttctgttaatggacaatagggtaaaatggatctttttaattaatgttcagataataaagaaaataacaataatcagaattctcttataatagaacatgctatttttctttggtcccactgatgccttgcaaatggtcaccagtgttgcttgaagagttttgtgcacaggacagagactcaattaaatgggttgataatcccattaaatggggatatatcttattggtcaatctctagcccagcttgttcaagaccccagattcaatccaagcaccctaaaaataattacaaatagtatataaacaaacaaaatagtctgattttcccccaaattgtctatgaaataagcacaattaaatctaaattcaattgacttgagtgtgttcctgcccattttgtctgcatttctaaggcagtacccatgtttcttctctcagcttgtcttagatgtgtgtttattgctgtgatgaagacactgtgaccacggccaggttaggaaggaaagggtttatctcacctcacagttccatagcacagtcagtcactgagggaaatcaaggtagcagcgtgcagtcaggagctaatgcagagataatgcagagcgaggccgtggggaaggtctgcttactggcttgctcctcatggcttcattagactgttttatgtagcaggctgagctacagcccacaccaatcatcaataaagacaatgggccagtctcatccatatatggtaggtgcaattcttttctattttacattctttctttccaaatgcctggtttgtgttcagtcaatatgaaagtagtaccacacaaatactcaaccaatttaagttactcagctaatgattctggtagcacctatgtagctgtgttcacaggttttgttttgttttttacattccttccttatcaatgttgagcttgcggatttcactcttactgaaatggtgcaaaatctatttgtttttaaaaattgcttaacaagttttattatatcagtttttaaagggatgcatcatttgtaccatattaaagatattaaaatatgacttagatttaggaggaatcttgttagttaaactttaggtgtaactttaaaagctctgtataacatgagtgtttattttcatatttcaccccactggtctcagaagtagttactgttatagtttcgagcttggtagactcaaatgttgagacttggttccagtctcttgttcctgcttatattttatgggtgatgctgtagagctcctgtgaagacagcctggccttgctgctgagagccgtaatggtgccattctctctgcactgtttttgtgtggagagaatcttcttccttttaggcctagaaattacatttgaagcaaataaatgagagtcttcatgtctcttttgaagttactttaaaaatcatatttacttttgggtatactttctaataactttaatgtagcttgaaagcttcctgattttgtttttcatttctttatactgtatgcatctggtgacttttcatcttttacacaagtgccagagggctttcggggacctgtccctttctcgtcgtgcattccctcatgcatcagttttactttctttgaagtcctgtaatttttatttcccatgactcataaattttgggattttttaaaagatgtatttgttgacatagtaaatacagtagtcacagtacattttcacagtctttactgaatccttctttcttgtagagaacactgcttcttttaggtcattgttttggagaaggaattaacaaatttaatgtgtttccttctcttcttacatattaatttattaaggcaaggggcaagccatagtttgcatttgttttattaatattgaaaagtttattaaagccagtatacaaattaatgggtcttatcactccattttatatgtgttgttgttaaaattgctaccgctccagtggtagtctttaattgagaggtaatgacatattctatctaatttacacatgtacaagttagtcatagcagttttaagattgcagtgttgacaatctgaaaaatgtttattgatgaatattttttaatgtaagcttaggaaaatgcctattaaaacaactataatgaaaattaaattcatgatatttgggaccgttcaaatttttctgatatgtggcttatcatattttttaagtaaaaaatgacagacagaggcaagtgatctaagtggctgataaaattgttcataactagataaattatagttacttgcctaccccctccccacattgagggttataaaagccttggagcattttatgcaaatgattgtggaactttaatggggaatttgagtattttccctttaatattctttaccattctgaagccttattgaaatggcctatctatgaaagttaaggtacgatgagtaccaaaaaagcgaaaaaatagtttaaacttttgccaaatcttgagtgtttgtattgcacagtgtagtgcaattgtgtattagttgtaaatgaactatttatatttattttatcaaaacaaaatttctgaaacattggatggaataaacagtgtgtcatagtgacttatactccccatctgcagataattcccaatagaacattttttgacaattattttttattggttattttatttatatacatttcaaatgttattccccttctctgtttttccttcacaagccctctatcccatctccccttccgcctgtttctatgagagagcttatccacccacctacctactcctgcctcactgccctaggattccactacactgggacatcgagccttcataggaccaagggcctcccctcccattgacaacagataaggccgtcctctgctacatatatggctggagccatgggtcccaccatgtgtactccttggttggtggtttagtccctgggagctctgggggactgcttggtattgttgttcttcctgtgctgttgcaagtccctgcagcttcttcagtccttccccaactcctccgttgtggtcagaaaaaatgttaatataaatgcattagtgttgttgtaaatcttaagtttccttgtcttgaatgactttaattggattttggttagcagtgaaaaatcacagagtatgacatttgtgcattttggtattaattagcaagggactagctaatctgaaaaactgacaattacaacattgattcatttatattagaaaatagtcctagtgaggattatttgacaccactctcattttgatataaatgttttcttgttgttgttgttgttgtagttgttgttgttgttgttttgttctttatctcagctactagaataaaacctaagtggcagcttgtgtcttatctagtctgtagagcagtggcctgcagatggggattgtaagtcttcagcagcgtgctatgtgagctagagagtttaaccatactggctgtaaacaccattatcttatttcctttaaacatgtggatgccttctttcaaatgatatacaaatacaatccaaatgtaggatataaacttttttactaaattattttagctaatcttaataatttgagaatttaagtctttgccttctaccgttttttgtggttacttagggatttttttttttttttttggtattgcacaagcatacatacataggtacatgtgtgggaaaacaatagatatgatatgattccagtttcagtgttttagttgtagaagcgattggtggtaagaccagaaaaattactctgagtaaatcatttcatgtaagtatgaaatgctgaagaaagtcttggaatattagttctttactatcaaatacgtgtgtatttatataaaaaaggtagtatattaaatgacataattttagcaatgtgcattggaacaatacaacattaattacaaacaccagttttccaacataagatctaaaacataacaaagaaaatttatatttatcatgatgaagcttaagaatttttatgggttttctttccagagaaccagaggacgaaagcgaagctttgttcctgaggaagaaaaacatgaggtttgaataagttaaattcttttttcatagtctgaacttagggaaactttcttgctttgagttatttccattccattcttcctattcagatttgttttgtttacttatttttttgtatggcaggaaagagttcctagggaaaggaggcagaggcagtctgtgttacagaagaagcccaaggctgaggacttaagaactgagtgttcaacttgcaaaggaactggagataatgagaatcttgtcaggtaaattgaatgtggagaccttgtccttagggggtcaaagccaaacaaatgcccatcattttattttttaacgacagataaagtaaaaacaactacagaagaaatcctttataaaatgctatttagtgagaatgctactttggaaatacattttctccacttattaatgtgctagacatgcttatgttctaaattgagatataaataacagtgagtatggatcttgagcaagagaattcattttctcttgagaataaattggtaatgctttatgtagagattctgccgaaatatttgttctgagtaccttgtactgagattattatgtttatctctagaccacagtttctaaagacccttcgcatatcataaaagttgaagtttactcacattggtgattatagagtacgattggcaacaactttcatagcacttcctcattgctttccaaaatgaatgtgttaaatgcttctctgttatgaaataaagaaaggtgaaaagatggcctagatagagtttattttttgtttggtttccttctttgtttgttttgtttcgtacttttaaaattttttaagtcaaacatgataccttccaggaacctcagctgacgctgctcagtggctactcctcaagcttcaaagactttgtatctctggctaaaagaagaaactactcaaagtgatcgggggaggcgggcatggatggaaagcaaaaggtgctcatttaaaagagtgtctagtctttcagggtccactgacacacagtgtggaacagtgtgacacacagtgtggaagggagttttttctgagttcttttagaaatgatgtttaataaatctatagtcaattaactggggacaaagaaagtaaacatttcaaaaggaataaaaaaatgataaaacacatatttgtattgtatgatttaaaacatttactattaaaatggcgtcatgtatgtcagtcactaagaatataacttctgtttgtgttacttcataaaaggcattgagttgtaaagttaataggtttgtttttttgagaagattaggaggaagtaaaaattctagtgaagaaataaaaggataagaactgctctatagattaagtcctatcacaagttaaatttctttcaactttgagaattacccctgaatagttgtcttcccattatgatttttgaagactgtcagtggtgatatcagaagcataagtatgacttagttgtattcataaaactatgacttttttttaaatgatagccgcatataattaacaaaactcaatgaaaggaaattctcttgagctggagatacggttggggagcttgatgaatttgaaattacccaagttttcatgctgctgaccctcccttaactatgggaatctctatagaacattatcttctggatcatttacgttaggatatatagatttttactgggttgtattattttttggatatatttgatattagaaatgaatacagtttttatttcaagaagattatttttttctagggtattttcaaacgattatatttcagttatctttcaaaaaataggtttcatcttctagaattgttaagatttttttgagattattacccttcttatctatttcatggctttctattagaacacttattcctactaacattattagaataaatagcatctagaattttgtcagtttttggaaggtgacaatatttgctactctagaattgataatacagaaagctagcttctttctctgtttgccttattaagacagaggagcataaaccatctgtaaaactttgaaaggaatttatatgtacacaattgaatgtttccattaatatttgctaggttaaaattggatatgaggtaatatcacaagtgttttgttttaatatttattttttttatatgagtacactgtctctgtcttcacacacaccagaagagggcatcagatgacattacagatggttgtgagccaccatgtggtggctgggaattgaccctctctgagagcagtcagtgctcttaaccacggagccatctctccaggcccacaagtgttttttagttgtaacgttatcttttttttttttttaaatatgttcagtttagacaccactgttcttggatttaaattttttatataaaattttgtttgcttagtaaaattaattttatacttaatatttgtcggtttgtctggcatctcatttattttggaattggcaccattatttgaaaagtcctttctccaaagtcatatttttatggttgttttgtacctttatcatgcatgcatagtattttatctctgattttaatatacctaatttattagtcacagatacttattcatttacttaattaatttgcaatcttagggactaaacccatgatttcatgatgatctcttaaatatgacttttttttcttgtaaagatacattttaagggcagggagatagctaagtcagcaggttacttactatactaacacaaagaaactaagttacattcccagtattcacaaagaagctgtgtgtgtaagattttgagtataatccctttgctgtagaggaagagacaagaagatcttgaggcccattgacctgctgctatggctttatcagggaacctctgatctcaatgagaaacattgcctcaagtaaatgccattatgtatttttggaaatgattaaattaatttcaccaaatgagagagaaataggattatcaaggttataaaaatatttaatttgcctttaatataaccttgaggaatttttaaaaacagtacttccattttcccatcttttattatgttttttattagatattttctttatttacattttaaatgttatttttaaacttaaacattacctgataaattgccctctagagaaagtacccaaggagctaaaggggtctgcaaccctataggtggaacaacattatgaactaaccagtacccccggagctcatgtctagctgcatatgtagcagaagatggcctagtcagccatcattggaaagagaggtccattggtcttgtaaactttatatgcctcagtacagggaaacgccagggccaagaagtaagagtgggtgggtaggggagtgggtgggggagcatgtgggggacttttgggatagcattggaaatgtaaatgaagacaatacctaattaaaaaaaacacagttaaaaagctaaaggactacttgagacctgttaaattgtgatatctctctgtgaacatatttgctttgataataatgttctatatttagattgcccacttgctgatgccgtttccttttttccacctattatcctcagaaatacttgataaatgaatcacaggcacttaataaactccatagaagcattggctcttttttatttaataaaaatattatgattaaatttaatctacgaacatcctcagaaatacttgataaatgaatcacagacacttaataaactccatagaagcattggctcttttttatttaataaaaatattatgataaaatttaatctatgagcaaatcaggtcactgaatataagaacatgtatctagtaggtgtgttttaaaagtttaaaatgagaattgctttttggtacaattagaatgcatgcacacttatgtgtatatgtgtattaggtaaggaaggaaacttggtatacctataaaagagtagacatggaagaatttttctctttcaaagtatttgattctttaaaagttgaattttagagataagcagtgctttcatctccatgagctttttactctgctattaaagtgagagcaagactgaactgtaagcctcatagtttatattaaccaggtaaacacagtgtgacaccctttcctcctgtgtgagacacacaccaggaaagagtctagaaaattcttatctgtgaattttcttaagctgatgccttttattttattttgtatatagctgttagaagcatgcagataggaagtaatctgtgaagctatttcagttttatcgctaattctacactattaattgcatgctggaatctcatctgagtatatggtgagtttatatagatactgatccattttggatataaggttagcttgatgcctaagtaatgctatcagcattttgatttttttttcacattttaaatgtctgacttcctaatgttttttcctaaactaaatttgattgcatcattaaactactagggataccagcaagaattcatgtataatagattttatttcaagtattagtctctaatgagtctgagtatttagatttttaattaacttttttgtttgtttgttttagccagtgtgtagggttgtaaatttcctggatcataattgagtttttctctatgagatttgattggactgatagtgaacctaaatttgactgtcattttgttaactattttcaaagatatttttttcctgttctactacctcttgagctataatcctggccctataaacatggtcattattttcatgttactgaatatcactaaaaatagattacttaagttactttaaaaatattcttttttttttaaggaaagatagaattaaatttcatagaattcttacactgttttgtttatagaatttcttcattattggctttttataaacttctcatatcaaaattgctatttttattgaatgactattgtatgcattgtgctagtgactgagcaaggtctagctcacactaggtaaatgcccctcccatctttcttctttgctgtttacagtctcactaaattgccttcttttgtgttttaacaaattattttaatactttgacaacatacttagtgttcctaattctcatggtagattgaatataaaaggcaaagcagaagtgctatagctacatatctttgatgtatttatttcctataatacatatcctgaaactaccttttaattttaacagggttcatatcaaagcagaagaaaaaaaagcagtattccaaatctagactgaatcataagggattgcttatatttaaatgaaggtttatacttatgaccgcatagtaactttatgttctgaatttttaacattttggtgatgtggtgggaatgagtttgagacagggttgtctaggctggcctggaagtgtagactagacaggccttaaatatacagtgattcttttgcctctacttcctgtgtggtgaaactgacaattgtgtggtttatttttaaaacaattttaaaccacagttttaatagtcaactttcctgttgctttataatttaagtttagtagcgtcttcgaatggaagctggtcctccagctgctctgtctccgattattctaggacaatacaaacaaatccgtaaatatcacctgttcccttgatgagtaatacaaacaaatccgtaaatatcacctgttcccttgatgagtaagcaagtgtcctgtttaaacacctctgttgagctgtaattttcatcccttaagttttcactcccttcaatttgttattttttttttgaaactatatcttttactatgtagctgtacctggcttttagtaaaacctgagggttttttctacattttaggaggcaattttgtgtaataaactatttataatcactgttggcttgaaccctttgtaatttgtgaactttgccttcatctcttcttagtttaattttactattaaaacttatggacaataatgcctgctatttaggttgtctggaatgataaatgtgatgatgcaatgccagattaggtaatgataaacattccccgtgtactaattagaaaacatgtaatttttcatctcattctatgtgttcatcttaaattattttgctacctagcaaggcaggcaatgttattactactgagatggttttggtgagaaaagtcacagagtcaagttacttcccaagttgtataactaaaaagtaatgaattcagacttgtaccatctcactcaaattccacaatgtttgatattctatgttttagttccctgctgcttaaaacttgtgtgtgaattccacacatgtggcagaagccattaatcctaatatttgtgggtcagggctaggagaataattgttagagaccagtctgagttactagtcccatagtgaaactcttccccctcccccataaataaataaataaataaataaataaataaataaataaataagtaaagctttgtaacaaatttgtgtacaggctagttggtgggactcattccatggcccatgttctttttggtttgttttttttttttttaatgtttttgttttgtttttgatgactttttggccttcgttttttaaggttgaatgctacaaccttattctgttaagcaagctatttcttaaaattaatatttactaaaatactttattcttttaaactttataagtcactgtgttattttttggttttactttatagtgaataagaattataacactaattatggagagggaattttgtccaagcttctctgggatatttaaagtttgagaaggtgattttagataacttattacttatcaacattttcatagtcaatgagtataattacattgtacttatatatataaatattacatgcacacatacttagtttacttatataacacaaatttaatggcacgtaatttattaaagttgccatttaggtaaagttgtgctatgcacacttctactcttttaatcattagtaatattaattttgttcctctcttaaaaatagtattctgtggttcttctgccttagaaaaagtgcatcactgctcaaggttaaagaaacataatgcaaagctaaactttagcgcggcaaataattaatcactcctttgtacaaaaaaaaagctattcaagcattgcaactttcattttgtgaatgagctttgtagatcaaatgtccctctcaaaagttggtctcttgattatctgtgatctggaggattactgttgtagtagaggtgggtcatttaagcataccagtgcatagtaatgaatttcggtccattaaattcagtaagcttagacaatgagactattttgtactcatgttaataaaatgtcagcttgtccttgcctgagaagtctcatgctgttaacccagtcttctctggagcttatgtaaatagacttccctagtcagaagtcataactgcagagtcacatggcatagctgatcctgatgcctgttaagatgccttcctgtgtctgcaccgataatttaggtagcagattgtgcttttaattttctcttttctgcttaagaatatagccttgaaactattaaacctgccccctgcaccgcacccccactttaccttcttcagttcattctctaactgagtcgtaggtgtgttgttagtactgttgatgtacacggattggttgttgactagtgcaagtcaaataatcattttcttatttactaagggactgtcttctctccagctcctcctctgctttatctaagtcaagtggcaatatttttcacactagtgaaaaacagaacatgagacttatctgaaaacatctaataactaggagagagtgtgggaagaatgtgaaaggctacaatttgaagattacatgtgcacttgtcttattactatgataaaataccctgagaaaagcagtttgagaaaggaatgatttgtttgtttacttatttttgcctctcatttcctgggtatagttcatcagagaaaaggagctatagtggcaggagcttgcctggggctggttacactgcacctgtggttaggaagcagagggagaccaatgcttgttctcagcttagtttcttccttttctgtagtccaggatcccagcccagcatgggcaggtggtttcacctcctttaacccagtaattccacacaggcatgcccgtggactcatcccccgtgtgttttcagatctcaggcttacaggtgagatgagggttgtagtttattggcacagccctgtacatataagaccctggtttattctcctgcaattagtcagccaattaatttgaggttcaatcatgatagtctgcagagagtctgtgtctttaaggaatgtagatattatttctggaaaccagttctttaattttgaagagagccctacataattagtttaatatgtgtatattgtgatgtttgctggtgtgtttgattacctgtgggcatggaagtcaactttggtcaccttttcttaaaatcggtctaccttatttttgaaacagggtctattactggcctggagtttgccaagtaggtgtggctggccagtgaccacaaagaatcacttctctgacttccccagcactagaattacgaatgacttcacagatgggtttttgttttttctcatttttgttttgtggactttggtttgggttgttttttttttatgaaaaagtagattctaggagtcaaaattacttttctatctagttcccaaaattgatttgaaaatacctttaagtctcatattccataattttgtaatatgagaagagaaattttagaaatataaaggttactcaaatataagaaattctaaataatttatagaaaagtatgttagtgattactatttttaatattcttaacctatgtttttctcattttgatattatacattttacagaccatcttgacaaaagtctgagttaactataagtaaggcatttgctcatttactgtttattaaaaaggactacagtagaaatttgctttagcatgaaaagcttgtcctttttgttcaaaacaaaataagctgattttaaaaataatgaacatgacttaagttatccaggtatgattatcatactttgcactgcctatgatgtgactagccacttttccaactgatagtagattgttcttcattttagttcttaacttggaaacagtttccaggcatgtaacacatttatcctaaacttaaatatattatcattatcaattgcagaattatcttttcaaattatgatgcatttaatagaatttaaagatgactataggtctcccaatatccagcaagcacctttgtgaaaagagttcccttgaattttgttctcattttcttgtgtaatcttacgttttattaataaaatccataatgcagatttgggctgatgttgtcagatggctcaatagctgacttagcactgcttgtaaacagcagttattctcaggcactgcatccctttcagccagataaccgctacactcctgccctgtggtctcctgaaaatgccataatccgtcaaatgccacattaaattgagagagaaaaccatcagtgcctgcacagttatgtaaaaggatgagcgcgcactgagtgagacgttctggaagagcagtaacctttccctagatgtgtgtcttgcccattacatttttgacacaaaatgttgcaaaatgatttaatggtggcattttgttttgctgactttcccttttttcattaaacagaaagcaatgttagattaggaatgtgggggaacggtggccaggcactaaattacataataagaatcaattttcaaagtgaattaataataatatttaaaagtgtgtacttctttttctcttttatatttttgttagctttaacataataaatcattgtcttaatcttattgtccaagttatcttttcttatctttcaactaaattgtgattataaatgacattttaacaaatctgtaggacttttacagctttacttaaagtatgatgcagaccacgcctgtttcctgtggcacagggagtgccctgtgtgtgctctcatgtggccacgtgtaagtagagcagtgacactgtatgcgtagacgccatcgtctaagagacagatgcctgttagctttatgattcacatttacattagaaataaatgctttcatcttgtcctatataatacatggtaaagctttcttgtacttatggaaacatactacatataattgggtaaattaacttgacagattgcagtttctaagtcttttgcacttaatttctttgttttattgttgatatgcaatacctagttgtgtgacctgtcacaaagctattttgaaaaaatgagaatgttatatgtgcacaattttagtatcttcttttctgaaacagtatatcagatgtgcttgattatgcatccttttatctttttgctctccagctttataaaaaaatacactttagctaacataagttggagtagcccagccccaatgccatccattgcttccttctcacttactaagatttcatcaggagacttcattgttttctaagaactcctagaagaattagattacatttgctgatgaatgttaacagttgcttttttccctaaatatcttaatagaaggacttagcttgttcttagagatccattatcttccttcattttacttacttacttaactacattatatgatgtgcctatatgggattcaactacaaatgacataagcacttcgttaataatgtgtttttcagtgtaccttaggtgctgagcaagtattgtcggaaggccatcaaataaaaagccttggattttgggtacagagaaattttctaaacaaccatacaatctctatttattctttatgttcattaaaaatttaattattattaactaactattccttgtagtaatggtacttaaacagtggtgaaaagattgcccaggaaaacacagacaactgaggtttctgaaggaagaaaatggcagagatgcaacacgtattttcagaaaatttattactctagtttagaaaaccagacaagttaaaatattacctgtatttcatagtagtaggcaattaatttagtctgatttttctggacataagcctagcaataaaaatcacaggcattaattgtgaagctgaggctattaaaatagaagggttgtgtgtaaggatctttctagatgcatatccagaagttagcacagatttatttctattgattgcgttccgtgtgcatggcactgtgttccacaaggtcatttccatccaagtttatattccccctcctgcctccttccctttgttcctttgtctccctagaccagtggctagcaaccctccctaatgctgtgagcctttcctcatgttgtgatgaccccaaaccaaaaaattatttttgttgctacttcataactgtaattttgctactgctttgaatgcttttttaaatttatttatttacatctcaaatgccactccccccccctttcctttactccctcacagagtctctgctcccattctccctctgctgagggtgggcaactcccattattccccaaccctagcacatcaagtctctgcagaataaagtatttcctctcccactgagaccagacaaggcaactctgtcagagaacagataccatagagacgcacatggagactgacctacatatgtctgttacatatgtaccgggagcctggttacagcccaagtatgctttttgattggtattcagtctctgagagctcctaggggtccaggttagttaactctgttgggcttcccatggaattcctatccagttcagggccttcaatcctttctgccagctcttccaaagagtgcctgacctccctccagtgtttgcctgtagatatctgcatctgtctcagtcagctgctgggtagagcctctctgaggacaagcatgctaggctcctgtctgcaagcataacagagtatctttaatagtgttagggattggtgcttgcccatggattgggtctcaagttgggccagttattggttggccattccttcagtctctgctccttctttgtccctccatttcttttagacagggcaaatttggggttgaaagtattgtggatggattggtgtctttatccttatccctcagtgggggtcctgtctggctacaggaggtgacctcttcaggttccatgtccccactattaggcatgttggctaaagtcactcacattgacttctggggcgatgtacagagtgtctgatatgtgctccctgtgaaaggatggttcagcccaaaggagtcatgacacacagcttgagagttggtgtcccacccagtttttttcatttctgcttttatgtcatacatacatgcatgcatacatacatacatacatacatacatacatacgtacatacatgtatgattttgtgtctatactatttaggattcacatatgaaagaaaatatatttatctttctctgattgcttagatcccttaataagattgtctctggttaccccaacttatatatttagtatgttcttcatagtacttattatagtattgaaaaatatttataaccaatttaaatgcctagaattagggggagttagtgaattattattcactaaaacagtaatttatcttctcttcatcacctatttcagcatttacaaagagtacttgatggatgatttggctcaaaaatgttgttttggggtaggaataaaggtacatgttattaatcccaatatttggaaagcagagccaggtggacctctgatttctaggcaagcgtgctctgtaaagggagcttcaggctagtcagtgtgacagaggcagagcctgccaaaaaaaacctaagcaacaacaaagagcaattttaggggctgaggctttttttttttttcaattagtgaagtgcttgctgcccaactatgtaaacctaaatttgatctctgaaccctcataaaaaagctgtgcatagtagtctgtacctgtaattatgtgctggaaacaggagagtcctgggagaatgctgggcagccagtttagccaaatcaatgagctccacaaggcagaccttgtgtaaagaaaaaaacgaaaaagaaaagaaggaaggaaagaagagaagagaaaagaaaatagagtgattgaggaaggcacatatatgtatattcatctgatttctggctctttggtaagtggggaaagaaaacacattaggaaactgagaacacaagtgaatcctgggatgaaacaccatgaacaaaagcaacttaaacaggaaagattttatttcactcacagttcattttcaaaagcaataaggacaagaattcaatcggggcaggaatctggaagcataagctgatacaaaggtcatgcagggtgcttttactggcttcgtctccctggcttgatcagcttgcttgcttatacaaccaagaactaccagctcattggtggccccacccacaatggactgaaacctcccgcaatcaatcacttgcaggcagcccaatcttatggaggcattttctcaattaagaaaatagagttatgtctaacatgactattcctgtgtcaagctgacataaagctagcacaactgacttggttttagcttcacacacaaatgtctcactgttaagccacaaactttccttccttggtcttcccgaagatcacacattaatattgacattacaatataaaacattttacaaacttcaaaagttccagtctttaaaaatcaaacacttaaaagtccagcctctttaaaatatccactctgttttaaaatccaagtcttttaaaaattcagtgtctctcaattatgaactcctataaagtaaaaaatgagttaaatatttttttttatgttaagagggacgagtcagtcacaatctgaatgaagcaaaccaaattccagctgcagataactcagtaccttgtgtgcagggtcgactccaaatcttctgagctcttgtagaggactttggtcacttctcaggctctgccctgtgcagcacacacagcttgtcttctaggtgctactccagtccactgttcctgtttttgttcgtcatctcagggtactgggatctccagagtattgcctggcttgctacagttggactccactttcaccggtagcctatcctgtgctctggttatggtgataagccttggcttttcttcattgaccccttcaatcctgaaggttcaactgctactgaggctgcacctttaccaaccacctatccgtgcctctcagtgccagatctccactgctctccatgaccccttaggcctttaaaaccattgcctgggtgacttttacactaccaagtcgggctgccagcacaaggtacaaccatggctaactctggaagacagttctgtgctcttaggaaaccacttcccggaagatttcaactcagtgatgatggtgatctaaatcagctaatttcttagctctgcagctgagcattatccattatcccagcaaagcaaatgtgttactatagtggttcgggtctcttgttaagcattctgccccagctaaccaaaccacatattctcaacatacctgtcagagtccttaagggccacgcaaaattttttttgttgtttgaaacttcagaagccaggagtctttagtcagcactgttctcaaaactctttatcttctaggcttatatagcagacagctctcaacactcagtgactgtcctagtccaaagttccaacgtccttcccaaagcaacatgctcaggactgtcacagtaatacgtcataagcttggtaccagtttatcttatggttactattgctgtgatgaaacactataatggagagacaagggtttatttcacacacattaccatgtaattgttcatcatcaagaccagtgagggcaagaattcaaacggcataaatctggaagcatgagcagatgcacagacggtgtgtgtgtgtgtgtgtgtgtgtgtgtgtgtgtgtgtgtgtgtgcgtgttctacctagcttgttgcccccagattgatcagcctgctttcttacagaactcaggaccaccaactctggggtggctccacaatggattaggccctcccacaatcaatcactgagaaagtgccctacagttcacctgcagcccaattgtataaaggcatatcccatttgaaaaaatagttatctcttaacgatagcttctgtcaagatgccataaaacgagccagtacactaagtaaatttaataacaacaacaaaagacatgaaatagagtgcatcctgctttattttgtgtgccctaatttaatacaaagagaccatggatttcttttcatggctcaatttgacttctttatggataatatgcattctaagatgtatcctttttgcattcatcagagcattcctgagcctttctaatttaatcaacatgaatgtttgtgttgtgtttcttatgtcacaaataccagaagagactaaagatcaaaaaaaaaaaaaaaaagtttcacatagcagaatagacttagttgcctctgcctgaatttgtattctggatttctttctaaatcacatagcagtttcaaccaactatattaggattccttctgtgggatttgtcatttcactccttcaattttgaggaattgaacatttctctttaaaaattgagtgagataacctaaactcaagacaattcattctcttttatatgtggattcgtgtgtgtgtgtgtatatgtgtgtacatatgtgtgtatacgtgtgtacacatggatgtgtaaatgtgggtaaagtctaaaaattaaagtccagagaggttaattgagaagttctgaggaagacaggtggcaaaagaatcttctaagttgtaaagaaataaattctcatattctcatattctctctctctctctctctctctctctctctctctctgtgtgtgtgtgtgtgtgtgtgtgtgtgtgtgtgtgtatgtgtgaatgacatagcaaccttgtcaactaattgtagaaataattgataaaaaataaaaatgaggcagatcataaaaggattggataattttcagtcaagaggaaagaatggagtaaggcatttcagaagaagagaaggactctgagcatgtccaggtagatggaaagtcatcaaaggcaagggtgttttaaaaagtaatacttaggtttgtagggctagaatatgctttgtgtgcataatgtttatatggatgtatgcacacatctaggtggacatacttgtatatgtagctgtttattactccccatgttagttttttctaatttattttgccttgaggaaaaccaaatttttaaaggttgttgatagttcctgtatgtgtatgtgttttgataaaatccactcccttccctccccgccaatccccccttcccttctgcatataccttttactacccaacttcatttgttattttaagtccactgagtatacttagttctacttgtgtgtgtacacactgttgagaaagagagggtggcagaggcatatctttgctaccaaggtaaaaagtgagctacaaaaataactggtccagcaagatatgcctactgatggtggccagaattgtggcaataaccaaccactttgtacttaagtctgcactgaatctggagctcactgatacagcaagctttggagatagtcctttcgtcttctaactccggctaatagatacacactttatctgacttttgctggatcctggagatttgaacacacatcctccctcagttttactcagtaagtactttgcctactgaaccattgattttctaaacctttgtaaggtttttgttgttgttgttgttgtttttatttattttttattttttgttttttttcaaaacagggtttctttgtatagccctggatgtcctggaactcactctatagaccaggctggccttgaactcagaaatccgcctgcctctgcctcccaagtgctgggattaaagacgtgtgctaccactgcccagcttgtatttatttatttatttatttatttatttatttatttattattttttgagacagggtttctctgtatagccctggctgtcctgggactcattttgtagaccaggctggtctcgaactcagaaatccgcctgcctcttgtttttattttttaaagattaattattggcttaattccccgtgcccccatccaccctccatctgctccatatctcatacctcctccctaccctaccccatctccacgtggatgcccccaccctccaacccacctgacctctaaagtcccagaggcctccagtttcttaagggttaagtgcatcatgaatgaacacagacccgggagtcctctactgtatgtgtgttgggggcctcatatcagctgatgtatgctgtctgtttggtggtccagtgtttgagagatcccggggtccaaattaattgaaactgctggtcctcctacagggccgcccttttcagcttctttcagccttccctaattcaaaatcaggagtcagctgctcctgtccattggttgagtgcaaatatctgcatcttactctttcagctgcttgttgggtctttcggagggcagtcatgctaggtctacagcctcagtagtagtgtcaggccttggggcctccccttgtggtatggtggggcatctgttaggtatatgcccaagagtggtatagctgggttttcaggtagacctatttccaattttctgaggacactccttattgatttccagagtggttttactagtttgcaatcccaccagcaatggaggagtgttcatctttctccacatccttatcagcatgtgctctcacttgagtttttgttcttagccattctgattgggtgtaaggtggaatttcagggttgttttcatttgcattttgaacatttctttaggtgcttctcagccattcgagattcctgttgtgaattctctgtttagttctgcaccccattttttaattgggttatttggtcttttgggggttaacttattaggttgtttatgtattttggatattagccctgtattgtatgtagtgttagtgacgatttttcccccaatctgtagattaccaatttgtcctattgatggtatcttttgacttacagtggcttttcagtttcatgaggtaccattttgattctagagcctgagccattggtgttctattctttgctactttctcttctattagattcactgtatctggttttatgttgaggtccttgatccacttggacttgagctttttgcaaggtgacaaatatgggtctattttcatttttctacatatagacagccagtacaattctaaaatttaaatatatataatatatatgtaatatatgtaatatatacaggaaaactgatgtgttataaagaagctggtgaatatcttacatataatagaaatgagcattttgttctgacttttcatgtaaaatttccatgtgttgttttatgtgaaatatttttaaagatatgctaagtcatttatgtacaatactttttattatatattatgatatcaccttcttctttactagactataactcatgttctgtcgatttaaaaacagctgtttttggttagacgtttgttaacctgagtgcatggacactaatttcaagacatagtaaagctacttgctattttgtatagcatgtttgcttctgaaagtgttggagatgtatttcatcattaattagaaatttgaaaattgtctccattgtagaaatataaactgctatatgtaatttcccgtttatctaagtactaatatattagtctttatttcatcatttattattgctgaaaagtcttcctgaatacttgtttcttaaaatcttcataaggtagtttttgttttgttttaactcactgtattagtagccaaacatgcgagtggcaatacctgaaaaagaacaaataaaaatagagaggctaggtgcttaaattccaaagtatttagggtcagatctttgtccagcattcctgggtgtgactctgacctggccacatgttttgggttttatttgtaaatgaaggattatagctttcatttccaggatcatagtgaggaagtatatgatacattccataactctcccagattgttgtaatagcctctagatggactctcttgcttttaatacagctgtgttcctaaaacatgatcttgtctttattgtatttaaatttgtacttggattttccagctcttgcacagtaagttagactttacaactgagcctgctagaccctccaaaccagctttagtctgtcttttgttttcagtttcaggtactcacagatttaggtgaccagtgtttggatctttctaaatctgtctagctatttgtatgccatcttggttttactttatatcatgtcctttatgggaaatatgccccaaagctatagacatgagcctggaagtccagtcctttgtctttactcacatctgcttgaaaaggcccatcttccttcctgtacctctaaaatgtaacttcttcaagattcaattcaaatgctacgttccttgccttatgtgaaaactttccctcagagtgactccatgatctactgaatttcaggacttttgtacactctctacttaatttgacaactggatacacacacacacacacacacacacttcccaaggcaaaagcaagaggtttattttcttgtgtgtggagcagggagaagggttgggggacgggtcaaccctcaatcagtccttctaggtgagtgacaagaaggcaaccctgaatagctactacaggaaggttttatactttttaggggcacaggttacatcagcaaggttacagttcaaacttattggctaaacatattgacctttaaatctattggctagcaaacatgacacacatttgaactcttccttggactttccagagggttaggtaactattagtacattctgagaattttttactcaggaatgttcctctgggtagagaatggaacttggcctagccaccccaggcaggaggggagagctgtaaggaggaagttgaactggaaaaagcccttatggtccctcattccccaccttttacttgtataagctccaatcctggagctgtgctcagggtcttgggtaactaactcatattcttcaggtcctgtcctcagggtctcatattgttggtgcaggaccatcagctacactgctcccattctctcttttctgaaggctataaacttattcagtatgcaggatccaaaggtcaacaagagcaggaaaacaattagggatcctaacaaggtagatatgagggtggttaaccaagactcaaaccagccctgactctgttcatgtttttcttccacttggctagcccttctctcaccttggccattgaatgtttaacaaccccagaatggcctatataaaagcaacactcctcagctaaagcagcacgtagccctccttgctgcagggaaagttacgtttaatcccctcctattctgtagtacgacttctgataatgaactcaatgattcttgaaggtgactgatggcaggttctattctctctatgtctaaatcagtgtctgccctcagactgtcataatttttcccttataaggcccaagctgagggccagtggctgcactgaccactcccaatcccaatagaagggagacaatgagcatttttggtatttttaaagactatgacacagattcgaatctaaatccaaactagtgaaggagtaaatttttgaaaagattgtgaaaatataatattttaatgaacaaaaccttccaaaaacgatttttaaagttgcactcattgtgctcaacgctctgcatttgtttcaccatttaaagggctgcatgtatacatgcaaaccatgacacagtttccttgatacggccagccaattttgccactctttattaattagcacagcaaaataacaaaagagaacagtgtatgaaaggttctggaaaactggaatttcactggatcctattggttccatcaatggtcctatgttttttatcagctgtgctgttcttgctgagcaaattctagggacaccctaacaatttcatttaaagcagatatcttccacttgatgggctttataaagaatatacttaattgctttcatgtggttcttctcagttaaccagaaagctgaactggttgtaactaggtcacacatactatacttcacttcatgataatgtagcttaaaaatgataaacacatgataaatgcactgacagtgtcacactaagatcttaggtcacagtttcaatagtatagccataaactaataaccagcctcttcaaatgatatctctttgatttatcatattttaagatgaaatacctaagtttaaaaatattaaaatataaaaacagtatttaaaaaagaaaaaactatgtcattacattttaattatgtttacaagtcttttttctttcttttaccaaagaactaaattatggttacagtttaaaaagtgggctaaataacaggatacagttgtcaaggctaaaattaaacatagtagcaatttttttgtaaataaaaaaatacagttttaaggagagagaatgcattataaaattatagtttaatttgctgaaaacagtacaggcagggttacctgttgttcaccacactgttttgtagaaagtgcagactgaataattttttttttcaaaaagtgactgtgtaaaactccatgtatctaaaaatttaataggaaaagattcacttatcaagtctctcatgtgttaatagacacattgcagcaaccaattagtgctactagaacactgcagaattgctctgttctgccccaaatcaaagcaatgtacttcataaatacccttgcacaccagaaaaaaaaaaagtcggttcgttttttttcatcaaagtaaacatcaggcacccattaacgttaaaaagcctttggattacacgtgaaagtacatttgatagtagtagctggtgataaaaggctacagtggatactagtaatgtaaaaggtgtggacatttcttgattttgtcagtttctgttggtgttccttttaagggtcctgtagaacgcagattgtcacactattattgcacaaaatgcaaaacaacccaaatcccctacttcactatttcagccacgctgggagttggtaacttgttacctcagtcatagtattttgccttaactgtagtacatgtgttgactttttgagaaacctataatctttctaacagtgtggtttgtttggggggtcccatgggatgatccctttggccacgagctcaattagatgtaacccagtcttagtactgaaatctttattatgtgacaatgtctcccccattaattggcaatttcatttttttaaatttaaggcatttttattagatattttctctattcacatttcaaatgctattcccaaagccccctataccctcaccccaccctgcttcccaacctacccactcccacttcctggccctggcattcccctgtactagggcatatgagcaatttcatttagatagacttcatatacatctagattttagaaacctttttctgtttccatacaacccctgaactgcaccttaattttcaccatctgtccctatatttcttcctaccttatcctgccttatcctcctggtacctgcttgatcttcccactcatgatccagtcataactaactgctctatttccctttcctagggagatctatctgtccccaaccccttagtccttactcaacacctaacctctgtgggttttgtgggttatgtagctcaaccatcatccattgacttaataactaatatccacatataagtgaacacataccatattctgttttcagcgggtgatgggtcttttctctagttctggtaatttgcttacaacttcatgcggtcattatttttaatgacgggataatactccattgtgtaaatgtacattatctttattcactcttctttcgagggacatctaagttgtttccagtgtcggctattatgagtaggttagcagtgagcatggttgagtaagtgtctatgtggtaaggtgaaggttatgtgcctttggctactctgcttggctagcattaccgcaatatcttttctattattgacagctattgtgaaatgtgttgctttctctctcagtctatgtgcaatttatatataggagggctactgatttttatgagttaattctgtatctagctactgtttatcacctgtaggagggttgtggttgaatttttaagttcatttatgtatactatcaaagatacattaacttctttctttccaatttgtacccctttgatttcattgagttgtctttttgcactggcagtccttcaaatacagtacttcagagtatatctcaaaagatatggagtgaaaggacaacattatcttgctcctaattttagtggaattgcttttaatttttctctatttaatttggtgttggttttgggcctgctgtaaattgtctttattatgtctgcatatgctgcttgtatctctaatcttcccagggcttttatcatgaagggctgttgggttttgttaaaggcctttttgtcatctaatgtgatagttatgtgttttttgtctttcagcttgtttatatggtcggttatatttattgagttatatatgtttaactgtgtctacatctcttaggtgaaccctacttgataatgattaatgatctcttttgattattaatgtatttttgatatgttcttcgattcaatttgaaaatattttattaagaattatacatctgtgttcatgaaaaaagttggtttgtaattttctttttctgtttttatgtgttttggatttcaggataactctgtcctcataaaatgaattgggtagtgttctttctgtttctattttatgaaataatttgaggagtattggcactatttctttctctctttctttcttgggagactgttagtggctgcttctgttttactaaggactatagatctattaaagtttttacctgttcttgatttactttggtaaatgatttatatcaagaaaattatccatttcttttagctattccaggttttttgactaaggtgtttaaagtatgacattatgatttgtgcatttccttactgtctgttgttcgccccctttcttttatgattttgttaatttatatagtttctctttacctctagttattttggtataagagtttgtcagtcttactgattttctctaaaaaaccatctctttgtttcattgattctttgtattttttaattgcttttatgttattgatttcagccctgattttgattatttcttgctgtttattccccttgggtgtgcttcattatttttgttctagagctttggggtgtgctattaagtcactaatctctctctctctctctctctctctctctctctctctctctctctctctctctctctctttctctcctcccccatgtgtctgtctgtctctcaatttctctcttttgtttatgaacttgcctctaagaactgcctttgtcttgtcccaataatttgaatatgctgtatattcattttctttcaattctagaacatctttaattttgttcttaatttttgtgttggcctgtttttcattttgtagtgatttttttcagtttccatgagtttgaaggctttctgttgttgaaatccaggattaatctgcttttgtctgatagtatgcagggtgtttggtcaagttcttttcttttttacatctactgagacttgctttgtgcctaagtatgtggtcagttttggagaaagttctaagaggtgctaagaaaaaggtatattcttgtacgctgaagtgaaattttctgtggatatctgcccattggtttatgatgtcagttagctccggcatttctgtttactttttgtttggatgaccttcatgctagtgtttgaaggtcaatatgatctctaagctctagtagtgtttcttttatgaatttgaatgtacttgtgtttgggaatagatgttaaaaattacaatgttctcttggttaatttttttttctttcatgagtatgtactgtcttaccctctcttttcttgattatttttggtttgaagtttatttgttacatattaaaatttttaggtgtgtttttctggatgcattaaaagaatgaatcctgttttgtatccattctgttagtcagcgtcttttgggagcatgggaccactgatgttgagaggcatcattgaatagttttgttgagttctgttcattttcttgtttggcatgtgattactgtcattttgttgttgctgttgttatttttgtggtagtgatggtggtggtggtggtagtgtgtgtgtctgtgtgtgtgtgtctgtgtgtgtgtgtgtgtctgtgtgtgtgtgtctgtgtgtgtgtgtgtgtctgtgtgtgtgtgtgtgtgtgtgtgtgtctgtgtgtnnnnnnnnnnnnnnnnnnnnnnnnnnnnnnnnnnnnnnnnnnnnnnnnnnnnnnnnnnnnnnnnnnnnnnnnnnnnnnnnntatgtgtgtgaagaagtagttgtgagtcatgatttttacttattcatattttgtatatgaatctaaaattatcctaaatgtgctttattaattaaaaatatataaatagcagtaagtagaaacatgttttaaggtttttcaaactatctaaaattcaatacatagagacatgtatatacatacactatatatatatatatatatatatgcatatacatatttgtgtgtgcgtgtgtagttgtattactagaatttagagacactttttttaaaatttattagatattttctttatttacatttcaaatgttatcccctttcctggtttcccctccaaaaaacccctattccatccaccctccccctccttctaagactgtgttccttccacccacccacccattcccacttccctgtcctggcattcctctacactggggaatagaacctgtataagaccaagagcctcttctcccattgatgtcccacaaggcattcctctgctacatatgcggctggagccatgagtccctccatgtgtactctttggttggtgagttagcccctgtgagctctgggtagtcttggtcgatattgttgttcttcctatggggttgcaaaccccttcagctccttcagtcctttctctaactccttcattggggaccccattggggaccctgtgctcagtccaatggttggctgtgatcatctgtctctgtatttgtcaggttctgtcagagtctctcaggagacagctatgtcaggctcctgtcagcaagcacttcttggcatccataatagtgtgtgggtttggtaactgtatatgggatggatctccatgtcaggcaatctctggatggcctttccttgggagacactttttaaatatcacttcaaatagcattaattcttttaacttgtagacatgcaaattctcataaactcatatatatttgtttatattatgtattttaagtaaacatagagtaatatatccctagggccttttcaagcatccttagtattatttacctctgttccttcctttctctgtgtgttgcctttcttccctctcctcggctaaagtctgctgctccagtttttgccgtgttccccatcacagtccttgtgtccttctatcttctaatcgaaagttccactatccccccaaaaggtccattaaatgtccctggactctgaggtggttccaggttatatatgtttatctaaagatttgtatccaataaggcaatggcatttgtctttcaggttctgtattatttctgcacaactttttctaggtcctttttttatctgcaattttcataatttcatttttctgtgtaggtaagtggaatttcattgtatgtatgtacttccttttcattgtccagtcatcaattgaagaacatttaggctttttccatttcctagatactgtgaatagaacagggagcccagctacagcagatatctgtgaagcaagatagcaagctcttttatataggtcaaggagtagtatatgcaactcatatgatagattactttatctttctgaaaattctccacactgattccattgaggttgcacacacagaaaagaacaaatgaaaaagaaaagaacctgaacaaatggtactgggaaaactggctctctatgtgtagaatgcagttagacctgtatctgtcatcttgttacaaaaataaaacaaagcaaaacaacggatgtaagaacttatgtaaaaacaaaatgctgatattactagaagatagcataagttgtaccctagaaaatatagatatgtaggaaaatactttgggaatagaactccattcactccgaattaaggcaacaactcccaaatggcaccacaaaacactgaggagttttggtgcaacaaaagagacaagtgaagatgaagtccacagagtaggcaagaactttgccagcagcacatcatatagaggattaatactcataatataaaaagtaataataatagtaataaaacatatgcaaagaatcagatgatcaggtaggaagtgggctctggatttgaatagacagttcacagaagaaagaaataaaaatggctacaacacatctcagaatatgttgaacatccttagtgattaggggaaagcaacttaaaacttctttgagattgcatctttctgctgtaagaagagctctgatcaatagaacagctgacaaatgctgatggagatgtgaggggaagggaactatgattcactgtttgatcagtgttggaaggcagtatacaatgctttctttctgttgctagtctttccctgagtttagtaactctgttaacaccacttcctagaacctctggttctgtcttttgcccaagaaaatggccagaatttgagctctctgtattgagatcattgaggaatttcctgcagtgtcttggctgctattcaggtcgggtgtttttccttgccgtgcctcaccagacatgcagtgcctgagtgcaccatcgaaatgtctttttccaaagcagccttgaatgcttattgaacattttaggacagacgagagcttatagcaccaaagaatgcaaggagtgagtaatattgccctctttccatcactgttcttaaacatttttcaacatccctgccactcaaaatgttttcctggtgcttttgacctgccttgctttataaaaagtagaacttagtgatttaaagtcgtcaatggaattaaagttagggattttgttgttgttgttgttgcatcatgagaagactagattctgagaaaagaattagaaaataaacagaattccttaaaggaatccttatacttaaaggtggtttttaaaggatatgttcctgttaggaaagattaggaaaaggatattcaattttcaaagcattcatgtctgttaaagtttttgaaaatttgggggttaaaaacaaaatgttcacttaccatgacctttccctaatttttattaaaatgaacctaatttttctaatcaggttaatttaaggatattgttagacatgtagaagaactaaaccagcccaccacatttaatatttatggtgtgacttaattttatcatgttctcttatcattttaataattactgtataatttttagatgtccaggaaagctaaacctttaagtaaatttgtgtgactcatattttatgttatcattaattataattaattcattatgattgcataaaatgactgcaagaagatttttaaaaatgtagacgcttatatatggtttacatatatgtagtcaatttccatagttaattatatagtttctgggatattaaattgtaagtaggataaatcttgttggttttttttttggttttttgtttttgttttttttgttgttgttgttgttgttgtttttgttttgagtcaaggtttctctgtgtagccctggctgtcctggaactcactctgtagaccaggctggcctcgaactcagaaatccgcctgcctctgcctcccaagtgctgggattaaaggcatgtgccaccactgcctggcaaatcatgttttcaaatacatttaacagtgaaatgtttgttttatttatttatctacttaaaaagattaattttgaatttttgacttactttccattgtatatttatattattaatttacacatgatcatttattacatttatcgatatttatattgttcatgtagcaaaagtgcttctccttagggctcgagagaggcctgtctgtgaaatgcttcttgtgtaaggatgaagacttgagttccaatcctcagttcccatatataaattgagtgcggaagggcatgcttgtaatcccagcttgtaatctcctgaagacagaaacaggagaatccaggggtttactggccagccaactgataccaatcagtgaacaacaggtttagtgagggatttccatctcaagaaaataaataacaattataatgagttggagagtaattgaggaagacacctgatttcagactgtagcctccacacacatttgcacactcacccatccttatttatgcgcacacacatatacatacataaacacacaaacaaatatacattcagagagagaaatatttaagcatgcaggatggaatctctaaccagttctgttactgttaaaatggattaccttgaattaagttgacttgtcattttgtcgtctatcattttttaaatttagagattccaaaacaaaacaatatgcaaatcagacaataatctggaaattcatatctgaccattcatttaggacttgcattctctccctgcattgacttgaagcaacatagaacaaatgtgtgttagagagggatagtcaagtctcttgtggtatgtaagtgctctagtcagaaatggacagtttctctccaagggcgctatcgtgttttctcttaaaattttcaattcttaaaaccccaagacaaatttaatctaatacagtttagtattagaacccaaatacatagtttttttttattttatttatttcctgtattctaaatgaacatcatattttatccattatttgtctatcaggagtttaactttatattggctttgtttttaatccataaaaatatatcattttggccgggcagtagtgtcacaagcctttaatcccaacacatggatggcagaggcagggggatttctgagttaaaggccagcctgatctacagagtgagttccaggacagccagggctacacagagaaactctgtctcaacaaaaccaacaaaacaaaacaaaacaaaacccctcattttaatgagctaggggtaaagggaattaacagtaggattaaggcacatatttggggtttggtgctgaattgtggtatctagaaaattatgtgttataacttaggcacaaaggagtattacttccaagtatctttgaactggcaactataggaattatccaattagattttggtcccagactctgccctctacatgtgctgtgtctagatgtgcatatcttcttttagatatgaatgatctgtgctatagaatcagcaaacaatgggaaatttaattaatcccagtatatgttaaaagtcccagtgtgaattgcttagtattaagagttctcttgtacagaacagtttggtagtgtttgacaggtctgctggcttccactctggttcccactcactgtgttcctgtcacgtttttggtgctttccatattgattcttttaatccccatggcaataatctctcagatacagataggaatcagaaactaactttatttgtggtctgtgaggaaatgaaggagtgtaatcaaagtggctactgaatgtaagccatcttaactatcaagcccatgcatttgtcattaggtatgctacctcactccactgcattgtactgacttaacatgcatgacgcaaccaagcacagcagatacttagtagtaatgatgcagtaatgattaatctgttggtgaaactttgaaaatatgttttctatattaattccaaagggagctaaatggatacaaatggagtaaatgctaggttaaaacatactctttgattttaaaatactgcagccttttatcttgacatgtgagagctgaatataagtcatgctgcttattgtagcatctagagagattaaaaatattaggtgaaagttagtaagaaagggaatattaaaattaacttttggttttaccacagttaaagacaaacttggatttaattgaagtttaaaacttcatcatgttatgcaaatacatatcatccatatgatatgaatgcatgtattttcatcacatttccatggatgcatgtattttcaaaggactgtcataagtaattccaaaatccgtttcagttttctgttagtctccattactttgcacataattgcaagtgaaatatgcttacattataaatgcttactccctttagaatatgcgttagctgtgtggcttaatgctgagacaaaggactcattcgcattccctgttgctcaagctccccacttagggcctaaggagctggaaactgtagcacagggtttgcagctcttgccattgcttctcgtgtgtttacaagcacagcctttcccttagccttgcttccccgtgattgttttccgtgtgatgttttgtgtggttcgtggtctgtggtcgagtttggcgtggtagctcccctcagtactgctttatttctctgtgtgcctcttttcactttctttttctcagtggaacttagaagcattaaacacatctttctagtagttaaatttaaaaaaatgaacattttataatgtgactattaatctatacagctctaaatatgtgaaagaaatggtaaattttgtttctacatagtcaaaaaatgttacttctaacctctaagcccttaagatttctcctaccaaaatcaaagaagaaagttagcaaatactatcagccatgcatttctaattcagtctttttcagaggaagccaagtataaagatgagggacagttgtatgttcccttgagtattgtaaaattgccattcttgataacaaaagcagcacacagctacttttcaaagtagtaattgataacatattttcctttatatttaagcccttctctcatagaatagatctattttgacagtcagagctattaccaataataaaagaggaggcagctcagtgttcaaaaagtaaagtattcacttgtaatcagtacgaacctgctcgagatcatggcacttagggtgaggatttcactctctttgttatttgaatctactgtggtattattagtatgtttcataagacatagttcagagctgctatgatctttaaatgttaatgctcttttcttatcactttactgtgtagatacccttcatgagacccaactctgccacagctcatcctcggaggcaatcccggaaacctcttttataagtgtgattttaaaatgtggataaaactctcaatagagcatataaactaaaggagaacagctatcttgttcttcccataagcttatcactgcagaaagtgcttttgcttgtcaagtttggatagaatgtaattgattgctttattatatgggtagacaaggcagttaatttgcctgtgtggatttttttccctttttctgtttttctgctctctctctctctctctctctctgcctctctctctttctctctctatctgttacaatattcagaaacactcggtgtatgcattattaaaaacaatagtggtaaatgtcttgtcagaattattttagttggtaaatgtctttcctcttgtttctttggcataagacaatacaatacagtatttggactgaaaattaaagaaagccagtgggacttacctgctctgtgctaccctgttactgaattattctctctgtgttatttgtttgtaaaaaggacaatgctttccactgatctgcaagtctgtatcacctcacttactgcgagtattcacacatgagaacaaccctagactcatatttaatgctatttctatttgtgtattcagcaaaagtgaaggactggtgaagattacaactgtttgagtactgtggaagcacttgatgtcagcacggacattttataactagaatttcaactcaagaatgaacatagtatctgtattagtatctaggtatttttccagaaatatccaaatttattcctttttgttttatttaatataaacttgctgtgttccatataattttacttgttgaacctaaatgtgaagctatgaaatgagggaactacagagcttgttgggtatacagcctgcctgctgaaagctcttcaccagccctgtgtcttcccagagcttcacagagtttacatttgatcctcactctttactgatccagttttaagtcaacggcagaaataactttgaatattgcaccacttaatctcgaactgatttagaagagcctgctgaaaatgaaacgcacatatacatgtaaattgtcaagctgtctcttaaaattccattgcttatcattgtgggtttggaccttttcaggtataagggcatttggaatagtttaaactttagcattagaatagataataaatgcaagtgtaattgtaaagctggtgttgctagtaatctgtagttacaggaaccacatgactgcataaaatgtttagtaaagttaaacatgtgtgaaataatgtataaggatactagtaatttattgattttatggcactagaaaaaatactcataattcttaggaaaagcagtatgctttctttgaatataaggaagaagcaaatgacattacttgacttatagcaaagatggtgaactccagcaaagtttaagagaaatgacaatggatgcttaccatttttcaaatgaactctgctttagtcaaattgtcttttagcataaggtaagaaaacattaatgggtatttttctattttagggtttctttttccctctgatgggtttctgttttagttttgagaaatcataggtagtagcatggttgtagtggcagtgttaaccaaaagcccttctacagtggttaatattagaacagtgtaattgtctttcttcaccattcagttttcagtggtacattatatattattctctcccaagcttggtaaaacacccatgttacatgttgtcacagttcctacatgatatgttcttcaaagtcatactcagaacagaatgaagcatttcttttaataatatcctaaatgaagtacaacattaacttttgcccattattggccttttgctcttcaagataaaaattaatgtttttctgtgaaaacattctaagtaatttatatcttataaatacacataagagaatgacagacagctcaggtatttgacagttaattgctgtaggataagaaatggaaggaatattaaaatgtcaggaaggggctgatattttaagagagagtacttaattggtaaagtgccatattagcatcagtacctacccatatgaaaagctggcacaggcttataccctagtaatgtaaaaaacagacgaaaggatctctgtgattgactggtcagtcaccctattgatttggcaaataccaggccaatgagaggccatatatcaaaaaaatgtggtggaggatttctgaagctgcatgcagaccaacacacacacacacacactcacaagcacatgcgcgcatgcacacacacacgcacacacacacacacacacacacacacacacacacacacaaaattacccccgctaacacatagttacctcccctgacacataatattgggaaataaatgaaatgcctctgaaataccaaatggctggaatggtagtaatatatcagagtcacagggagaattttgagactcagttgactaccatcttctccttatcctccagctccaccaattgttctctccatcactttctggagtctaggtctgtgatgaaactcaaagatttgagttcgtagcaggtttcaagtaatgttgattgagctggtcaaggacattactttgaaaaaaattcatacacggttacttgtttaaaataatcattagcttattcagtgtggactaataatgcgtgtgggtttaatgcctttaaggggctcttccattcctcaaaagatttgtttttagacaaaggtttgtagaaaagtagtatcttctgaaacacaaagtacaacttccttaattacaaaatgtcagttaaggatttatttcactaatagagcaacactgcttgcccaaagtgtcttaatccttccacttagaacagttttgtatgagatgaaaacaatatttagccttagtgtgtattgagtttaagtttagatatttatgcatcagttatgtatcactacatcttgtgtttcttgaatgtgtatctgaaaccatatgtggcataaaattagttttctgacaaataacgttcacatttgttaacttactttcctgtttatgcaacagtgaactacttttaaacactcagattttcaaactttaaacacacacacatacacacacccccataagtatgttttacttgactcacaatatggaaatatttcaccaagatctgtttaaaaattcagaagaattctgcaacagattacaattttaacattttctgaaacattttcggttttctgaaattatttttaactattcaaacttgttgaagagagttcctcaagacacataaagacatatcaagacatgaaaacagagtttatctgtctttgtaaatttagatatttgtaaggaatgcgaacagagacgggatttacaagtggatcttcttagaaagaaaaatgtagacttctttactgtagtgatcacctcaaggtgctctgtaagcctgtcagtaagattgactgctcttcaggtacttaggatgtaatgaaattgaatgttcatgctgagcttggtaaataaaatgagattgacctcctagccgttatctcctttatctgatttacattgtaaaatcaggatctacactattgattggagtataattagttaattatgaacaggaaaatgcaaagttaggtggagcttgaacacagcaggttgtagtgctaaaatctttcccagggcatgagcagagggagatcagtttattagagaacaaagcagacgagtttcaggcacggaaatgtctaatccatttctcatgctgggaagagatacttgaccttactgtgtattgtcatgaactgccttgtttcatgttccgggtttccttgtttttattttgttttgttttcttatttcacttttaaagttgcaagctggctgttggcagatataaataatgaattgattccacattttacgtgggattggatttggcttttcccaaatagtgatatttagttatcaatatccatctgtaatgaggaattttagactatcctaccacccactcatttcactgtttcctgtgagagaaatccccagtagcattcacaagataggttcatcatttttatgatgtttgtgaaataagacttagaacaagttttgaattaacatgtatagaaaacattcgtgtaggtggtggcttgcactaaaattattacctgctacaaggattaagatagtttacttatagatattataccattgatagaatgtagggttttgtgacagctcatattatttaaaaaattttaatgggcctcagtatatatttattctacatattaagacatttaattgaaatgattgatcagtgttcactgcagtaacttatcacagttagttgctgaaattgtatttgaattgctagtaaggttttatttaagcagtgttaatagtcaagactaattgaagggaaagccagaagagccagcagtcggttctccagatgctcatgtttctaggtgagaagcgcagtgttctgtagttccagagacagtttccttattcatcattgtatagggaatactgcctgttgtgcttcattacggtaacagaatatctacagtacatcccttttaaagtctcgccccagaggctgcttctttccaaaggccagtttgcttaggaggtacctgcacttaataaaccagtgttttggggtttgtttgtttgtttgtttgtttgtttgttttaaggaatgacttagtatatgccagaaataaacttattattatttgaaactaagaaagctaaataaaccctttagagcaatggttctcaacgttcttaatgctgtaaaaactctcttatacaattcttttcattgtggtaagcaccaaccataaaattatttgtcactttcataactaatttttctagggttatgaattgtaatgtgaatatctgtgttttctgatggtcataggcaagtcctgtggggggggggggctgtaggggtcgcgacccacaggttgagaaccactgttctagcaccttgactactttgtgtaggcataagagaaaattttaagttagatatgtttgcttatttccacattgtcagtagtcactcgacactgagtttaatgcttgttatgtggatcatagcacacaggaagatcaatcattttctcttcttctctagggtgctgtacttaatcataacgctaagtaagtattttaataaaaatcgagctgtgcttatttagtctctacatcttcctgaatcaacgtagagtgctcctctgtcctttgtatttgtatcaatattaatgtagtatgtaggaagttgaacttgataggtacttggttggtcagactttgttcacattaaaaattggctttgtttgatctcactatactacaaattttagaattctctgtagtctaatgtgcacaatatttattaaatattttaaatatacttcttcagtcatcaagtttagtttttatttatagacatgttcttcatatgctaaatttatattttcttcatggttaaggtattgcctttttactataatgtgctattggtataataatgtttttcttacatcaacatttgtttcatttaataaagtgttgtgttaatatcacagtacttttgtgggtcagtgacttcttttgaaaatttaaacattttattcatttgttttaacaaactaagtgtgttattgtatttgtacaattaaaatgtttccaagtacttattagaaatagaaactaaggaaaattaatcagtaagtgtttttaccctattgtacttttcagagtatagcctcatataagacttagtttttgagttttaaaagcatttaaaagtttttctatatagccaaaatttactggttactaagttttgatacaattttcacagttgtgtgtgtacataggatatacaatctactattttaatcttctatactcttatgtttttaagaaatttaatagtatctcataaatttgtcagtaggcctagttaacacagatttttcaaattctgctagattttacctctgccatttaggatataattgttagtagtaccttcagttatgatttggtttcaatttaacagatttaatgcaaattttctacatgaaaataacttgtaaaatcctttgaatatcttatatttattgtttacttggcaaacattgacttcaaatggggtattattctgtaattttctttctctctcttgaattttggtggttgctagagtagagaccaccactttatgctatttaaacttggacttgcagcctttacttactgggagtaagcgaggaccttatagaactatcctaacaccccaattgtctgccagcatgagaaagacgtcctgaaatgtatcctgatgaaggtgtcaggaagaattaggtcaactcctaagagcaaatgcttcacagcttcttctgaaagtgctcccaataccagaacaggtattggatcatttaaacattttaatgtacttttagatgcctcattttaaacactgtcaatttgcatagccttaatagttttggtgacctaatttctgcatacagaagttctgtaagaaaattatggttgtaaaaatatactgatactattaggaagcaatggctggtagtttttaaggaagtaggaaccctgaagacctggaaaaattgaacataaaaatgtcagacaaaatagcagatgaatagtattttaactacagaaacttgccacagagatgtagctccagctgtcatttagcctgatgatcctaatgtaaaaaatgcagagaaaaaatgtattttatatattccccctgatgaaccaaataatggtattctttataacatttccgtgaaggattagtgacatattatatagtccctgtacttagatcagtgttcctctgtgactccaaacattctgatcaacgtagaagcagtcttgattaaaaggtttttgtatcccaggatttagtattttagctactgaaaggtaaattagttcaactgagaaaggaagacccagagtatttattctgtggtcttgctatccttattttacatttgatattaactacataatcttatttttaaatcccagagaaacagttatttgaacatttaaaattttaatatatttttggatcagtggaataatatatggcatttgtcagtttcattttattcactcctgcaactgggattacagtaaatgcacaattcaagttcattttttgaatctcagagttttgaaaaaatattcattcacttatttcattgacaagaaccttataattatagagtaatgatgagtaagtcatagtagataactatctcacacttccatgtgcctgcatgacttgactctggaattctgaaatattccttgacaggctaggtttttgtagcatagtaagaaattttgactaaaaatatagataattgttttctttattgtgatcattttttaagttacttttctttggacatatgcatgagaataattcctttctgtatttcccaatgtttactgaataggaattttgtgttgtactcaagcaacctgcttaataaattccttccttggtgttttaattgactttttatgctctaaaccgtgagaaatcagtaataacgagaatttgattggttaaaaagtactcctctgtaattaaaagtacaaagaaaatcagaaataaaacccattttgtaagatgtatacatcttgatactagttgctcaattttggacttctgatttcagttgttgcaaaattcatttttaaaacactgaaataatacagatttttcttcattgtcagcaggatgagattgtctgaagcgaagaataggtatggtagttttcttagattgtgtacttcatatgaggcaagacactatcaaaacatctgctgagtgctaagtatcctcagaagtacttgaaacaccaagtacatggcagaacttgacaaaaactagtgagagtaatatccaatccttgaagtggctgcttgcatatttaaatattctgttacttaacataaaaagattatatctgctgtagattgtgttagcatgctataaatgttagaaagttcatttgcagtatactttaacctgaaaaaaatacaaaaatgaagtataaattgtatggcagaaattacagcttagatttctgtgaactgtctactggataaatgattaattctatttgttcaaaattgaattttgattgctaatttttgcacatatgcttacatatatattcattcattcatattttaacatttatatactctgaacttttttatcagaatgttgttcctttctaattgtattgtttcaattttttcatctataatatttatttaagatttagatcattatgataaatgttaatttcagaatctcctgagcaaaggttagagttatatgttaaagtcgctatgtaacactgtgttcttttgtctttgaaatgagtagtttcaacattcagatccactctgactctgcttgccctgcaggtgtgatgaatgcaggctgtgctaccattttggctgtttagatcctcctttgaaaaagtctcctaaacaaacaggctatggatggatatgtcaggaatgtgactcttcatcttctaaggtaagggatgaaaggcttgaagaaaacaaatcagttcctttcatcttgacaggtttttttttaatattacaacattctttctgacattaagaatgaagaagaaaattatattagatgacttaaatttcctccatgtaaagcatttagctattttgtatgtcctctgcatttctctagcatattaactattgttataataggacaacatctctctgctaatttagtactttgaggccgtagcagggaacaatttggttcacttacattgttattcaatagtaagagtttgggtatttcctacaaatttagcactaaagaataggtacataatattaagtgacaaacacacttaatgttttttacaattggtgagtaatttaatatacttattccatgggtataaatagtaaatgttctgtaattgaggagtctctctgaagatataatcacagctctgtatgaaaacctagcaatgatttcccaacatcctacatttatagacagaaccaacaaatatcagaaggcttctgtgcacacattccctctgttcctcagtttcgttccagtgttccgtctcagtaatgccctgtaatataaaatggtactaagaggatcacagattgaattacattcatattgtgaattcatttcccatatttctttgttaatagttattggcagttccttagtttttttaactttcatacataccaagttttaataaacataggacatttatttttaaaatgcagtttcctaattttttgaggtatgcacctccaatgagaatatcacaggtacagggactaagatggcttggtaggtaaagtgcatactgtgcaggtaagcatgaggacataagcacagatcaccagcatctacacaaaagcctggtgttgtaatctgtatctgtaatcctagcactggaggggcagacactggcagatctctggagtggctgaccagtgagtccagccaaaatagttctgggtttagtaagagagcctgagtggtaggggaagatacacggcatctgcctctggccctgtcatgtacagacatagttaagtgcaaccacgtaaaagtatggtataaactagactgagtattgtgttcttaaaacgtatttcttaggccttcctgggttatctttgatggaaatctcaacaactgtctcaacttgcatacccaaagtaaaacaaacttgtctgacaccgttaagtgaatagacacatgtcctttaaagtggcttcttttccagatcatgtactcacacactgtactgcagattgaagtgtgctggctactcttgttacttttccgtcttttatccttcttcaacttccttttttgaaaagatctgttgagtttccatgacaggtttgtctaccacaagatgagctaagcagggagaattctctttgattctcttttcctttttcattctagtgtgctatacttttgaaaagtaataaactgttaacttttattcatagaaaatttatctaaatttcttaagttagattttctggacccacatgcacattacataccagctgaagcaatgggtgtttcttgatgatcatttagaacagaattgctttagtagaaggaatacaatttcataatggatttattttgtatgattttttttttgcaatgagaaattaaaattctataactgatgtattaaaaagaaaatatcaatgtatttattttcaagcaaatagttttgacatttgtgcctctttgggaacttgatacagcagtttccccaaggagtatcttgctacaatacattaaacaagcacatttaattgaacctagtaatatgggagattgaatgtctagattttatgtattgtgaagatttatgaaaaatattaaaatgatctatgtttaaaagttctttaaatttgaagcttataactgacccataaaaaggacttttttatactttaactattcatttgacctctgggattttatatgacatacaggttggattataggtttctgaatttagcattgctgaaagagaaataattttcatgtaaaataccacttcctgtcctgatgtagtagtattggcacttaccactgtgatagtagtttattgaaatgctcttcactaatcttttctgagttttgatttaagctcttgtttaagatatgtaagaataagaggaaaannnnnnnnnnnnnnnnnnnnnnnnnnnnnnnnnnnnnnnnnnnnnnnnnnnnnnnnnnnnnnnnnnnnnnnnnnnnnnnggagggaagggaagggaagggaagggaagggaagggaagggaaaaggaaagaagaaggaaaggaaaggaaaagggaaaaggaaagaagaaggaaaggaaaggaaaagctttttgtactgttctgtgcatgatagttctgtacagaaagactctgtgatggaatgtagatttgctaagtctacttgtttatttattgactgcattggtatttttcctgtatgcacgtctgtatgagggtgttagactccccagaaatggagttaaaaaacagttgtgaactgccatgcaggtgctgagaattaaacctggggcctctgtctagaagagcagccaataccatctctctagccccttgctaaaggtctaaacatttaatctatgatgtattattctctctaactactccaggtagtttgtttttaacgtatactttggacttcctgcttgctagtgagtagttaagcctacaagcttcctattgatgggccttttgatgctaagcatgtttgtagttcttataacattttccccacggggagggagttgggaatgtataagtcttttcaccttgtagtttttagttgagtattgtactttggggctgctagtaatgtatcatttatgtttcaaaattttagccagtgttgaagttaaaaagaattatctaggtaatctacaagagtctaaagacagtctgagctacatagcaagactgcgtttatcaaaataggccaacaataacaacggctgttgtatattgttacttatgttctgaactaattaatagaaaaacggcctactttaggacattatatgcttcattttcctaggaattctttattaaataataattttatcaaaatattttctatggttattcttttacagtacaactggaatcagtactgatctgattggctcagtaatctacagtttatacatgatcatataatataattagacatatgtttcaccaagtcatacctagaaatattattgtttcagataaaatttgtcagtgtttatgatacacctttttgatatatttctttacaaaatacaaaatagttgaaatattttaatatagatattcctaaagtactctaaaataatttgcagaattaaaattacttttcaaaatatgcttattacaaatttgaaaaagctaagccattttctaactttggtgatgtgggcctgatgagattctgtaccatgctgtggatgccacatgtgacaagaaactaaatcagaactgagaacattagaaaagtgcagtggggtaccctagatggaaatgcctttgaaaagttgtcagcatccttctgcccttcattctgaaatagcattttatagttttacttattttcattttatggtagagtttacatatttaaaatttgagcattaatgcaaaaggatgttttatactagttttcaaaaagccagtgaagaactctttaagctcctaacatggcatatgacatactgatgcttactgtgctcacaaatcatgtggaatagatggttagcctggtggaagtcaattagcatattgtaaattgtgaaagtggcagcctagctggtgtcatttatattcttgctttaaatgccagtggaagatttcaggtattttagttaagatatgggtaatttgtttactctagtttattaaatgtataatttaagtaatttagcatcacaccaacctgtctgtgacttttctttcacaacttgttgttgaaccttaaggttatatcctcttggctatcagatcattttttagtttttgtgttttgcttttttccctcccattttggtgggtatttcagctaatgccatccctgttgggtcctgagccctcttgctttcctggagtctgagacaatgtgttggctacccccagttccccgttccccgtcccccattactacacacttctgttcaatttcctgactgtccgtgcatctccccaatcttctcccaaacctgcccccacttcttttccctcttcccctcctctcttcctcacaagtccctcccaccctctacctcctgtggttatttggtttctaagggctcaaatttcacgacagtgctgtgatcttcaatgagtgctcctgttctataaggttgagcttgttttgtagcagcggttgagatttagaattgatgacctgtctgatataagagatgtttttataaagcaatatcaatgtgaaacacaatttcctgcaaacataacaaatagagtttcctgtttcttttggagttttatgttagatagttgagatcatgtgtaacgttccttgtagaaaaacatccatttcttcctagaattaaaaggcaacaataggtatcattacacaataaacaaatttaaaccagggcatttctggttctcttaacaactaaaattacatattaccctatgctgtattttacataaggaataatgtatatttccagttaaatataaaatggtggtcctatggattacacagcaggtcaaaatttcaacaatggctttatcaggcctaataggaataataagaaaatatctaagtgatatgaacattagaggaaacgtacaaatcattttttaactgaaaatattcttgagtaacaggagaacatttctgatactttaaagacattgtttccttctaatttattaaactgttagttaaaaattgaaatgagaagataaaataaattaaattttaaaataataccagccaaagatatacttaaggtaattaatttatcaggccagtgagatagctcattgcataaaggcacttggtgtgcaagcctgacgaagtagactctatccttcaagtctaaacccagacactgtgtgaatctgtaatctgagtacccctacagtcaggtgtgaggtagaaaaagggaaatggcttggaaactcacaggccattagccagtaggatgcaatgaagcaagaattgcaaaagagacctccctaaggaagcaaatgagagactattcctgagaggtaacctctgacttccacactgactttgacaggagcctcgtggtgtgtgtgtgtgtgtgtgtgtgtgtgtgtgtgtgtgtgtgtgtgcacagtgcgtgtatgcgtgcatatgtgtgcatgtatgtgcacacacacataatattaagcaaaaacagttttttgaaagataacctgagttcattttgtcatagtatctaatgggttttgtttgcttgcctgtttatttaggagacagggtctcactatagcactatcttcaggcctttctacataggttagcattgcctagcaagagctgatcttacaggactgtgccactgtgcccttggtgaaatcagaataggaaatcctgttctagtatattagagtagaaagtaacagtagaaagaagataactatgtagaagtaaatatatttgcagattatttgttcatttgaactataaaactaggaagtaataattcaaaaccccaagaatatttaaaataataagtattataaaaaattctgctttaaagacacatttttctgtttttctctttgtttttttgcttgttgttcattttgactccacttttcagaataaagttggattcagtaaagaaaatttcataaagccattcacagtgttacattctggtaatgttcatacttgagagtgtaaaattggaggaatgtgtacaaggtcaaggccaacctggggttgtaccactaaacaatcaaaacaagatacaaatatatttcctgtataagagtaagatcatggtgggatattcacaatgttataaagaaggaaatcaatttactgcaattatagaagctggttacttactgcctttctactcatgttttagttctatatcctcttacgtgcacttttcaaaattttagttttatcagtttgttatacaacaaatgtccttaagataattgtatacacaatatacaagtttccatgttttctttttaaatcttatttttaattatgtttgtatgtgtgcttgggggtggggtgggtggttgactggtaatgtgtgtgtgaatacagatgcctgcagaggccagaagcagacactgaattccttgagctggtggtggtaagccactcagtgttgttcctggttggtaagctgccaggaaagtttccccaggaatttgttttggaatttgttccaaaaggcatcctggcagtagtgataccaaagagtcacagcacacaacagctcccctccccaccccgcacaagagatttattgacggagggggaaaccagaagggtggctgcctctgctcacggtagaagcagcagagaatagggagaacacagggtttacatagggtttcttggggatggggaggagctttccagggtggcctgggattgagggactatgtggtctgattgttggggtaaactcaaggagttgtggggtattttttttttttaacttgcaggtcagggactggccattggtgctgggaatggatgttatagcctttagaatacaattgacatttaaggcctttagagaagcctgagggtagagtgggtatgaaatggaagttacagctgtttgagggtttgttgttgttgtttgttgttatttggggatttttgtttggttgattggttttggttttggttttgccaggctgctgtagtgtcttgtgtgccttgaggatttacaaagttttcaaaggtagttagaacaaatagccaacattctgcttatcaaatacacagacacacacacacacatacacatactcaggatggataggtatcatataacaagttgcgagtacaggtattaaacttcatcgtattttgttaatgtaattaggcagttgcaagagcctacagcagcaaactgttccttaataactcaagtttaatattcaccatgtctcttttgccactcctttaaatacagttcattttgttgcactctaagacaggtaaagaatttgaataaaacaggttttccaggaggggagagtgctgtgtagccaggcacagtggtccacacctctaatctcagcactcaggagaatgaagcaagctgggagtgtgaggccaacctggtttccagagtaagttccagtctagcaaggactacatagtgagaccctgtcttagaaagaaaaagagggacatggggagggagagatggagggacagagagagagatgtctttccatctctgtccttgtttttatatcaggaaaaatgccacttcatttttccccattcttaaggttcagttcccatcaacaaggtgtattcctttttctgtcatttttcaaagatcacttgtcacactccagttcggaaaatccaggacaggaaggaaggtgaaaaagagccacctgtctttttctcctcttcctctcctctcctccttctgtttcattctcttccctatctctcactttctctcgtctatgctttggtatccccactacacaatgccttattgggatatttgtccatgtgtgttgcgataataaaaatactttgagcaagttaattcataaagaaaataaattttcttggctgtcagagtcctagcaatggcattgcttcagctctggtagaggagtcgcatggtagatgacatcatagaggcagagactctctggaagggaaatctataaagagagcagaaggtgaagacttactcttttgtagcaatcttttcattaggattaggcaggatcagaatgccatcccctgcttttggaaacagtgctgttaatggcctaaagaccttaaactataattatactgatatcctaacactaccaagcattcagcccaacccttagatgagaaaaatcatgtccaaaccgtagcctgcagcttaaatcctggtttctctacaatccttaggactaacctgagttcctagcctgcttcttttgtgaggccgttcatcttggtattcagcaggattttctcagagctggcatcgtttatgccccagtcatctgtactaactagactgaaaactcttacatcagggtttttcctatcctctcaaagacaaagggccaggtgttaaacatatcttttatattttagctgtctacttctccacacctagcctgattcctgcttagctacttttgaatttatttttaaagcattattctggaaaagggagtgtaagtaatacgggtcctgtgtcctgaattgtgctttataggccttaggctatttattgatgcacaaaagttgccgggtgtataaatctgtgccagccatgacccaaatatgcagaaaagataaaagagaagaaaatacctattcagcaaatataagaatcatgtatttttagaaatagttttgttctacctagtatattcagcatgtctgttaatatataacttgattataacaaatatttttaaaacagaaattcagtttaattttaaaatctttagttctgaagtacagaatatctggtttgcctaaaagtgtttagtgaatctggcagaagaaacacgtgttctgcacaacattgtagtggaagctgtagcccacgagtgtttgtagaggaagctgtagcccacgagtgtttgtagaggaagctgtagcccacgaatgtttgagtatttactttgtctttgtggacatgctcgcgctttcacataatttattggataaaaattttacatgttattcatatgctgtgctaaatcttctcttgtgtgttagaaattaataactatatataactcttgatgctaaaagttacacttttgtatatctgtgaaatattatctagcattcatagttttcttcaaatggtatattatccacactttgtttttaattcttggatctgaaaacagtacctcttgtccctcagtccctgatgaactatatttgtatcttctagttggatgcaagactaaacctcctatcccagtttgtatccatatgtaggtaacctgaatcccataaaaaaaagatttcttgagaaattcttttaaatttagaaaggaacaatccaccaatgaaccagttaatgtctaatttgtttagaatctgatattgcatatcagtaattgttcttttcattgtctgtgcctgtaggtgcttgtgtatgtaaaaggttttttttttggtgaatttatgcatgtgaatataaatgtacatgtgtagaagccagagacagcctcagatgtccattcctggggattcctgtacctttttttgaggcagtatgtcatttggcttggagattgtcaagcaaactaggctacttgaatcaagctgtgttccctgtctccattccctggcagggattgcaagtcctgcagccttttaaaatgatagttatttaatatattttgttatgtgggggaggggaaacatggttaatttttttctttttagaacaaaaaagggacagaaactacttaattagttttactggtacttacgtggtttaaaaaattagaagaatattaatatagtccaaatgctttaatttttttttttactgataaggaaaattagcttagagattcgtggtaaccacaagcttacaccgcttgttaaagacagagccatgtctaagtcagtgttggccagtttagtaactttattagttgagtttatgttacttgataaatccagtgattaatagggagtctgtgataagttatagacatgtgggatcattttgcgaaattcacactacagaaggaaacacagcaacatcagatggagtaccacaaagttaagtaaatcctgacaaaaacagaaaaaattcttaattcccgtattctatgagagtagatgtccaacactgtgatttgttaccaaagagaaactcacctctaagttcacttggtgacccctctgctgtctcatcttggttttatttggtatcacttagtttagttttgtttggggtttttgaaatagggtctcatacagccacggatgcctcaaattggttatgtaaccaaagaggctttgaattgctaattctcctgtgccttccaagtgtcgagcttacaggtatgtaacactgagagttcaggtgacacagtgtttcctgaacagttattctttctgataggcttagatatgccagctagtcagtatgtgttcagtctcagaacccagttgttgaaaaaattgggtaagaaagcaagtgaggtcatctctctgcctcagtggtcagcctaaaatgaagacagcaagtgatgtctacttagtcaagctcctttgatggccgtttagagtctgggaggtggagtggggatgagagctacactgagtactatctaggctctgtctgactacacttgagcataagaacaattaataaatgtttttcattgagattaaggttgaagtatatatagatgaattgtttaatacttcggcagcactgagaatggtggtccctgtgcgtggacccttttccttgtcctttgaaggctatttaaatttacttaaatacggtgacttaactgccattattgcaaatgctctttgtctttttttttttcctattgtaactcaaactttgttaacgagtaacaattttctgtgttggcaatgttaaatgtaaccttagctttcaattcattgctgcagttatgtttccagagcctgctttaggagataaacccattgcaaatgaagacagcattcattttccttctacctcgggccacacaaaattgattggggtaataaaatgacagcaccttgtaatatactgaaggctctttaattcgaaaaccagttccagcctgattccgagcttgtttaaagctaatttatggcttacataattttcagctggctgaccaaggtaaaggatgatgcatgaaaattgataaagaattaacttatgatacattcagatgtgtcttgttaaagtcagatggctttaaaaacagaaggcggagagaggagacagaaatacagaaatagtaagcagggttttttttgctgtgggtaacactattaacagtagtttaatttctcctcatgttctatcaaaactaacttactcttttctttgtaaaatcaattctattttgcgttttttcgtattttaaagacattttgtatttttcatgacattaaggacaatttgataaggttggataccatcacagtccttacaactttgacagtgcccagtgtatatggcaagtctatatgacagtgcccagtgtatatggcaagtctatatgacagggcccagtctatatggcaagtctatatgacagggcccagtctatatggcaagtctatatgacagggcccagtctatatggcaagtctatatgacagggcccagtctatatggcaagtctatatgacagacagggcccagtctatatgacaagtctatatgactgggcccagtctatatggcaagtctatatgacagacagtgcccagtgtatatggcaaggtagtggagaggctgcttgggaggttattcaggcaggggtttgcaaaatgagtgtctttctcagatgtaggctgaaaggattttgacttcctcgtgtacctgaactgagaaggaggtttcagcctttctgactctgtaggctatttcatcttagtatattatatttaagcattttaactcataaattatatatcttccctagtaaagtgctctgtattatgaatgaggccaagttttcaaaactgttgtcagaattccaaactggggactagacagtgtaagtaatttacatggttattatgttttaccttcataaaagacagtgaaagattggcatggttattttgtttgttttgtttgttcttgtcatcttgccatttcctatcatcgtcacaccctaagcactataaactgagtgtagtaactcatgcctatagtttcaagactcagacgctgaaccgaagcaggcaggttcctgtgagtcccacttccgtgggtgccacagactgagaccagcacgaaaccacgcctagccgtgcaacttcagagaagactgttcccttaagaaatgtaggaggggatcttggggaaaaactgttaagcatcactgacataaatagccttgatcttggccatttctttaatattgccttatttaatatttcctcagtgttaggtgttaaactgttttgtgttctgtacagcatgcactgtggaataattaacaagtaaataatagattcatttttttctatcatctgctgttttgttttaatcaggattattgtccatacattctatgacagctaatttccactgtgatgaatcagtttataacactttaatgttatgataatgtgaaagggttctacatttactataaaccctatgtaggattgtggaatttgatctcttccttgagtggcagttatgcaacagtgccgtgatgctgggcggcaagttcctagcagctgccactcggccatatctgtgtgggccacagatgatctccagggcgctgtgcttttgaacttccttgtgttcagtagacttgctgagtgctgcagtttttcactacggtatgtttcctttgacgatgaatttattaatctcttagtcagagagccaaagaaagactataatccacaagtaccaggtaaggtttcagatcactttgtaatcattgaaaactgtgcattgtatcaactctttgacacatgcattcattaagtccaagcctctataagcttccttacatagtactttgtggacctttgaaatgataggaacgtggcccttaccaatggccttgcaggttctgtggtttgatttcatgtatgttgtggagtataatctgtgactgaccctatccacagacataacttaccacctttattatcttgatgttaaaacatttcattttagtttcagcttagtatccaggaaaaacttatgttaataccgttaagtcttaataagaatagcttttaatgcagcaaagctgccttaggcttccagcgaagcctgagctggccacatccttgccatggaaggcactctgctctttgagtgagcagtctgatgcagggtgagtagtggactacaggtgtgatccagaccagtgtttgtgagatttgtttttaattttacttctttctaacaggatttgaaattctatgacttaagtagacttagaactcaagcaacccatctaggcacaaataaatgattgctattttccctttgtaatttatatattttgagaaagatatttctaaaacaaagttttcttttaccttcagaccaagttttaaagtttcataaaagtgaagcctctattgaaactctttactgtcttcagggaaaagagaatatatacagtagtaaatgcatagaaaaaaactgtagaaaaaattccaaatatcttctactttcacagaagcggactggctggagtaacctaaaaattccttcaaacattgaactgagtttttttttttaagttaaagatttagtaactacaaagaaataagattaagataattttggcattgttattaagatttatattttcatttgaactctccccttaagaatgcccacttgtcagtgtacactcatgtctttcttgagccattttgaggagagttgacacatgacttggtgtcctttacaggttgtaagaggattaattcttaagctctactcatgaataaccttacatgtgaccccatgaaagaacaagatcaagttagcacacataagtgaactaattgtcacagtctggtcaattccctattgaaataaagacaaatagaaatcatttgtatttggattcaacccaaacttaaaggactttgaaaagttggattgtatttaaacaatgaatcattttcatactaatcctaaagtattggtaattttaaatgttaagaaataaatagatagtgtgccaagaatttatgtctgtctttgaagaactgaggatgacaagacaggaagtatggcaggtaacagatgtctctaggatactacctactgcaaatgattgtagaacagggggatacttggcaagttttcccatggggtatgggttagctcagggtttccagcaatgcactgacgcgttgctgtgagaaggaggtcacagaagcgcacctgtctgtacatggatggatggtatataaacacatgacatgtaccattctcgtccttgctgtgttcagctttattctatcctgttctatgtctcctttagacattcacaacttactaaatccacatgtttgtcaaggctaggattgctggctatttgagtgcaatccagactgacttataggtctacatatttcagtaggtttccagatatattaatatagaagtaatcataacctatgaaaaattaaaatttcttttgttgcacattttttgttgattttcattttattatttgtgatatatcaaaagaataaataattttattggtttgatacaaaataatgtactaaattttcctttctctgtattatattgactgcagttcaccaaaacctaattgcgtatatggtttccacaggaaacttaatcagctaaacagaatttgttctttgaaattagttttgtgttgcatcagtgcagtgaagcagatctctacctaattattagtattttcatctttcaatgtttaaacctagtttgaatttgtttggttttagcccttataatctttaaatatttatcttttgtaacattataatttgatacagtttttttatttcattaatttcttttccttactgtgttgcctactaaaacttaaaaatgatgtttcttgaaaggaaaaatcaaaattcaaactcctagtatattttcttcaagtcagccaactgtgagaattacttatctactaaatgttaaggggttatggtttgaatatttaaatagcagcaatgtcaagggtcaactgaacagttaagcagataggtttgctggctgttagtttctgtgtagggaattttgtgtggtgctacatcattactgctttttctccaatatatgctttacactttaacttaattactaataaagcttaggaaacacaaacacagaatgcctcaaatttgtaaaactgcaaatgtttaggtttcttgccaactttcgccatcttggatttctaagccagtagcaatacttaatgaccttttctgttcttacagtagtatacatggccattattcaatatgccacaatgaatcatttttatcttcatcttgtgtctgctcagtttatatagaataaatatttatgctttctctgttttcaggactagaagattcagatagaataggtttgaagtatcagctataattcattgcttgaaaaaaaaaaaaaaaccttatactgatcctgtgttgaaaagaaaaccatcttaatcatttcagttgcagcttataactgagatagcatcactatttccttcttaagaaagtatctgtaaagtaagaaagcactggaatagttatgtgtagttcattgttttctacgttaagttctcaaaacagattgttaccttatttaacacaggagtacgattacctaatgacctaatgccaatctagattttaagtttgcagctataaatttcagtggattgagactgcaaaccccacgcattgatttgccagtatcagaaaaatattcagcattttgaaagtgttttgctgatagtatataattgttgacttagttgtgggaacacagccctgattttagccctggtcttgcttaaagcagttgacacattttaatagcaatcttataacagtgtatacaggtaaacttaatttcaccaatcacttaaacaactacttttctaatcatttaactctattttttgtttgtgccttaatgaaatacaaaagaataagaaaagaaacatgctttttaggaattctgaatagcatacaatcctgtttaattaacaccaaattcatatcatataacattaagcatgttacaagattttttatcatttttgttaaatacattagacagtaatgcatattttatgcctaggccaatttttaaaccatcaaagaaactcttgaataaactgaaacagttttctttttaaatttatattattttgcatatacgtgtgtgtgtgtgtatctgtgtgtgtattgccagcttgtgtatctgtgtactacatacgtgcagtacccatggaggatactgaaaatccctgaaagtgggattgcagggctacaggttgtgaactgccatgggatgctgggaattgaacactgggccctctgaaagagcaacctttactggtaaccactgagccatctctatagtcctgaacctaagtttttcattgcattattaaaatgttgtatcggacctaagtttatgacaatacagtctgttttattctaatttatagcattttactgtaaatttttatagatttactacagtagactttgactacttattagtgttctccttgcccatattcattgagctccatgcggtcattgttcacataagtagaatttatttaaagccaaaattataacatgcagcaatatattcttatagtaattatggtcagcatattctattcaaatcagagccctggctctttatgttttttttttttcttcaaactgaaacatctaaggccaatataaaaggtctcttatatgttgcttagggttggagacaaaattttatgctaaaataaaagtttggttaaatacagaaaatagaacattagcggctgctcatgtatattagaagtgactttattatccttttggtttttcattgtggttcagaggtgtcagctgtagttcctattatgatattcctgttgttgaaactaaaagcaaagaataggctttgagacttcacccacacacatacacacacacacacacacatacacacaaaacttcagtctgtcttgattacttaccgactcactgaaatagctcttgttactctcccttaacttcctctcatcacactcagtatttataccattgtccaaaatcacagtgacagcattgaacattccttctagaaaagtttgtaagattcctaaaacctgtgtaatcctgattttctttcttcctggcttgcagtttcttctcagtattcataactaaatttttgaccttagttcaagttgtagtgtgagtcctggttcttggacctcccccatctattcgtatttgtctctggatgatcttagtctcaagatgtgtctgtgtttggtgacttccggttttctgattttgtctctgacctcttcttccacagtcaagattttattgaccatttaagtgttggcttaatatgttagatagctgaagatcatctctaactttataatgacaaaatagaattcttggtccttccctactttaatatcttacttttcatataaattccatcatgcttgagggttataaaattagaagaattaggccaggcatgttgatgcatgcttctgctccagccctcagaaagaagtaggtggatcttcatattgaccagggctacatagtgagacactgtctcaaaatgggaaaaacaaaggctggagaataggatgagagagaaattaaggaaagagaaagagagagattattcctaattattctcatttgtttttctatctgcttgccctaattccaaagcatgtgtttttttttttctgtcatgtatctagtacttgtacttaccaacatttctgatgtgttactagagcctgctttcttacatctttaattataatctctttaattttttcccatcctttctttagacaacagagagaatgtgattaaagttaaaataagctcaggcagtttccttctctctctctctctctctctctctctctctctctctctctctctctctctctctctctttctttttctcattttattttttatttattcactttatattcccctcccctacccagctccctcccatcctccctctgcctcctatgactattttattctccccttctgagtgaggttcaagtatccttgcttgggcttgccttgtttggcttctttgggtacccgtgtgttatggttaatgtctatttataagtgaataaataccatgcatgtccttttgagccttggtggcctcactcaggatgatattttctagttccatccatttgcctgaaaaattcatgatgtctttgtttttaatagctgaatagaattccattgtagatgtaccacattttctttatccgttcttcagttgagggtcattttggttgtttccagtttctggctattatgaataaaaatgctatgaatatagttgagcaaatgtcttcaccaaccctacatctgacaaaggactaatatccaaaatttataaagaacacaagaagttagataccaataacccaaataacccaattaagaaatggggtacagagctgaacagacttctcaacatagggatctcaaatagcagagaaatacttaaatacatgtttaaagtccctagtcttcagggaaatgcaaactaaaacaattctgagattccaccctaacactggtcagaatggctaagataaaaaacacaagtgatagcacatgctggtgaggatgtggaacatggacactcctgcatggctgctgggagtgcaaacttgtacagacactttagaaatcaatttggcagtttctcagaaaactgggaatagttttacctcaggacccagctataccactcctaggcataaacccaaaagatacttcacccacaaagacacttgttcaactatgtttatggaagctgaaattcttaaccactccatgggttctcagacaagccaaagtatcacagtggcttgttaagctaggctaacatttcacctcaggccagactccctggcctttctgatgctcatgcacacagagcatgcttgggcactgggtctttagcctctcttccctgttcctagactatcccttctcgtgaacagttcctacacgtcattcaggcctcagcccctcagccatggaagactttcctgactaacaacctaagataagtatgtagccaatttctttcacttcacttcaactatatcaaaatattataatataatcttttttatttatattgtctgacagttttcccattgttgctcactactcttttttcctatcatttaagcaggcctgttaaatagtgaatgcatttttgttgcttaataaacaaataggaagcaattacgtaagttcaataattcctaagagttatttgtatagaaataataagattgtttaaaataaaaagtagaaatcattttcactctggttatagaattaaaatcacttatcttctaccttgtgcatctgagttcatatttccgtcacaaattttagaaatctatttttaactatgtgatgataaactatatgagtctgaatatttgctatctcacaaacattttctggggtttttttgtttgtttgtttttgtttttgttttttgtttttaccataccttgcacatgttcttgtatttttagttaggttaaacccaaagtcattctttgatgttgggtttttcctctttgatttgggtcttacattttacagataaagaaattgagtctggaattcccattgccttctatgatgtcataccaacactaagtactaatgcaggattcacatagggtttttggacttatttggagccaaaatatcataattgtttttcagtataatatcatttgagctatagacacaaacataaacaaactcttttgtatgtcatcctaagcgttgaaatggtaccaaatcagtgttgacttaaccgggtgtacagttcgagactgtaattcaggacccatgaactctgattcaaactcttctattaattagctacagggtcctggggaaatcagttttgtattctgggtctggcttgcttttttctggctttaacagaatgggcccatatggtcattacatgagattccatctagttttttaagccagtgaatttctattaggaaagtgtaatcttgacgagacatctgtagaaagcagttgtagtttatcttctctgactttggagttgtcatgtgtccagtgcttttccataaaacatagaggaaggtggcagtccctatttaatcaggtcattaaattcagcaaaatacttaataaaatcctcaggtaaagagtaaaagttttttaatgtaattttatccactattgattttccttatactaattttaaggtctttactaaattacattattttttatcagtaatccaaatgagtcttgacaattttatatatatatatatatatatgcaaatatgagtagattttgctaataattataataccttatttctttcttatttgtcttcaaaataagattaagtaacagcaccctgtttactgcaccttgaacttagctataataatcccagctttttttttttttttggaaacaagcgtattgtcggcgttctatacagccttgcagaaatcagcctcttattaaatatttattgggttgttgtgtgtatgagacatataacaaaaactatttatgaagtagacctcttatatcaggattatagccagtgattcaggctgcctaaactaagaggagacaaattggaccagagattaaaatgtttgctcttgctagttatatttctgcctgaatttttttaaatacttcatgccaacaagacaggtcaagcaatagtgaaagtttaaaatgtacagagattcaaatacagatttttctattttaaaagacaaacaaagcaaacaaagccaaacaatacaaatgtgttgtctgtctctgacatataaatacataaatatttaaatatttcacaagttcctatatgaatacatatttatatgtaaatagatatgcatatgtgtatatatactttatatataaatacataaatatattttacaaccttatatgtttcttaattatagcattgcatcaaaaatggacattaattcggttatatatgatgtcttttttttttttttaagactcttaagggtgaacttttacttttcccaaaatcctgtatggacctacctctgtagactcatgagtcttcttaaaatagtaactgtgcttccgtctttagaaaagaagcatttgtttgttgctttcaaacatttgagaactccatagccctgatcatccttttttttttctttttttttattcgatattttctttatttacatttcaaatttcctagtttcccctctgaaaacgccctatcccctccccctcctcctgctcaccaacccacttcctgcaggcctaatcatccttacatgtgcttattttaggccctagatcagtgttcctgagattataacacaaagtcattttactcagaagctggtccttgcaccagtttccagggcatcctctgcttctcctatgtgtatgttctctcaagatttaagaactgtaccacaacaaatcctgactgttggcaaaaactgtagacctccccttgttctcagtattactttctttgcttttagtcacccagcatctaaaaataaaaattggaaagtttcagaaataattcttcatttttctgtttcatgctgttccaaatatcagatgcagtcttactagcacactggttccttcctggaatgtaaattatttccttgtctactgtgtccatgcggtgtagatcacccattcttatagttaccagatctatggccccaatggcatgggagcttgtgtttaagtgtatatgtggcctttcaattgtagcctaatactgcttgaaagatagtctgtgtgctattacctccattccctcatcacaaaacattgtactgtttcatgtcaccatgaggaaatgaggggaacgaagcacagtgagatgtcttacgagaaaaaaggggccatattcaactaacttccattgtagtatgttgtcacaatgtttcacttgttattgttatttttagtgtgccattgagtatatattaaactatgcatgatagcagaaagcaaggctcagtcctgtgtgtagtttttcaccatattaaaatatgttgctgctaaaaaggaagaccactattcttgggaaaactacaaagatagttaagatgtttatcgaagttttcataagaaacattcagagagcataattgtcaagggtttagatataaaccttaatgtccttatctctttcagggtaaaccttgtctgtggtgcgatttttttctcttcaaactgtggtttgttttttatttcattttaccccagctgttctttttcattatagatctgcataagagtgataataaccttgtgacagagtcaatattaggctggtcgcgaaagctttctgccaaagaaattagtccactacctttaaatttagcctcaaacaagtttttagaacaaaatgagaaagcagccaccttttgaccaaaatatcactagaatgatccccaaggtagttgctaagattgttaacctctaaactacttgagctgggcctcttcagtttccgtagctttcagcaccactgtcttcatcctaactcctactagaatgacccactaacctctatttacagtatgcagtgtaatgacgttcctagcacaagccagagacacaaacatctttcatgctccttggaaaaccatgatgatcaggtctgtcctagcactagcccaccacctagaatcaatgtctgtcttaggtgtctgtggttatggcaaaatccacggccagggcaacttaggaagggtttatttggggcttatagttccagaggtatgagttctttttcatcatggctgggaagcatggaaacaggcaggcatggtgactagaggaccagctgagagcccatattaaaaaaaaaaaaaaaaaaaaaaaaaaaaaaaaaaacaccaaatgggggtagggggagagaacttaaaatggcatcagtcttttgacaccacagagtttgttcccagtggcatactttctccaataaggccacatgtcccaaatagccaactggggaccatgtattcaaatacctggatgtggaaaacaaaaaattatttaaattacaacaggatatttcccctagaattttctcctgatagttaaagggtcctaaatttttctggtattttatatttcataatttcagtgacttagtactttgaataatccattgtttcaactgattttaagcctcatgtggcggggattatataggagtggccttattttttaagtccaatacagtactatcacatagctatttgatttgatcaaggatggttgtatgcataggttacatatctttctttttaaatgggatatttgaaattttcattacacggaataatattgtcatagtctcatcttctagattgtaaaacactgagaagtacattatatcaatagaatcattagctgcttaaagagaccattggttaaatgatgcattgtcatataagctttataagtgatttgaatcttgccaactgtcctacatttgggaatcgtttaaatacataccagtagatgagttcattatagtaataacttaaagcaaatggttttaaatttaatttaaaagctactcaatagccaagagataatctgtaaattcaggaaataagcatacaatatatgtttgttcctgataataaagtacaactataggggatttttcttttgaatgtgatttttgcaaagtacttaaattttttgacataaataaaatatcttctttattctataaaaagttaatgtgccataggagatatgttacttggaaatctaatgagctattaatttctaataaaacaatgaagattaatggccttactttggggaaaatagcactcaacttgaaataagtatatttgagagagtttaatcagatcatttgagagaaatggttttataacttggttgttaataagtttatttctaaagatttagcccatcatgtggcgttagtcttaataaaggcataggttatgttgggatgagaaagaaatcatcatgaagattcaagaaacctaactttggagagaagaaagtgtctggtgctgtagcccagctttgtacagtattaatctttaaaaagcagactttccctacatgaggccaagggatcaaaatatattcccgactcttgcagaataagaagcttgtttagtcgatggagtcctatctgtacgtcctgtctgtgcgtcaccagtagcagagaggacgatggttctttagaaggacatttacgacatcttcacataatgcagaggttgttactgtgcttaagtgaaaatgattcttttcctctgtataggagacatttggaaatacctgattcagggtatgaaagtaaaatgtcattattaatgagaatgtctgctagccaaagagacatagttgaaaataaaactgtatttacaaatcattacagcatttatagttacgcttgtcataatacagttaaatcatgttctaatagttcttaaactatcagaactaaaaaaatacatgacatgagcttcattggtgaaatatttctcaataactttaattttctggcaggcagtaaatactgagaggggtaaggaataagtaagacacgcccatgtggacagaggaagagtgaaggagtcgagaaggagtggccctgagtattatttaactacatagtacttaagaacgaagtatcttttctttggagtgtttgctgctcatttgcctttaatgtttgggtcaaatgactggattataaaggagttgtacagtgttatagcaagcttgtatgctcttgtccagctccccttctcattaacaacttacggaggagttcccagccataaaacagaaagaagccttaggcggttctctgaagtaaacgtttgtgttcactagatgttgccagtgctgccgcttgtgtcttctctggacataattcaatcagagctcacttttgtctcatcagctgagtgttgttaatgttgttctgcgagtaatgattggcacttggttgttttatacagtgtctttccaacgcagcttttttgttcctttgtgtattgtttttcaagaaaggataactctgtgtagctctggctgtcctggaacttgatctgcataccaggctggccttgaactcacagagatccacttgcttcagtctcccaagtgctgggattagagacatgttccaccacctcctggctcccatgtgcatttttcgcatatgttcttatgagtaggcaagttgtgtgttaatcagaagtctctggcctgtgttaccatcactctcaggatgtgacattcgaatatgtcagcatggatttctgctgatgctaaccatcagttgccatggtgcttatgaggtttttcccttaggaagttatcattgttcctttttaaaaaggagttgccaatcctctatatttggaagacagtacaaagagttgttttattttaagtctctagacagtttaagttcagtaaaaaatgtgctatcacacttttgttcataggcagccttagaaacattttagctttcgtgaattggtgaccaaggagaaatgtaagaaagtaaaagaggtccccatacataatcatagttggaattcagttcccctaaaactcgctttcagtctgaggtagtttttgcagtgagtaaattaaaactttaataaagacactgtatacagaaggaattctgaattgagattagttaggaatttttaaattgaaaaaattaactgttgagtgtttaatgacttactagattgttccttaacatcagaattatcacaaaatattcacaattgtctgcctcccatagataacagtatataaggaatttaaaatattgaagtatattagctataaacatacataaacctgagcaatgctactaagtggactgatggtctctctgtctcttgtctgtctgtatttctctctcgctctccctctctttttgtttctcacctatgccccacttctctctttctatttgacttgttgctaaaataaagaatatacttttgtgtggttaagtaaaaagcagattgcttttactgtcttttgtttgaatacatgaaaaacagaagtaagatacagttatttctgagatgcttagggatggaacccacgggatcctgattgcttgacaagagcacagagcgatgtcctaggcctccattcacttgatggtatgtgtagttgagctgattttcaccaagagaatccaatggtactccagttttattctctattcctaggatttttaattaaatatgcaactctgtcataagaaaaacccatatactttttacagtaaatctaattaagcatttcttgtaagttcacttcaatgtctacgatggcccactaaagttggaattcagttgtaaaatggtagattaattgccttttgtatggagtgaaataagaatctcaatatgcaaagtcaggaaatgtaattagaatcctcaattgcttattcagtgcattggaaagctgaatgcagaagtacaggaaaagggccaaaggttgttaaatgtagcacattacacacgctttacactttatttaatgacccaagtgtttatggctgcgaagcaaatgcaccattcaaggaattacgatgggattgtgaagcattaaaaacgccagtgaattttagtctgaaggatgcagtgtgctcattttggctgaaacattttcattatcatctgtatttttccagttattaggataaatttttcctcattgtgcagcattgttgtctatagtaaagcatggtcttcaatactatagagagttaaaactaatgcatgcccccatatcaaatataataataataatagtaataatactaataatattaatacaactgaaattaataaaagaaagtgttgtttgggtgcagtttgaagcaatttgggtatattacttttctgcaccttttctatgactacaaactttttaaaaaaattttttctttaagtaaatggcattgcggcactatcttatttctaccctccagcccttctgagctcccctctttctagcccctcccacacctcccaactctcaagttgatagccttgttttcttttaattattgttgttactcacacacagacatatctatgcatgtaaatataacttgctgaatctgtttttgcttgtgtgtaagtagtttcgagcctgaccactctgcattgagcagccagaaagaactttcatctctgagaggccaatcctcctcctaccttccatctgactgcaaacttttataatagtgtctttaaaagatacacaacttacttctttaaaatatattgttaagatatatgcatatttgtgattgcaaatttaaattctattttagtaactattccttctctgattagtcaaagacactatattaaaatttttaaagaaaatagaaacctttccagtcaccacttatctgcagcccagtttgcttaactacagtagcaacaagtgtcctctctgagcatagcacggttaggaaagtaaaagccactgacttcactccttcttgtgaacatagatcctcatttttcctcacttattcatagaaatagtttgtacagtcaaactataaaagaactcaataaaagacatgctttctagttaataaagtagctgtgctcacagtggaaatgtaagaaaatccagaatctcacaggcaataaaataaaacaataatatcacttagccattcaggcccttagtgaaggaattgtatatagagccagttgtttttttttttttttttttttttnnnnnnnnnnnnnnnnnnnnnnnnnnnnnnnnnnnnnnnnnnnnnnnnnnnnnnnnnnnnnnnnnnnnnnnnnnnnnnnnnnnnnnnnnnnnnnnnnnnnnnnnnnnnnnnnnnnnnnnnnnnnnnnnnnnnnnnnnnnnnnnnnnnnnnnnnnnnnnnnnnnnnnnnnnnnnnnnnnnnnnnnnnnnnnnnnnnnnnnnnnnnnnnnnnnnnnnnnnnnnnnnnnnnnnnnnnnnnnnnnnnnnnnnnnnnnnnnnnnnnnnnnnnnnnnnnnnnnnnnnnnnnnnnnnnnnnnnnnnnnnnnnnnnnnnnnnnnnnnnnnnnnnnnnnnnnnnnnnnnnnnnnnnnnnnnnnnnnnnnnnnnnnnnnnnnnnnnnnnnnnnnnnnnnnnnnnnnnnnnnnnnnnnnnnnnnnnnnnnnnnnnnnnnnnnnnnnnnnnnnnnnnnnnnnnnnnnnnnnnnnnnnnnnnnnnnnnnnnnnnnnnnnnnnnnnnnnnnnnnnnnnnnnnnnnnnnnnnnnnnnnnnnnnnnnnnnnnnnnnnnnnnnnnnnnnnnnnnnnnnnnnnnnnnnnnnnnnnnnnnnnnnnnnnnnnnnnnnnnnnnnnnnnnnnnnnnnnnnnnnnnnnnnnnnnnnnnnnnnnnnnnnnnnnnnnnnnnnnnnnnnnnnnnnnnnnnnnnnnnnnnnnnnnnnnnnnnnnnnnnnnnnnnnnnnnnnnnnnnnnnnnnnnnnnnnnnnnnnnnnnnnnnnnnnnnnnnnnnnnnnnnnnnnnnnnnnnnnnnnnnnnnnnnnnnnnnnnnnnnnnnnnnnnnnnnnnnnnnnnnnnnnnnnnnnnnnnnnnnnnnnnnnnnnnnnnnnnnnnnnnnnnnnnnnnnnnnnnnnnnnnnnnnnnnnnnnnnnnnnnnnnnnnnnnnnnnnnnnnnnnnnnnnnnnnnnnnnnnnnnnnnnnnnnnnnnnnnnnnnnnnnnnnnnnnnnnnnnnnnnnnnnnnnnnnnnnnnnnnnnnnnnnnnnnnnnnnnnnnnnnnnnnnnnnnnnnnnnnnnnnnnnnnnnnnnnnnnnnnnnnnnnnnnnnnnnnnnnnnnnnnnnnnnnnnnnnnnnnnnnnnnnnnnnnnnnnnnnnnnnnnnnnnnnnnnnnnnnnnnnnnnnnnnnnnnnnnnnnnnnnnnnnnnnnnnnnnnnnnnnnnnnnnnnnnnnnnnnnnnnnnnnnnnnnnnnnnnnnnnnnnnnnnnnnnnnnnnnnnnnnnnnnnnnnnnnnnnnnnnnnnnnnnnnnnnnnnnnnnnnnnnnnnnnnnnnnnnnnnnnnnnnnnnnnnnnnnnnnnnnnnnnnnnnnnnnnnnnnnnnnnnnnnnnnnnnnnnnnnnnnnnnnnnnnnnnnnnnnnnnnnnnnnnnnnnnnnnnnnnnnnnnnnnnnnnnnnnnnnnnnnnnnnnnnnnnnnnnnnnnnnnnnnnnnnnnnnnnnnnnnnnnnnnnnnnnnnnnnnnnnnnnnnnnnnnnnnnnnnnnnnnnnnnnnnnnnnnnnnnnnnnnnnnnnnnnnnnnnnnnnnnnnnnnnnnnnnnnnnnnnnnnnnnnnnnnnnnnnnnnnnnnnnnnnnnnnnnnnnnnnnnnnnnnnnnnnnnnnnnnnnnnnnnnnnnnnnnnnnnnnnnnnnnnnnnnnnnnnnnnnnnnnnnnnnnnnnnnnnnnnnnnnnnnnnnnnnnnnnnnnnnnnnnnnnnnnnnnnnnnnnnnnnnnnnnnnnnnnnnnnnnnnnnnnnnnnnnnnnnnnnnnnnnnnnnnnnnnnnnnnnnnnnnnnnnnnnnnnnnnnnnnnnnnnnnnnnnnnnnnnnnnnnnnnnnnnnnnnnnnnnnnnnnnnnnnnnnnnnnnnnnnnnnnnnnnnnnnnnnnnnnnnnnnnnnnnnnnnnnnnnnnnnnnnnnnnnnnnnnnnnnnnnnnnnnnnnnnnnnnnnnnnnnnnnnnnnnnnnnnnnnnnnnnnnnnnnnnnnnnnnnnnnnnnnnnnnnnnnnnnnnnnnnnnnnnnnnnnnnnnnnnnnnnnnnnnnnnnnnnnnnnnnnnnnnnnnnnnnnnnnnnnnnnnnnnnnnnnnnnnnnnnnnnnnnnnnnnnnnnnnnnnnnnnnnnnnnnnnnnnnnnnnnnnnnnnnnnnnnnnnnnnnnnnnnnnnnnnnnnnnnnnnnnnnnnnnnnnnnnnnnnnnnnnnnnnnnnnnnnnnnnnnnnnnnnnnnnnnnnnnnnnnnnnnnnnnnnnnnnnnnnnnnnnnnnnnnnnnnnnnnnnnnnnnnnnnnnnnnnnnnnnnnnnnnnnnnnnnnnnnnnnnnnnnnnnnnnnnnnnnnnnnnnnnnnnnnnnnnnnnnnnnnnnnnnnnnnnnnnnnnnnnnnnnnnnnnnnnnnnnnnnnnnnnnnnnnnnnnnnnnnnnnnnnnnnnnnnnnnnnnnnnnnnnnnnnnnnnnnnnnnnnnnnnnnnnnnnnnnnnnnnnnnnnnnnnnnnnnnnnnnnnnnnnnnnnnnnnnnnnnnnnnnnnnnnnnnnnnnnnnnnnnnnnnnnnnnnnnnnnnnnnnnnnnnnnnnnnnnnnnnnnnnnnnnnnnnnnnnnnnnnnnnnnnnnnnnnnnnnnnnnnnnnnnnnnnnnnnnnnnnnnnnnnnnnnnnnnnnnnnnnnnnnnnnnnnnnnnnnnnnnnnnnnnnnnnnnnnnnnnnnnnnnnnnnnnnnnnnnnnnnnnnnnnnnnnnnnnnnnnnnnnnnnnnnnnnnnnnnnnnnnnnnnnnnnnnnnnnnnnnnnnnnnnnnnnnnnnnnnnnnnnnnnnnnnnnnnnnnnnnnnnnnnnnnnnnnnnnnnnnnnnnnnnnnnnnnnnnnnnnnnnnnnnnnnnnnnnnnnnnnnnnnnnnnnnnnnnnnnnnnnnnnnnnnnnnnnnnnnnnnnnnnnnnnnnnnnnnnnnnnnnnnnnnnnnnnnnnnnnnnnnnnnnnnnnnnnnnnnnnnnnnnnnnnnnnnnnnnnnnnnnnnnnnnnnnnnnnnnnnnnnnnnnnnnnnnnnnnnnnnnnnnnnnnnnnnnnnnnnnnnnnnnnnnnnnnnnnnnnnnnnnnnnnnnnnnnnnnnnnnnnnnnnnnnnnnnnnnnnnnnnnnnnnnnnnnnnnnnnnnnnnnnnnnnnnnnnnnnnnnnnnnnnnnnnnnnnnnnnnnnnnnnnnnnnnnnnnnnnnnnnnnnnnnnnnnnnnnnnnnnnnnnnnnnnnnnnnnnnnnnnnnnnnnnnnnnnnnnnnnnnnnnnnnnnnnnnnnnnnnnnnnnnnnnnnnnnnnnnnnnnnnnnnnnnnnnnnnnnnnnnnnnnnnnnnnnnnnnnnnnnnnnnnnnnnnnnnnnnnnnnnnnnnnnnnnnnnnnnnnnnnnnnnnnnnnnnnnnnnnnnnnnnnnnnnnnnnnnnnnnnnnnnnnnnnnnnnnnnnnnnnnnnnnnnnnnnnnnnnnnnnnnnnnnnnnnnnnnnnnnnnnnnnnnnnnnnnnnnnnnnnnnnnnnnnnnnnnnnnnnnnnnnnnnnnnnnnnnnnnnnnnnnnnnnnnnnnnnnnnnnnnnnnnnnnnnnnnnnnnnnnnnnnnnnnnnnnnnnnnnnnnnnnnnnnnnnnnnnnnnnnnnnnnnnnnnnnnnnnnnnnnnnnnnnnnnnnnnnnnnnnnnnnnnnnnnnnnnnnnnnnnnnnnnnnnnnnnnnnnnnnnnnnnnnnnnnnnnnnnnnnnnnnnnnnnnnnnnnnnnnnnnnnnnnnnnnnnnnnnnnnnnnnnnnnnnnnnnnnnnnnnnnnnnnnnnnnnnnnnnnnnnnnnnnnnnnnnnnnnnnnnnnnnnnnnnnnnnnnnnnnnnnnnnnnnnnnnnnnnnnnnnnnnnnnnnnnnnnnnnnnnnnnnnnnnnnnnnnnnnnnnnnnnnnnnnnnnnnnnnnnnnnnnnnnnnnnnnnnnnnnnnttgtttcttctaccatttgcttggaaaattgttttccagcctttcattctgaggtagtgtctatctttttctctgagatgagtttcctgtaagcagcaaaatgttgggtcttgtttgtgtagccagtttgttagtctatgtctttttattggcgagttgagaccattgatgttaagagatattaaggaaaagtaattgttgcttcctgttattttagttgttaaaggtggcattctgttcttgtggctgtcttcttttaggtttgttgagggattaccttcttgttttttctagggcgttgttcccgttcttgtattggtttttttctgttattatcctttgaagggctggattcgtggagagataatgcgtgaatttggttttgtcgtggaatactttggtttctccctctatgataattgagagtttggctgggtatagtagcctgggctgcagtttgtgttctcttagtgtctgtataacatctgtccaggctcttctggctttcatagtctctggtgaaaaatctggtgtaattctgataggcttgcctttatatgttacttgacctttttcccttactgcttttagtattctatctttatttagtgcatttgatgttctgattattatgtgtcgggaggaatttcttttctggtccagtctatttggagttctgtaggcttcttgtatgttcatatgcatctcattctttagatttgggaagttttcttcaataattttgttgaagatgtttgctggacctttgagttgaaaatcttcattctcatccactcctattatccgtacgtttggtcttcttattgtgtcctggatttcctggatattttgagttaggatctttttgcattttccattttctttgattgttgtgccgatgttctctatggaatcttctgcacctgagattctctcttccatctcttgtattctgttgctgatgctcaaatctatggttccagatttctttcctagggtttctatctctagtgttgcctcgctttgagttttcttaattgtgtctacttccctttttaggtctagtatggttttgttcatttccatcacctgtttgtatgttttttcctctttttctgtaaggacttctacctgtttgattgtgttttcctgtttttctttaaggacttgtaactctttagcagtgttctcctgtatttctttaagtgatttattaaagtccttcttgatgtcctctaccatcatcatgagatatgcttttaaatctaggtctaggttctcaggtgtgttggggttccctggactgggcgaagtgggtgtgctgggttctggtgatggtgagtggtcttggttcctgttagtaagattcctccgtttacctttcgccatctggtaatctctggagttagtagttatagttgcctctgtttagagattgttcttctggtgattctgttaccgtctatcagcagacctgggagacagattctctcctctgagtttcagtgctcagagcactctctgctggcaagctctcttacagggaagttgcgcagatatcttgtatttggacctcctcctggccgaagaagaaggcccaaaacaggacctttctcagacagtgtgttgctttggcagttcccaggtggtacagactctcacctaagcagactaaattcctaagttccttggagtcccgggaccaagatggcgaccgctgctgctgtggcttaggccgcctccccagccgggcgggcacctgtcctccggttcggaaggtggccggctgtccccggcccacacagggtgctgcctcagcgcctctgtgcttctgcctgttccagaagctgtcgggttctctggcgcaccctctcacctgttcagactaatttcctaagttcggcaggtcccggaccaagatggcgaccgctgctgctgtggcttaggtcgcctccccagccgggcgggcacctgtcctccggtccggaaggtggccggctgtccccggcccacacagggtgctgcctcagcccctctgtgcttctgcctgttccagaggctgtcaggttctctggcgcaccctctcacctgttcagactaatttcctaagttcggcgggtcccagaccaagatctagagccagtttaagaaaacgtttctttaactatagaagtgcgggtgtcttcatattttggtgttttgttttgttttgctttgctttgtattttttccttgtaaaatctttcctatacattttatatatgtttatatatgttattttatttagaaaaccagtgaaatattataatttggaacaaagaaccatttctttaatatttaagtgcttttattttgaaacattttgagcttacagataacgagatagataattcctagctccttctatccaggtgaccgtggtttccatcttgtataaccactgtacaatttccagaaccagaaagggttaccagatgattttattgactgccctgtgtgtattaccaaggtcttcagttgtcccaatagtctttctatggcccactgttccagactgcattaaatgatcatgctaccctagccttctccagtttgtgacagttccagcttttttcatccctgaccttggcatttttgcacactaccgttgagttcttttatagaatacctgctgtgtgctttcccatgattagctcaaggaaagactacaggagagaggtgatgtgcccttcttactgcatccattggcttggtgatgctaagtatactttaggggtaatgttgatcttcaacatgtgacgcatggtgatatttactgggtttttggcatcagacttattatgtaaagaaaaaaaaagggaattctatgcctttttatgatcttacctttaaaagaaatcctttaaaacatggcagtttacaaggtgaacatattcagattttaaaataatttgccattgcattgagttagtttctgcttaaaagaaaagaagatagataggttttattaattaacatcaagtatttgagcttttatcaaaagaaaaatgcactagttagtaaggggaaagagaaggagtctttgtcccaaaatagtggcacaagctaaatttcatctaaaggacatcttgcaacttctatgcaataataaggatttccatctgacaaataagacaagtgtttattcttgtttctctttcccaataactcttcactcttttccacccagagtactagaccattattacatgtcccttgtgtgcctagaaataacatctcttctccatgtcatactgtcagagtaaaaaaaaaaggaagctcgtgaaccacatttagtcattaggtgttatgggtgttgctgtcataggactgcacaccacatctgatgagaagaagtacgaggtcagttggaatcaatatgttttctggagtttgaataacaaacttaagcattaagagcatgcctgtgtgcattccagtaccccacagggtctgttttcttgacggttgcttcagggatccttcatgaaacaaatgtcaagcttgtcagggctgtcactaagaaaacgaaccatgtagcaggggtcttctttccctgggaaacaaacagatgtcttagctcagcacagtgaaagcccctgccatcactgcctgactcgcacttgctatccagtagaaagaaatgctgtgccgcagcctccttcccttgcgcgtcactcgctgtgcacttacttgttaatgatgctcagtctgttgcctggaggagttggttaatcttgaactctatgtaaagttcttataaaatttgcctacaatgttacatatacatttccaaaggacagcccttcagagggttatgcgatcaagctgcaatgatttttttttaaggtaaaaatctattacatttatttttatactgtcaagctatagcaatttcagtgttatatcctagcaattagtctggaaatttttttactcctctctgtgatcttttgctatatctaagtcacagctgcagtcatataaaataatagataggctttgatggttatataagtgatttaagatataaaaaaggcaaatttttaagacaaatcttcagaataagcagaagaagaaaaaccaaggccaagactgtgtatttgcttaagaggaggcagagctacaatagagacatgactttataagcgagcaggaagtcagccaacgaggagctgtcatagtgatgcctcagcttccagacgtatttctgttacatgttaaacactaaactgtttgtaacttaatggaagctgcagacttttattttacttaacagcattctcctatagcttctacttattaaatataaaaaacaaaatatatagacacttcctagtccttagacttcccaggcttattatcacatcaatacatcagtatttttatttttttatatgcatggttgttttggggttttttatttatttttggcctggtgtgtgtgggtgtgcatgcatgcacacgtgtgcaagtgttacctacagagaacaaaagacgacaacagatggagcccctgaaactggcgttccagatggttgtgagcctccatgaggatgctggagaattgaccctagtcgtctgaaaggacagtgttcttaaccactgacagtttctacagcccttttgcatttgtatgttgagttaaagtagtgttaaaattgctagataaagttagatacagtttattaacgaagtaatattagtctgcacacttagactgtacagatgatgaaggctttgtttgtttgccatgacttaaaggatatgaattttaaatgactctcctgggactggagacatgggtcagtggctgagtgcacctcttgctcttacagaggaacccagttctaccagcacctacatggggattgagaaccatctatagttgcagtttcaggaaaactcacaccctcttctgtattaaatagacacagaaatggatgtggtatgcatatgtaattgcaaacaaacactcataaacctaaaagtaaaaaatatcaaagtatgtggccattttggcacatactgcttcacacatttttgctttccttctttatcagtgttgttattgtaaatcaagattgctggaaacatgtctgctgaataagaaatgacaatatgccctttttaaagtgtgtattcatttacacacagctcttgttcttaaactctaatatttcatagaattcagaaaacattgagtagactccaattctatgctgattgcacccatttagacaggaggaatataatatacagaagaaggccttgtttgaaaagcatcttgacaaatgtggtactacctaacaaaatgtactgtcttagttacatttctattgctgtgataaaacaccacaatcaagggcactgacaatggcaagtatttaattggtctcatggtttcagaactgtagaatatgtggtagcagaacaaaggcatggtgcctggaagagctgagaattaacatcttgatccacaagcaagcggcaaaaagagcatgacagagataaggctagtctcttaaaccacacagctctccacagtaacacacttcttacggtatcacactcgccaatctttcccacacatttctaccaactgagaccaagtattcaaacattttgtttcagcttttgatgggcattctcatttaatccacgatagcctctttaccaagggattttctatactgacactagtctcattagtagaaggcagtggaaggtagaaaatgaagatttaatttttaataggttgtaactaaaatgtaatttctagaaacccttgcatatttactaaacctcttcagatgtcagttgatagaaaataatctactcagtagggataatttaaagggaagtttgaatgacttagcagtagtagttgttggaaaagtagtcaaaattgtattgccaagatgaactaaagtctcacctgatatctcattcacctataaagcttcagaataattgataatatttataatttctctgattttctaatattaatacagtctaaatcaaaaataatatgcaggttagagacaagaatactttcttcattgtactgattgtagaagagggttttgttgttgtctgtttttgttttttccataggaggcaattacacagacatgatttgcattgacactaagcaaaaattcaactattatgtgttttatttaaacttggttttataaaatacagaagtacagaatgattttttggagataactggcattaattttatgtaaagatacttgagaatttctgcctatgctttaattaactcagtaatgttttaggactagtgcctatttcagttaataaaaagtaaaagatcatattgataaatcagaaataacaggaaagcaagactacttggtacttggatattgttaaaggaatatatttaataagatagattaccaaaaataggatgaagtatttttccaggtgcttattatttatgctttgaaggtcagcatttaatattaagcacaaggcacatttcattcctctggtagcaggcattatgatgtcacttcattatccaccatgtgccatgggaaactgatgtgaattatgaggccaccacttagaatcgaaactagaagattgtaaacgttctacagcatgacaggcccatgtttcctattttagaaccgactgatcttcagataacatatggtggtacaagtaattgaaaaattgacagacctgtcaagaaagtatgctagatgagaccaaaatgccatgctggagcacataaagtgtcttacaagttaaatttattgttttttatcaaagagcaaagtaaaggctatctggttcccctacgacagagagcactgttcggtagcaggtgttcagaaagtaattctgaaaccttgaaaaatcggttgctcttaatcaacatttagaagaaaataccctgtaatataattaaacagtaagaattttataattatagatatagaatcttttccttattctagaatcaggatagtacattgttttgctggtaagaagtgtaggatttaatgtttgctaaaatttattttgcaggaagatgaaaatgaagctgaaaagaaaaacgcatctcaggagctcagcatggagcagaaaactccaaagaagtaaaggattgtccagtgtgttctgaagcgtgtacaacttaggctcaagcagataacgtttctgatttataaaatgttaattgtaaaatctaatttacaaaactgttctcaataaagtccttgaaataggagcttgtatttgaaattcatatttttttaaacaattcaactttgacttaaaggccaaaccatcagaatatcttttggtttctttattgttttgttttgtttatgtggctttgttgttgatagtgggatttattttgtttcagtttttgttcttttgagacagggcttcactgtgtactcttgtggacctaaaggtacctatatagaccatgttgtccacagactgaaagagatgtgggccaccgtaacagcctctcaaatgttttttttaaagaaagaaattgtcaaaaatacaagaacatgattttctttgtcctgtgacctaagtagaaaagggttttgttgttgtcctctgttggtatctgtatggcctaaaagaaacctctgggaatatgtaattcaattttatttttatttttattcttttttactatagtcacttgttatcttccaaaaggacttactggagttccagttaccaatataaagaaacccagtattctgatttgctttcctgttcctatggtaaacaccataagtaaaagcaactttggggaccaaaagattcacttcaacttacacttccaggtctcaggaagccatggagaaacacagctaactggctagcttgactagctcatactgacctagctttcttacacaacctggccacagctccctaggaagagtgccacccaaagatgggctgagccctccgctgtcagtcaagacacctctcacaggtacagccacatgcctgtgtggtttgtgcagttacttagttaatgatccctctgccaggtgaatgtaggttagtgtcagactaacaataaaactaacagggaccaccaacataattaaaacaggaaatgctcaggcatgcaaacactgacaaccagccagtgccacaggaaatgctgatgcgttcgctcttcacatgatactccagatttgcagaaaggaagaaaaataatttgacagtcctttgtagcagagatagtaccatgatttttaagccataaaaatattttcagtaagggggctagagagatgactcagtggttaagaatgcttaccgcttatagaagactggagtttggcttctagcatttaaatcttataatgccagcctcaggggatccaggaagacttgcagcctcagtagacacctatacacacatgcacacatgcatacacatgcactcatgcacgcacataatctttttaaaaatagttagtaaggacctatgtatttgtccatacaaactattctcagctatttaaaaacaaaaacagtctctctgtgtgtcctgcttttgcttatacatttccaaaccctttctgaccctcatgtttattagtgtgttaaagccattgaatcctccctgcttctgacttctgagctgttatttgccaactccagcagcatgcatgaatctagtcgcagtttgtataaccatagttctggcagatgtctttgtttgattattgaagtcaaatttgcttttaaaaaaaaaagggctagaactttgagggaacttataagagattgcaacatgcaacatcctctcctttagaatggaatcagtatgttttccctggggtcgtatttttatcacttgcatctgacaagctcactaaatgtgtgacagtaggatgtgctggcagcttgataccgtaggctgaaatagagaaaactgcaagtagggcaaacaagaagtttactgaagggtagcttctaagctaactggaaatcggaaaaggagctcacacttagaaagcaccctccctgggtgaactctggactgggccaaagcaaaggctgagaaagcagttcagctgcacgggggggttgccctaagcagtttcaaaatcactgagacatttttttcctacgtggatctatttcagaaaacccatatttacacagattggtatattaccaggtttttggtgataatggttgttttgtttttgtttgttttttctttttttttttaattggatattttctttatttacatttcaaatgttttcctctttccaggtctccccttcagaaaccccctattccatcacccctctccctacctctgtgagggtgctctcccacccacccacctgctcctgcctttgcaccctggcattcccctacactaggacatcgacatcgaaccgcctcaggcccaagggctactcctcccactgatgtccaaaaaggtcatcctctgccacatatgcagccagagccatgggtccctccatgtgtactctttggttggtggtccagtccccgggagttctggggggggtctgacttgttgacactgttgctcctcaccacccatggggctaaaaacccccttagctccttcagtcccttctccaactcctccatctgggaccccatgctcagttcagtggttgactgtgagcatctgcctctgtatttgtcaggctctggcagagcctctcaggagacagccatatcaggcacctgtcagcaagcacttcctggaatccacaatagggtctgggtttgatgactatatgggatggatccccaggtgaggcagtctctggacggtcattccttcagtctcagctccacactttgtctccatatttcctgcagtgagtattttattccaccttctaagaagcactgaagcacccatactttggtctttcttcttcttgggcttcatgttgtctgtgaattgaatcttgggtattctgaaatttggggcttatcataccatgtgtgttcttttactgaaggaggcagaggcaggaggatcaccccgagctacacctttgtttttattttgaatcagggtctctgtgtagtcctagctgttctgggacttatgtatactaggctggccttgaagttagagagatcctcctgtgtctggagtgttgacattaaagttgtgtgccactatgcttgactgtcactttgaacggtaatgatagctatttcataccttagcagccacactacatgttctgggttatgcatacagtggtgcctataaatatgaggtttatgatgctgcttgtcatgttctaataatgagcaatgtgagccttaagagaagtaaatgaacaaaagctgtgtactttgtatttagcagcaagagtttaaatgcaaagcaccttacccctaaatatctcagtctttacataatagccactaatatcatccttcttttgatccatacttttcatcctacttcacccgtgattctctgcattaacattttagtgtttttattatttttagatttgtttttattattatgaactgtgtctttatgtggagaagtgtgtgagagtgcaggagcctttggagccagagaggccagaacctgcagagctagtaacagttgtgaagtgggtgtgaggaatcaaaccctttatcttctgcaagaacagtatatgctcttaatcttgaagccatctctcctgagcagcttttattcactttacggcttttgtttaagtgaaatagaggaaatggcataactgtcattctttatactccaggatagaatggtgctcgtaatgaaccaactacaaaaacaacctattgtttgtctgtgacatcccagaagagctttgtccattttttaaagacaagtggttgattccatttctgtatgttgccatctgctctactgttgcctgcatttctgaaatgagctgttagtgtgggagacacagtgaaagccactatatgcgcatattcagtacttgtacttaactgatactcttagtcaaaaattgtatgatgtctctttaaacaagttttcggtgcgccagcaagatggtacagtgagaaagggtgtttgctatcaagcttgacagccttaatttgatccctaggatccacataatggtgagaactaacacgggaaagttggcccctgacttgcacatatacacaaacacccaaataaataaacaaaggttaaaaaactttttaacaacatttacccattattttaggatagtgaatgttacagtaaaactccttaaatttcccttcagaaaaaaaatctgatgcttaaagcccagacttgggtattctatgttaaaatatatggaacttctttttaagatttacctagttttgaaattgtgtgtgtgtgtgtgtgtgtctgtctgtctgtctgtctgtctgtctatctgtgtgttctatgcggggacttgtgttcctgtatgcaataactgcagaggccagaagcatcaaattctctaagcctgaagctagagacagttgtgtgctgtccaacatgggtgctaggagctaaacttggatcctctgtacagcaatttaagttaagtgctgagccttcttcccagtgtcatatgtaactctcataatgccacaaaataactatgtgactgtatcactaatcactttatttgcatgctatatattatcatgcaatagattgtattacatactagaccagcctgccataacaaaataaccagaggttgcattggttaaaacacaagaagtttattttttttcagttaagtatgattataatttctagatcaaaacacagtaggatttactttctttcccacaacacattctctccctcacttatttggattgtgttaaggatcattacaacagtatctgtggctctatagatcctttatatttacagaaagtcttcagaaaggttgttagttggcatatggtctatgagttaatttctacaggttatctactgtaaaatgaagccttcctattcttggtatctctttagttctgttacttagctcatttcctacccagtgttaagtaccacagcgctgaggcagcctgagactaccaatgcctggagaacacagcttcttttgtacttcatgatgcatgaaaacctagcccacaattcctagaaacaaactgtgttattgttagcttcggagttatatttcttcataacctccaagaatttggaaataaaacatccttttattagtctgtctctatcacaaacaggaatagcattttttttttcttaactgtgtttagactacactcattccttaggtctaggctataaatatcagaagtaagcagggatgttacaccacacagctagctggcaaatggaagttgctagatacaagttcttaaatccattgaacaaaactttaataagaccctatatgttagccatgcagttttctgtcacaaggtcttcagtggggaatgacaatagatgctactcttgggtattgtccttaccgctaataaatttcactgaattcatttatattaaacacccattcaaatgtataaatctgggaacatgagcacatctatgtgtattacacaggattctccacagagctaaagatggggagattttatagattggcctatacagtggggactaggtagtcagaaaacagctggttggaaaaacaagccagtagctgcttggcccttgaagctgaatatctcagcagttccaaagcaatggtgggaacctggaagattcctggaaagctgctggtattcagtcatcattgggaggcccaagagactggagtctgagccagtagagcacatccacagcagcaatgggctcactcagggaggagcaatcgcttcttcctctcatatctctattcaggagctttccactggaagttgctacctctgaggaagacattttagttagtctcttctggaaatgccatcacagaagagcccagacatgtgtcttcctattgactccagaccctgccatatcactggaattagccattacatcatgtgacctcagttccaatctacagagcatttccactcaaattgtcctttcttgtagttttgaagtcgcacagccttgctatattccctgatttatcttgtttgtttgtttgtttgtttgtttgtttgtttgtttatcaccttgtacaatgctcaagtcaagtggatcagggacctcaacatacagttcattggcacaggagaaaacttcctgaacagaacaccagtggctcaggctctaagatcaaccatagacaaacgggactcatgaaactgaaaagcttctgtaaggcaaagggaaagatcttcagtaaccctaccttcttgttgaagtttgcctgatgtaaaattccacacagtggaaacacaagatatgtaatttttgcctcactgcctttactcagcagagtgattttgaaatggtctgtttattcttacttactgaaaaatatgtcctcatgtgtgaatataccacagtctgtccatctggtgactgacatttaaacaaatgtaaaatagtagaaatacaaatagtcaaaaagcacacaaaacattattagtgattataaaacagctaattaaaacaagttacagctatatatccaccaagctctgcataggagtggctgttacccagatgaccacatgtacctattgaatggttgaactagcgctacttcactttaagatgtggtaccaaattttggaactatactgaaagtaataacaatatcacaataatttgtgttcaaattttgtgttgaaatgcttctttgaatagatttaattaaattttaattttttttaactgtgaccactagaaaatttgtatttacatgctcttgagcagtggtcttgaactgtaattctaagtctaaaaataaatcttaaaaagatatagaaaaaccctgaagttttcatatactattggtagagacataaaatactacatcatttcaaacaattaaaggatctttcataaagttagccaaacccttagtatgaggggatgaaaacatgttcactccaagatttgtacagaatttgtaaccatcttcttcataatgaccacattctagagccaattattgtccctattcagctagaagtcacacttcaaacgggttattcctttcagcatgtaatgtgattcatagttagggtctaattcttataactgtaacaacagtgtaaaaaataattactacaaagctactatgaaatgttacatagaaatctaaacaatacacaaaagaactacaaattttaacatttaaaaagtgatgtcgcttatttgaaaatgattaatagactcacagcttttttaatggtcccatattctaatttttttaattcaaatatggctgtgtgtttcagtgaatgctatccattttccttgggtttggaaagtttttgaggggagagcagatatgtgtaccctgttgcttgatattggaatgtgtgtggcttgccttgagtctgatttccactccagagggcagtgacttcccttggtaactttctgagcacccagatgaaatgggagcgggatcagaagttctgctcctttaataccgttagaaaactaataaaattattatttgaatgttaatattcattttgcattatattctttttcatttttttcttttttctattagatattttctttaattacatttcaaatgttatccctttttgtagtttcccatctgaaaacccctctcccctccccctgcccctgctcaccaacccacccactcctgcttcctagccctggcattcccctatactggggcatagaactttcacaggaccaagggcctctcctcccattgatgaccaactaggccatcttctgctatatattgcaatatattcttttgcaagacaatcattaatcgttttcttctaagcaagaactttgaatgtacctgctttcctgcctacaatggtttttttaattggatatgaacaactcatacaaaggacactctctcttacaaaagttttacatggttaccagaaaaatactgcaaaacctgctgaaacaagcaacaaactaattttatttgacatttctccagagcctgtggttcctaaggcctgtacaggtttctcttgattgagttctgatactgcttgggactaaagcaacttcctcctgataccaaactaaataaggttcactcgaacttgcaaaagttgattagaaaactattccattttccattacatttttttacaaagccatgaatgagcaaatttcttctccatttcagactactgagcaatcatagcaggtaataaatgttgtcccattgtgaatgcaatgtggaatccgtgactttgatatctgcaaaggaagtcaagcacttaaagcaacagtatgaaagctcaagtagctatggtataattctgatttgtttttagaaaactcctaatttcctagttacaaagccaaataagatcagccctttaaaactactgagccatgaaacccattctccttaagggctttaaatttgggagcacactcatgaaatttatagctctgatgagatatattttgcctgcagtcaagatgagagttagaccattggtttctcagcatgacacctatgtgttctcgtgtgcagaagatgtcattaggctcataatatcacagccaacatcacattaatgtttacaaggttgcttttgtcacttttacatcttccatttacacctgcagcatgctaaatagctcacactagagaataagcccctactttcaccgccactgtcagtggagtgaaataaaaccaccattttcattcatattcatggtgttcaagcacagattagcagaagagacagcttctagaaacaatagataattggatcagatcaggtgcccttataagcatgcatatggtggctttcattattgacacgtggtgagctgaaaaggtagcttggcaattctgactcttgctatttggggcagagcctgatccaaaggagatgtgagatttccattgcttttaaggatggattaacttcttcaggacgctcagacctcaggacaatgagcaaaggagctgttaagtgagacctaatgtatcagaaaggcagccacctctacaggaacctgccatctgcctcacataaggaataaagagctctgcaggaagaaacctattatttggaaatggtagtgctcttttttattaggcagtgaaattctgtgattaagaaaatcagttctgtaagcagtgttcttaaatttgtttagtgtctaagacgttttatctgtaattttattattccctctaccatttactgttatgacactctcagacacaaatgagacaagaaagagtacgataaattcttgggtactctggagtgagactaagcaattattgatatcatttcattctttaaagagatgtaagaagatatttgttttgattcttaaaggtgattatatgtaaagcataaatatctagactccaggtccatatttgtatttttttttaccttaagcagaaatatagaactagtcagagctataaatcatgaatatatttcagcctccagagtattgttgaactgaactagctttgtaattacgctaagaagggataacactaatgccttcaaaatgttattttgttgctaaaattaaattaacaaaaggacaaaaggaacatctgtttggggttatgatactttctcctggggaatactttcttttgaggctctcttattggcctgcattaatttggattttattattttattgaatctaattctaaaagtcaggaatggtttatggaactctcctggtacaatgttggttttcagggtctttagacacatttctcctttgttcctacatcctagctcctgagggagaacagtagtcttgcctgatactcaaaattccagttttgcatattgttgtatgatggttctgtatcactccatcgtcagacaaactggatctttatttactgttgaacaaaacaatccttcaacaccatgattctgtcctctaagagcttcggcacctcatgtatctttatattatttttcagttgagagtttcatagaacatgtttgatcactttctgctttttcatatctacaaacacacaaagatcactttggtgctgcccaaatattcttcttacatctgtgggcttc

SEQ ID NO: 966 - DNA, 2469 bp, Mus musculus
cgtggacgcgcttgggggcgcgcgtgtggggcgcgcgccgcgccgcccggagggccccggagggagctgccaggcgcctctgcaggctcagcgcccagatcccgcaggacaggtcgagtctccagccgccggggtcaacggctgcggtttaagactgcagctgcttcctgactttcactggcgcttagggacagaagttgaaacactactctccaaacgaccacctcacggattccttatggatcgcagctccaagaggaggcaggtgaagcctttggccgcttctctcctggaagctcttgattatgatagttcagatgacagtgattttaaagttggagatgcttcagtatctgatagtgcagctgcttctgctgctggcaccacaccagccacaagccctcctgctgtcacctccccttctgtccctaccaccactaccaccaccacggaggaacaagtcagtgagcccaagaaatggaatcttcgtcggaaccgtcccctgttggactttgtatccatggaagaactcaatgctatggatgattatgacagtgaggatgataatgactggagacctactgtagactctctgattcttgagaagagtcaaaattggagttctcagaaaatggaccacattctgatttgctgtgtttgtcttggagataatagtgaagatgcagatgaaataattcagtgtgataattgtggcattacagttcatgaaggttgttatggagtcgatggggagagtgactctattatgagttcggcttctgaaaactccactgagccttggttttgtgatgcctgtaaatgtggtgtatctcctagctgtgaactatgtcctaatcaggatgggattttcaaggagacggatgctggaagatgggtccacattgtttgtgccctatatgttcctggagtggcttttggagatattgataaattacgaccagtaacgctaacagaaatgaactattctaaatatggtgccaaggagtgtagcttttgtgaagatcctcgctttgctagaactggagtttgcattagctgtgatgcaggcatgtgtagagcctatttccatgtcacctgtgcccaaaaggaaggcctgctatcagaggcagcagcagaagaggatatagcagatccattttttgcttattgtaagcagcatgcagacagattagacagaaaatggaaaagaaaaaactacttggctctacaatcctattgtaaaatgtctttgcaagagagagaaaaacagctgtcccctgaagcacaggcaaggatcaatgcccgactacagcaatatcgtgccaaggcagagctggcgcgatctaccagaccacaagcctgggttccaagggaaaagctacccaggccactgacaagtagtgcttcggctattcgtaagcttatgcgcaaagcagagctgatgggaatcagtacggatatctttccagtggacaactcagatactagttctagtgtggatggaaggcggaagcataagcagcccgctctcactgctgattttgtgaattactattttgagagaaatatgcgcatgattcaaattcaggaaaatatggctgaacaaaagaatataaaggataaattagagaatgagcaagaaaagcttcatgtagaatataataagctctgtgaatcattagaggaactgcaaaatctgaatgggaaacttcgaagtgaagggcaagggatatgggccttacttggccgaattacagggcaggatgccgagaaagacgaaaaacagttactggaattatacttaaaatcagaagataagagatctataaccttaatttttcataaaaatttattcaggcaatgctcagagtgtgaccaggcagggagcagcgacatggaagcagagatggccatggaaaccttaccagatggaacaaaacgatcaaggagacagattaaggagccagtgaagtttgtgccacaggatgtcccaccagaacccaagaagattccaataagaaacacggaaagagttcctagggaaaggaggcagaggcagtctgtgttacagaagaagcccaaggctgaggacttaagaactgagtgttcaacttgcaaaggaactggagataatgagaatcttgtcaggtgtgatgaatgcaggctgtgctaccattttggctgtttagatcctcctttgaaaaagtctcctaaacaaacaggctatggatggatatgtcaggaatgtgactcttcatcttctaaggaagatgaaaatgaagctgaaaagaaaaacgcatctcaggagctcagcatggagcagaaaactccaaagaagtaaaggattgtccagtgtgttctgaagcgtgtacaacttaggctcaagcagataacgtttctgatttataaaatgttaattgtaaaatctaatttacaaaactgttctcaataaagtccttgaaataggag

SEQ ID NO: 967 - protein, 773 aa, Mus musculus
VDALGGARVGRAPRRPEGPGGSCQAPLQAQRPDPAGQVESPAAGVNGCGLRLQLLPDFHWRLGTEVETLLSKRPPHGFLMDRSSKRRQVKPLAASLLEALDYDSSDDSDFKVGDASVSDSAAASAAGTTPATSPPAVTSPSVPTTTTTTTEEQVSEPKKWNLRRNRPLLDFVSMEELNAMDDYDSEDDNDWRPTVDSLIKSQNWSSQKMDHILICCVCLGDNSEDADEIIQCDNCGITVHEGCYGVDGESDSIMSSASENSTEPWFCDACKCGVSPSCELCPNQDGIFKETDAGRWVHIVCALYVPGVAFGDIDKLRPVTLTEMNYSKYGAKECSFCEDPRFARTGVCISCDAGMCRAYFHVTCAQKEGLLSEAAAEEDIADPFFAYCKQHADRLDRKWKRKNYLALQSYCKMSLQEREKQLSPEAQARINARLQQYRAKAELARSWQAWVPREKLPRPLTSSASAIRKLMRKAELMGISTDIFPVDNSDTSSSVDGRRKHKQPALTADFVNYYFERNMRMIQIQENMAEQKNIKDKLENEQEKLHVEYNKLCESLEELQNLNGKLRSEGQGIWALLGRITGQDAEKDEKQLLELYLKSEDKRSITLIFHKNLFRQCSECDQAGSSDMEAEMAMLPDGTKRSRRQIKEPVKFVPQDVPPEPKKIPIRNTERVPRERRQRQSVLQKKPKAEDLRTECSTCKGTGDNENLVRCDECRLCYHFGCLDPPLKKSPKQTGYGWICQECDSSSSKEDENEAEKKNASQELSMEQKTPKK

SEQ ID NO: 968 - DNA, 215739 bp, Homo sapiens
tccatttgcttggtagatcttcctccatccctttattttgagcctatgtgtgtctttgcaaatgagatgggtctcctgaatacagcacactgataggtcttgactctttatccaattttccagtctgtgttttttaattggggcatttagcccatttacatgttggctaatattgttatgtgtgaatgtgatcctgtcattatgatgctagctggttatttcacctgttagttgatgcagtttcttcatactgtcgatggtgtttaccatttggcatgtttttgcagtggcttgtatcagttattcctttccatgtttagtgcttccttcaggagctctggtaatgcaggcctggtggtgacaaaatctctcagcatttgcttctctgtaaataattttatttctccttcacttatgaagcttagtttggctggatatgaaattctgggttgaaaattcttttctttaagaatgttgactattggcccccactatcttctggcttgtagtgtttctgttgagagatccactcttggtctgatgggcttccctttgtgggtaaccagacctttctctctggctgcccttaacatttttttcctttatttcaaccttggtgaatctgacaattatgtgtcttggggttgctcttctcaaggagtatctttgtggtgttctctgtatttcctgaatttgaatgttggcctgtcttgccaggttggggaagatctcctgaataaaattctgaagagtgttttctaacttggttccattctccccatcactctcaaatacaccaatcaaacatagatttggtcttttcacatagttcttggaggctttgttcatttcttttcactcttttttctctaatcttgtcttctctattttaaccatttgatctacaatcgctgatatccttccttctgcttgatcgaattggttattgaagcttgtgtatgcttcacgcagttcttgtgctgtggttttcagctccattaggtcatttaagctcttctctacactggttattctagttagccattcatctaaccttttttctaggtttctaccttctttgcgatgggttagaacatgctcctttagctcggagaagtttgttattaccgaccttctgaagcctttttctgtcaactctcaaactcattctccatccagttttatacccttgctggagaggagctgtgttcctttggaggagaagaggtgttctggcttttggaattttcagcctttttgctgtggtttctcctcatcttagtggttttatcttcctttgtctttgatgttggtgacctacggatgtggttttggtgtggatgtcctttttgttgatgttgatgctattcctttctgttcttattttaccttctaacagacaggcccctcagctgcaggtctgctggagtttgctggaggtcctctccagaccttgtttgcctgggtatcaccagcggaggctgcagaacagcaaatattgctgactgatctttcctctagaagctttgtcccagaggggcacccacctgtatgaggtgtctatcggcccctactgggagatgtctcccagtcaggctactggggggtcagggacccacttgaggaggccgtctgtctgttaatggatctctaacaccatgctgggggaaccactgctctcttcagagctgtcaggcaggatgtttaagtctgtagaagttgtctgctgctgccttttgttcagatatgccctgccctaagaggtggaatctagagaggtagtaggcattgttgagctgtggtgggctctgcctagttcgagcctccctgcctctttgtttacactgtgagcatagaactgcctactcaagtctcagcaatggtggactcccttccccccaccatgctccagcgtcccaggttgatctcagactgctgcactagcaacgagcaaggctctgtgtgtgttggccttgccgagccaggcacgggagggaatcccctggtctgcctgctgtgaagactgtgggaaaagtgcagtatttgggcaggagtgtacagttcctccaggtacagtcattcacagcttcccttgtttagaaaagggaaatcctctgaccccttgagctttctgggtgaggtgacaccccaccctgctttggcttgtcctccatgggctgcacccactgtccaaccagttccagtgggatgaaccaggtacctcagttggaaatgcagaaatcacccatcttctgcatcgatcttgcagggagctgtagaccggagctgtttctattgggccatcttggaagtgccccccaaggagctttattgagagacagaacagctctcagtgaagaggagacccaaaatacctagctcccatcctcaggcaggtagtcctgaaatgtgtctgagtctggctgagtctgaggtttttatgggctcagaatgtagaaagtgcatgctgattggtctatgggtgggcccagaaaaagcaccatctgattggccgaaaggcatcaaagaacttctcactcctggtcatggactctacccagaacaggtagcctggcccacaggcttcaggccatccctggcttgaaggttggtcctcactggggacctaccctttcccgcgtaggaacctgtctgcctcccaccaccatcaaaaccttgaaagcccatctaattggtggaatctaaatcatatctataatcctagttttaagtgagtctgagaaacgtagtttttattctaacatgatctgtaatacagaggaagaggtgagaatgaaagtcacctgctagtggacaatatctagcccaattttatgctttgtctactcagcaaccagatacacccttctatccgtaaacctccccacaatcacaatagcaataaaaccactaccaccaaacataaggtaactcttcctaatatagatgaaaacactgtctccttcagggtcagaatttgtccttgccccttcgaacatactgggatctgattccatttatagggatgcagtgagagagatgggcatgaggagaatcagcatccctttgcaaagtaatgaactcagttgagtccattcattacagtgtcttcaacaaggcaggtagcttcaccaagaaagaagggtctaattctactaagaaaatgatgctctgagattttgaggcttggttttcaattctcaaggtaccattctatcccaataaatatcctaaattcttacaaagttgcctaaaacctgcaacttgtgtattcagatttatcaattgttaatgatatcagtcctatgatgacatgggatgaaattaatttagagtagtagttttcattggagggctgagtgatggtggtgccactgttgttggtagtgatttggctccccagtggatatttggcaatgtatgtccattttgagttgtcacaatttgggttagggagagctgttagtggcatctagtggatagagtccagaggtactgagatatcctacaatgcataggacagccttcctcagccttttgccacagggccaaagaattatctggcccatcaataaggacaaagataagaaatcacagaagctctctgtgtgttggaacaagttttgagtcaagcagttaacgtcagctggatgtagtcactcacacctgtacccccagcactttgagaggctgaggcaggaggatcagttgagctcaggagttcaagcccagccttggcaacgtagcgaggtcccatgtcacatttagaaatttttttaaaaagttaaaaccctgggcttgtcatcattgttctctaatttttcaaaggctgtcagaactgccacctcagcccaccccagtccatttattgcttatttgcattttagtgttctatcataacaaacaattgctaacagatcttgtgttcaacaggcaccttatttcagttgatgacatatgataatttaagtaaatgtattaccactgcatgtcttggactaccaatatcttattttccactggtaatcaagatatcattgcctttaaatccaaactgggtcaaataataaatatcaaattcccagtgttgaagttttatttctttattttttgaacatctttatataccaactattgtatcagacaaaattagtatagcaaatagaaaacactacatatatttcatgtagaaaaatattttggtatgtataaaatcatttaaaagactgaaggagtgaaagtcagagattcaaggaaattttcagtttcaagatcatataactgtagctatgatctggaggtcagaaaactagtgcagctgttgctgctaaccctctccacaactgctcctccatcttgcccttatacctttgaattaagctagtgaatatggattctattcttatagatgattgagcttcttttctgctgttacagctacacgaacatggcctctgcctcccttacattttctacatatcaagatgcccatgggatacctaatacatctgagttaagtaattgtttaaagtttttaaaaatttggtttctccaatgttgttagttttatttaaatatttaatgattcttggttgtctatatatatttgtgttcatagtatataatacgtagtgttgatggccagaattgatgtactttgtccaaataagaagccctattcacctggcagagaataaatgcaagttttcattataggtatactggttctgatggttgtgtgtttgtttgtagggttgaggaagttggtggtatagggaggttacatgtgagtaggctcttctttatgatttatgagtagtttctatgctggatcttcctatttcagctattaagacaactgaaagtcagtgaggttactatcagtctccttcctataaacctgttttccattctggtaatctctgaagttagacttcccccttagtagagctgtatttgaagttttattcaggagagaaatgctattttcagctcctctgacaacagaattactatgtggctcttttccttctaatgaattatccagtctattgtccaagtctcagcccttctcacaaccctcattgtctcttacctaagcgttatgcagagaatgtattggaaaaactcactttagtgattcttctctttgatgattcatcacctggatgaatttattagctccttagtctgttggattttgttggcaatgtggacctacttccagaactgtcaaaattcctccatagccctcaaaagtctgctggtgacattactctcaggtttatagcaatgctatgattttatggatttatttctatttgtatatttcttctgtgatttctgtgtattttggggagggtagtgaggtaattcacaagttcaattagtttaattagttgtgaaccagcactattatccttagatttacagcaaactaattttactttcttggtttcttaaaaaattaatcaggatctgcagtttctctctcaacaaaataagacaattcatttttttcttcatttatcttattttactttccctaagcacttcatctctttaccccctacatcttggatttggttaccgtaatttagaattatgacccctctagtttgcatatccttgcttaataaaactgtattaaatcccacaatctcagtgttgacaattattcacaattaattctaacttattttctttttctcttacatcattttttcattgcatgtcctctaatttcttggatttaaaagacttttttcttagagtaattttggaaatagggtacactgttatctgcttctcaaaactttaagtaaccagacaggttattaatattatttccagattctgggtgatgaatcagaggctcaatgttgcctttttttagggtaacacaaattcagtggccaagcctagacccaaattcggatctccagactcttaagtttgctgtcttttgtatacatatttgtttctttttcttacagtaggtgtccacaacaagctatttattttactatcttttgttggagtagtttgaaagaccatttctgaatatagaactctgcttttcataattattactgatgcttgtgcagtcatatttagtttgcttaattagacagaattgtggacattaagaatattatttggcaaaatcctacattgaggcagtttgtgcttgctgttttttggaaatgataattattatataattcttcttctttgtgtagtcatgcataaatatcttgaatttgaatacctggcaactagaataaaagagaaacatgatggattacataacataaatattctaccaagaagatggcagagcattaggagactcaaaattttctgagttaaggctgggtgcagtggctcacacttgtaatcccagtactttgagaggctgaggtgggcgatcagttgaggtcaggagttgaaggccagcctggccaacatggtgaaaccctgtctctactaaaattataaaacttagccagggatggtagcaggcatctgtaatcccagttaccagggaggctgaggcaggagaatcacttgaacctgggaggcggaggttgcagtgagctgagattgctgccactacacactccagccggggcaacaaagcaatactccatccccctacagctcccccaaaaaattctgagttaagaatgccaagagtaatttatcacatacgccttaaagatgttcagcagaatattattggagatgctattatagccagtttacaaccaataaagacaaattctttatatgacatcaaaatgtaatttcctttataaatatgggtgcaaaaatcaacaaaatactagcaaactgaatctagcatctataaaaagatttatacaacatgactaagtagaatttatactagaagtgcaaggttgattaaacaaataaaaatcaagcaatatagtaatatactatattgaaaaaataaagtacaaaaatcacatgatcatctcaatagacagagaaagagtatttaataaaattcgaagctctttcatgataaaaacagttggcaaactaggaacaggaaagttcctccacctgaaaaagggcatctttgaaaaactatagataacataagactaagtggaagactgaaagttttcttcctaaagtcagaaacaagacaaagaagtctttccctcaccacatttattcaacaatgttctgcaggttctaggcagagcaattaggcaagaaaaagcaataacaagcattcacaaaagggagggaaaagttcaagccccttcatttaatatcatttcctggaagttgcacgtactgtttctgctgacatgcaattggccagaacttaactgcataactccaagcaacatcaagaaagttggtatattatgtctttattctttgaaaacttatgcccagttaaaatttggagcttccatttttgaagaaaaaggagataatgggtattgggaaacaaccagcagttctttccatgtttattgaatgcaggtcaaaaaaaggaattaggtaatttttttcttttctttttaccctacttttcttcttcctttttccctccctctcttccttccctccttttctccttctttccttctcttactttctttcaatacatgaattgcaaaagattaataacctaaatgcaatattgtcttctggattggatcttggaacagaaaaaaggacattagtaggaaaattagtgaaatataaataaagtgtttagtcaacaaaactgtactcatgttagtttcttagttttgataaatgtattatggttatataagatactgatattagtggtagctaggtgaaggatgtacaaaaactcagtattattattgcactttttggtaaatctgaaattacttcaaaattaaaagttaaaaaaaaatgattgctgatatccaatggccacaggtttggaaaactagaaagaattcttatccactcttggtggtatatatattagtacagacttttttttttttttttttgagacggagtttcactcttgtcacccaggctggaatgcagtggcgtgatctctgctcactgcaacctctgcctcccaggttcaagtgattctcctgcctcagcctcccaagtagctggaattacaggtatgtgccaccacgcccagctaatttttgtatttttagtagacacggggtttcatcatgttgggcaggctggtctcgaactcccaacctcaagtgatccacccgcctcagcctcccaaagtgttgggattacaggcgtgagccaccgcacccggcagtacagtttttctagagcaactaggtgttatttattaaagtaaatgaattaatacattttgattctgaaaatctccttctagaaattagttttacataaacacgaatgccagattttgaatttctcttttagatgattcagcataattgctccaaataaatctaaaaggctattgtcaaacagtggaatatttggatttataatttcatagataagactatcagtccatgatatggttggtgtttaaagtagaatggaagtgaaattcccagagtggagtttttaaaataaccaagttcctaggattttaactggaagaataaatatctgaaaggcaatgaggagtattaagcatgggatgccacttctgcaccttgagaaaatgaagtatggaaggatgagtggttttcatttgagagggctgcagggtaactgtttctatttcagatgaggaggtaaaaagaatgggcattgaaaaggaaaaatgtttactaagtaggttatacattttggaatagaagtttctatagcacaatagaaaagtttgagaggtcacatggcaatgatagtttgggtgagagtgaggcaggagaatagggtgtggaggcagggaacctaaggatgtgtcactccgacttcctaagaactaaattgaaaggaaacccctaactttccatgcctaagtaacaaaaggaccagaggctactccctttgcaaacccccactttttctgcagggcagatgggaaattggctgtgggcagcaaatcagactgattgcaggagagtcttcctttgcatagaagtatcactttgtaacttcaccatctgcaagaaatcaaactgattgcaggggaaatcttcctttgcatagaggtataccactttgtaacttcaccctagcctctgattgattgctttttgcaccaatgtttgcacaggagcatgacctttgtaacttcacttcagcctctggttggctgctttctgcaaccaatcagactgattgcgcgttacttcatttacatgaggtgagcattaggtggccaataggaagcttctagagggtatttggactcaagattctgtatccgggcccttgagccgctgctcaggtcgcttccgtacagagcgtgctttaattttcaataagtccctgcttttgttgttttgttgcttcattctttctttgctttgctgggcgttttgtccaattctttgttaaaaacgccaagaacctggacaacttgcagtcacgatcctctaccggtgacaatatcatttaaatattggtagtggcttaaggtagcaaacatccctttgtggaacgtttactcagtaaatccttaaaaaacagatcagaaacaaaaactggcctcccagggatttggactcaggaggtgaattaggcgcggagagggcggagcctttggggtttatgggcggaattgcacagggtttggcggggatctctgctccgccttggcactactcggctccgctcgcctccgcgcggctccctgggctttcactcggctctgttcggctcctgctcgggaagggtgcgcgggggcgagtcctgcgcatgcgccctcaattcctgctgctctcagggctgcgctcagcctcgtgttttcacttccttttcagagctgtatccgggtcgctgctttccctattgtctgaggcagccgccctcgcgctgtgcaatttctggtctttcgttgcttctggtccaggctaataaagtttttctttctttaattttttttcttctagttttaacgggagaaattaactccccggggccgccgggttgactgcgctgcctgggccggaggtcttctccggccagggagcgctgtgggaaggggctcgagcggccagggccaggcgaggccgggggggcggggggttaggggaccgcggggctactcttgggagcgcccctgtccggctggctgcgcgccggttttaaatagcatctttcggacttgtcttcgcggccccagtccccgacctcggcgctgcctgggctcctgcagcctctccctaagtcttctccaaacgaccacctcacggattccttagtaagtgtatccgaggcctctgcggcgagaggtccatttcagccattctagaagtcagggccggtgggagcagggcaggggtgggagagtcctgcgggaaagcaggattggtggaccctcgccctccatggtccgcgggaatgaagcccgcttgttttattccctgatttttgccgtttttattgactgttacgatgtctaagtgggggattacgaggaaggtgcagaaacatctcgaaaagatgagcaagagggtcagcttcgattttagctggtctgagttggcgttggcagcatcagggctggagctgcctttgaaactgcccgtggagctgtccagccctccccaccctgcttctgcaccccaaccttctcctgaccccttttgctgagaactcagttagacaaaaattccttgtgcgaggtcatctttatgttctcttagcaccacaactctcccctgtgtttggtgtgattatgaatgacaatgtaatttttttctcttcacagtggatcgcagctccaagaggaggcaggtgaagcctttggcagcttctctgctggaagctcttgattatgatagttcagatgacagtgattttaaagttggagatgcctcaggtaaatatttccttctctcttcccctttcccagctttctggagttaggcttatttttagactttttaaatcggttttgattaaaatgccaattttaagtgaaagcacgtaaacttcatttattttgtccatttgatttcccattttgcctttagatcctgtcactagacctataattgcttctgttttcctcagagataattagcagtcaggggaaggactttttccaaagatgcaaaaggatttctctgttttacaccttaaaatatatttatgcttatattatagaggaaaaaactgaaagatatcccgaagtagaaaagtatcctgagaggtgtgtggaccattaatagtccctgagcagggttcttcttttttcagatcacttgacaatctcttaggggagttttgctttttttgtgtattagctcttttactagaataaaattgaccagagtaagagttgcacttcaaattatagtaggtgctggaccttgtggattgggcctttcagatgtctctgaagtataagtcatgcatgcttgctcactatatttagtaattttaaaaactttttttaaaggtcgtatattcacattgtactaaactggaaaacagaaaagtatgattttcctttgtattttctgttcagtgtaccttatgtatatatacagtttcaattgaaggaatctgagaaacaaaaattatgtttaatttaaatgttttatgggaaaaatactgataaacatgaacaatgaaaattatgtgtaattccacctcttttgaaaattttaataaagtgagatgaaaatttaaataaaatgagaagtaaaagcctttccagtttcatctcttcaacagtttttaaatatccttccagagagtttgccgtggttagtcacatctctccttcttctggttttcccttgtctttttcctgctagggatagtaggaagggatgaacgaaattatattactgttgctacttttagtagcatcaacagcagaatttgcattgtgatttactgataactttttgtttgcataatctcacttaattttcacagtaacttagtgaaggagataccattttacaggtaacaggggtattgagtttaaagaactggcatgaggtcactcaggcagtaacggatccaatggatttgacttcagaatttagtctgtttatctgcttggatcccaagagttgatggacggaatcttaaacagaaactgactatttggttactaattgaattcatccgcagcaatcaaaaattgataagtttatcttgattaactgtttttttatcctttgcttctcagctctttatctcccatttagttggtttgctgatatttggtatttccaaagaagggaaggggaagggaaaggaggtaaaatttaaatcttagttctcttggtaaagaccttggcagataagaatattcctggctaggatgtagttttggtttgttatggttgtggttgtaaactttgacaaacatagttgggtcgtggaagttacgaattctttgaatatgggaacaattctaaaacttacattaagtattacattattatgtgacaataaatcttgactttatggacaatttgtttccaaggtttgttcattgagatggaatattcacaggtatcacttctttttcaagtggtaaaacaatctgatacaaacataaagtactttctcaaaatattttatgatatcgagctaagtagagatttctgaccttgttaaatcctaattatagttgaagagaactgttatttgtgaaaaatgataggatgagttttgttaggttgatatatctatatatcccttaaacacactaaaaatatttactttctgttccctcttgtaatataatatctagtatgctgcactcataatttaccttcctggccccctggggagcttaaatttgcgatctgtggtctcaggtcacaaatttgtatgtatagttcttggtatttattgtaaaagggaatttagaagaaaatgattgtatttaaaatgatcagtagtcaacagaaattgaatcatatttttgactcttgttttaggtgcattgatgctctgcatagctgagatattggcttactctagattaccattgttttccatttgaatcttttctgtgcctgagatagtatatatttagttggagtcttgtagagaataagacattagtcctatcactggtttccaaacatgttgaagttgtggattcccagccctacttacgaataggagattaaattggaagtagagaaatggtagctaaacatctgtctgatcatatcttctttcaaaacaacttctagaaatgactcattgaatgaactacggacttccttagaacttaatattaaagtggttagattcgttggccttaattttggctaactggattccgtggatcaatttcttcttaccttcatcttgaaatctgaaattctgactataaaactttttatatttctgtttggttttaagaataaatatagaaaacatttgcagataaacataatttaactctatcataaaatagaaacaaatcaacattggtaaagaatgacccacccataagattggcaagtgattacgagcctgtacctttagaaaattatgaaactgaagatagtttatattttatttttaatgcaaaagcaaaagtaagcttctcatttttgattgaaagcagtcaataaagtttgaaatgagtaagtcctaaaataggatatatatgcattattagaattatggtgataaccaccagaagaaccatatgtagaaatgttaggttgaactatatggaattaccagttttgtaggtccaaaacacacagtcaaatattagcaatttcatggttttacctagttaaagtgttgatatttgagacttgggcatagggttgggtgtatgataggagacttatttacatttggttatctgctacattaattgaatgttttaaagaatgtttacatctttttaaagatgcagacatgtattacttctattaaccagacagattagccatgctctctacccctatcccccaccaggcaaagtaaaatggggttaactttagatcttgatcaaaagttagtttagttaggccatattgccaggaaataatttaatgagaagtgtcagcctgagactttggtggtattttgtgcttaatctgactttgaataagtggaccaagatgtgttcattgattgtccgtagtttagccctttgctagatgttatggtgaatttacaaaacagtagtaataatattagaataagtaagtaaaataacatgtaagtaaaataaaaattagaataattaaataaaatagttgatacaaaggatggttgatcacttgtgtagttcaagtctttcataggaaatgagattagattgatgtagaacaatttcattgaggagaggaggtaaaagtggaactatgaacagaaggatttagataaacagcaatcttggtgaggcaaaaattaaaagtgttgagacttggaattgtttttttatatttggggatcagtgttgagtaaaagtagaagagataagcctggaaaaatagaataaggtcaaattgtggctgtatatacgagttaacggtttctcaaccttggcgctattggcattttgtgttggataattttttgttgtggaggcttgtcctgtacccagtaggatgtttagcaacaacaaccttttcctctactagatgccagtagcatctttcctacctgccccagcctcacctccacctccacttccactgttgtggcaactattgtttccagacattgccagttgtcctctgggggaaaaaaatgttcccgtttgagtaccactggctcatacaaaccaagatgacatagctggaactagaatcggaagtggaggatgagttgtgttgactgattggctgtcttcaagacatatacggttttggtcaaacatagccctgggatagctgtaaataactagtagaatagtgattgatctgttatctattgtgtatatttatagtactaacactgttgtaccagatcaatgaacagaattagattgatgaaattgatgaacaaatttatattgcatatattgtatattagcataaaactaaattaaatcatattgattttgttatggggagaacattggatataatggtattgatggttgatattaattaaattaatttttattttattatttgatattgtaaagggattcttgaaggttggtgttttaaattctaattttaaaatttattttatttttttgtctggccattaccactcagaggagtttttaaaaattctgtaatggtaaaaaatttcttaactgtctgttagttgaaatagctgttgcttggagagattctgatatattgtatgtttgagaaaggttatcttttatttaaccaaatgggaagtaggatttcaattttaaagatatatttttttcaaacgtaagaaaggtttattgtagacttgaaattaactctttctgcctaagataatttctccagtatatttctttttttcctttcctttctctctcttttttttttttttttggaacatagcacagagtcattctttgatgactaggaaattttgtctttgcagcctatggaaaaaatagccaagggccttgatttttctcattgtcattattacccagctatggttgtaaataaatatggtttatctccattcctccagtgcatatgtacaaaaaagaaatagtgactaattagatgaagaagttatttttcagatatcagagaaagataagatttgatgtattgctgatccctatagaaagataaaatttgatatattgctgatccctgtagttggagtctgactaatgtactatatttggagaatgaggggttgggtaagctattaggagttggttttgtggaaaaatgtccattcttctaataatagttaacaaacataaaacattaaaaattttttaaaaaattgctttctattcaggcatggttataaatcaaaaacagaatcaaggagtctcaatttacctctcatttgaaaaaataattaattaattggcattggcaactaccaaaacaaaatcacaaaaatctctgacattttgtaaaatttaccaagtaatagcaaagttggattggtctcaattttgatcagctacccacacttctgccccagttaatcttacttttgcgtctatcgtgaagttttgattgataaaaagccttctagaaggttgatccagaagaaaagtaccttttctttcatcttcatctcctagctctcttaattatggcattgcttcccttctagagcctaaggtgtttcagttttctttagtcagtgtgcataaaaaatctttctgtgtcttagaagtgttgagtcaactctggttattatttattaaatcataattttaaaatgtcaagagattactattattgttatttttaccagatgtgatttttcttggtaggttgggtttaattgctgtgagtggtttacaaaatcataattttcttaatgctttagagactgaaaagaagtcacttgtttgtgagtaatattgggtccacactcttgaaatccaagaagcttaaaaatccaagtgttttgtaaggttcacacaaacttacttgatggcaaagcctaacggaactggtaggagtttatttgtagtatttatttctcatactctgtaaataggatttatacttttctccgcagaaataatgtttgattataggataataccatggacttcactgggggtattagtgtaatatatggtgcatgttccatgttacccttgaaaatctgagaaattatgaattctgaaacacatctggttcttaaagtttcagatagggaattgctgacccgtatgatattgctcttgtatcctatgcaaggttgtttaggataagagtgtttttttcagaacagtcccaagtaagctatggatacctacatgacagttgtgagattgataatgatttcatagggtcagtcagtatctgttaaatgttagtgtttattttttatgcaattttgcttgcaggatgtttttgttagcagtcatttgtatgtgacttgtggggttcactagataccagatactaattacagacagcttccttcaattttagtgcttagttaattacagaggttaagcctagttgagttaatagaaattaaaatgatgtggaaacactttactttttccaccattttatcattacctttttcttggctataggtgcaaaaaaattcatcatcctgtggattttactggctaagacttaactggtttcttccccatctcctactgctccctgtcctctttccctcctcccatttatttctcgcttcaaagattttagattgttatttacttaattgggtacaaaaagaatgattactgagtacttactgagtaatgattactgagttactaagtagtgttgggttgagagggactgggctgccctaggcaggagtggaagaaacctgctagaaagcttacagtcctgtgagctctttaatgtcttcagcctaactttttagtaacctctgtgactgctcattttcaggatggactgctttattcatcaatttcttccattctagagcatatagtagttactgcgtagaagttttgaaagtgtagtgactcttcttttattgatacgaacagtatcctaataaacaggaagattgataatttctcttgcaacttcctttttctgtgccattgctgttgtctcttttcacctgtgttcttggtattcctaaaatttgtttggtatattagagttgtagtataagttgactatcataaatatctatgcttattttactgggtaaagagtaaaataaatgaagcagttttatgggttagatttatcttgttttggttttgactcaatacttacaagtccatatagtttataaaagatgtttaagggaggaagaattttgtctgtattatcagtaaaattaaaatcaagtgcccaatcttaaaagaagcacatttactttaaaaaataattgccttttcagtaccaaatattgccatatgacacaaattagtgcttctctttttaaagcatattttaatttagggttatctatattcatcttcattagcactatactgaactaaaaccattgtatcaacttcattgatttattatttgatcaggttgggaatgtctaccattctttgacttaaatttgtttatattgttttgcaagttattcacaaattttggtggtttcatttgtgtcagcgttgtgtgtgtgtgtgtgtatgtatatacatatgtgtggttttttttttctcatattttcaacagattctgaagggagtggtaatggaagtgaagatgcttcaaaggacagtggagaaggttcctgtagtgattctgaagaaaatattttagaagaagaactgaatgaagatattaaagtaaaagaagaacaacttaaaaattctgcagaggaagaagtactatcatcagaaaaacaattaattaaaatggaaaagaaggaagaagaagaaaatggagaaagacctagaaagaaaagggagaaagagaaggaaaaagaaaaggaaaaggagaaagagaaggaaagagagaaggaaaaagaaaaagcaacagtatctgagaatgtggctgcttctgctgctgccaccacaccagccacaagtcctcctgctgttaacacatccccttctgttcccactacgacaaccgctacagaggaacaagtcagcgagccaaaaaaatggaaccttcgacgaaaccgaccacttctggattttgtgtccatggaagagctgaatgacatggatgactatgacagtgaggatgacaatgattggcgacctactgtagtaaagagaaaagggagatctgcgtctcagaaagagggaagtgatggagacaatgaggatgatgaagatgagggaagcgggagtgatgaagacgagaatgatgaaggcaatgatgaagatcatagtagccctgccagtgaagggggttgcaagaagaagaagagtaaagttcttagcagaaacagtgctgatgatgaggaactgaccaatgatagcctgaccctatctcaaagcaagagtaatgaggtagatcaacccaatttttatatctgtctgtctggggaaaagggaattcttctctaaatcactctacacattgtattaagtggcttccttgaaatcctatttatagacggctgtgggatgaatgagcaccctaactgtaacattttttcatttggccaacagacttttattaaatatctactatttgtcaccgttctcaaggagctcacaatctctgtcctcaaggagaaatatttagagaaatatttttatatccatagacttgggaaatgacaaagttttccattctcctttttatccctttactcctttgttcacaggactgctgaatggtgctgagtgcattatgaaaacaaaggtcacctttctttcaacttagttgtgtccatatccatattaaaatataggcctttagaataccttagagcagggcaacagtctaatgattttctgaaacctttagagattcgttttaaatattaattcctttaccagttgtagcactcatcatctttttagtcaccaaatctttgctttatgtgtatgggacatacacataagtatgaactatttttacatatatttagtaaataaattctctctacaaagaaatggaataaaaacccaaacatttccatcataaaacagacatttttgtcacaaaactgcagtaatggctcagtgcttctacttgaagttctactactgaaagttaggtttattcattgatctcagagatgcatcattcaagactcttcagtcaaacacatttgtgtctctttgtctgtgtgtttttgtatatgtttttcttcaaaagaaagattgagttgttgtcttacatgtagatgtatctgttacatcacatgtagaactgtaataattctgtgatttctgttaatgtgtttatattcaccaaaatttatttctttaccaaacacttatttttttccatatcactgaagtaagttaaacgggtagaaagatttttcctcttatgctttatttgttctttcacatttttctgcctacaagttttacatagcagtgattatctattttaattgctttgcttaaaaatttggtgatttcgttaccaaaataatctatagcaggctgtgaggttatcagtggagatgagacagcagtttatatttggattataaacattggttaacttctgaaaccaatattttatatgaaaaaatattgcctgccttcaatgtcattctaattcttacctttaaaggaaagttgtcatttgggaaatagtgtaatatttttaatgatatagcacaggcagttccatattatcaatgctatcttaaacaggcatggaaaaatctaattgtttgtatttaattgaggcatgcatgcagtttacgttatagcagttaatactctatatataatgaataagtttacttttgaccacatcactttcttcatttttattaggttgatattcttagaagtagtctagctaatgatagaggcagtgtcgattagatttatgctaaaatgtgggggacacctgcatgtgtttaggaatttgccacgtaaagtgtgtgtagtatctgtttattaaacctgtacttcataaatactgcctaagaggttgtagactaacatttatgatgcatttaaagtccatgtgttggttgtttagttttttttccccactagaagacactttagtaaataaagggaccttttatgtttaggttaatagtcccaaacacaaacacattccaggaatgagattccaaagtgcttcttcgaaaagtgcccatgtagaagagattataaaaaggtactttttctccagaataattctccttaaaagcttgagtcattttcccctcaattctattattcaagctctacagtagttttttgatgattttagtttatttaaattatgtccctcaaattagataattacattttaattaaaaaactaatcaattgtgattattagttatatttctagttttcttatttgtatgatcttaattttgtgaaaagatgattaaagctagtccttgttgcctgtggccaatgtttgggtcttaatcttcctggttattttagctagtgataatttctgtgtccaatacatagttaagtatatatttgattatatttgaagtttgattttccctgcttttactttgttttcagaaactactttgtagtagagttaggtgaaaatgtagctttagaaatacataatagaaatatataattataccatatttagtttataagcaggcagacatttttcttagctgctaagttcatttgtagcaaaataatgacctgaaactttcataattttgaagtttcttaagggaacttgatatttattttagcagggcccttttataattactgctcttaatggccttaacatatgcttaatggccttaacaacatgctgcagaccctgaaatactctctagcagtgattctcaaactgttttttttttttttttttttttttttttttggagacagggtctcactctgttgcctaggctggagtacagtggcatgatctcggctcactgcaacctccgcctcatgggttcaagcaattcttctgcctcagtctcccaagtagctgggactacaggtgcatgccaccatgcccagcacatttttgtatttttagtagaggtggggtttcaccatgttggccaggctgttctccaactcctgacctcaagtgatccacctgccttggcctcccaaagtgctgggattacaggcatgagccaccacacctggtctcattttaaaattttttaaatgtttattttttttgagacagattctcgctttgtttcctggactggggtgcagtggtgtgatcatggctaactgcagctttgatctcccaggctcaggcaattctcccacctcagcctttggagtagctgagactacaggtgtacgacaacgactggctaatgcttttatttttgattttttttttttttttgtagagatggtatatcactatgttgcccaggttggtgtcaaattcttgaccacaagcagtcctcctgcttctgccttccaaagtgttgggattacaggtgtgagccaccacacatagcccctttacagttttaaaaattattgaggacaaccattaatatttgtgtagattatatctgttgatatttaccacttcaaattaaaactgaggaagcacacaagttatcagatcccatttcatgtagtgtctggaaaacttcatggtactcccatgagagaaagagtgaaaaagagaaataatgtcttagtatcattatgaaaactgcctttaccttttatacctactgaaagagagttcactggaccacaccttgagaactgctgctctagaactgggcattagataaactgcattttccgcaaacggacacctgtttttgtcaataaccttatggcattttttaaatttagtgcagcctgaagaatccccttgaaatgtggttgtatgtctttttcagccgttaatcttgcagctttgagattccttaagattatcttgccctttagttttctgaggtaagttttttggggacggcagtgtactattttcagaaatggttcccattttcaagattttgaaactaaagttttgcatgagaattaatccatgaccgtaaattatatcaatagaattggcatttttgttttgtaaaagaaagaagagctctgttctcacagaaaatatttaaaattagagacagtttggattttggattactgctttataaatgtaactttatgttctttgctgagtagaattttttttccataaaagtctccgttaagtacattagatgtcatgttgagaaatggcaattgtcacctgatttttgtgaattaaaatgtaaatgttttgccaaaatttataaatatccacttctatttgggacttctaacttattaatcagttgtctttttacacattgcaaaatgaaacaaattgctctgagtcctaaaaaaaggtcagttctgtaacatttataaatatcgagattcatgagaatttaaccttttctaaaaatgtagaggaagtatgattggtcaagctttttgttataataattttttcttatcttcagggcagtaggattcttttaattctaattttacaggaaatgtgctggaatttccttgtattaaacacatgtgatttagataaaatttagcctattgtatatatcatttacagtcatatgtggaatatatatatataaatgaacagtaagtatattttagagcctgtggagaacattgatcagtattatcattttgggggtaagttttaaatcctgatggaaagaatgcaataatttactataagtagtgattgatttattcatatactgtcatttattcttcctataattacattggattccattaaattattccatcataataaagttattttctaggtggtacttttttgccattcaaaacctattttcctgatgtctatttttatgtaaaaccatattttagaaattttatgttaaaagcttcagcttaactactttctctgaaaccttgaaagatgatatacgtcttcagaaatatactaacaacagttgataataaatcaggttttgtattgatctaatcataagtgtgcttaaacttgtgtttgatctgttaaaacagatctagctgggcgtggtggtacatacctgtaatcccagctactcgggaggctgaggcaggagaatcgcttgaacccgggaggtggaggttgcggtgagccgagatcccaccattgcactccagcctgggcaacaagagcgaaactccttctcaaaaaaaaaaaaaaaaagaaaaagaaaaaaaagaaaactgagatcctaattttttttaaggaggatgtgttacttagattttccagttgaaacattgtctgctagccatttggttagggaaatattttatctctagttttccctatttccctctttgcgttacatttctattaagagcctcaagtcatgaggatcagagggccagaaacattagttaatgttgttttctctgcctctaaatgataatagatgtggagagaaattggcgtagagatatgatttaggcatttatggtttttctgagcaaaatggaaaaataggaaaatagaggaattagaactgcattttgatacaactttttctgacctttagaaatttacttgtttcccatatgggtaaaccttttttccagggctgattaattttaattccaccagagaaattaccacacagtccataaagacatgtagcatcctaattttcaaactgtgattgtttgctaaattagtttctagtctgttttttttttttttttttttttaacctagatgtggtattccaaggaaagtcttttttggacttaccgtggggatgatatttaaagtagtagtgctcattggagcttgcaacttttcttttgggggtacaaggaagatcctcagtgtaataaattatcagttcatgttcctctttttgaaccaccttaacaagagatacagcggaaaggaaaaggcattgaccatttattgagtgtctagtttgtgccaggaacattcttgccatatattgttaattcttataacctcctgaagtagatattatttttatcgccattttgcagataaagaaattacagcttcgaggttcagtagggaataagcgagaggtgagaaagaaacttaggaatgtttgatttcaagtcaactttgaagcatggctagtagtatgaaaatctgggcagatttttgtttgcttactctggtactgtaaaaccagatgagttttctttaggatgttttcagttttatttgccagccatttgtcagccccagacctattttatttggttttataacacagagaagcaaaatacagaacttagaaatactagaattctaaagagaaatgatactatattcttgttgatgtttgcattcttttctgattgttttacaaatctgccgcaattttagatgttatacacaaagtatattggaagaattattaattgtgaccttcaagtgtattcaagtgtcagttacaaattgctgttgaaatgatggctccaaatgttacttttggatattggttgagtttaaaagaatataaaaatataaaaaataataaaacatatttatgaaaaatatatattgtgtattgtatgaaactaatttattaaatttatttctgaatattgttaggttcataaataaaaatgtatggacccaagtgccatcttttattatatgtaatgttaagcacaatctattaaatatgcaagaatcattttcttaacttacttaaagtttaaatctataatgcagaaggtttaaatgcaaacaagcagaccctcttctgaaattttatcttttaaatattagtttattaatacgtcttcctatactttttctttttgagacagggtcttgtgctgtcccccaggctgaagtgcagtggcgagataatagcttgctgcagcattgaattcctgggctcaagtgatcttcccgccttagccacctgagtacctgggactaagggcatgcatcaccacgcccagctaattttaaaatattttgtagagacaggatctcactgtgttgcccaggctggtctcaaactcctggcctcaagtgatcctcctgcttcaacctcccactgtatttgggattaccggtgtgagccactgtgcccatcctctctttttatagtatcactagctagatgtatttattaccagtttacactggatatttcttgatagagacctacttaatagagttctctgacccttctagcagctagtcaatctggatccttttttagattattttctgtatctctgtgtattcatatacctacgcaggctctcatggatctgtcttacagtagtttgataatgctggaatttctgaatttcccggtacttaaggagtatagagtccttaagtgtgccatcacatacatacttgcttatatgttattttgaattgattttttcctattttgtatatgtgcgtcttgtcttctctaggtaggattataagctcctaaagtgtaagaatcatgtcttgtgcttttaaaacacatgtataggatcaatgattactttgattacttgtggattcatttttcgtttttcctagtttaaggggcaaagcagaatagcaaagcagatcaacagtagttagttgcatgcgtgctttttcatatcctagaggagagagaatacgaagcttgcagagaagtgaaaaattaaataagagggtgcttacagggttctttgataaagaggtcaagtatatatttctcaaatataatgtactttgaagttaataaaagaatggaaaatggggcatacatttggaaatgcatataataatgtttaagtaataaagaattttagtgattaagttttttttttactttaaatgtgattttctgatatatgttaatattttaatattaggactcgctgattcttgagaagagtcaaaactggagctctcaaaaaatggaccatattctgatttgctgtgtttgtctgggagataatagtgaggacgctgatgaaataattcagtgtgacaattgtggcattacagtccatgaaggtaatgttgctttcttttctctctttttagaaatggctgactgtggctcttttacatttgtactaaggtggttctacaatatttcatggtgtttcggttgaaataatgctaaatcatcaaagtatggatgctatttttcaggttatcttttcttttattttgagatggagtctcactgtgtcgcccaggctggagtgcagtggcacaatctcggttcactgcaacctccacctcccaggttcaagcgattctgctgcctcagcctcctgggtagctgggactacaggcgcccaccaccacacctaatttttgtgttcttttttattttatttttatttatttattatttttgagatgatgtctcgcactgttgcccaggctggagtgcagtggtgctatcttagctcacttcatcctccgcctcctgggttcaaactattctgcctcagcctcttaagtagctgggattacaggcacgagccaccatgcctggctaatttttgtatttttagtagagatggagtttcaccatattggtcaggctggtcttgaactcctgacctcgtgatccacccgccttggccacccaaggtgttggattacaggcgtgaactaccgcgcccggccaatttttgtgttcttagtagagatggggtttcaccatattggccaggctggtctcaaactcctgactttaagtgatccgcctgcctcagcctcccaaagtgctgggattacaggcgtaagccaccgcacctggtcccccagtcatcttaattaaaaaaaaaattttaaataatgaaaatagaaatgctatatgaaaatcagtgtttctttaaaggtcggtgttctggtattgtattttatggtactgtttcttgtttgtttttttttaattttttaattttttaatttttttttttttttttttggtagaggcagggttttgctatgttgcccaggctgatcttgaactcctggcctcaagcaatctgcctgcctcggcctctcaaagtgctgagattacaggcatgaaccagtgtgccaggccttatttccagttttttttttttaattttaaatttttaaaaattatttctagtttttaaataaaattcagaagtaggaaaaagttgactattttagtctgatagaaagcattcttaaaaaatttatattctatcaattttttgtagcttcttctttcatagttgtatttttatttttgagacagagtcttgctcttgtccaggctggagtgcagcgacacaatctcaggtcactgcaacctctgcctcccaggttcaagcgattctcctgcctcagcctcccgagtagctgggattacaggtgcctgccaccatgcctggctaatttttgtatttttagtagagatggggtttcaccatgttggccaggctggtctcgatttcctggcctcaagtgatccacccgactcagcttcccaaagtgctgggattacaggcatgagccaccgtgcctggctgacagtatgtatttgttaagagcaaagggccgggtgcagtggctcacgcctgtaatcccagcactttgggaggccgaggcgggcggatcacctgaggtcaggagtttgagaccagcctggccaacatggcgaaaccccatctctactaaaaatacaaaaattagccgggcgtggtggcttatacctgtaatcccagttactcgagaggctgaggcaggagaatcactggaacccaggaggtggaggttgcagtgagccgagatggtgccactgtactccagcctgggcgacagaggaagactgtctcaaaatttaaacaaacaaacaaaaaaaggcattctcttacataaccacataattatcaaagtcaggaagttagcattgatgaaatgctgttttatctaatttatatagattgtattcagatgttgccaattgtcccaacaatgtcatttctaacaaaatcaaagccaggatcatgtattgcatttaatcgtcatgtctgtttagtcacctttaatgtagaacagtccttgagtttctgtctcatagacatttttaaatatatagtccagttttttttattttggtttgtttttacagaatgttcctaatatgattagatttgggttatatgcttttggccggaataccacggaagttatatagtgttcttagtgcatcgtattaggaagcatatgatatttatttgtgcagttactggtgatattactattactttttttctcatttttattgcataagcctaccaatttagaatactggtgatattttgatcacttggttgagagggtgtctttctggtttatctgtggtaaagttattttttcttaccaattaattattattattattattattttttaatcagggctgtgactaccacaaaacagtatttctatggcctttctcttacctgcttttctggtattacagcccttgtcccaagtaattctgggagtctgctggacttgtgggactttgcatgatctgtgattctctagctaatgctctgatcttcatgtggagctgccctttttttgctgctaacactcactgtgggaatatctccagttactgttattcatttatatttttagtaatgtttgttgagtaccttctatgtgcttggtattctgtaaattttaggcatatgaaatagaatgtacacattgttgacctggtggaacttaatgtctggacagacaggcagtaaacaaaccaataaatatctcttagttggtggcccagattctgaagaaaaatgaagtaggacaaggagtataggaatgctgtgtgtgagggtggttgggtgagttgcagaagtttgtatttgtaaaaattgataaggggctgggtacggtggctcatgcctgtaaatcccagcactttgggaggccaaggcaagcggatcacctgaggtcaggagtttgatatcagcctggccaaaatggtgaaacgacgtctctgctaaaagtacaaaaattaatccggcatggtggcacgtgcctgtaatcccagctactctggaggctaaggcaggagatttgctggaacctaggaggtggaggctgcagtgagccaagattgcgccagtgcactttggcctgggtgacagagggtgactctgtctcaaaaaaaaaaaaaaaaaagttgttaagggaaatccactctgataagaggatatttgagcagtgacctgaaggaagtaaaggagcaagtcacttaaatatattgggaacgagcactgcaagtggagggagtagtgaatgtaaagatctcagccaagcacaatggcccacgcctgtaatcccagcactttgggaggccgaggcagtgaatcacttgaggtcagaagttcaaggccagcctgtccaacatggtgaaaccccatctctactaaaaatacaaaaaattagctgggcatggtggcatgtgcctgtagtcctagttactcaggagtctgaggcaggagaatggcttgaacccaggaggcagaggttgcagtgagctgaggtcgagccactgcactccagtctgggcaacagagtgagactccgtctcaaaaaaaaagatcttgaagtggtagcatgcttaagagtgtttgtataatggcacagaagtttgtatggctagaactgggtgagcaagctggttagtggtgggagtagagatgggagtaatccagctggggtcttgcagattccggtactgattttagattttattattgtgtccggaattggtgggttcttggtttcactaacttcaagaatgaagctgtggatcctcgcggtgagtgttaacagtttttaaaggcggcgtgtccggagtttgctccttctgatgttcggatgtgttcggagtttcttctttctggtgggttcgtggtctcgctggctcaggagtgaagctgcagaccttcgcggtgagtgttacagctcataaaggcagcgcgtacccgaagagtgagcagcagcaagatttattgcaaagagcgaaagaacaaagcttccacagtgtggaaggggacccgagcgggttgccattgctggctggggcagcttgctcttatccccttctctggccccacccacatcctgctgataggtccattttacagagagctgattggtctgttttgacagggtgctgattggtgtgtttacaatccctgagatagacacaaaagttctccaagtccgcacagagcactgattggtgcatttacaaaccttgagctagacacagggtgcagattggtgtgttacaaaccttgagctagacacagagtgctgattggtgtatttacaatcccttagctagacataaaggttctccaagtccccaccagattagctagatacagagtgctgattggtatatttacaatcccttagctagacataaaggttctccaagtccccaccagattagctagatacagagtgctgattggtgcatttacaagccttgcgctagacacagagtgctgattggtgtatttacaaaccttgagctagacacagagtgctgattggtgtatttacaatcccttagctagacataaaggttctccaagtccccactagactcgggagcctagctggcttcacccagtggatcccgcaccagggccacatgtggagctgcccgccagtcccatgccgtgtgcccgcattcctcagcccttgggtggtcgatgggaccgcgccacagagcgggggcagcactcataagggaggctcaggccacgcaggagcccatggcggggtgggtaaggctcaggcatggtgggctgcaggttccgagccctgccccgcagggaggcagctgaggcccggcgagaatttgagagcagcgccggcgggccagcactgctgggggacccggtgcaccctccacagctgctggcccaggtgctaagcccctcactgcccggggctggcagtgcccgccaagcccatgcccacccggaactcgcgctggcccgcaagcgccttgcacagccccggttcccacccgtgcctctccctccacacctccccgcaagctgagggagctggctccaccctcggccagcccagagaggggctcccacagtgcagctgcaggctgaaggctcctcaagtgcggccagagtgggcgccaaggccgaggaggtgccaagagtgagcgagggctgtgagggctgccagcacgctgtcacctatcattatgatggatgtgggaagccataacatggcttttcagcagaggattaatatggtttgattcatgttttggaaggatcactcagactgctgggttgggagtagactgaagtgaatctaaggtgggaaactaggaaaatatttaggagaccattgcaattatctaagagaggaattggttttgaggtagatagtaaaagtttggttttaaactctgtttatgtaagatgttaggactagaaatttaaatttgggacttatcagcctgaagatgttatgcaaagatgtaagactaaatgcttgtaacaaagtcatcctagtactttagaggagatggggaacacatggccagtgagatatgaggaccatgggtgatgacccagagaaaactgtttcaaaaagagagtcagtaaatgtgtcaaataatgtttttaagagtgggaaatcaccctaattcaatgctggacttcaagtacaccaccaggcaagctatcccagaggttattgaaaaaaaaaactaattgataaaatgtttatatcacatgattcattaaataaatataaaatacacagaagcaaggggaaagatagaggataagttaactcatttaggctggggtttaagtaggatagaaggaccacactacctaaataaatcctggggtacatagtgttgatatgttttggcttatcaaccttctttgctaatgctgcggttgtgagaaccagagcccacaagataggtgcccagggccaaagataggcacactctcaggaacatacaggagcaagtatgcctggtcatggcgttagctctccagttaatctactcaacagccgtaggttttatttttatttgttagtggacagagtaggtatcaccaatgggtggccaaattaaggcctcaggaatattgagttctaagtgtcgcatatatgtttaatgtattctgactctttggtgccttttgcatatttgcctcaagaatattagatacatcttggtccttctatccctttctgtctgtatttaatgcatacgtgctttacttactttttatctatacatacacatataagttttattgatctcattttgtttctctatagtagagtttaatatcctcaagcagagcaaaaagacattattactgagaatatatcactgaatttagtaacatgagggtcattggccatcttgacctgagagagttcaaagtgagaataaaagaagggaaagtgcaaaaagtgaccaaatgcaattcctgtgatgagtttttatatagagaagccaggagatgggacaagggatgtgaaattgagggagggtttttttctttcttattttagatgctgtattgattatctgctgcagtggaacaaattatcccaaaacatagcagcttaaaacaacaaacatttattatttcacatgatttctaaggggtaagaagctgggagcagttggttgggttgttctggcttagagtctctcatgaagttgcaggtcaaagccatagcctgggctgtagtcattttaagatttggctggacctggaggatttgcttctaagctaagtcaaatagttgttggtaggcttcagttctttgatggctgttggccagagacctcagtttcctactgcatggacctccctcataagctgcatgaatgtcttcatgaagggcagctggcttcagagtaagtgatcaaagagagaaagagacggaagcagttgtatcagagtgctagtatattttataatctaatattggtagtgcatacaaccatttctgccatattccgctgttcacacaagccaaccctagtcagatgtaggtgggggcattctaagagtgtaaataccaggaggcactgattattaagggctatcttagaggctgcctaccacatgtgcagagattatatagcatgttgtgtgctcatggaagtgacccagtggaaagggagaattggtgatataaggaaaatagtgaggaaagaagggggaacaattgctggaacaaaggttttgagtgcaagattagaggggatgagatccagtaccaagtagagagattgagtagataagagtaaccatagtaattagggaaaaaaggatatatgggtccagatgtagctaggttgttagatgtggtagttggagcatgtgtaagttatttttaaaatgtttcttgttttctcagtgaaataggaagcaaagccattagcagagagtgggacagtggggagttagagatttggggaggcagagttgtataaatttatttgggagaataaactgaataaggaaacatatacctaaaatatatatgtatacacacacagacacatatatgtatatatacacacacatacacagcaataagaccacttgatattagtggtaatgaatataaagagctcattaatataaatatattcatatgaatatgatattagtggtaatgaatactgttactgagaaaagtaaacatggttgaatatatgtgtatttttcttctccaggtgtggttcagattcctgggagtaggtaaagaatatgttaactcaggagtagcagctactttggcagtgtttgttacattgatcactgatgatcacaaacatgttactgctgcttatatccatgaatgtcattgctgatgtgtgatacagtcatgatgagttctgtcagttttggtgattctcttatgatgctgagggcactatctctatttttctctgcttcattataatgctgagtaccatctctacttcttaagtcattcttaggtctacttcttagattgtggtcattgactatggatgtatttttttaggccagcacagtagttttgagtaattgaattggttgctaacatttagacattgggaaatcgtacacatttaggatttcaagcttcttttgcaaagttctggcggcactagggttttttgctgttgttgttgttgttaagtgatggagtgccccaggcttgcctcaaactcctgggctcaaacaatcttcttgtttcagcttcctgagtagctgtgactaaaggcattaaaggcatatgcctgcccttgcagtagttttcactttcttctagcacaatctgctggagctgaataaggctgccccctgatagtaaggcctgtggtctccagttcactccagtcctctctcaaaccacttactcatttttgttagttgcctagtccctggagatatttgaatatatagttccttatctgctttgagggtactgtctcttgttgctgatatttgggctgctgatgccttgtggtctcaatgtctcacatctataatagtaaagcaactcttttactatagcttttactttaggacacaagcttgagtccactggggactagttccatgtacatttcaaaatgaccctcgctctctattttgttgtttttgagtcatgttttgctccttggactcttaacttaggatgagttctttcccagtagattcattgttcagataaacatagatttctgtaagggcacaacattagttccactgacatgcttacagctattgaaagttcataatacgacccctgcttcagatgaatagcctcggtactggaaaatctaccttctttccaaagtagctttgattttcagaaacatttaaaaagtctgaatcaaggcagacaaatgagatgatcaagctgagtggtaatgccaattaagtcaacaggatgttgtgtctatataaagtcatgtaacaactcttcttgtgtaattgatttaactgactttgatggcagtccaagttataaatatttttgagactttgctaatgataactcatttaattcctaaaactaattcattagaattggagacctatttttgttacagagaaggaagaaagtagagaaggagagggaaattgatgcataaatagggaagctgaatagtctttgaccactttaggtgaatctttattttgtataattaatttattggtagtaatttgaattctgtgaactttatatatgttccaagtaaagatgcaaaagatgcaaaaaggtcaaaaatacgttttgacttaaaaaattacgctactactttcatcctctagtttaaataatttcccatttccctttttaattttggagtttctgttgtatgattgattttgtatgttgtattattagactttctgttgtatgatgtggagtatcttttcatatgcttatttgcctttttttttttttttttttttttgagatggagtcttgctctgttgttctggctggagtgcagtggtgggatcttggctcactgcaacctctgtctcccaggttcctgcgattctcgtgcctcagcttcctgtgtagctgggattacaggcacacaccactacacctgactaattttttatttttagtagagatggggttttgccatgttggccaggctggtctcaaactccagacctcaagtgatccacctgccttggtctcccaaagtgctgggattacaggcgtgagccaccacacccacccttatttaccttttgtatatcttcttggatgaggtgtctattcagatcttttgcccatttttaaaaattggtttgttttcttattgttaagttttaagagttccttgtatattttggatatcagttctttatcagataggtcttttgcaaatactttctcccagtctgtagtttgtctttttattctcttgaaggtatctctcacagagcagaagttttacattttaatggagtccaacttataaattatttctcttgtttattacgcttttggtcttgtatctaaaaagtcgttactatgcctgaggttatctagattttctcccgtgttattttctagttctataattttttaattataaattttcttaattaaaaatttaaaaatttttataaatttgcatttcacatttgggtctgaatttatttttgttacgagtatacggtctgtctcggaattcattattttgcatgtgtgtgttcaatttttctatcaccatttgttaaaaaagctgtctgtgctcccttatattgcctttgctcctttgtcaaagatcagttgactatatttctttgggtctttttctgggctcagtttgttcatcaactgacctatatatctattctttgattaataccacactgtcttgattactgcagcttcatagtaagtcttgaagttgagtagtgttactcctttgacttgttttttttccttcaatattatgttagctcttctgggttttttgcctctccatgtaaactttagagtcagtttgcagtatctacaaaattacatcctggaattttgattgggattttattgaatctatagatcaagttgggaagaaatgacatcttgacaatattgagcttttttattcatgaacataataaacatttatttatttagttctttgatttctttcatcagagttttgcagttttcttcatagagatcttggcaatattattttattttttggggggtgctaatgtaaatggaattttgtttttaatttcaattctacttgttcattgctttcataagaaagcaattggcttttgtatattaagtttgtatgctgcagtcttgctataattgctttttagttccaggaaatttttggctactcttccagattttctacttagacagtcatgtcatctgaaagcaaagataattttatttctttctttccagtgtgtatatttttgtttccctttcttgtcttattacctgatgttgaaagcagtactgacagagaacatccttgcctcatacctcatctttgtgggcaagcttctagtttctcatcgttaagtatgatgttagctataggttttttttgtagtttctttatgctctagttgaggaaattactccttatttctgtttgtgttttttttttacttgtttgttttgagacagagtctcactctgctgcccaggctggagtgcagtggcgcaatttcggctcactgcaacctctacctcctgagttcaagtgattctcctgcctcagcctcccctaatgtgtataattttaaaaggtgcctcaagattcctcatgcaggagatgggaaggatcatcctttgagagacattggtttagaagaaagtaaaaatggggggataaaaggaactctgcaatgtggacgatgtcatgctggagcttagacagccacaggtgtaggtcaaggggggagccagagcaatgtagaatgaagtatggttcctggtataaggcaaatatcaggttgacagtgaggtttctaaaaattaagactttttattttatttatttatttatttttgagacggagttttgctcttgttgtccaggctggagtgcaatggagcaatctcgactcactgcaacctccacctcctgggttcaagcaattctcctgtctcagcctcccagagtagctgggactacaggcatatgcgccaccacgcccagctaattttttgtatttttattagagacgggatttctccatgttggtcaggctggtcttgaactcccccgcctctggtgatccactcgcctctgcctcccaaagtgctgggattacagacgtgagccaccgcgcccggccaaaaattaagacttcttaatcctcttaataatggttagggcaaacacaggaaagaagaggcaaaaatgaaatgctgatgacaaaaattaacggtgtgagcaccaatagaaggttgagggtcaatgcagatggaagcttgggtagtatctgctaaagagatgtgccacctcttgctccagctcttctactgtcttcagggtgatttttctttcttttttttttgagacggagtctcgctctgtcaccaggctggagtgcagtggcatgatctccgctcactgtcgcctcccagcttcaaggaattctcctgcctcagcctcccaagtagctgggattacaggcgtgtgccaccacacccagctaatttctgtatttttagtagagatggggtttcaccatgttggccaggatggtcttgatctcctgacctcgtggtccgcccgccttggcctcccaaagtgctggtgcatatctgttcatattattttctgcttaaaatcagtcccttaaaataaagttcacgctaatagcaggactctctgagatcccataccctgaccatttgaatgacttgtctttttctccagtgtttgggggctttcatatatgcttttccttttacccagattcctcttgttccacaaatataacctaaatacataggtgttaagccagtgtttaccgtttgtcttcctgttatttggagatttgaaaaatcttacttttaattttatttttaaatattttattgtgtatatttcaggtatacaatatgttgttatgggatacatatagatagtaaaaaggttactgtagtgaaggaaatgaacatatccatcatctcacataattacccaatttttaaaaagtttaccaagtccatccttctgcagaaattacctatttttttgtttttgtgacaagaacagctaaaatttacatttaacatgaatcccatacacagtacaagtttattaccttgaattaattcattaaaatattcttaattataagtgacatatgagtagatatgtaaaaatagttatgctgtctgtctcaactctacttctctttgcatagggaatcactgttaacaatttggtatgtatctaccccatctgttgtaccttgtgtaccaggggttttttaactttattttattatgtagatatatgtcctctgtggaaaacatcagtagaaataagctaagaaaacatctcccagttgggcttggtggctcacgcttgtaatcccagcactctgggaggttgaggtgggtggatcgcttgagctcaggagtttgagaccagcctgggcaatgtggtgaaaccctgtctctacaaaatatagaaaaatcagccaggtgtggtggcttgcgcctgtagtcccaactacttgaggggctgaggcagaggatcgcttgagccagggagttcaaggctgcagtgaaccaagattgcaccactgcattccagtatgggctacagaggaagactttgtctcaaaaaaaaaaaaaaaaaaaaaaagaaaagaaaaagaaaacatctctcataatcataccacctagaggtaaatatgcttaaaactttagtgtttgttcttccaggcttttttttttttttggttgcttgctcatacatatacacaaatatatatttttaatttaatagccaataatatgcacactcttcttataatctgtatacctctattgtcactatggtttctccacaccccacaggatccattcaggtaccatgagttgcacttgtgttatatctctttagtctccattaatctagaacaatttttctgccattttgtggtgttcatgatgttgacatattgaagaatcttagtttttataatgtcatattgaatatctctcagtctggatatatctgattgttttcttgtgattagattcagtttaaatttttttttttttttgtaagagtattgtgctggtgtttagttcccattatatcacatcaaaagacgtataatgtggctgggtgcggtggctcatgcctgtaatcccagcactttgggaggccgaggtgggtggattacttgaagtcaggagttcgagaccagcttggtcaacatggtgaaatcccgtctctactaaaaatacaaaaattagcctgtaatcccagctggttgggaggctgaggcacaagaatagcttgaacctgggaggcggaggttacagtaagccaagattctgtcactgcactccagcctgggcaatagagcgagattccgtctcaaaaaaaaaatgtataatgtcaatttattgcattattggtgatagtttaggtgatgtcaaccacagacctcttaattttaaaggttttttttttctatttgtaattaatgataaatctgtggggtaataactttgagactctgttaatatgccattctctagcaactttccacttaatagttttagcatccttgtcaaagtcactgattacaattacactgattacatatgtaggctgcaagatggaaatttgctaattccaattctaattcctcctacatttattaggaagcatttactgtgtaaagaaattctcttcccctttttttccttttcagtattactgtgagctcatatgttataatctattaactgattgctgtttctgttacttattacattgtccaaatttgaccagtgagagtcctttaagaaggcccttgtgtatacacaaacacttctctctctttctctcactctttctctgttttgtccaccacttttctgtctctacctctaaataaactggataaatccctaagatatttttctacaacttgctttgtttcactcatctgttaattctgtaattcttctcatgtcagtgtatgtgggatatttcattctttttaatgatacatagaatggctcaaccataatgtacttatttttttgtttcaagtttttcacttatatatagtgctgacaaacatgtgccatgtatatatatgtaataatttctgtgggatagatacctagaagtaaaaattcttttttttttttttttttttttttgagacggagtctcgttctttcaccaggctacagtgcaaaggtgagatctcggctcactgcaacctctgcctcctgggttcaagcgattctcccgcctcagcctcctgagtagctgggactacaggcatgcgccacctcacccggctatatttttgtattttgagtagagacggggtttcaccatgttggccaggttggtctcgatctccagacctcatgatctgcccacctcggcctcccaaagtgctgggattacagggaagtaaaatttcttagtcaaaagataagtgtatttaaacttctaaaaaccatttccagattgactaccaaaaggactgtactaattaccaacaatgcacaaactacttgataacattgcatatttgtaaattttcttttattcttttggatataatctctttattacaatgtgcattcaccttattaagaatgaagtttggcatcttgtggccatttgccacattttgttttctgttacttgcctgtcattttcttagtcatttcttttctttttttttctggtgaaaacatacacatatatttagaattagccagctggactcagtttagatgatcccaattttgttggcaagattcaaagcattgtaatcaggagccagtcgaacatatgccttcttttctccatcaggccgaattagggtgttgacaccttggccacatcaatgtcacagagctccttcacagcctgtttgatctggtgcttgttggctttaacttcctcagtgaacacaagcatgttgttgtcttctatcttcttcatggcagactcagtggtcagcagaaacttgatgatggtatagtagtcaagcttgtttctcctgggggagctcttccgaggatatctgggctgcctccagagtctcagtgtcttgggctgctggaaggtgggtgacatgcggatcttcttttttggtggctgtggacacctttcaacactgccttcttggccttgaaagccttcggtttggcttcagctttaggagggacaggagcttccttcactttcggcactgtcttgtgaaaagcatagtcatttcttgtcctggcgcggtggctcacacctttaatcccagcatgttgggaggctgaggcatgtggatcacctgaagtcaggagtttgataccagcctggttaatgtggtgaaactcccttctctactaaaaatacaaaaaatttgccaggtgtggtagtgggcacctgtaatcccagctacttgggaggctgaggcaggagaatcgcttgaacccaggagggcttgaacccaggaggcggagattgcagtgagccgagatcgcgccattgcactccagcccgggtaacaagagcgaaactccgtctcacaaaaaaaaaagaaagaaaagaaaagcttagttattaggttctctttttttctcattgacttattggaattctttttttaatggtctttgtctgttatatgtgttgcaaatattttccatccttgcaaatgttttttatgttttccatcctgttctgtatcctttaactttgtgattttttattgtttacaattttctgtacagttaacacctgtagattttttttcccccttaactcttttgggactagtttttaagtttcaaagtgaatttttatctaaaactcaatccaaagaaagggacatttttaaaagtgtaataagtagctagtattgctagagtcttttgtttttaaatatggttgcttacagtgacagacttccatattgtaattcagccatgcaatttttaaaaaacatggttaaatatgaacttcatgaatactttatttagagaaaactatttgcctatcataatacatgaatattaaataaaatgtggaaaatatagaacagagagaagaaaaaaacatttctaattgtcctcatatccagacagccatagtattttgttgcatttcttttatctccttttttttgagaaatatgcttattctcaagtaattgcataaggatctttaagttgagattttgctaaaagatagtatgccaaatttcgcttattgaatttataattgtttactgtaattacttttcagagtgctcacttcatctaaatctcttttctttttgaaatttgagggctgcagtgtgtcacttagtataaatatctttgtgggaagatcttctaatattagggtacctctgaccgtgatgtcacttatcctgatatcctgattgtagtgtgtctgaattcaggagaatgtcaggtatatgttagtacttgacagaagttaggtagtgtacttaccagcagttgccctcaggtttagttgctattcattaaatgagataaggcttactaagagatgtttccccctatttatttttcagtttactgttagcctagcccaaggccatttttgttttttagtgtatgcaaaaagatatccttaggagtgttcactggatagtagaatatgttcaagttacaaccatttggtactttacttcttttgtgctttaggacaggggtccccaaccaggtggtactggtccttggcctgttaggaactgggcctcacagcagggggtgagcggctggtgagggagcattactgcctgaactccacctcctgtcggatcagtggcagcattggattctcctggaagcgcgaacactattgtgaactgcacatatgagggatctaggtttcatacttcttatgagaatgtgatgcctgatgatctgaggtggaacagtttcatccaaaataatccccctgtcccatccatggaaaaattgttttccacgaaaccagcccctggtgccaaaaaggttggggaccaatgctttgggatatatttctgacaagtattatgcatgttgtaggtactgtctttctcgtaaacaatattactcattttaaaatcttttttggccgggcgcggtggctcacgcctgtaatcccagcactttgggaggctgaggtgggtggatcacgaggtcaggagatcgagaccatcctgactaacatggtgaaaccccgtctctactaaaaatacaaaaaaattagccgggcatggtggtgggcgcctgtagtcccagctactcgggaggctgaggcaggagaatggcttgaacctgggaggtggagcttgcagtgagctgagatcatgccactgtactccagcctgggcgacagagtgagactctgtctcaaaaaaaaaaaaaaaaaagtcttttttattgatgagtttcatagtcaaaagtctaatgatatattaagtacagaaaaagtgttttaagtttttaaatggcaacttttatatacctgttttatatataccgaaatataattaggatagatattattaaacacatactgcagatgaaataactaagcttcagagatttggtttgttcaaagttacacagctagaagatggaagactgaaagtccactggcccctgtgtgaaaagctgaatggggaacatttccactgatttgaattatccatacctttgtacaactcaaaacaattgtaaacacatatttttattttcttaaatatgagttgtgtacattgcatatattagtcaaagattgatgctaattaaatggccatagaaacatgtcttctgtgttacccattggaaacacactgagcacatatgagttttatgtgtttatacattgtttattttgtttacccatatgaaaaagaaaatatgtttcccatactcatgttttatatggaagagagaaagattttagaacgtatttagtcactaattaaaatgaattggagcagatatacagtgctagaactttggtctagagctcagtaaacccaacaggtatgacagagaaatatgggataagtggcaggtaaaagtggcaagtaaagaactctataaaggtaatgacacagtatggatcatttttcagggacagtgaagctgaagaaaaaatacatacagacttgctggttgttctttgagcttgcacaacaccattcttccagattacaaaggaagaatttcctgggaatggatttcagaatcattcctaagattaactgtaggaggtttaaaactctgtgcaaatgtgcacgtttgctatgtgtgtggaatattctttaaaaatataattgaaaattttctttattctgaaaaagtgaactgctgtgatttaccttgatttggctgaatgaagttaataaattggatagctccttaagggctttattctcttggtaattgcctacttgtgtggatgcacattttatctagtttgaatttgtttcaaaggaacattattttgtaaataaaatatatattttttcccatgtggtattgcatagcacatggagaaaatagattgatgataccgtttcattttatgatttttctttgaatataatgttttgttcttttattggaaataaaactgaccccaagaataaaattatatttccttttaattttatgatagtgcatttaaagtaatgtatatctacccaaggtgatgaagatgatgattgccaaccacaatttaatgacattaaagaaattaatgagttttgattcctttgcttatcttgtgtgttatagtctaactccttttaaatctgttctttgacattttatatgactttcagattgtgtgcgtatatatgatacatataattatgtattaaagtatgttaattaaaaatgttaattaaatgaaattaattatatagtttaatttgtaactattaatattaactatatttagcataactattaacatagtatatatgaaatccatatatacatatatatatacacacacacatgcataatctgaaaaaatatatatacttttttgagacgagattttgctctgttgcccaggctggttcactggcaccctccacatcccaggctcaagtgattctcccacctcagcctttctagcacctgagactaccgtgtgtgccaccatgcttggctaaactcttttttgtattttttgtagagacagggccttactatgttgcccaggctgatctgaaactcctgggctcaagcgatcatcctgcctcagcctcccaaagcattgggattgcaggcatgaactacacgccttggctgactttcagattttattaaaattcactgttataaaacctttgaatagcataaggataacaattaaacagttgcttgaagcagcttgtgtaagtcatagctgcaaaccaactttttagttttttgcttactattaggctattttagttatgatctatatttggtaagtagtgttttaatgaaatacttacatgtaaccactgacatataatgacgtctagttaattaatgttggtaatttaaaattatttactaattgtatatggctcttttcctttctcgtgggtgatttgtttaactcagtattcattcatttatatactgtagttatttattttagtttgaatttctttgatggttgtgagaggtcacgctccaatttaggctcctggttgtctggttagtgtttaccagttcaaataatcacatgatcttacattggatatatataaacttacccatatggtgaagtcttttaggagacgatcatgttaaatgtttctcactgtggcttatttaatgtcatcagtttattgcgtgttactttggatgccccttagaacttggcaccaagacctaccctcttagaataaacctggtcaaaaggatgttgggatggttgctattttatctttagaaatgacctattttgagatgtaataaatgtgtctcaggagactggagaaatgcccaaacctaaaggtgatacttcaggacaagaattaagttgcaatgtgttcattattatatatgctttagattgtttctttgaaggatgttttacattagggcagtgccttcctttttagaggaagggaaatttgataataagttagtgtatgtccactaccatttgggaaaaagaaatctatttaggagtcatgactatcatcagtagagaagtgtacttcattgttggttatcagtaagtagttcagcatggttttttatagtctgaatgaaatactctctcagaacttttcaatttccatttatcagattccatgtttattatactttggtggtagtaataacaaacttttaggcatcttgatgctgagaaagttatttatgattatggatgtgacattgcttaccagcagattttgttggtttctaagataccggcagcctcatcaatgctgactgagttcacagacaaaattgagttgtaggaattttaatgatcaaaacctgatttaccaagatattgtcaatgaagtcctgcctgaacttcttattgcagctttgataaataatctactcttttaaactcaaaatcagggaaaatactttaaaaattttaggcagatctggaagcctaaatagaaactttaaatatacagtcacccctcagtatacctagggaattggttccaggacccctgcagataccaaaattagcacatattcaagtcccacagtcggacctggggaacttgggttatgaaaagttgatgctttgtttatgtgagttttgtatcccacaagtgtattttcactctgtgttgtgttgaaagaaatctgcatataagtgcacctgaccagttcaaacctgtgttgttccattgtcaactgtaacttgtaattccagagatgtatctaaggcaactttgcttttgataattggagggcaattgaattgaagtatgacatgtcctactctaaagtgtaaagagcattgccaagttatcttgtctgttgggtgtgttcatgagaatctttaaggatttttattacattagctgcctaaataatatgatgaactcctctcagaatgttgagttttgtgagtgataagaggaaaaaagagaatgacatattgttttcatccatttcagttatagacaaattttcacagaaagaataatttaaaatttttgaacagattaaatacatcatagagttagagattggctcagttgtgcatggaactcagtctgtctaatgttactactctgaacttttcaaactgttctatagctttaggtgcataactttgcttttacaattgtattatacctgtttgtattataatctgccacctccaaaattagatcaaagactttttggtttgtatctttgttttgcatgagtttgatcttttatatatatattttagtacctgctacaaagggacctcaataagtgtttgccaaccaataattaatctaaattctttaatgacaacttgtattttttatattttatatttttattttttatgagatggaattttgctcttggcacccaggctggagtgcagtggcgcaatcttggctcactgcaacctttgcctccagggttcaagtgattctcctgcctcggcttctcgagtagctgggattctgggcgcctgccaccacgcctggataatttttgtgtttttaggagagatgaggtttcaccgtgttggccaggctggtctcgaactcctcacctcaggtgatctgcccacctcggcctcccaaagtgctgggaatacaggcatgagccactgcacccagcctaatttttatattttttaaattaaaaatttattgttttcccacctttaatgcttttacagtaggactaaaactatttttaaaatgtcatttatttcattgtgtatactacattaggtgaaaaagtatataaaatgagtttatttctgtattttaatacgtttcttataaaccattggtgtttcatatctttttcctcatctctttgctattctttttcttttgtgattttatgtgactttaacaaaataaaccctatttaatcatagtgtttttgttttttttaggttgttatggagttgatggagagagtgactctattatgagttcagcttctgaaaactccactgaaccttggttttgtgatgcctgtaaatgtggtgtttctcctagctgtgaactgtgtcctaatcaggatggaattttcaaggagacagatgctggaaggttaatgtcctaattatgttggttcatatgtttgctttataatgtgtctgcctttgacttccctgttcttctgtttatgattacacactttcatttgattgcttctttgtatcttcttggcatagaataaatgaccagtgggatacagatggagaagggtgagaggaaagaccatttattgagtacctgcatttgcctttacatccataatcttaattaatcttaataattgaccctatgatgaggcaggtggtaacgtttctcattttataggtgtatagtacccagggctcagattatttaaataacttattcgttcaagaccacaaactggtgaatggtcaattttgaacctagatctgtataactttatatcaggagatagaacttaatacagtgatttaaaaagaagtttagtataaagaatttttaagctgtgataaaagagtcactataaggtataaaaaaactctaaaggatgctctgggcctgagggagattatccaaggaatgacaaaattggaatgatgacctcctaccctaggttggggttcaggctttgttggagaaattatagttaaaccctactggatggagagaaggccctctgtgttgagagggccatggaaaaatgatcttcatgttgggccagggctgtgaggtcactgagggactgtgtatatagctggggcagagcacaggaggaagtactccacccatacctgctgaaaagcccctccgttctacgagacctcctgccattgagtttatagctccctctaccattgagcttagtgttatgctcactctgagaagaaatgctgaagaaattctgtccattattgcagagtaggtattgaagcatgcgtgagaggcaattaataagtggcacaaagacctgtgttctttttactacattcacactcatgtttgttaacacatttgagcacttgtcatcataacggtgttgccatcttccatgttttttttttttttacaggagactaccatctagggttggtgactaaaattaagagtaattttcaaccttttgtatttcgtggagatcacgctctgcctcttcctctccaatataagagggggggtgggtacttaaatttttattttgtcacataaggatgttttagtattttattaaacatgctttatattaaaaacaagattaacagcaaagcaacctatataaattatcaccatcatttcccatattttaacataaaaactagggtatattatgtcctaaaataaaggataggcttttaaatttaataaattttactttagtaaagtaaaacaaattttctcttatttttatcatttttgcctcaattggtggactgatccttgagaaatgttgccatacaagattgctgggatagcgtagaatctaccattgaatcttggagaatcccatgtgttgatgttcaggacaaatgactaaagaatcttacctcttcttccttattgtctatccaaaaataaaatatataacaaatgatttgatgtattgacatgaatctgtggtctgtatcataggcataggcattactctaagttgggcctgagagtggcctagtattagggagtttagtaagcattaagtgtgcaccttcaagttggactgtctatgtttggattctagtcttttttttttaatagctataattttaggcaagtgatgtaacctttttatgcctcagtttccttagcagtgttgagaagactaaatgagatgatccatgagaaacaactagcagtttctgtaacataataagtggtcagtaaatgtctccttactcttactactgccgttactgctgctactagtgctttcttattaccattattgctccacttattttaggtaatcatggagtattagctcatgcatagattttttttttttttttttggtaactcttccagtcctgagaattgaaatttttggtgataaattgtggtgaataagtaaggcagttttggaaagacagaacttccttttagggaagagaatttattttactgtttttcttgttgataatttaaaagttctgttaggacactgtcaagtagtggttacttcatgctatcataatagacaaaacaactggcaaagttgtttctgaatgaagaaaactgaggcctctttaccatttaggtttactgagggatttttttttggatactgtggacgttacataagtagacacctcctgtgatggtgcaatctggcaaaaattcttttatatactatttgaacacttgtgctaatgtctacacttacctgtaggctgtactggaaattataggccttcacaatatttccaaggacgtaatactagtttgattaaaggtataaaaagccaagaaaattcgagaagccttttagtatatgagcttcaaatggaaaacagggaaaaagaaagaatattgtatataaagaataaaaaaggttttgaagttcaccatcacatgagattaattagacttttttccttctattcttgatgggagccacaagttctacatagaaaatgatgtgatttaatgtaagaaaaccagtacattcttgtcattaaatttttattttatatcttatggagagtaagacttataaacctgactgtgggaaattttttggcatgctctccttttttattttttatttatagttttactatttgtgggtacatagtagatatgtatattcatggggtacatgagatgttttgatacaggcatgcaatgtgaaataagcacatcatggagaatggggtatccatttctcaaacacttgtcttttgagttacaaacaatccagttaccctctttaagttatttttaagtgtacaatttagtttttcttgactgtagtcaccctgttgtgctattaaacagtaggtcttagtctttccactttttcgactcattaaccatctcccacctccccccaccatttcaccctttccctgcactatccttcccaacgtctagtaaccatccttctcctgtctgtgtccatgagttcagttgtttggtttttagatcccacaaataagtgagaacatgtgatgtttgtcttgctgtgcctggcttatttcacctaacataatgatctctagttccacccaagttgttgcaaatgactggctctcattcttttttatggcttagtactccattgtgtattgtgtaccacaatttctttatcggattcgtctgttggtggaaacttaggttgcttccaaatcttagctattgtaaacagtgctgcgacaaatataggagtgcagatatctctttaatgtactgatttcctttctttcggatgtatacccaacagtgcagttgctggattatatggcagctcaatttttaggaacctccaaagttttcttcatcatggttgtactaatatacatttcatgcaacagtgtacaagggttcccttttctccacattcttgccaacatttgttattgcctgtcttttggatataagctattttaactggggtgagatgatatttcatgatagttttgatttgcatttctctgatgatcaaggattttgagtcccttttcatatgcctgttttagcatatgagcttctttttatatgtctttttttgagaaatgtctattcaaatcttttgtctgtttttaatcagattattagattttttcctgtggagttatttgaactccttgtatattctggttatttatcccttgttagttgggtaatttgcaaatattttctcccattctgtgggttgtctcttcagtttgatgatgtattctttgcccagcttgttgtgatcctgctttttaaaaaaacctgatatgatatctttcgtctgtttttgcttcggttgcttgtgcttgtggagtttcgctcaagaaattttacccagagcaatgtcctggattccccaatgttttcttgtagtattttcatagtttgaggtcttagatttaagtctttaatccattttgatttgatttttgtatatggcaagagatggcgtctagtttccttcttctgcatatggatatgcagtttttccagcaccatttgttgaagaaactgtcttttcccatatatatgttcctggcacctttgttaggcactaagttcacttaggtgcgtggatttgtttctgagttctgtattttgttcctttgttctgtgtatttgttttatgacagtaccatgctgttttggctactgtaggtttgtggtataatttgaagtcaggtagtatgattcttttttgcttaggatagctttggctcttctgggtcttttgtggttccgtatacattttaggattattttttctatttctgtgaagaatgtcattggtattttgatagggattgcattgaatctgtagattgctttgggtagtatgggcattttaacaatattgattcttccagtttgtggacatggaatatttttccattttttggtgtcgtcttcaatttctttcatcagtgttttatagttgttattatagaaatcttttacttctttaagttaattcctaggtatttaatcttatgtgtggctattgtaaatgccattacttttaaaatttctttttcagattattcactgttgtcacgtagacatgctcctgatttttgtatgttgcttttgtcttttgcaactttactgaatttatcggttctaatagttttcttatgaggtctttaggtttttccaaatacaacattatattacctgctaacaagaataatttgacttctttctttccaatttggatgccctttttatctttctgttgtctgattgccggaagctagggcttccagtactatgttgaataacagtggtgacagtgggcctgcttgtcgtgttccagatcttagaggaaaagcttacagtttttcccattcagtacgatactagctgtgggtctgtcatatatcgcttttattatgttgaggtatgtctttctatcccgtttttggggagtttttatgatgaagggatgttgaattttattaaatgctttttcagcatcagttgaaatgatcatatggtttttatccttcatcctgttgatgtgatatatcatgttgattgacttgcttatgttgaaccatgcttgcaacccagggataaatcctacttggtcataatgatctttctaacgtattgttaaattcggtttgctggtattttgttgaggatctttgcgtcagtgttcatcagagatactggcctgtagttttctttttttgatgtgcctttggctggttttggtatcagagtaacactggcctcatagaatgagtttggaaatattccctcttcctctgttttttggaatagtttgagtaagattggtattagttcttctttaagtgtttggtaaaattcagcagcgaagccatcaggtcaagcagtcccaggcttttctttaccgggagactttattatggcttcaatctcgttacttgttattggtctgtacaggctttggatttcttcatggttcaatcttggtaggttgtatgtgtctaggagttcatccatttcttttagattttctaatttattggcatatagttgctcatagtagctgctaatgatcctttgaatttctgcaatatcagttataatgtctccttttttatttctaattttatttacttgtatcttctctcttttttcctcagcctggctaaaggtttgtcagtgttgtttaccttttcaaaatactaacattttgtttcattgatcttttgtatatgttttttatttcaattttatttatttctgctctgatctttattaatctactaattttgggtttggtttgctcttgctttcctagttctttaagatatgtcattggattgtttatttgaagttttttctcttttgatgtaggtacctatagctataaacctccctcttagtagggcttttgctgtatcccatagattttggtatgttgtgtttccattactattcgtcatactcttcttctttatgtcctttgttgggtgtcctcccagctgttctgaaatgaaatatggctttgaactaaattccttaatttttaaaaataagctttatgttgcaatagaaggcagcattgaaatctttatgtctcagttctttctttttttttttccaatcagacggggcctggctctgttccccaggctaaagtgcagtggcacgatattggctcactgtaacctctgcctcctgggctcaggtgatcctcccactgaagcttcctgagtagtgcaggttataggtgtgcgccaccacaccaggctaatgtttgtatttttctgtagagacgaggtttcaacctgttgcccaggctggtcttgagctcctgggctcaagcagtcctcccacctcagccttccaaactgttaggattactgtacctggccaattttttctttttttctggagagaacgtctggctttgtcaccctgactggagtgcagtggcatgatcttggctcattgtaaacccccgcctcctaggctcaagcagtcctcctacctcagcctcccaagtagctgggactacaggggcatgccacgacacctggctaaattttgtattttttgtagcgatggggtttcaccatgttgcgcaggctggtctcaaactcctgagcttaagtgatcctcctacctctgcctcccaaagtgctgggattacaggcatgagccactgtgcctgaccacttctttctttttttttctttaaaattctagatttagtaagtcttagttctgtcccttgctagacttgttatatttgaaaatcagttaatttttctgaaaccaattcttcatatgtaaatgaacaacctcctactcaacagaagcttttaggcttttttttccttgtagttaacatttcttgagtgaagacagtgagccacactctgctgtaagcacttcacatacatctttataacttccaaactacctttatggtgctctgtgcctagtagacacttataattgattactgaatgaaggaatgaaaataacgtacttgacgtgaatttgttttacatgctgtaaaggcattactgatacagagcacttcaaactccaattttattgattaatatagttttcattcttaaatgagtcttttgagaagtatcactctacttagtctgctttattaaaatatatgaatttacaataatctgttaatagtttgtgctaggatgacaattctgactgttttttggtggttttatgtgatgcttatttcctgttcctttccccagtcagcatctgtcataatagctccaagcaaaattaatggtaaagtaacaaggaagatttttttttaaattgtagatttgtcttagttacaaagttataaataatgtgcatctaaacagatgagcaagaaactatttacagctggtattaaaagggaccatagttgtctcggccatgattttcattgactttgataggtattttaatgaggactcaagttggtatcctcacatgagtggttgggagaatgatatacttgtatgccagtcacattgaaatggcagtttaaatctgtagtacttgtgtactacattttaagaaggtcagtatgaagcaagcagccagctgttaggtttatcaaagataaactcctacagagtatagcgacatttaatacatcagtggagcatgaaaaaactgaacaaattaaattgagaaagcagctgcttgttgaagacgtgtatctttatattgaactccataggatgtatttgggaggttggattaaaacattctatcaagaaaatctcaaaaccttggcttttttccccaataaaaaagataattttttaaaaagatttagaactatttttcccagtgcctctagagaataatttttggtcttagtcctctaaaactcataatgcaccacaaaaaccagaaccatgtagcatgcatagcctctgaagttgtgataaagcagaatttgttgttaatatattcacagggttaatagagatttgctgctgtgaccctctttcttacaaaagtgctaagatctactgtttaaatttcaaagtcagtgatgccacattttgttttgttgtaagcaagcagaaagagtgcctaatatattaaaaaaggttcagagcagtttttaaaaaatgaaattagaaacaactgcaatttttttcagtgtactgaaactctgagcattctttgttttagtcttatagcatcattcaaactttaataaatatttatatttggggcatataaattttagtatatagattgtatggtaaacagataagatgaataaaaatgtgaattgcttattctgtaccttttcccagcagttttaatctggaaaggaagttaaaactgtatacaaaaattgtaaaatatgtccttaaagattattaccccagcagcttttggaaaagagtaataagagaaattttacctaattactgcagagtaaattcacagttattaaattagtatccttaattctcaaagggtttgaaataatgaacgtgactacctttccttgcatatgaaaatgatgttttgtttcatttgaatagtagttttatgcaaatatttaagaatagataagtgcaaagtgcagtgagtgaattttaagtgaaaggcaattatagttgttagctctcagttttggctaagctgctggaaaagtaatttcagtccccttttttgtaactaagtgttattctgtaggtgtttcatattttttaatgatgtgcctgagattgcgagattttaacatttgattacagaattctcttggtagtattttgagatggcaagcgttttatatgtttgttttgtgtgtgggaattttattaaaagatttgatagcaaaatcatatcttctcttcttagatgggttcatattgtttgtgccctgtatgttcctggagtagcctttggagatattgacaaattacgaccagtaacactaacggaaatgaactattccaaatatggtgccaaggtgagacacaaagcatttttgattgcttgaaagagaaaggttttacttgttagtttacctggctttttatttgtattatgttgactgcagaaatgcttactaggaatcattctatttagcactaaatcatttattattgatagtagttttcctagaaagccaataatgcataaattcttctatacattcttaatttagagtaacgtatgaggtaaaatgataattggtactactaccatttccctggcagtgttcacaatgcctaatacatagaccaaaaccttatttacaattagatggatcaaatataagcctaatttctgactttacttttgaagtggaatttgtcaaaattatgaaaaagaatattagaagtgatctttgatgctgttactgtaattgttttggggcgtgccgttaacatgcccttaatagatggtgaacttaattgatatatgttatgtgtgttctgactgcttcaccaacctggtgttcccctatctttctccctgacttggttggggcctctctgttcgctgagacacagtgaaattgaaatttggccaattagggctgggtgctcacgcctgttatcccagcacttcgggaggccaaggtgggcagatcacctgagattaggagttcgagaccagcctggccaacatggcgaaacctcgtctctactaaaaatacaaaaaattagctgggcgtggtggcgcgtgcctgtaatcccagccactcaggaggctgaggcaggagaatcgcttgaacccaggaggtggaggttgcagtgagctgagattgcgccacggcactccagcctgggcgacagagtgagactccatctcaaaaaaaaagaaaaagaaatttggccaattaataattctacagtggcctctaagtgttcaagtgaaaggaagagtcatacatctgtcactttaaattaaaagctagaaatgattaagcttagtgaggaaggcatgtcgaaagcctaggtaggccaaaagctgggcctcttctgccgaatagccagtatgtcagtgcaaaggaaaagctcttgaaggaaattgaaagtgctactccagcaaacacatgaatgataagaaagtgaagctgccttattgctgataatggagaaaattttaatagtagggatagatcatagcagccacaacattcccttaagccaaaacctcatccagagcatgaccctaactgttcaatattgtgaaggctgagagaggtgaggaagctgcagaagaaaggttgaaaggtagcagaggttggttcatgaggtttaaggaaagaagccatctccgtaatataaaagatgaagaagatgcagcaggtactgatggagaagcatcagcaagttattcagaagatttagctaagacaaatgatgaagatttgtacattcaacaaagattttcaatgtagatgaaacagtcttctattggaagaagatgccatctaggacttaccatagctagagaggagaagtcactatctggcttctaagggcaggctgtctctcttgtttagaggtgaatgcggctggtgactttaagttgaagccagtgctcctatactattgtgaaaatcctagagcccttaagaattatgttaaatctactctgcctgtgctctgtaaatggaacaacaaagcctgtgcacagcacatctgtgtaccgcatggtttactggatattttaagccccttgttgagacttactgctcagaaaaaagattcctttcaaaagattactgcttatcgacagtgcacctggtggtcacccaagagctctgatgaagtacaaggagattaatgtgttttcctgcctgctgtcacaacagccattctgaagcccatggatcaaggagtcattttgactttaaagtctgattatttaagaaatacatttcataaggctatagctgccatacatagtgattcctctgatggatctgggcaaagtaaattgaaaaccttctagaaaggggtcacttttttagatgtcattaagaatatttatgattcatgggaggaggtcaaaatatccatattaacaggagtttggaagaagttgattgcagccttcatggataactttgaaggggttgaagaattcagtggaggaagtcactgcagatgtggcagaaataacaagataactagaattagaagtgtagccaaaggtgactgaactgctgcgatctcatgataaaaatttgaacagatgagaagttacttctcatggatgagtgaagaaagtggtttctcgagttggaatctactcctggtgaagatgctatgaacattgttaaaattacaacaaaagacttaggatattacataaacttgattgattaagcaggaagagggtttgagaggattgactccaattttgaaggaagttctaccatgggtaaaatgctgtcaaatagcatcacgtgccacagagaaatctttcataaaaggaaggatgaatctatgcagcaaacttcattgttttattttaagaacttgccagccgggcacggtggctcacacctgtaatcccagcactttgggaggccgaggtgggtggatcacgagatcaggagatcaagaccatcccgggtaacacggtgaaaccccgtctctcctaaaaaaatacaaaaaattagccgggcatggtagcaggtgcctgtagtctcagctacttgggaggctgaggcaggagaatggcgtgaacccgggaggcagagcttgcagtgagccgagatcgtgccattgccctccagcctaggtgacagagcgagactccgtctcaaaaaaaaagaaaaagaaaaagaaagaaattgccaggctgggtgcggtggctcacgcctgtaatcccgacactttgggaggccgagttgggtgggtcacctgaggtcaggagttcgagaccagcctggccaaagtggcaaaaccctgtatctactaaaaatacaaaaattagctgggcgtggtggcacgtgcctgtaaccccagctactcaggaagctgaggcaggagaatcacttgaacccagtaggtgtaggttacagtgagccgagattgcaccactgcactccagcctgggtgacagtgtgagactccattaaaaaaaaaaaaaaaaagagagagaaattgccacagccactccaactttcagcaaccaccaccacccccatccgtcagtggccatccacatcaaagcaacatctttcaccagcaaaaagattatgacttgctgaaggctcaagtgatcattaacattttttagcaataaagtattcttaaattaatgtacttaacattttaaaaatacataatgttattatgcatttaatagactacagatagtataaacctaacttgaaaatacatggagaaactaaaaaattctcgtgatttgttttattgtgatactttattgaagtggtctggagctgaacttgggttatctctgatgtatgcttgtaaatttaacagaggttatttgagcattaacagatgtatttattgggcagcacttagaactagaaaaggctcagagatgcccacttcaatagtgtgagcagtgggcttctattggctgaatgtggaaccaaagtaaggaaattacttaattgactacagctgtgttgtttttctgtatgggtatgatttagtagaaagtgtccagttacgttatctgatgtctagttggctgttgtggttagttgaagcttgttttttttttttttttaaatttaatttattacaaggaatttttctaaattaaatttcaccttgtgtaaagttccatgtacagaaacaggtccaggctaatttcctcttgcttattttgctttaagaaaacatcactgggaaactgagttgaaaattaggtactctctggcttctctgcaaaatcagatacaatgttgtaaatcatgactgggacagccttctagacctcattgtctactcattttccaatctgaattatgttctcctgtgttctcagttgcttagttcactagcattttaaatgattcaggcgattgaggaagattctgttttctttgatagattgttttatagtctaaaaaggctgtcaggaatattttccttatattcactctgaaatcccttgctcaatttcaacatattacatgaaattatccagataatctaaacaatatgtctctgttcacagtgtggacatcctttaaataatttaatttctctttatctctcttgctcaatctcatgtttagattgctatttgccagtatattataccatttatgttctactgttattagagaaattatattaactaggcagtaggatgtcaggatttgactattgaagtttttaagttttccttgtatttgtttccttcttatgtagttcactttgaatacttatattaaacaattctttaattgtccattgtcagtctttcataatttaacatctttttcttttatgaagatttctgttaccagagtagtttaaacttttagactagctaattccccctttttcttttaagagatagttaaaggaataaaaaaataaataaatctgagaggatttgcggtaatttcaacagttcataccttggttttataaattttctctttttatacagaaagaatgtacataattgactgtgttgtatattactaccaatttcacctgattattaacctaaaattacttttagttgtcttaaagatatttaaaacatgcatgatttctaggttgtaatgcctagattttttgttggattttctctggtctcttgtttccttttccaagcaattttatattgtttaagaattagtatagcttgatggtgggctttaaagtaagattgtcctggtttgaagccttacatttactttctttgttatttttggcaagcagatttcttaacttgtctttactttaatttcctcatgtgtaaaatgggaatagttatagtatctcttcttcatagtagttgtgtttaatgattacatatatttatacatatagtccttgacttatgatgggtttacatcctgataaatccattgtaagtttaaaatattttaagttgagattaatttaatacacctaacttactgagcacagcttagtgttgcctacctttaatatgcttggaacacttacattagcctacacttgaacacaatcatctgacacaaaactttattttataataaaatgttaactatctcatgtaatttattgaataccctactgaaagtggaaaacagaatggtcgtatgggtactgaaagtgtggattctgctgagcgtgtattgtttttgcaacattgtaaagttaaaaaattagaagtggaactgttgtaaactggggactgtctgtatatgtaaagtgcttagaatagtgactggcacatagtaagtcctcaaataattttaattatggttgtattattatttattatcattaaattagttgaattttgatttatttgaaccatataggtaattacgttttttcatataaactcttggctcgcctatgattattgtttgtattggtacataattggttcattatttgtatttagcattttaaatatttagtggacactttgtatgagaatgcagtctttagtctggaaataagtttgctttgagaatttttctgttactttgttgtaggagtgtagcttttgtgaagaccctcgctttgctagaactggggtttgcattagctgtgatgcagggatgtgcagagcctatttccatgtgacctgtgctcaaaaggaaggtctgctttcagaggcagcggcggaagaggtaggtttatttaaacccatagttggtgaacatgttcacaagatatcttttgactctatgtcctataataagtgtaaataataaaagaaattttaacatttattcttaaagttcttgccaagatcactgttctaaaactttaagagtaaatgcctatgagttttgtcagttttaaagctagtcagacgttcagaaaacataatttttatagtgagatctgacagataaaatgaaagataatccaagttgtcttaaagcattaaaatgtcggcatttcagccccatgaattatagttaaaaaaaaatagcatattttatacgagaagctgaaactgtatttgggtaaccttgctctatttttctttaaataaaatcattactgtgtctttagtatctctgttactatctctttactgttacttttaattccataatattcctttcagatttattggctttacgttaaaaaatcagttgttttcagtgtttggggactggttaagattcgttcaagtattctgagtttaaaactattttcattacactataaaaatgttacttacttttctgaactctgttctttcatgagtattagtggagacttccagagattacatacagtataacagaacccaccgaatatagaaacaattttgagaatccagctacctttttttatgtcagttatctagacattagtatgtaaaatgtaaaacagtgccactctcctcactcaatttttgtgtgtatgtgaattgtatttagtaaaagtgtatacttcggtaatggacccattatttaaaataaattaatgaatattgcaaaaaattttcagttttaatttttaatagggtaactgtctaaaatataactcacataaaccctttggagtcctcagtaatttttaagaatgttaacaaattgtgagcaggttcagttcattccttaagcttacatagtaatgaatgtttatttagtaatttttattgcacattcatgatggctttatggtaatagtctaagcctctccttgttatgttttttcttttattgggtaaattttgtttattgtgctgagattttatcttagtacatttatttcatttccagaaagtgagcaaagatactctgatgaagaaaaattgtagaaaaaaatttgaaggatatattttatgaataaacagatcttataggaattgtatttttgatacatgtagctgtttttgatacatatagctgttccaatctcttcatttatatagctgttccagtctcttgattttaaggaattgtactttgatgaaggctactagatgaacagtgagcatcttctcagctactaggtagacatagagttataattatacggtaaaggtagtctggattcctcatagctacaactcaggatggtgggcaaaagtacgagagggcaatacaggtaagagttagaggaccagataaatactacgtaaatacttggatcagggaatctataggataaggttagttgtctacttctggaaaactttgagctttgcggttagtagggtgcttttggagccagtggagagctttcttttttactatggtagtttggattcctttgcacagcatcatatgtcatcatttttggcaagatggcagctaattaacaaaaatgtgtgaagcagccatgtttgggacagtggggtgtaatggagttatgggatttggagagtgcatctccgtctaaaggcatgcaaattaaatgaaactaaacataatattaagctacatagtttacattctgtggtctgtgtatcttacctataagctaatttgaggaaatttacagggaaacagatacattaggatgtgagaattagccctgaggcatcttccttgccttgctgtgtcccttgattaattaggtgggagccctggatgctggaataataaaatgcaacttttctccctattcactaccttactcagtgtgctgttgttttggggggaaatgatttaaagcatatttacatatatatgttactggtttcttgttataaacagagaattagaaaattctaaatgttttctgaacgatatttcaaaacccagaatattgcatgaatcaatattaatgaagtttgcatttgacagtaatcattctgtcttgtctatttctagatggttgtacttatgtacataaggatttatgtaatgtaatagcatttaaaattaagaaacacattttaaactaaaatagatctatgtttgtgagcatatcttgccttctatttccattttatactctttagacattctagggaacttttcaaaagactatatcaagttggatttactactttttcatggtggttttatataggctgttaaaaaaaaaaggttgaaaaatagaataaacatatcagtttcatctaatgacattgtgtacctttctgtattttttatgactttgtatagccttctgacatagtcctttatctcattggtgagaatccatgtgacatttctattctttttcatctactttgtgaatattccagatttattaagaatagtcaaagcatgttatgacacaacatgctttattagaaggatatttaaaaccatgttatgacacaacatcttatttttaaaactggactatagggctgggtgcagtggctcatgcctgtaatctcaacactttgggaggccaaggccagaggattgcttgaggccaggagtttgaggccagtttgggcaacatagcaggaccccatctctaccaaaaaaaaaaaaaaaaaattagctgggtgtgatgttgcctgtagtctgagctactagagaggccgaggtgagaggatcacatatacccgggagtttgaggctgcattgaactatgttctcaccactgcactcagcctggagaatagagtgagaccctacctctaaaaattttaaataaataagtaaaaaaataccgagctattgtgcaggctcagttatgctgactacaacttatgttactatgttttacattatatagtctaaagttacttatagtccaagtaagccatatggtagtttcttctgtaattaaagtataatttggtgctattgaacattgctgtactctgttctgtagaaaattatatttgaaacaatataaaaccgggtgtggtggcacacgcctgtaatcccagtactttgggaggccaagccaaggaggatctcttgaggctggcctcaagaggattttgagatgagcctgggcaacatagcaagacccaatctctacacaaaatgtaaaaattagccaggtgtggtggtgtgtgcctatagtcctaactgctcaggaggctgaggtgggaggattgctgagcccagaagttcaagatttcattctattagagcatatatggctgaggtggggtggacaagaatattgataatgcataattaagaagataagtttgatatgccattaggttattattgtatttaaatgtttctggtttcagtaaacacatcaattttactattaagataccagtaaagcgtaggtacgttcttcaaatacactgtttttacaagtgccaggtaaggttctcaatgtacaagaccgaagttgtgtcttctttcagtttatataactttgatctgctatgtcagttttacccagggagctttgtttaaaaaaaaaaaaaagattttaagattctagaccaaatcatggcatctagaggaccacaagctaaacttaatccatagatggattttgtttgttaggagtagagttaaaaaagaaaaccttgaatttaaatgactttagatggggcattccagtttgccacaggctctaagttctcacaggccccagcatttactaactgcttctcatcattcatttttgtcttatatttttctggcatcttttaggtctccttcacccatttatgttgactattactgcttctcaaggcatttgtatttaaggcccttgcctcagctctgctaagtcagaatttgcagagttgggctctagttacctctatttagaaatctccttaaatgaatctgatgacagtcaggtaatggttaaggaagatggatcttacatactggacataggtcttggttcagcaacttaacctctctggctttcagttttctatccataaaattgatattaaaatggtagaacccacctcatgtggtagtggtgaaggttaaagagatagtatatacaaaagcgcatgtgcttatttcatggtagatattcagaaacatgtttttccctttctgtcttccactgggagtaggatcttgaaagctccatttctccaagcaggttgaagggatattccatgtcaaccaatgcattaattaggacattattttgactggtttaacaaaaccaagtaacgagttgcttaaacgaagaagttgaattcactctaatatacaattccaggcggattggatactgaggggagtttggttccagggatcagttcccttctttcttcttgcttcaccttcctttagtctattgcactctcctacacagtcaaagatggtttatcaccatcttgactggattcttcctcattggaagtagcaaagaggaggttaagagtaggcagcttcctttcaagggcatggtctgggcatttcatacaacttattggccagaacttaatcacatggccacatctagctgtggggaggctggatcagatagtttctagcagggtagccatatgcccagtaaaaactcataggggtctagtactaatgggaagaatggatattgtaagacaattagtagtttctgccatagtaagtattggtgtttttcttaagtcagagtcttggtccaaatgcttaactcacctatgcaagcatgaatcctatctctaatgactcaatttcaacctcatttactttgaaacattagaataattatctagatctgggtatttgggctgaggttcggtataatctttatttccatttaacatctctgtcaccaagatttagagcatgtcatgagaaagcagctgtttgtatgtgttaatgtagtctcctaattaatttttgtatttaatttttaaagctatatgaagtaattgtaagtaaaccctgttttactaatgtggtaactgaggcccagagatgttaagcaattttttgaagtcccatagcctgtaaatgatagagccaagatttgtatccaggtttttatgtcttcaaattctgtgatacacattgctgtactgtgacatctatagatatcacactacagaattgcctcatatgctttttttttaatattaaggacacattagatttttttttctttctgttcttatatgtctctcctcggtagtgttgtcatttctctttgggttgtaaaactctacttagagacacttttgacataacttagagaaaaactaatagcttatgtttactgttcctttttgggacagacataaagaatgaacagcctgttgttttgttagcaattacattgtaaattacttttttgtactacatctttacaagttgtttttgatagaataaatattcttttttgtacactactttttatgaatgaaaatgtactgttaggctatgagagagctgtaattccacttgagtttttagggaaagagttaagggcataacttaaatttttttattgacagggcttagaatttcttaattctatttttttttttttttttttttttttttgagacagactgtcgctctgtcacccaggctggagtgcagtggcgcgatctcggttaattacaacatctccctcctgtattcaagcaattctcctacctcagcctcctgagtagctgggattacaggcacatgccactgtgcctggctaatttttgtacttttagtagagacaggcttttgccgtgttggccaggctagtctcgaactcccaacctcaagtgatctgcttgcctcggtctcccaaagtgctgggattacaggcatgtgccaccacgcctggcccttaattctatttttatcctcagtagaatctgtccattgttagccagttagaaatgccacacttatcttgttggctagttgaatgttgttgttttgcaatattagtttatgcataactttaatatttaatgattatttctacttaagattattaaaatcctatttgttttaaacagtgactttttaaaaaaatacagccggccctccgtgtctgtggattacacattcttagattcaaccaactgcagatcgaaaatgtttgaaaaaaaaaaagcgtaataaaaaagaatacaaatataaaaccaatacagtgtaacaactatttgcacatttacatttgtgtattaggtattataagtaatgtagagactgcttaaaatatgtgggagaatgcatgtaaactagatgcaaataccacaccatttaacataagacgcttgagcatccacagattttggtatccttggggggtcctggaaccagtcccccatggatattgaagggctactatacaagtacacccaaataatacattatatttgatttcaatatctttaaacctgcaggccctttaaagaaaaacgttgttggtaatttgaagttgacatacaagatcaagtttctaaagaagtaatttttgtcattatgtacaaaaattatttttgtaatttattagatgtaactagcactagtagattctttgaaaaggaagtaatattcttttgtgttaggtcttttatgactcttgggagtacaaatgttcactatttttctgtgctttctttgtataggatatagcagatccattctttgcttattgtaagcaacatgcagataggttagacagaaagtggaagagaaaaaactacttggctctacagtcctattgtaaaatgtctttgcaagagagagagaagcaactatcaccagaagcacaggtatgggattcatgtcaaaacccgtatgtttttgttttaaggttatgtaaggattttacgtctcgtgtggcttccagtgacatgtgacgtataataggaagtttggttagttacctaggaaatggattgtgattaaggtaaatagtgagtataatttttggctgaatacagtactcctcatttagtcaaacagagcagtcctttataaagtaaattttcacattgaaaaatgtgactgtgaggaaattactctatcagtgcaatatatttattacatcttgtttcagtttgttcaaaggatttagtcagtttgcctatatttaaaatataattttatatacattaaacctatggagacaatagcagttattaagaagagaaacttcagcttaattagtttctcaaaactctgattataagttaggacagttgttactaggggcagatatagtttattgtaactcaaaaattatacagtataccttaaggatcattcatacctataatttgctttggtgtgagaagttctgattatctttctgtgaacatgggaataaaaatcaatgtaaaaatcttaaggaacatgtttcattttattatcttttaaaatttgaatacatttcttttataggcaaggatcaatgcccggcttcagcagtatcgtgccaaagcagaactagctcgatctaccagaccccaggcctgggttccaagggaaaaattgcccagaccactcaccagcagtgcttcagctattcgtaaacttatgcggaaagcagaactcatggggatcagtacagatatctttccagtggacaattcagatactagttctagtgtggatggaaggagaaaacataagcaaccagctctcactgcagattttgtgaattattattttggtcagtatagacactggtacatgcacattttcactgagaacaatttgttaatgaaaatgtttgatatactgttaatttttagaaatttattagccatgctgcatatatcatagagggatgtttattttcctaatatgttgtgggtttttacaaaatgctaggttcatttatttgtaaatatacttaaaagttttaaactatgtaggtttatcaatgtgatcatctttatagctagtttcttcctatgtcagtttttacttcctactaaagtaaaattcgatatttcatttaaatagagagaaatatgcgcatgattcaaattcaggaaaatatggctgaacaaaagaatataaaagataaattagagaatgaacaagaaaagcttcatgtagaatataataaggtaagttagctacaaaatatgcaacataatgtgatagatcttactgatgatttcttttgtgaatgtatggcatttcttttatgttttgtttttaatttcttctggagctctttggctcttccctataactcctactcctcattagcttcattatcatcactgtctcttactgagcactttgtgtgccaggcataattttgatctctttacatgtattatttaattcccagcttaactttatagtgtaggttataatcattgcttccattttcagggagaaaactgaatcctgaagaagttaaataatttgcccaggttcacacaagtagtcaagtcacagacttgacaaatgaagtcagttggtgtgaggccaactcatgtgactctgttctctatttctaatcaataaacattgctatagagcttcactttctaagtttgtagaaaatttagaaacttttctttaaattattatttatcttgaattatattataatgtttggaataaaaatttccaaatttgaattttcatgtacctcttcatcctaatgagaaaagattcaaaaagaagtatcttataaaagcaaaatgtggttaaaatgttataccaagtataacttgacatataaaacgggtattgacttattgttagaaaacattttaagtcataaaaaaatagtaggaagtacgtttccaataatcagctacactgtgtagtaaaaagagtacttggaattagattcagaggacctggggattcttgctagttctgtgatcttggccaactcacaaaaactctatgatccttagtttttttcattgggaaaatagtggaaatacatcttgagagagtcacaaggattagttagcagaacatgatgttatataacaaactgtaaaagaaggtataaacgtagttaccattattagtaaaaatgccagcagaaaacaaaatgcttacagcaacaaatactgctgaataattggatagccttgtctctcagtggtattgtggcttgaatatattaaaaatatatggaggccgagcgcagtggctcatgcctgtaatcccagcactttgggaggccaaggcaggtggatcacgaggtcaagagatcgagaccatcctaggagtttgagaccagcctggccaacatggcaaaaccccgtctctactaaaaatacaaaagttagctgggcgtggtggagggtgcctgtaatcccagctactcgagaggctgaggcaggagaattgcttgaacccaggaggtggtggttgcagtgacacaagatcgtgctactgcactctagcctgggcgacagagtgagactccatctcaaaaaaaaaaaaaaaaaaatagatcgagaccatcctggccaacatggtgaaaccctgtctctactaaaaatacaaaaattagctggatgtggtggtgcacacctgtagtcccacctactcgggaaactgcagcaggagaatcgcttgaaccccagaggcggaggttgtagtgagccgaaatcgtgtcaccgcactccagcctggtgacagagtgagactctgtctcaaaaaaaaaaaaaattatatatatatatgtggaatagaaatgtagatatttcttaaattgtcagatattttaatgaagtttactaatttggcttactttgtagctatgtgaatctttagaagaactacaaaacctgaatggaaaacttcgaagtgaaggacaaggaatatgggctttactaggcagaatcacagggcaggttagtttctttccaattgctgtctccttcagttcttgctccctatatgattttcaaagaacagatttttgatacaactgtcatttgactaaccgaagaattctgtttgatcagggcctaatcctttgggataatgatttctgcttgaaatacacctagagcattggaagctgcctactgagaacctctagtttaatttggttgtttcaacagctatcttgtgtgcaaaattttttcatttgctctaactgattgacctgtcatttgtgatgaagcttaagacttgaagcatgagtttttcctactacattcttctttcctttaatttagcagttttagattccctgccacatttttttctttcctgtccttatgctgtatttttttttctattctttggatgtataatttaaaattaaaaaaggcaaactagagatattcatttttatgttaatttggttttcagctgtataagagatggttttttaaactttaatgttaaaatgtatttttcccctttaacagtagctgtgatcgtagttattaaaaaaaactttattcatgaacacctttagtctgttaaagtttttggtgttgaataattattgttagatggatttctttgaatgccttttttagtactgtgtatataattgataaattacagttttcgcaaatattttttattttttaaggatgatggagacccactgtttgtggtcctttcactaaaaagtagttttatttgtgaaggagcttttcgaacagatatttttcattatacttgttttagaggtttatggagagtcaaattcatcacacagcttatttaaatattttaagaagtgatacatactgatttgtactgtgctataccagctttgaagatgctttatgtgaaaagaatgtgtgtggcttgtatcctaaagaatgttttaaaaggtgagaattagtagtcgcctctgggaggatcagcctttgttcctgttaataggttggttgatggatttttggaagattatgttttatacttaatatttagaggagttaatgttgagtataaggctttagtttatttgccaagctagcattatcttttggcttgatttgcaagtttttctcataagaatctcctgtttaaaatactatctaccataaaagacattttcatttattaaaagacttttaacagaggtttgcaaatttccttttgcaaatgtaaaatacacagcagaagtagaattcatttatactgcttgcatgacactttttttttcagttggttgaacagatgtgggcccaccaggccactgagaaatgactttgatagatggttgctgtctgagaagccagcatactacagattagtagaaacccaaagagaatctcacttgctttgttggagagtttggtccaataagataatttttctaattaacctatggaacaccaatatagctggggtgctgaagaaaataaatggcctcaatattctttttgtcaagtgtactgtgttttgttttttttaaacctcctacgtatgtgtctttgtctttgaaagctgaaatagaagtttaatttttatgttttagtgtaccactgaaaattgatgaaagtctgtaattatagatttctaatggaaataactattagaaaaaagctcattttaatcctttttgccaatgtaaaatctgataaagcagatttccccctaacaatcctactatatttacttggcttgagtggcaattagaggaaaatgttgcttttatttctttcttaaaacaatatatactacatttgttcaaatcaatagaagttgaatataccggcaattttgcgagcacccaaggagagaaaaccaagtaaaaaagaaggaggcacacaaaagacatctactcttcctgcagtactttataggcaagtaatgaaattaataatgatagaataatgttgtgtatttttttaaactgatacttattagaaagaagatcctgcaaatatttgagaatgaattatgtccataccagaatttaagtgcatttgaagttcattttctcaaaagatgcattccagtttgaatgatagaggagatttttgttgctgttttaacctaaactctatggaaatgagcagtaccctttggggaactggaaaattactttagataacattatagttattgtcttaaataatttaaacaatataaaagatgagcatttatattttattttacttgaatgaattgtagagtttgttttttagatagtgatgggtatcatatatgtatatatatagaatgaatctattgcctttgtaggcagtggataatgaagataagttttagttttgagtttctacactttttttctcttgatgctcagttgcaatcactttgttcgcataagtatttttgttttttactttctttgctcaatattttcggtgttcaccattatagtaattttattatagtcaagacttctttccataaataaataggttacgatctcactttttcccaaataattatattaagtgggagaagtttagaagatgctggtgtttttgtgtgtgtgtgtgtgtgtatgtatgtgtgtgtatatttatctatgtatatgcatacatatatgttatgcatgtgtaaatacataaatattcttctcaaaatttctttctcagaaatagtagcaataacaacaatatcaatctccataactaccttctgtttttttgttggaggctccctctacaagtaatagcaaataacttccttgaagtgtgggaaaagcctacattgtcttagtgtacaatgtgaacattagcacattctcaggccagctttttcaaacacggttggttcatttggaaccatcaggcaatatcactatgcttctgacttttatgactacaattcatttttgtttcagaatatattttaagtgatttttcttttttactgagaccaggtactggttatttatttatttattttggctttttaagtgtgtgtgtgtgtgtgtgacttttttctaggagtatttaaaaaaaaaacctaaccatcattgctttctgtactttccaaatataaatatactttagattttcaggtgatggtgcttgtgtacgcaggtgtagttaaattgcctttttgcataagagaagttagatttctgagaaaccaaaagatcctaaaataatagtagcaatcacaaaattccacaatctttgcaataaatatcaattgatgtgtgcgtttttaatttttttacttttgaatttaattagtatatttttaaaacgcaaaattcagtattgaaaagagactcatgtatacttgcagtatatctacatgttgaagactgtttgaaaggtttacaactaatggtaggaaataaactaccttctgtttgtgaagtaatttttttatagttttagaaaattggaaaattactttgttctataatttatgtgtctagagaaaaaatgaactaatgtgaaatgggttttaagtaataactaaaattaaaatgaatatgatgttgaggataaataccttatatatgtaattctttagaaggtttgactctagtagtatttaaatttttaccagatccaagctatttttaacattctcaaaagtatttagaactaacagttactgacattgtaaaaagatgtgttaatgaaagaaattgtctatctcaacagaagaaatagtaagttaaatcaagatgaaattttgtaagttgaaaaatatgctataagtaaactgtttcactatgataattattattgaaatctttacttgctgcctttattaaaagttgtgggatttgtaagaagaaccatgatcagcatcttcttttattgtgtgatacctgtaaactacattaccatcttggatgtctggatcctcctcttacaaggatgccaagaaagaccaaaaacagttattggtgagtaaaatagaggagatttagatgtttgaattgatttactcttagtttcagcagtataagatgaaatactatatttgttcataataaagtatttggcacattttaaaattgactgtcatcaatatttattatagcattatgtgactaaatctataacagcttttttgagaaatgagtttttcattaattgtggctattatcttagcaatagattcttctttaaggcatgaattctgtccattgcttataattctcttgttttattgttcagaatttctcaaatgctttattgttattttgaaattgaatttatctaaaatttgccatcatattatgcttttacttgcaatttaatattttatttttggattagagtcaaaggctttacttctggtatttggtatttgtgctagtcatttaaattcaaccattctttgacatctagaaacatttgataaacatttctgatttttttttttattaacttaggcatatcgaatcactacatttgataaaggttatagtatctataatgagttttatccttttcttaattttactccaagaaagggacagatgttcagattttaatagaatgatttctcataggaaggagaatataggaaaaggaaaactttggaatgaacatgaatattctttttatacaagttacctttccagttttagaaaagagtgaaccccaaatttttaaatggtaatctctacaagaggttgtgtgtgttcctcaaatacattaggcatattttttgacctcattgttttatcacttaaggctacctctgttcatttgattaggaagctgaaattttttcactattttcacatgattgcttttttatagtgttctttgtatcagtttgttttgagatattcatactggcctgttcttttgaaatgcagtggaatgtatttattatggtttttatgtgcttcagaaactgctatagcatattcaaatcccaacaatgttaataagcatcctgggtgagtttttaaattgaaagctagtttgatagtctccagagccaggatgttttgccatgaacttatatagagttatgcagttctctccttaaatgaagttatggaccctcctgatactgctcagcctgcagagctctggtttccagcatgtgagagtttctgcagctaaaaaaaaacacacacaaaaaaagggaaatcatgttctttgtagcaacaaggaggcagctggaggccattatactcagtgaattaacccaggaaaagaaaaccaaatactgcatgttctcacttacaggtggaagctaaacactggatagtcatggacataaagatggggcctactagaatggggagggaggggagcaaggtttgaaaaactgttgggtagtatactcactacctgggtgatagggatcattcatattccaaacctcagtatcatgcagtatacccatgtaacaaacctgtgcatataccccctgatctaaaataaaagttgaaatttaaaaaaaaagaaaagaagtaatgtacatagcctgaggtgttttagtgagagcacttctaaaagggcgtaaacaacttagagccttttcattgttgttagtggtttttaagtaaaagtagaagttaatgttgtagcacagtgaagcctttaatttctccttgtttctagtgataacatttcctttggcctctaagatcaacttagctttggttagcagttaactgggtgtattaattttggagtgtgcaagattcagagaattgttttttctttagtgtacctcaaatgtgggaggcagtttttactttttgctttttaacattttcagtttatttttgaagttatactaaagataataaatactcaaaacttaacactttctaaatattttgtcacattttactattatctatgctctagaggttatttaagtctattgcatctggatggtagaaaaaaaatgataaacgcaggttgagtatcccttatccaaagtgctggggaccagaagtgatttggattttgtttttgtatttgttttggaatatttgcattgtacctactggtcgagtatcccaaatctgaaaatctgaaatctgcaatgctccaatgaacattttctttgactgtaatgtcagtgctcaaaaaacatttggattttggagcacttcagattttggatttttggatttgggatgctcaacctatgatagttgctactacacacccttttccccatcctacattctgtgatgccatgttgataatttgaaattgaaattgccatagttaggagtatttgtactgtagaaattactaaatactacataacagggctttcccccagagggtcaagtgttagacatttactagcatatcactgactgatgtctgctttagactctaccttgttcttactagtcctttcattagggaaagggtcctttaatttctccttgtttctagtgatcaaatttcctttgatcactagggtcctgttactggactcttatttcatgactgtgccttagtctgcagcttgaacttccacaggtccctctggtataatatttctgaatggccggtttatttttgctgtctttatgttttgcaagcctgtggtagcacccttactactaaataccctgtaagcaaactgtacctagaattaattactatacaatctgttgccttctcagatatcatattctactctaataactattttaagcacttgctatccagccttttcttccagtaccagcactgttttcaaggagacactagttctagatttggatgctttcttcagtccatcccagagttctgtggactgtgctgggcaggttaagacatgtgacatcaaagaaaagatggatacagatacagaagtaattattggtggaaggtagggaagttgagtgaattcaccttggacaggctcagatatttcagtgatataggagtctgttgagagggaagagacctgggatgatgatgggctcttgagaagacagcagatggttggtaacaacttactgtggaaaaatcaaactgacttgctgaggctgtgtagcaagaatgtttagtgcataagtaaatgtgattatttgatttttcttgaattatgctctgctgcccaggagaaggagaggggaaaacctaggggcttcttaggttgggccagggatgtgaaaagctagtaaagaatattattaataggtgggtgaagaattccacagagaatagagaggctagtgatggtgtgatctaggttctattttgtttgtacctctttctagtatttaaaatgcattttgtctcatttttagtttatgttattttgatttttgttgttgtttttaaaaatgtacaatctccacactgccttaaattctaagacacatttggtaggatacaaatggtaagggcttgatttattagagtagttcaaatagttaatcatctcttaattttagaagactaatgttatatttctgcctccactcatctgattggaacttgtgttgccttttccaattgtttgaagaatattctgaaacacattatttaacagagaattgagtaatatatccttttattccttggatatgtctttattttatgatgaaaagaaaactcaaacccttctaggaatagtttacagagggttttttcctttgtttttcttgataatttgttcatttacatttttttattgcctcttcttcccattaaccgctagtaggaattccagcattagaatgggacatttactgtatatgaaataacaggtatatatctgctattaaagtttttacaggtattataactacaaaaagaataaaatttacaagttgagttaaatgttgttttctgcccttcaaagagatacccataatgcagaagtaggagggactgaggtattacttgtctgagaagaatgatatttgagccacctcttaaagttttatgtaggcacctgtcaagactttcctctaaatacaggagaaaacatggctaacggcttagacataagaaaaaaaaaaactctggtgtgggatcctgagttcttgatgactgaaaaagataaattgtggaggagaaaaaagtaaatcatgaattatttggaatatggaatgttactggatttatttattgcattattgcatttaaagattcataaaatcctttttttttttaacttacacgaataaaattctctaaattagtccactttcttttttttttctttttttgagatggagtctcgctctgtcacccaggctggggtgcagtggcacaatcgcaactcaccgcaacttctgcctcctgggtgcaagcaattctcctgcctcagcctcccgagtacctgggactacaggcgcgtgccaccacgcccagctaattttttgtatttttagtagagatggggtttcaccgtgttagccagaatggtctcgatctcctgacctcatgatccgcctgccttggcctcccaaagtgctggattacaggcgtgagctactgtgcctggcttaaattagtacactttcttgtctaagcactattaaacatttttctttagtaactaagattctgaaattccattgggtcatcattctgattataggttgtagttgtatggtgctagaaacatatagaaggtatagaaaattgagaaaaggccagacgcagtggctcatgtctgtaatcccagcactttgggaggctgaggcgggcggatcacttgaggtcaggagttcaagaccaacatgatgaaaccctgtctctactaaaaatacaaaaattagctaggaatggtgatggggattcgtaatccctgctactcaggaggctgaggtagagaattgcttaaacctgggaggctgaggctacaatgagctgagattgcgccagtgctctccaatctgggtgacagagtgagactctgtctcacaaaaagacagaagaagaggagggagggcaggagggagggaaagaaggaaggaaagaagggagggagggagggcgggaaaaagagaggaaggaagggaggaaagaagggagggaggaaggaaggaaaggaagggaagggagagggagggggagggagagggagggagggggagggccgaacggcaaacagaaaaacctcttggtgtttcaacatgaaagttattctgttgcataaattcctgacatggatttttattatactttaaatttttaattggcttggatcaattaaaaggttaagattatcttcagtattgtccatgggaattataaattttaggactctattctcatacagtgtgctaagtaaaaatatatagaattaaggtgagtttagctaaattaatagataatagcagtttagtggattattgaaagaagccaggtatgtatttgactttaggaaagataatcatgattttccttaaaatattatttgatttcagctgggcgtggtggctcacgcctgaaatctcagcactttggggagggcggggcaggtggatcacgaggtcaggagttcaagaccagcctggccaacatggtgaaaccccatctgtactaaaaatacaaaaattagccaggcatggtggcaggcacctgtaatcccagctactcgggaggctgaggcagagaattgcttgaacccgggagatggaggttacagtgagccttagatcatgccactgcactccagccttggcaatagtgcaagactctgtctgaaaacaaagaaaaaataattatttgatttcattgaattagacaggccatggctttattctaggttattatttcttaccatcttgtgtaccaattaatgtagcagaaacattttttacatatcttaaaggatatttataagatgaagactatagtgtttaatagattgttgaagaatggctaagaagtattatgtccataatactcttgtagtctactcagtgtggactctatctactgcaacaatcatgtggcggttgtcttgaaataggaatggatatattctgcattggcagttacatttgttttgattttttgagttgttccgtgttttgtggtgttcagggtgtaacatttctattttctgggaattagccaaatttctttgtcacctaactattatttatagtggggatggaagtgaacataagaataaagaatgtcctgacaagggtaattgctaccaaaagagaagcgaagaggaaatatttcagtttttaaaacaaaacaaaacaatgatttatctgaaaaggtacctgcttctatacctaggggatttagataacattatgtttgcctgttatttaagtagacaaacaacatattttaaaagtaaattagagcctggcgcggtggctcacacctgtaatcccagcactttggaaggctgaggcgggaggatcacctgaggtcaggagtttgagaccagcttggccaacatatagtgaaaccctgtctctactaaaaaatccaaaattaactgtgcgtggtggcacacacctgtagtcccagctacttaggaagctgaggcaggagaatcgcttgaatggggaaggtggaggttgcagtgagccgagatcgtgccactggactccagcctgggcgacttagcaagactgtctctcaaaaaaaaaaaaaaaaaaagtgtaaattagaactgtttgagaaactgactacatttcactcaactgatagaaatgatcagttagcattaagattacaatttaatgctgaaaagtgaagcagtgtgcctttttgtaatataatatgataatttctctagtcatctgttttgaaggctgttgcatttattattagttaactaacaatatctaacatttctggggttttcacagttctgctaataaagtcagaatatacttatcatttcaattctgagattctgtaaggtgtgtattttcttttgccagtccttgatgttttcatatgggacaaatgcaggagcaatttaatatattcgtttagttgtgtctttgttaatgatggtaatctgacaacctaggggataacctgccagctatatttacatgaagtgtagcaatagatacataaaagttttctgagtaatacatgattatgtacatttttgttttgctttcactgatcagtatttctagtgctcaaagttttgctaacctattcttaaataattggaaattttaagatatttaaattaatacgttaaggattaatttgtattttagtaataatatgtttgcattaacaaaacaaatggtacttggtatttaactcttgttggagttcaaaatttaaagctgtcactttgacaattaaatattagtttaataagttcacagtattagtgaaagatgtgaattttgatggaacgaaatcaaatcataaatctttgaaaatacttgctatgagaattataagctacattcaaagatactgatataaacatataaactaaatatcaaatacaattttacagattataatcatttttattaagagaatactatcaaacttttggagaatttgcttttgatcattcttttacatttgaagaaaatatgagtaaaaatttacttttaacaactggttttaactttttgaaatggtcctttatgattgacaatataaagatttccagcagttgttgtttagatttctgctgtctaaatgttagccactagccacatatggctatttaaatttaaatcaattaatattaaaatgagaaattttctcagtggtatttgccacatttcaagtgctcagtaaccatctatggctagtggccactgttctggacagcacagatatgtagataatcctaatattataaaaagttctgttggataccacttgtctaaagttttagtttcaattaatttttaatattacccatattaaaattctttataaatgctactttaacaaattcctttgataaataaatgtatatttcttcttttagaagtagtaggggccaccaactaatatgaccttttttttcccccaacacttcttggagtctgtttgtatagtttctttaagtagtatattcagcacaagttgtcattgactacaattaaaagatatgataactgtgacaaggagtagtgttagggtccttgaaggactttgattttcaggtatcacagtatatgtcatttaaagaaaagtcatgctttccaaaggtaaattattattattatttaagacagggtcttgctcatgttacccaggctggagtgcagtgttgagatcatggctcactgcagcctccacctcctgggctcaagtgactctttcacttcagcttcctgagtagctgggattataggcgtgtgccaccaagcctagttaattttctttttttttttgtgaagacagtctctcactatgttgtgagcagtcatcctgcctcagtctcctgaagtgctgggattatgggagtgagccactgcagctggcaaaaccacctttttaatcagtgttgaatctcatgttggttcacttaaacatatagcattgttaaatgtgttcttatacttacaggatacattaaattgccttaaatattatattcatagtagtcactcttagaggagtatttctgaatgttttttcattatgtaccctataatcacattacctgtgtatatttttatatattattcttatatacctggattttgtatttataaaaactatagctaaagccagaagataataataaatgcatgacttaaatttttcccctttatgtaggcagtgctcggaatgtgaccaggcagggagcagtgacatggaagcagatatggccatggaaaccctaccagatggaaccaaacgatcaaggaggcagattaaggaaccagtgaaatttgttccacaggatgtgccaccagaacccaagaagattccgataagaaacacggtagtttattttttatttatcataagcatcatacaattctgaggccaaaatttaagagagtgagaaagacacagggcaaacatatactcagaagtcaaagaaaaagacatctattggttattcttaacaattttttttctatattatgaaatataccacatgcttacctgagtgtttgtagtttatattttgttggaggcataatataaggaacacaccagagcatccatcacccaccttgaaagacagaccattcccaaagctttagaagtttcccgtaaacccctcgacaagctcatctttatctgtctagcccagaggccacctctttactcagctttacttttctcattcacttctttttctttatagaagagatttacactctaaatttctgtacttataaataatacatggtttatttttgtaggttttgaatttcatatgaatggaatcaaatgtttttctctggtaatttgatattttgaccaaaattatgttgatttgattcagacatgctgatccatgtagttgtagtttatttattgtcactaatgtatagttttctatggaaagaatagattattacctagtttttcttttgctttgttgatgggcagttaggtttttttcatgtttttctattctatacagctttgtttaaaatattcctataaatatctcctgcagcatggtaacaaggagtttgtgtatgtattaaggtgtagatttgctaagttacagactatctgcatcttcagttttgctagataactgcaattgttttccaaaccagttcacactcataccagcaatggataatgtttctgttgcttcacaaagttttgtccagtgttttaatgctttccagtgtggtacagggaaaatagtatcttgacattttatgttgcatttctctcagtactaatgattttgttcatctatttacatatttttggtaaattgtatttccttttctgggaaatgtgtatgcaagcctttcaccagtttttctgttggggtgtttacctttttctcattgcaaattctttgaggccaggttttaaagagtttcttctggggaaatcatttatgttcatgtttaccaggtaccttgaaggggcctctaccaacttgagaatattttaaataaaagtttggtgtgtatgttttctattacatcaggagtgtaaatttcaaacctttaagtgctggcttacagttatgaattcttagggcatactttccttgcttgagctgaggcaggcacttttcaaaaatcttcctttccacaagggagatacaaagatatttttagggttagttgtcatcatttgttctgttacctgtttcattttaaagagtctttaattttttccttaaagtaacagttttctcaaaaaacattttcttaatctgtattaacctcctatattataatcacttaaaagatcttattcaggagattcagcttgattttttaaatcagttttgtgttatggggtcatataaaatttatgaggcaaatctttatctcttagataattgaaacagtttattttgggtgctctaagtagatcaacttgaaatagtttttatttgtagtttcaactgtttataactctttttttaggcttcaaaaatatattttgtttataagggaactagagagacttttcctttgttaaataagccggctagtttctatttctaaaatattttctataattgtttgaaaatggtaactagttattcttaagatcttagagaagagttattacttcgtatgtctgtctacaaagattatcctcttatgaaacattatttttccagtttctttattgtttcaagaaagccttttgactagtattatcatccttaactttggagttatcatatagagggaaattatgtatattacagtgaaatttttgtgcccacagttcagtattacttgagataaaagagaactctttaacattaaaggatccttctatttttttctcacctttactggtctgctttttttatcctagaattataaggaagctttaaaatttgctaatataatcccattcctttcatcttgttctttgtctctagttttcttgtttaaaagttttagacttcttacagattttggtcagtgaaacaccagggaaagagtccatgaccagtaatttcaggaaatgcagtgtgattattttcttacttgtagaaattccaatgcatgttgaagctccaaaaaaaaaaaatcctaatatttagaaacaggattacttttatctattctttttcttaacttgtttttatcaaaaaagcattttttaagacactttttttttggtagcatagagtactgtgtggtgctaagtttggaaatgatgctccggagaccatggattacttgcattaggaccatcttgggtatttgttgaaatgtagactttggacccaccctagagctagtatagactttggacccattctggaattaatcaattagaatttaggggtttgactaagcagatttcttaggtgctacgcttatactaaataaaagttgaaaataactactaatggtgattacctttcctttttccctctcatcttttctgcctgccttccaacaatccattcagaaaaccagacaattggtgcgaggtatcatactaaactgttcaaggaatgtaggaatgagagatacagaagggagtgatcagtcattttggtcttgatcttaccatttatgctgagttcctgttgttaccttaagtttttacttatttctatttgagttgtatttatcttttttaatcaataggtggtatggtgaaaaatgaggtgttctaattgtgtttcttagaacagtgttaattatgagagaccaggcatacaacagcttactaacttgtataaataccttttgcaatatataactaatttttctctcccattgttacatttttaaactattgctcccaatatcctcctacttacacttttatttcagcacaggtattacaattgggaacattctgtcttgtaatacattattatagtatttttatttttgtcagtttttcatttttcctgccataaattgatcaaagtataatttgttttcatgttagtcttattattctgtcatgattttgaagaaaattttaccttcatgacatacgtagggcaatcatgacataccccaagctcatggacctgaactcctggcagacagcaactgccctgtttaccacagaagaatgggtcccattcttcttatgtttcatcagtgaaactatagaattattgtaaaggcagcctgagatagttctgtttaagtactttgttatttagacattttctctgcattattttctatgtggaaacttttacttacttttaggcaaggaaattaattttgaagaaaacataaattagcttacccatatcccttttgaagttactttaaaattggtgtttatacttgtggacatattttctaatactctaatgtaacttgaaagctttcagattttctttttgctttctttgcactctaagtcatgtagtgacttttcatcttttgtagaagtgccaaaggacttgttgggacctctctttccattgtttttacacacacgcatgcatcatctactctctttgaagttgtgagatctttcttcctgacttacaaattcgggttgtgttttatatattttcttttttgcaaaataaatgcaataaataggcaaaatactttttagcagctttgactgaaaaccatattgtttttcaggatgcattatttcttttagatcattattttagaaggagatttaaacacatctaatcgtttttccatcgcacttaacaatgtgagccactagccagttctaagtggcagtctttatttgagagataatcaaatatcctagagcctacttttattacatttatgttttaactaattttacgcatatacaaagtacctatttaataatgtttaagcttaagtcttgagaatctgaaaatatgaaatatgtttcatataaatattttttagatgttagtttaggaaaaatgttgaagcatttggattcagttctactgaagtgactaaaggttactgtacattatgttcatatttattttacttattcttatactaactgtttgaattactacagttctgggaaagaagagttatttgtgggggctttacataccagagttttctattatcagactcaaggtgacctctgaggtacgagtcagattataaaacctctatctgtcatagattcttagaagaaaccctggcaaacagtttttgtagtgaactagaactcactttggctacttggaagagatctactctgtgggtgtccttagctcaagtaatcttattcagaaccctgagactcctgttttgctttttgcctcttggaaatccatcacttttatttattcccaggagtatgaaataaagataagaataggtggagctttcaagactttccttattttgtatataccattatctctgagaaggtttttatagcagcacttacttgtcatgtagaatacatattttattatatatcattagacccatagttatttcagtttatagtagttaagacaaattggttatgattttctttttattctcccatatattttcataaccctgttaacataagctaaattagataaaaagaaactctacagtcaattgaccaaagggaaagcactcacttttggtgactgccattccattggttgtttattggtagccaacagaaacagatgacaccttgttcataatttgttttttgtatatagcaattttctttgaatatttcatgaactttaacttgttttcaatgcagtttcataattgaaagacaaatatttttaggaattatgtatatgtataattttatattttttagaaattatatttttattatatattgctacatataatatatgctatacatataattttatattcttaggaattaaatatatattatatttttatatattagaataaattttatattgaagcatttttgaatagctgccagaaagctactggcatttattccccagcataaatctaatgctatttagcttaacagaggttttcaaagtttgacttaattgtcctaattaacattgattttggaattttgcccatgaataagcatgttctatttttacatataagttgcagagggaagcatttcttatgattcaccatatgtgacttactttaattattaatttgtataaatattgatatgtcaacaaaaacacaagtgttaaatttagtgacctggtcacaagtgaatatgtgaagcctagtttactgatatcaaagatgttaaggtactgactcttttagttttaaatttagttcatttgccaaatgaatcatgcatttgacttgattgcaaattaaaataacctcagctctaaagaattaattaaaatacattacatgttttttagtccaaatgatagaaaagttagagaaatgtttaattatttgttttagatgaataaactatttatttacttatttttatttttatttttttgagacagagtcttgctctgtcgcccaggctggagtgcagtggtgtgaccttggctcactgcaacctccgcctcccaggatcgagcgattctcatgcctcagcctcctgggtagctgggattacaggtgtgcaccaccacgtccggctgagttttgtattttagtagagatgagatttcgccatgttggccaggctggtttcaaactcgttacctcaggtgatctacccgcctcggcctcccaaagtactaagatcacaggcctgagccactgttcccggcctgaataaactatttaaaagttgcctgctagataagataattttacaccttttcagtttaaatacattgtctctaataccatgccaatctcttctatggattttttaatcacctcttttcaagtaagttgatcacggacagattacgagcaaggtgatttaagcagctcaggttgtaattgttccctagctaaatcaagttcttaaaaaaaagaaaaacaaaaaattggaatgtgtcaagatttggaatgagttttaaactttcatttacttttaataggttagctaattactgtcaaaattaatcagtttggaattgcacccttgcttgattaatcatgtggaatttccaggtaacgtatctgtgttacattctaaagcacattcttgaaaagtaaaattcttccttcttccacatattattttcatcctacagttttattgttgctaaagtagtttcagcctcaaaatatatcagaaaaggaccacccagttatatatacttctattcatctgagatgggacaagctctttggtaactgaaatttgtcagataggcccaacttattttcgtttttcttgcttttttgtaccatttctccctcttttaaattctacttatgttttgggattcattcaagtacactactttcaagataacttgtctgttgtgatcttaagcagttatgaattttcgtagttatagttgctgccacttcattaaaactagaaaaaaaaaatcccatagctttcaacattttcttggttggaggacttggtattttgtatagttatatttggaccaaattctcttttatttttttctttggaaatattagtaatgtgataaatgctaaataagagtgctgtaattactttggtaatgaatcaagttagtatgtagtatggagctaccaaattatgtagactatagtgccagtttgaatttactctttattgggtataattctctaacttcatttgaaatgtaagaaatcttcattgggcatcacaatgttacagtttagtttaagtatttacgtgcaataagagatttgcattctgaatgatttagctcatttctatttgggattaaagtattaatcttggattagccatgcaagaaaagtcactgaagtgacagttgagataactgagtttcaggtttacctcagaaacttaccagctgtgtgacatcagcaagtcatttctctggattgctttttcagagctctaagataatattattttatatttttataataagtttatttttgtagatggaaattgtttatgtgtcttgtgttattttaaattattacatgaatatatcagcgattaccatttggtaataaatgtacttaaagtgactattttagataattacaaatacacctaatatatgagaagaaatttataaatatagagagaaatggagctataccattgtgtgattgaatcactaattggcattataccatatgatgctaattgcaatctggtatgaagagagtttcaattgatggagtcataccagatatttgaagatttaagttattatcaaaatggtaaataaacatccttaaaagaattgaaaacatgaacttgcagcattaaaatacatacttgaaaaattcaaaactacatgatacatttgctagttcattacctaaaagatgagttggatgaagaaaaatgtgaaaatgtatggaagtcttttgcacattctgtttagaagtttgtagagctcaaatgagtaatttgaatattttccacttgatattggttactaatttggagcatcttattgaaatgccctgtaggccaggtgcagtggttcacacctgtaatctgagtactttgggaggccaaggcaggtggatcgctttaggtcaggagttcgagaccagcctggccaacatggcaacccgttctctagtaaaaatgaaaagattagccaggtgtggtggtgcacacctgtaaacccagctacttgcaaggctgaggtgtgagaatcgcttgaacctgggaggcggaaactacagtgagctgagattgctgccactgcactccagtctgagcaacagagggagagtctgtctaaaaaaagaaaaaagccctgtaaatatacattatgcaaattagataatagagtaccaaattagggaaaaataatttaaactttttgtcaaatttttattttattttatttttttgagacaaagtctcgtcctgttgctcaggcttggaatgcagtgacttgatcatgtctcactgcagcctagatctcctgggctcaagttatcttcccaccacagcctcctgagtagctgggactaccagcactcacaaccatgcctagctgattttttcatttttattgttagtagagataaggtctctctgtgttgcccaggctggtcttgaacttttaagctcaagcagtcttccccgcttagcctctcaaagtgttgagattatggccgtgagccatggtgcctggcctgtcagtcagatcttttagtttgtattatatagtatcatcattcattagttctgatttaaccacttataaatttattttattaaaacaagttaattgagtctttatgtcataagctttgtgttaagtttaattgggtgtagaaagatgaatatgatatggtccttaccaaattgggaatgaattttgtaaggggacagaaaataaagcattaaagggcaagagtggcacagaaggaaaagagatgaatgtagaaattactagccataagttttcagttagaacttgaataagtgttgttaaggacctttctacactggtgtccttaaacttatgtgtatttgacctacttaggattcttgttaaaagatagcttctaattcagtgtgtcggagtcagcctgagattctgcatttctaatagacactcaggtgatgccagtgcttatgggtcatgattgacaccttgagaagcaagtctcagtattgttctttggaagtcagaattgtagatgcaggatctgcatttaaaggcctttcctggatatagtcttcagttttctgcctaattacttccataatataattaaaacagactgattggcaatataaatgtaaacagattcatagtttataaatttactttttttgaatgactaatttagttgactcttggttatctaggaacagattaaatggtaagtagttagccatggtattaaataacagtgtacttgatatgaagaattgaaattaatgtaagaaaatattaatatatttatactataatgtaattctgtttagaattatttggtacctactctagcttgggaatgttccttgatctcagctgtcaaagtaatttttggaagcagtgcctgcattctcttccagtctctagggaacagtggtctgcatatggggctgtgctgtgattggtggatatttctaacatattggctgcaaatactaatgtagttacagttcttttaaacgtttgtatgcgttctttcaaatggtaaatgtattctgaaatataggatgtgaattttagctaaattagtttaaaatgtcattttatgtggcattttaattagttttatgttaactaggattttggatatgtgagaacttttccttctacttttttttggctgcttaagaattatttctttacataaacatgtatgcacatgcatatatgtaggcaaacaatgtgtgtagtatgatcccaggtttagcatttcagctatataagtgatgtgataagttatgaaaatttaaatgctctgagtaaatcataattatggacaattatgaagtgtggagaaaatcctttaaaataattttggagaattcattttttttctatcagatacatgtttatttaaaagtaaagtactataaagtatatttaatttgttactttttatttcctatggcataaatggtaacaaagtgcagtagtccaatatagtattaattagaaataactaattttgcaagtgcctaacctaagcaataacatttaacagaggaaatttatatttattattaattaaacattagatatactgtggatttttgttttttgtttttttttttgtttttttccagagaaccagaggacgaaaacgaagcttcgttcctgaggaagaaaaacatgaggttggaataagttaagcacttttacacagtcttaactttgagaaattttcttgcttaaaattgtttccctcatatccttattttgtttgttatgttttattttattatcccttgtatggcaggaaagagttcctagagagagaagacaaagacagtctgtgttgcaaaagaagcccaaggctgaagatttaagaactgaatgtgcaacttgcaagggaactggagacaatgaaaatcttgtcaggtaagttggatgctaaaaccttgtctttaggggatgaaagttctatatttattttctcatcacagaaaaaatgaaaaaacaattgcaggataagacctttcttaaaatattatatagtggaaacagtactttagaaacagatttcatccacttcttaacctctcacacatggttatactctggatttaaatgtaaataagagtgataatctgcctgtttaacacagggaattatttttctcttgacaagagaaattgacagtgctctctatttagaggccatgaaagtaatttgatctaaacactgtgtactaagattattatgttttatgtcagaaaacaataaagttactaagctctgttagcatattctaaatgtttgaaatttagaagcaatggtgagaagacagactttttattgacaagaacttaattagcactttcttattgcttatcaaaacaaatgtgttaaatgcttctcccttacgaaataaagaaaggtgaaaagatggcctaggttgattttattttttgttttgtctttgtttctttgtttcgttttggtactttatttttttttaatcagacataatgctaatcagaaatcttagctgatgctgcacattggcttttcccaacggtccagaggctgctaattttagcggaaatgaagacattgatcaaagctctggtgagatgggggagtgagtgtgtgaacaaaaagagagctaatttaaaagaggcatcagactttcaaaggacagtgtcacaaaagttcttacagttcttacagggactttgtaagggaatccattcttatttctttaaaaaattgtcttctggtaaagccctgttaaattaactgaggacacagaaattaaacatttcaaaaagaataaacatattgataaaacaaatatattagtgttgttgtatgtttttaaatacttacttccaaatgatttaatctattttggtcattaaaatatgtcttaatttctcaaagaaaggcatgaagtcttaaattttatgagttttttatgctatcaatgagaaagataaagtaaaaattacagtagaaaaagacaaagtccttcaacaaagttaagaaagtttataataattggctaatttttttgaggtagttcatgtagagtgtgttgggagctatcctgaaggttaagtttattaaaatttagggtaaagtagtaagtagttccaagttcaggagatacacctgaataattctgaccacagtataaattttgcaatatgtcgaaaatgaaatcccaagcataagcgtaacataatggagtaaatgaaacaataaaaataaagaaaaaaaataacaatcttatataatgaacaaaaatttaattcaggaaaattcccttggggttgagggtggagttgaggactatgattttgaaacagtagttaaaaacttatagagctggtgatccttttattaattatttgaacctgtatgagtatctactgtgtcttactaattttttttttttaatatgagattgattgaggcctttttgctgtaggacttagaggtttttattaggttttttgttttgcttttgtcatatattggaaattaggaacctgagaaatacaatttttattttaaaaatcagtttatgatagatttccaacccatcatattttagtcgtttaataaaaaaagtgccatcttctaattttgataagatttttgaatagtattactctatgttatttatttctttagtttctgttatgaaatttttatttctaattgcattattacaatatgccaatgtctggaattttgtgaaagtcttctggaaggtaaagatatttttattactctaaaataatggatatgcaaagtccccttccttcgttttgccttattaagaagataatatcgtaaattgtctgcaaagttttaaagaggtaatgtagaggaaattaaatgttttattggtactatattttaatatttcttaggacaagataagctggatataaagcaatgccataaaatatttttggttataatgtgatctttaaaaaaaatacattgtttatgcactattcttcttgggttaaagaatttttatataaaatttcatatgtttaataaaagtaatctcataagctaatatctgccattttccctggcatctcatattttggaattggcactgttattgtttgaaaatcaccccccaaaagtctacacttttttattacattgcatcttaaatactatctttacatgctatttttttaactttcaaataagatattttaaataaggatttattttctctacagatatatttcagcgcttactcagacatacgtgtatgtctgttaggttctcttttaaaattaaacttcatgggtcacaattagtcttttatttaatatactgtgtttactttctcaagttcttttaaactgatgtttatatcacactagaatctgctcttcagcagttttgattttttaaaccacacttctctatgtaattcaggctatatagaaaattccttcttaattgtccttttttagttatttgtatgtgtttacttgtgaatttatatgtataattttttatatcattgaacaattgcatgcaatttgtcagtacattgtaattagtaagtttcaactgttattttctgctttgcctgtttttcttgggacttgggcaagtaatttagcatttctgtgtcttggttttccccccgttgtacatgatcacaatcatacttgcttcattaggtaccttatggataattgctgagtgatagtaaggttctttccatataaaatgttagaacagtagtattatttagtaacacaaagaatacatgtatgtgtgcattgaaataaaggtcacaattggtaaatatgtttccagttataataaatacttgttatgtcagaaaatgtacatgtcctgttgtatataattttgtctagaatctaggagacaaaaggaaatttgtcattacatgttttctaaaatgattagattgaaggtttacagcatctcaggcaattttatttttttaagtgctggttttttgccatctacttttaaaatttaattagaaattatctgagaagttctcaactaaatatatatttctttatgctatttaatgcaatctaaatgctaaaggtcaagttgaaactatttcatggaattgggaagtcttaaaggctttgtctgtgataggtcattctttgttggaagtagttatggaactacttagtgataccttatttatttttgtttcgacagttcatggcacatttaatgatcagaaaatgcttggtaaatgaactctacataagtaatgactgagtattcttttgctgaattaataaaaactgtcactattataatttaattctagagcaaattgagtcacaaaatataatgtttgatgaaggtatttaaagggcttgataaaggacaattgattttttgtcactaaaatgtagtggatagtttttcctctgctgtattttaagtaaggaaatagatttgagaataaatgattaatctatgaaaagtagagatgaagtgattcctctccttgagcctatatgaaaaggaagtgggcctgtctttcagtctttatcgaactatcaaattaggaataacaccaaacttctaaacctcaaattttatcttaactttatagactcaatgtggcacatttattacttaatcagagataggagagagagaagaaaggtttcctaaagctaagaaccctggaatccatgagccctcttaaatagcatctttaattttattttgtattgtggccatttttcagaagcattgagggtaggaaatgatctattaagctatttcacttttatagctaattctacactatcaaatgcttgccagattctcccctttatttgagtatatggcaaattacataggtattgaaccattttgattacaagggtagggtgtcaatttggtctgtaaacattgttgttcgcacttttatttattttacatttaaaaatctggcttgtcagtgcatcctccccaactaaatttgtttgtgtcataaattattaggaaaaccagcaagaattcatatgtattacattttaatttcaaatattagtctctcgttattctgattataatttttttgttgtttgttttcgttgtcactcaggctagagtgcagtggcactttcttgacgcagtacagcctctgcctcccgggctcaagcaatcctctcacctcagcctcccgagtagctgagacttgattttttatttttaattaacttttctgttctaactagtatggaggcaatgttttgttttatggttattgttatttcctatctaataattctttgcttaggtccaggtgacaaaaactttcttctttgttttcttctagaagctttgtagttttggcttttatattttatatgagctatctgaaattaatttttgtatatggtttcaggtagagttaaggaaggtttgtttattatctgccccatgtggattcccagtatcatttgttgaaaatacttgcctttccacattaaattactttggtgccacttttaaatgccagttggctttttcaatgtgggcttatttctagactttctattatattccattgagttatgtatttattcctgtgccaagaccaactcttgattactcaggctgtggagtaagctgtttcgtttttctggatcctttgcattttcatgtaaatattagaaacagcttgtccattttcattttaaaaaggaaagcctggacataacaccaaaagcataggtaataacagcaacaaaaaattagctaagttggactaaattcaaagttaaaaacttttgtgtgtgaaaggacaccatcaccagatggtaaaaaggttaacccataggataggggggaatatttgcaagtcatgtatctgttaagggattgagaatatataaagaacttggacaactcagcaataagaaacaaccccattaaaaatgggcataggacttgaaaatatttctccaaagaagatatacagtagccaacaagcatatgaaaagatgctcaacatcacgaatcattcaggaagagtaaatcgaaaccacagtgagataccacctcacacccattgggctagttatcattaaaataaataaataaacagaaaataacaggtgttggcaaggatgtggagaaactggagttcttgtacaattgcccttgggaatataaaattgtgcagctactagggaaaacagtattttaattcctcaaaaaattaaagacagaattaccatttgatctgttaatactgcttctagctgtacacccaaagcagaaactcaaacagataattgaacacctgttttcatagcaacattattcacaatagccaaaaggtggaagcaacccaagttccactgatggattaaaggataaacaaaatgtagtgtatatatgtatattctcttagtccattttatgttgctaagaagaaatacctgagggtggataattgataaagaaggaaatgtttatttggctcacaattctcattgttgggaagctcaagattgggcatctgcatctggtgaggacctcaaggtgctttcactcatggtgaaaggtaaaggagaactggtatgatcagggatcacatgataagagaggaatcaagagagggggagatgccaggctctttttactatccaactatcaaaggaactaatagagttagaacacacccctgaggaggtcaataatctcttcatgaaggattcatcttcatgacgtaaacacctcccattaggacccccctaaagtgggatcacatttcaacattaggtttgtaggtgacaggtatccaaaccatagcatacatacagtagaatattatccagccttaaaaaggaatgaaattctgggccgggtgcggtggctcacgcctgtaatcccagcacttcggaaggccaaggcaggtgaatcacgaggtcaggagatcgagaccatcctggctaacacagtgaaaccccgtctctactaaaaaatacaaaaaattagtctggcatggtggtgggcaccagtagtcccagctacttgggaggctgaggcaggagaatggcatgaacccggaggcagggcttgcagtgagccaagatcgcaccactgcactccagcctgggtgacagagcgagactccgtctcaaaaaaaaaaaaaaaaaaaaaaaatctgatactgcaacatagatgaaccttgagaacgttatgctaagtaaaataaaccagttacagaagggtacaaataatgtatgattccacttacatgagattcctagagtagtcagatttatagagacaaaagtaaaaatggtggtttccagggggaaggaggaatgggcagttagtgtttaaggggtacagagtttcagctgggaaagatgaaaaagttctggagatggatggtggggatggttgcacaacagtgtgaatgtgaatgccacagagctgtacacttaaaaatggttaagatggtcaatgctatgtatattttaccacaattgatttttaaaaataacctgaagaacaaaagtctacagggattataataggctttgtgttgaatacatgggatttagtggcagggaaaggggctggggcagggggacattaacattttaaccatgttgcatctttcaatttatgatcatggtatatctctccatttattcagatactcagatagtctttattttttctcactgatgtagtttcgactttaggaatcttgcatgtcttttattacatgcatttttaagaatgtaatgtttttgatgctattgtataggttatctttaaagttctctgttttctgttagagtttagagctgccaggtggtcagttaggaaaacaagcaaagttcaaagtaacaaaactttattttcttattctggtagcatcaggaagaagccagtcaggaaaggttgctggctcctgagtattacattgtttcccactgaacagcagtgggcaagagtcaggaagataagtgcagatacacccccaaccccaaccagcaccccacaccacacatacccttgtacttagaggagaaatttagtcttactgctaaaggattcccaaacaaaggttcctgctgttttatggacccaggggcttctggaagggagatggggaaggggtaggaggtagaaaagtactgagtccgcatggagaagtgccttcaagtctccttaataaggaggacgataaggcacaggtatttgaacagtgtttgctgggctcttccatcccctctgtcccagggaggcttcaaaatcaaccttgcaaatctgggataaacccttctggtctgatgtattgcctcttttatgtattttttttaattttatttgctaatattttgataagggttatacattctctgtgaacgtattccctccctccctccctccctcccttctttccttcccctcccctcctctcctctcccctccctttccgtcccctccctttcccttccttccttccttccttctttcttgtctttcctttttttttggttggttggttgttgcccaggcttggtctcaaactcctgggcttaagtgatcctcctgagtagctggaattaccaccgtggcttggtattaccaccacaccaccatgcccagctgttctattatttatttatttttttttttctggtagaagtatcacattttattagataatactggccttctgaatggagttggaaaaagtgttcccttattctttgtttttaaagcatttgtttaagatactgtttgttcattaaattttgatagaattctccggtgataccatctgaacctagagttttcattgtggaaatgtttttgataataaattcagtttttagaataaatacttcctttcatcttgtgtcatttttggtaagctgtgtttctctttttgtttgagacaaggtctcatgatcacagctcactgcagcctgaactcttaggctcaggtgatcttcccacctcagcctccttagtagctgtgactacaagtgcgcgccaccatgcccagctgattttttaatcgtttgtagaaatggggtctgactgttttgcccaggctggtgtagaacttgtgaactcaaacaatcctctatcctcagcctcccaaagtggtgggattacaggcatgagccgctgtacccagctaagctgtgtttttcaaggaatgtattgatttcatctcatttgccagttgcttctttcttatatgtcagcaccatggtattttctttagtcatgctggccttttcagtgttcactgtaactatttgcataggactttcctgctttctgtaatgtatttgggcatattttcttcttccttctaagcctacatcagtatttacttctttcatatattcttcctaacttatgtggccccatattgatcgtcttacattgattgtccttggaaccctcataaaatcccatgtcatgctgtgatccattttgcttgtaagttgtgtcattattgtctgtcaattaatttactttgtccacgaggtgagtatagcatctggaccttccatttatttctaatgaccgtgatagtctaatgcaatatggctcaggctgttaattcagaataaatgcttgttaatttactgatacactgccatatctgtatatttttgcaactctatacaattaaaatagtttataatttgtttttgggcagggacatttctttacatagttcctgatttgttttatttttgaaaatataaaaacttttaaaattactgagtacaaacttaaaaatcgtgtatgcttcttgaagctaaaataataggtgacaaatagtggtttttgattaactgataatctttatttttgtgatagttgtttactgcactgagagttaggagatctcaactagtttaagcttgtcacttgccagctttgtaattttaagcaagtcacttaatctctttcaatctcacttttcttattttaggagaataccttaggctgtaacctctctgaagcctagtacactagctctgatattcaaagactatatattccatgttcccaagtccatgttacctgtttatttacatttgatcacaagctcctgtgtaacatactcagtagcatcttcttccaagctattctgtgattatgtagactatgattatttttcttgcttaaatatcttagaatggaagccagttttccagttgcattttctctcatttacctagaggagtagaaaataagtcagtttaaaacacccacttcctttgataaatagcagatatttcctttttaaaaaacaactctagtggtatctaattttcgtcccattaaattttacccattataagtatagagcttaatgatttttagtacatttgtcattgttcaacgatcattacagtccagtttttagagtatttccatcacctcaaaaattactatgcctgtttatagtcattcatagcccccatttccagcgtcaggcaaccactgcaaatgttcttttgtcactggtttctcatagccctgagacatgtttctgattatgtataaattagattttgtttccacaactaatttaatgcaataagagaacttctaattaaagaagtgttaaagtgactctcatatgaaaaaattacaccattttattcattcttcaactcagtacttttaattttggatattaaaaaagtaagcctgctaaatttatattaagagcctagattctattacatttcaaagtgtctattattttgagaggcagtactgtaaaatgaatgattaagtatgaggatttataaccattctgctgagttgtattagtccattcttgcatagctgtaaagaaatacccaagactggtaatttactaagaaaagatatttaattgacttacggctctgcaggctgtaagggaagcatagcggtttctgcttctggggaggcctcaggaaacttctaatcatggcagaaagcaaagggggtaaaggcatcttatgtggcaggggccaggggcaaagagagagatgtgagagatgctgtatacttttaaacagccagatcttctaagaactcaccatcatgagaacagcaccaagaggatggtataaaccattcatgagaaatctacccccgtgatccagtcacctcccatcaggtcccatttccaacattggggactataattcaacatgagatttgagtgggacacgtatccaaactatatcaaggttttaaaccttcttttgttatttgtgaactctgcttttatcttgcctgtgttttaccttcattatctataaaatagcaataaacaatagtacctactccatagattgtctggatgattaagtaataccgtacaagtaaagggcttggcacagtggacaaaaaatggtaaaggatatatatatgcaaataacagcaactctgatataacatatatagtgcttattgtgtttgtcagtctgtttacattgctataaagaaatacctgaggctagctaatttataaagaaagtaagtttatttggctcatagttctgcaggctgttcaagcagcatggcactgacatctgcttctggtgaggtctcaggaaacttacaatcatggtggaaggcaaagggtgagccagtatatcacatagagtgaacaacagagaaaagaggaggtgtcaggctcctttaaacaaccatctttcatgtgaactaacagcaagaatttgcttattcccatgggtttagtgccaagcattcatgagggatctgcccctgtggtccaaacacctcccaccaggcccacctccaatattggagatcacatttcagcatgttatttgaatgggagaaacatccaaactatatactttcactccttgccccccctccccagttttatcttctccacattgcaaaatacaattgtcctttattaacagtcctccaaagtctttactcactccatcgttgattcaaaagtccaaaatccagtgtcttactggggactcaaggcaagttccttccatctatgagcctgtaaaatcaaaaacaagttatttacttccaagatacaatggtggtacagacattgggtaaacattcccatgtcaaaaatgagaaattaaccaaaagaaacaggcagtaggcccccacatatttctaaaacccagccaggcatacattaaaccttaaaagcttcaaaacaatgtccttcgatgccatatcctgcatcctgggcacactagtacaatgggtgggctccaaatgctttgggcagctctgctgctgtggctttccaggattcagcccccttggctgctctcatgggttggagttaaatgcctgtggcttttccaggctcagggtgcaagctgctggtggctctaccattctaaggtctggaaggcaacagcgcccttcccacagctccaccaggtagttccctggtagggattctgtgtgagggttccaactccacatttcccttccgcactgcactaatagaggctttctgtgaaggctctgtctctgtgacaggcttttctgcctggacacctgggttcctctgaaacctaggtggaggctgccaagattttttcactctcgcattctgtgcacctggaggcttaacagcatgtggaaaacaccaaggccagattggtggcccgagctagctgtacctggtgatgtgagctgtacctggggctctgtgcatcagctggagctggagcagccaggattctgggagcagtgtcctgaggctgagcaaggaagcagagccccaggcatggcctctgaaaatgttattttctcttagacctctgggcctgtgatgggctgcactgcctggaagatctccaaaatgcgttcaatgcctttcccccatgtcttggctattatcatttgtctcttttttagtcatgctaatcactttagcaaatggttgctccacaaccaccttgaattcctctcctgaaaatgcctttccttttttttctttttttcttttttttttttgagacagagtcttgctctgttgcccaggctggagtgcagtggcacgatctcagctcactgcaagttctgcctcccgggttcataccattctcctgcctcagcctcctgagtagctgggactacaggcgcctgccaccacgcccagctaattttttgtatttttagtagaggcagggtttcgccgtgttagccaggatggtctcgatctcctgacctcgtgatccgcctgcttcagcctcccaaagtgctgggattacaggcatgagccaccgtgcctggccccgttagttccaactttaagtcatttccttgctcctgtatcgattcataggctgttataagcagccaggccacatcttaactgcttcactgcttagaaatttcttctaccagaaacctgtgttatcactcttaagttcaaacttccatagatcccaagaacatgcacaaaatatagccaagttctttgctagggcataatatgggtgacctttactccagttcccaataagttcttcatttccatctgaggcctcatcagtctggcctttggtgtcaattgctatcagcattcggccacaaccacttaacaatactctaagaagttccaaattgtcccttgtcttcctgtcttcttctcagccctctaaactcttccaacctctgcccattacccagttcccaagctgcttccatattttcagatatctttttttttttttttttttagatggagtcttgctctgtcacccatgctggagtgcagtggcatgattttcgtttactgcaacccccatctcccaggttcaagcaattttcctgcctcagcctcctgagtagctgggactacagacacatgccatcacacctggctaattttttgtatttttagaagagacagagtttcaccgtgttgcccaggctggtctcaaactcctgagctcaggcaatccttctgcctcatcctcccaaagtgctgggattacaggtgtgggccactgcacctggcctttcagacatctttatagcaacactacacttcttggtaccaattttctctgttagttgatgttgccataaagaagtaccaaaggcttgctaatttataaagaaaagaggtttatttggcccacggatctgccggctgtacaagcagcatggcactagcatctgcttctggcaaggcctcagtaaacttacaatcatggcagaaggcaaagggggagctggcatatcacatagagcaagcaagagaaagaggaggaagcatcagattcttaactagcttttgtgtgaattaacaagaactcactcattcccatgggaaggaaagaggttttttttttttttttttttttttttattattatgccattcatgagggttctgttcccatgacccaaacacctcccaccaggcgcacctccaacactggaagtcacatttcaacctgagatttggaggagacatatatccaaactatatcaatatgtatcaggtatcttatatacatgtattaagtcatttagataccctatgaaataagtattaatatctcctttgaattgatgaggaaactgaagaatagagcttaagtaactgcttaaaagttgcatagctaggctgggcgcggtgactcatgcctgtaatcccagcactttgggaggctgaggcgggtggatcacgaggtcaggagatcgagagcatcctggctaatacgatgaaaccccgtctctaccaaaaaaaataaaaaagtaaaaattagccgggcatggtggcgggcgcctgtagttccagctactcgggaggctgaggcaggagaatggtgtgaacccgggaggtggagcttgcagtgagccaagatcgtgccgctgcactccagcctgggcaacagcgagaaagttgcgtaactagaaagtgttggaactgagattcagagttaggcagtctggctacagagtccatggttttaacctctatagtctcagcataatttacatttgaacagtgtggttggtaaaactttctttgataaatgtaatttgttaaaggctaaatggtggcatcccttccgtgatcatacctgctgttttattttctttattttatggttttcaatgatatatttgttgttctttgaggcttcagtgctataacctctattcttataagtatgctgtttagttgtatttaatattatttttttaaaatgtactgtctgctttttaactttagatgtcattggattttttatattttattttgaatgaagaccatcgcacagattgggaactgaatcttctttagagatgcttatcttggatatttttttctttttcttttttttttttttttttgaggcagagtctcactgtgtagcccaggctggagtgcagtggcgtgatctcagctcactgcaacctctacctccggggttcaagcaattctcctgcctcagcctcctgagtagctgagattacaggtgcacaccaccacacccgactaatttttgtatttttggtagagatggggttttgcaatgttgtccaggctcatctctaactcctgttctcaagcaatccgcctgccttggcctcccaaagtgctgggattacaggcatgagtcactgtgcctagctttcaaatatggttttttttttttttggcaaaattacacctttttcagataattctaagatatgttagtatctcaatggtatattaatataatactaatatatatgttgtacttatgttgtatgtgcacatattaaaatgccatgtgtcatgtttaattcatatatactacatttaatactatctatatttatgaaagttgcttcttaggaaattcatagtatgttaccatctacacttttactcttttggtcgttagtaatgttcattatggtcatctatttactaaatgcttttgtagtccctttgtcttgtcttaaagatcaacacatattattgctctaattataaattgaagaaacctctgaatatataggcataattatgtaaaaatgttagaaacgtaagcatttgaattaaccagtagtgcaaagaaaaaaaaaaagccagattcagccgggcgcagtggggctcatgcctgaatctcagcactttgggaggctgaggtgggcagatcacaaggtcaagagatgaagaccatcctggccaacgtggtaaaaccccgtctctactacaaatacaaaaattagccgggtgtggtggcacgcgcctgtagtcccagctactcaggaggctgaggcaggagaatcacttgaacccaggaggcaaaggttgtagtgagcccagatcgcgccactgcactccggcctggcaacagagcgagactctgtcttaaaaaaaaaaaaaaaaaaaaaagacagattcaagcacactgtatttgcattttgtgagtatgatttggagaacagatatacctcgtacatagtctcttgtttgcctgtgagcttagaggttgtttttattatcattattactattactatattttgagaggcaggttcagttaaatgagtggagcaatacaaggtaatagacaaagaattgcagtcacttgaaatttagtaagcttagcaagtaagaacattatctatctcagaatcttcataaaataaatgtcagtttgttcctcagttgagaagttttgcaccattaagttgcttctctcttcagcgtgcatgaaactgaggcttaaatttcaagaagatataacctcagaattacataaccttagactgatctttttcaagtattaaaatgcctgagtatatgtggcatgtgggtattttagttcacactgtggtatttgaatagaaatgctttcacatttttgttttctgacgaaagagaagagaagctatctaacctcattttttccccttatttatccttattcacttattctctaggtggcatgtgtgtcattagcttaacccttatttttcccttaatattgttgacatacatggagaggtttgttaactaggaaaaccaggatgattatcctgcctcttttctgggcagtgatagtgcatttaatatttatcttagtgaataacagaatatgaacctcacttgaaaattcggtcaataactaactaggaaaaatggtggggagagggcatagagctaaaattaagaggttgaaattttggttaagtctctgccagggagaggctgtataaccatgagaaatgcaaataacctctctgcgagccagttttctcattcatagaatgagcaatgcattagattgatttaaaaatcccttttaattttcaaatttcatgattttgtaatgcttcagaagttaagaagagaaagaaattcagaaatgcaaagtattattcaggtgtaaggaatgtgagtcatttatagaataagcctctcacccaacagtgctatttttatttgtattattgacccatcgtatttttaaagttttgttcttatttatatattttttagactatagctttgaaaaacatgggaattaattataacgcagtcacttttcatttattactaattgagataagtttgtaagaaacattttgtagtagaaaatgttttaatctgaaaaatttgtcttttcctttctgtaaaacaaagtaaattgagcttttaaatggactaaaatatgtagattaatatgaattatattatctacataagtatttttagcatttctcatatttattatctatgtagctactaatgtatgatatatggttgctttttattttaattcttaagtgcctaaattccttctgtgaaagtttcaaggagcaattacatttatcctaaactaagatgaattaaggttatcagtttttgaatgagctctaactattacaatgaacttaaaaggatttaatctaaacatacctatatatatagtatgtgccctttcaaaaggagcttcttctaattctgctctatgtctctagactgacctcatgtattattaataaaatatccagaattaggttgtctttgtgagatggctcggtagctggcttttgccatggcatataagctgagcggttattctaaatcacatcattactttcagccagataactgctaaaatcaccacattgtggtttcctgaaaatgccataatctttcaaatgccacattaaacctagaggaaaaagccattcgtagtacctgcacagttatgtagaagaatgaaccatgaaccaagtgaaaagatgttctggaataatagtaacatttcccttgatgtatgtatttcctattactttttttgacataaaattttgcaaaatgatttaatgttggcattttgttttgctgactttctttttcttcattaaaaagaaaccaaagttaggatagaagtgtaggggaagagtgaccaagcactaaattctataatatgactctctgttttcaaaataaattaattaaatatgttaggaacatggcttttctccttttacattgtatgctaactgtgatatacaaaatcatttagctgtattatcaaaaatgattttgtttgttctttacagttaatttttttttcttcattgtcgtcatcctgttttttcttcttagtaacctttgatcataaatgacatgtcaataatcaggaaagctttatgacatagaaattaccaattgcatgtaactcaaaaagtgccatacttttgattgtcacttttgttgcatattgctagagctgattatacaaggaaacaaaatatgaatagactcagtggtctaaaagatggattcttgtcaactttaagaggatacatttttactacgaatgaatgtcataaagttattccacgtaaaatgagttcaaagtttatttgcacctgtgagaacataccaagtgtagttggatagaggaagtaacttgccaaaatagactttgtaagaattttgtagcattagattttcagttttagctttgatgtggagtacctaggtgtaggccctgtcacatcgttatttaaaaaacaataaaatttaaaaaaaacttgataacttatattacacgtgcatacttgttaacatctcactttaaaaaatgtattgggtagtgattgactaaacactacttggtgtttttttcccccctcagaattatagaatttttcataaaagttgcaatttcaattaagggaatggaaattgggttgaagtttctcagtcagtatggcatcagtagttccttttcactcaactaaataactttttcagtagattttattgctctttatggaactctgcaggtatagattagattcagtttttaaataaacattaactctgctggtttttctccctgatgtctcaaaatagaagggtttacatttagtcagcaattctttgtcttcattttatcttatttaattttttgcaaacaactcttttctagatcaaaagtactattcaggacattctgcagtgcggatatatatcctaatggtttcaaccaaaaatgactgaaggactttgttagtgatgtgattaaagcatgccctaatgagcaaatgcattagagggccatcaagcacaaagtcttgaattttgaatatagcagaaacagctagttaatattactaatccatgtgttaattgcgctacaacagtaatgaagataatgtctaagacactgttgtcattcctagagtgttgctggtgatttggcctaaggtgatagactaaaatcaaagacttcaccattatacaattcatttatgtaaccaaaagccatttataccacaaaagctattgaaattaaatatatatgtatatatgtgtgtgtgtatttatatgtatatatatgtgagtgtgtgtatataaatatatgtatgaaactataaaagaagtacttgcaagaaatgtgtcattctagtttggaaaacgagataagcacagagaaagttaaaatcccttttaccctggtagtagaaaatcaaagtagtaaaacttttctggggaataatttagcaatgtgaatcaaaggcattaagcatgacaatactatttgtaaagtaacagcacttggaggactctttccagaggaatattctgaaattagctcaatttttatataagaatattctttatggtgctcattataatagtgaaaaatatttggaaccaacacaaatgcctggtattacaagagtggttaaataaattaataatataccgtaaattttcatcctcttatttgaccccttattcagccattttttaaaaagagtatttcctgtgtgggaaaacatttaagtttaagttagaatcgtcccatatttgtttaagatttatcgtggtgacccacaactgtaatcccagcactttgggaggccgaggtgggcggatcatgaagtcaggagatcgagaccatcccggctaacaggatgaaaccctgtctctagtaaaaatacaaaaaattagcggggtgtggtggcacgtgcctgtagtcccagctacttgggaggctgaggcaggagaatcacttgagccccggaggcagaggttgcagtgagctgagatcgcgccaccacactccagcctgggcgacagaatgagactccgtctcaaaaaaaaaaaaagagatttatgatcttaattttttataaatatttttatttcattttaaagcttttctctatcttcataggtttttgatagtgaaagtatcttacttttataccagaaaactggtttttaaaagctaatagtgtacgtagaattctaacagaagactctggatattagatatctcttgactgccttagaaaatcaatttgagtgcagtggctcacgcttgtaatcccagcactttgggaggccgaggtgggaggattgcttgagctcaagagttaaagagtagcctaggcaatgtatcgagaccttgtctctaataaaatttttaaaaaatcagctgggcatagtgacacgtgcctatagtcccagctacttaggaggctgaggtgggaggattgattgagcttgggacatattgaggctgcagtgagccatgatcacgtcactgtactccagcctgggcaacagagcaagaccctgtctcaaaaaacaaagcaaacaaaaacatcaatttaataaaaccattatggaaaggcatgaaacaaagtcaattctctttttgtttgtctatcctaaattagcataacaaatttataaattttcttccctcacattttcaatgtctattttgcattatttgcagataagcttaattttcccttgttattcaatcatttatgctttctgatttataaattcagcattcagtgcctttctgatttaatgacaatgaattgttgacttgtacttcccagtcttccttatatcacaattactagaagataaagagttggggataactaaacatactcagtttatcctgaccaaatagatatttctccatttccttctttatcacacatagtacttccactcagctatgtcaggagcctctctttagtctcagccttcacactcagtagaattttggtttcatttttttcttctgtgtgggatatgacaagatttctcttcaaatagcctattaatcctttattctttaatccacagtacccctccccttcccttttcttctctttttctttctttctgcctttactacatgcccaggcatgccacagcaccaatggcttatcagtaccagctcacattcctttccttatttgggaagaaaactagctctctagcttatcacagatgacttctaccccctctcccctctctcccttatgtgcacaccttatctaagaaaaagttcaaatgttcagagaatcgggtctagcttagattgtgcagtccaaccccagccaatggggaaagggcacaggggcaggatttgcgtcagggataaaaactttaactctccttttggtgactggccaaagagaagcacccctctgtgcagaagtaaatttgctttgctgagaaatcctttgtctgagtgtttgttttccttaagactccaagctttatttctgacattctggaattatagtttggagtcttattcctcacttatattgtgctttaccttctaggtgtgtgcacaccgtctctctttctccccgcactcccaccccgtatcatcgtgactggaaagccacaggaagttgccacatagaaatattctgctttccctatttttttttttttttttttttgatacagagcccttgctctgtcgcccaggctgcagtgcagtctcggctcactggaaactccgcctcccaggttcaagcagttctcctgcctcagcctcccgagtagctgggattacaggtgcccgccactacgcccggctaacttctttgtatttttagtagagacagggtttcaccatcttggccaggctggtctcaaactcctgacctcgtgacccacccccttggcctcccaaagtgctaggagtacaggtgtgagtcaccacacctggcctgctttccctaattttacctaatgagaattcttatttgggatagaatcacttagtaagataattgtaaaaatgagcggttgccagtaaaaccagtggggctgtacaaaaattggctagatttaagctaggagaaaataaataatggaggaaagcattccagaggagaagatgggatgcccgtctggggcaataggtagattcaagcaaagtttatggagaactttatctgaaacagcacaatttgtggttgtttttattggagtataacattacataaggatatgagaagatacgttaaagacactatttttacaagcattactatctgtttaaaatgtagtaaaaataattacagaacttaaacttcaaagtatttacaaccattactatttgtttaaaatagagtaaaaataattacagaacttaaacttcaaaatatgtacacacacacaatctgaaaaaatgttagaaaagcaaatgtttcagcatacacagatagccatttattttgaagataatagcaattagaacataagtattactttattggatttatttttaaaggaccaagtgttattttcttcttacatcctctaaacctgtccctttgagggcacagaattagtatatcatcatccatacttctttcctctaagtacaaacaaaatattcagggcctactggtggcctcctcttttcattcccattctagctattatagggtttactcttgtgttttttttttttttaacttcacaatgcataatggactttttctcagtaaatagagaactaagccagtttttaagtagctacaaaatataatttggatgtatcataatttactgtaatatttccctattgaaaatttattttttcctgtttaatttctatcccaaagtaagtgtgctaggccaaaattatatgcatattttacatgttaatggataatattatcttgttacccactggacatgaatgtgtaatgatgtcatagcagagatttttgtcaatttgatggatgaaaattggcattttgattgtattttgtaacaatcagtttcaatgtttattcactcatatattgatgaaccatttggattttcatatctgtgaattgcctttccatatcctttgccgctttatctttggagatttttttttcttttttaaaaatgagtttattacatatctttgtataagttgcaaatattttctttaaggttgttgggttttttgtttgtttttgctttattgctaatggtatgttttgctgaattgaaatttacatttttttgtgttgtgatatttatgtctgaaaaactaaaacctaatttggtatgttatgaaatagacaacagatatatattatttaggcaggaaatgcaaattatctgtctttgccctttagatgatctatgtacagttttgcttgacatgttttaaagatttactgagatactgtgtcatctataaataattttttaattacacattgcgacattagcttaatataaaaatactgttttgctttaccagaatgtcatattcttctgttgatttaaaacaatttattagttttcagaggctctattttgttaatttttgaatatcaggactgctgattttaaaacatgttgaagctatcattgatgtaaccttttgtgtaatgtattggatcttaatggtgttggatacatgtttggtgattaattctaaaggcaaaaattattgtttctattgtagatgtcagtggtgaacaatgaattgctaaatttaatcgttttttaattttctaaatactcatcctatttggcctcgtttcaacatttaacattggtgaccaaccttcctccttaaaacactatcttttcttggttttgtttttttccttttttttgagacagtgtctcactgtgttacccaggctggagtgcgggaactgcaggtgtgtgcctggctaatttttgtgtttttttaagagacagggtctcactatattgtccaggctagtcttcaactcctaggttcagtccttccaccttggcctcccaaagtcctgggatttgctactgataagtacagttttttttaaccctagtttttatcagtagcaaaacataatagtttaaaaaaaaaactgtggttaaatgcttgaattctggagcctagttatttgggttcagattttcacccagcatttattagttgtaacttgtctagttacataatctttgtgctttagtttcctcatctgtaaaccgaggataataatcttttttacctctagaattgctgtgaggattaaatgaataaaaatatgtagtgcttattctccttcatcaactctctcctggaccgttgcaataaccatcaccttctctagtttgagtacctctagtctgtatccagttgtcttactaaaacatgaatttgttactattgtactcaaatttgtccagaggcttcccatttcttgcaaggtaaatctagactgtatagcatggcttataaggccctccaaacccagcctcagtctgtctttttgttttcatttccagctgttcacagctccaggtgacctaaatttagatcatcgcaggtcattttttctttctaaaactaacctgttgcttttatgccatcttgcttttattatactttatgttataccttctctctgaaataacctcgtctttttctctgggatgagggcttctcaatcacttatacttagtccatatgtcttggtcagtgtatgattcttagtgtataagcaccattttttaataattaaattaattttaatattccaggtccgaagccaatgcttatcacatagtatgcccccagtacataaccaaattgaaaaaacaatctgtggattttaattagtggtacttatttaatattttaaaagttataattgtcagatattaatgggatcttggcttagttatgttatttttatatacaaaacattgaaattttggttagattggaatggtagtttttgtcatcatttgaatataatttgtatagtaatttaattcattgttttcatggcttttattgttctatgtgtatgatacctattaaattcttacttgagttttattactcttagtcctcttgggtttctatggatagtacctatttcactgaaatctctgcgttatctttaatctaaaaatatgtatgtactattagtttttgctaatttttacgtggggtaatatcaagtcagttaaattagatctcactacatcttaatccagttttgggtagcataaaataaataagggtatactttgtttgtaaagtccctgggttcccttttcattctattctgaaagaaatttgttaacaaattgagaactcctaatttagcttcctggagtgattttatggtaatagaaagcactgcccttctttctttttttttttttaagatggagtctcgctctgtcatccaggctggagtgcaatggcacgatcttggctcactgcaacctctgcctcctgggttcaagcgatttttctgccccagcctcccgagtagctgggactacaggcgcacaccaccatgcccagctaatttttatatttttagtagagacggggtatcaccatgttggccagactggtctcgaactcctgaccttgtgatccacctgcctcggcctcccaaagtgctggggttacaggcatgagccactgcgcctggccagcactgttcttctttcttgacctggtttttttgttgttgttttagatataggtactatgatattgggccataatctttggctttgctccaatgattgacttctaaggaatctttactcacgcaattattccttttactgactattgctaattatattgtggattataaccacaactatatttgactcccagtggtcttctcacttaataatctctgtgtgttttcatttggcccatgcttcatctgtgtgtgtggtgtgtgtgtgatacatatggacacatgtatgagactctgtcactcttttctggcattggataaacattttgaaatatgcaataagaaataaataatttaggaacattaggattattttaagaagtcgaatgggggcaaaaagatttttaaagtgtataacttgaaactaacataacaattaaaagttacccagggcaattatttataaaacataattttataagttctaatttatagaatagtccactttgtttaattcagtataaaatataactttgcagagttatcattattacagtcatccctccatatccgtggggcattgattccaggaccgctctcggatatcaaaatctgaagatgctcaagtcccttatgtaaaatgccatcatgtttgcatataacctatgcatatgttcctgtatgctttcagttatctctagatacttattataatacctaatacaatgtaaatgctatgtaaatagttgttataccatattttttttattgttgtattgctattttttattgggtttatttttcccaaatattttccatccatggttggttgaatccattgatgcagaacctgcagatatggagggcagactgtattaacttcagaaggtaatgtgtgttgttcacatacacacaaacacacacacacacgcacacacacacacagtcctatttcccaacatgagaaattgtcaaatttttatgcattaataactaatgaaaataacagagtatttttgttttcatccatttttaaatgtcttttataaatgtatttcatttgtaatcctgctttttcattttaatgaagaatttcattttcttactgttttggttttgttagtcatgaaattttttttaatcataataaccctcctgggaatttatcataaggaaatagtcaaagaaagaaatgctaatataaaaagacatttatagctatagttatagtaggaaaattattcccaccgtaaatatataactccccaaattaaaacaactgaaaacattgtataggaggggagtgataaactataacaaatcagtattaaaaaattatgtatctcctatagatttatagattataagatatttacataggaatgaggaaacctgttttatgtcataagtatatgctactaaattgttacatataagtggctaaagattagaagggaacaaaaaatgagcatggtattattttagaatggtaggagtctgagtaaagtaaaatcttcaacaccattttaaggacattaatctcatgaatgtaacatttaagtagagcctcattttgagcacagacagacacaaagattaattagatataaaaaaaaaaaaccgtagccctgatcagttaaccgcagcaaataaaaacctaagacaaaccttttatcaggagcaaccattgagtagggcaactcatattcaaatgaaataaacatcaaatctgttcctcaaaacaacattaaagttatcagctttttgcgtatgtaatttcagttagttatgcagtatactaaataaggtgtaaggatatgttcattgaggcacaaacaattcattgacttttatatatgtatatcttttaaagcttggatcgtatttgaacacaccgtggtttctctaaaaggtgaaattcagctgggcatggtggctcatacctgtaatcccagcacctagggaggcagaggtgggaggatggcttgagcccaggagttcaagacctgcctgggcaataaagtgagactccattctccacaaaaaggaaaaaaaggacaaaaaaggtgtaataagtaaaattcagaactctggaaatattttttaatgagatacttaacatatgtctatattcttcaaatactcaggcaagtttgagcaaagtattatgagtagaagaggagaaagttagaatggttgattattgcctcatgaatatactattaaaagtgtgactttatgatgtgactttagtgtagaattgttcatgcattctttttttttttttttttttttttttgagacggagtttcactcttgttgcccaggctggagtgcattggcgtgatcttggctcaccacaaactccacctcctggcttcaagcgattctcctgcctcagcctcccgagtaaactgggattacaggcatgtgccgtcacgaccggctaattttgtatttttagtaaagacggggtttctccatgttggtcaggctggtctcgaactcctgacctcaggtgattcgcccgccttagcctcccaaagtgctgggattacaggcgtgagccacctcacttggcctgttcatgccttctttatgtgtgtacgtgtgtcatttttttatacttaagattatgcatgaagcctcaagtgtgatttaattcataaataggcaaccagttgagctctgtgagaagtgattggtcaaagtacatgaaagtaattctttaagtatattctctatgaatcgtagcaagaggaggagaagttctgctttgaatgaaactggtaggcactccctgtaattgcccagtgaatcaggttgacaaagatagctacacaaggaagacaggcctacaaaggactaaatcaatgggattcagtcacaagcaagtgaaattatatcagtcaataactttccttataagtgactgaaatcttccagacccatattttccttttcaggttactcatttatgtcaattattaaagaactgcaaaattgcctgattatatcaaggaccttgttgtgacatggtctgtaaatgtagatctttttttaaaagaaagttgagtttcatgtagagcattgagcacgttgactgaagatttgactttttccaaagcttgtaactgtaaagaaattgtggaatcttgtttttccctttaaaaataagattcctgtgtttgtttcttctcaccagatttacttttgaatttatttcatattaaagatactgaaaggcattcacttatttatacattagatttttatgtagagggtttataagagacagaagaattcataggataatgggatcattcctaaaaggataaagaagtcttcatataaaccaaggtgacaggtgaattgaatcttgaagtatgagtaggttttaggagattgggtcaggaggtagcagtcattcaagggaataaacagacacaaataaagacaaagtgggaccatatgagtcatgtgtgatgtaggtttaagagaataggtagattggggccttgagtgcaagctaatgatgttaaggggtccaatggagatttattgaagacaagggatgatacaaaggagaggattgtaaaaggttgatattgtggtgacatacctgatgaacacatgggcagctggaggaagaccagtttgagggctgtgaacctagactgatggaagtagaaatgcaaaggattagaaagatcttggaaacataacatcatactagggttgtagcagataattaatgaaaaatggaaaggcaaggaagaaagggaagtgtttaaagcaaactggatgactttaagctgaataatgggagagaatggtgagagtagaaacagaaaaaagatgagttggctatatttattttttggagaaaaatataataggtgaatagagggttttttttaaaggtctattgaattagacattttcagaaagcatttaaaattatgggattataaatataaagaggagctgcttgccgttgctcacgcctgaaaccccagcactttgggcggccaaggtaggcagatcagttgagcccaggagttcaagaccagcctgggcaaaatggtgaaacccgtctctactaaaaatacaagaattagccgagtgtggtggtggtgcatgcctgtagttccagctactccggaggctgaggtggaagaatcacctgaacccgggaggcagaggttgcagtgagctgagatcatgccactgcactccagcctgggtgacggagcgagaccctttctcaaaaataaaataaaagtgaatataaagaggattagaactctggaaataaatttgataactgttaaacacttattctttaccccttaagtattcaattctaattttccgacctttgctttaagtaaatgactgcgtctttcagtggatattgaaggtacagcaggaaatcatgctctgtaagaatggaacacctgaaagaattaggtaggtgtccttggtttagttgagtcacaggctaactccagagaaatttaattaccatgtagcagagcctcaagatgaggttttaatactctgccatttttaagctttgttttgctgactgaaatacctctgtgtataatataatacttatctctgcttagttgtatgtcagctgattgactttaaagttgtggaatatttgtaatttgtcttttaccccctttatctgttttgtatttgcttctattcctttttctttgtggttaccttcatcccagctaaatttgctctactttaagacagtggtccttaaacattagggtgcatttgaagcacctgaaaggcttgttaaaagggtttctgttttaaaattctgaagtggtgaccaagaatttgtatttctaacaggttcccaagtgatacagatattactggtctggagactatactatggcaatcactgccttatgcataaagcccttatgctaaagtcctaagatagtggttctcaattggctagagatacaaaaatatcacctatagaaggaattacagaaaaataagcaaaaacaggcctggatctcactcttgaagattccaaatcagtaggtgaacaatttagcaatagtacctcagagtttaagtttaagaagtttaagagtttaagggcatatgccttttttgcatatgcccacatatcactcatctaaacccagtgaattgcctttttgaagtctctttttttgttgttctaatgtgaggatgtcatgagaccaagagctccattctttactcgctgaacctgatcattgactcttagggcttttagggaggagatacagttgtcttggccaaaatggtattataaaatgttgaagccaggtgctgataaactcagaattattaaaagctctttttgtaaagtaacacaccagttaaagggtgtttttttccccctaatagtgacccttgaatcagattggcatggcaacgttctagattgctctgaaatagcactctgtctgttgtctccctgagacagtgatctgttttcactatagtcagaaagtgtgatacagtcctgccaagcaaaactagctttcaggctttagattctaaacttctaatttcccttaggactttctctttaactcatgggttatttagaagtgtattttatttccaaatattcagaggattttccatatatatttctgctaatgatttctagtttaattgcatctttaatatctccgtcatcccagagtttgttctgctgattgctttgtttcttgacagtggattttctttttcattttatgtgcctcataacttttgattgaatgttggacatcatgagttgaacagtagaatacttacgcctgaaaagggcacacctgttctttttcaaggctgttagtataggggagttgagtcagtttaatctggagttgagctgggcttatattttcttgttgctctgcttacctcagtgtaccacaaggcttcaggtttctttggatttctttactatttcctgtgtttctggttgaggttgtaatgccagagtgcttttcgtcatttgtactcccctgttaaatttcacctttctctgtatgcttgtgctactgaagaagccccattgcactgtctttcctcttacttagcagtagactgtcacatattactcagtgcttgctggtctggtggtattagccaaaggagttcttaattttcctcattcaaactcagccttcagcctccaaagaaccacaagcttggttcttgagtgtaggcctttttcattgttctctgccctttttcctatggcagctttattctggcttgtgtctttggcacatcttgtgagggagtttccttctgactctcaggggtaggagacctttaaaagtacaagggtagtatactgggcccagaaatgtttcctgtcactcctgtaggagtagaggatttttttttcctcttatgtttttttctcttcacagtgagattactctgttccctgtgtggcagcagggtttacagcctttcttttaatgacattatggctttcattccttaaaggagaagggtctgggtgagactttgggtctttcccactgtggtggccgctccccttctccaggtctacactgccaaccagtgaatggtctttctaatggcccaaattgtctgaatctttttcttgagtacctggtggaggtgtctgttagttttctctggctgttagaacaaattactacaaatttggtagcttaaaacaatataaaattttttcataattttggaagacataagtccaaaaccagtttcatttggtcaaggtgttcagcaaggctggtttcttctagagtgtttgggggtagaacccattttcttgccttttctagcactagagttgttctgcactccttggttcatgacccccaacttcttgcagctatagtcacatctatttatctctctgattctgactcctcctacttctctcttacaagagctctttcctgtgattatatcaggcccctcttctcaaaattcttaatcatatttgcaaaatcccttttaccatacaagataacatattcacagattcagggcattagaacatggactcttttgtattgttattcagcctaccacagggttcctggaaaaaagtttgtgaatgaaggtaaccgtccctggggctgtggctcccaaggcttctgtactctgatattagccaacatttcacctttagcaaacctttaaaatttataactgaattcttactcatgtagtgttgagcagctcttcctctcatgctctgccacaggtgatccagagcttggatcccatccttcttttatggggtctatctttcttgtatttcaggccacttggttgccctctgacatcagctctctcatggcttgaaaagttataattttgtagtttatctttttttttcttgctaggatagaaggagtgttatttccagttgttgttgttgttattgtttttccattctagccagaggcagttcaaagaaacttcagaaactttactgagcctgagggaacacaagtcaactgccagtaatcactaccttcagctttatagtaatagcagtagtaataaactagaacaaattgtagtgatagtaagagtggttgagttgaactcatagtgaaggtaagtaagcacttaccacaaccatatgccaagcattattttaattattttatacacttatttaatccttaaactctataaggtggttactgtttttatttacatttataagtgagaaaactgaggcaagtggagattaagtcattttctcaaggtgtcaggctgatactgacagagctgggattttagtccaggaactacttctccagaatctgtacttttaagcatgaggctgtgctgcttctcaaaaaataatttgctctgaggatatgatgggtctttattctgtaattaactcaatttcctctgtgaactttttgctgaactatttcccaatttttttgagagtcaagggcatttcgtttaatcctgtatccctagaagtaaatggaaataagatcaggttttctcaacctgggtttcctgggagaatcaattcttaatactctcaggcatccattaaatgtagagaataaatgttttttcagtggattttaaattgtattcattatctactaaattgggagaagtgaaaaaaagtcaaataattttctattttctgtgtttcaaatgagaagctcctataatcacctacaaaatgataatccctgcatgatgtaagtatcaagcatcatcacggacatctcagctagagtatgagataaaacctcaactggattctgtagatttttttttttaccctactctcatcaccattgaaattggagactgatctttttctagttgttctctagtcaggggatatatctctacctgtatatagaaggtcagctttggggctatactctgaattcataactagtaattctatttcaaggtgctgtgaggtttagtccactgagaatcccaagagatttgtgtctttgtcagaatgctaacttttaaaggtttattttaaataaggaataaagaggtcttccttaatcacatggttttcccagtcatgcaaagttcattttggttcttttattctttttcggtgtctgagtatatgcatgcatggatatttgcatgtaaacttcaagtgggattaaaaccatttagggccatccatgtattttgtaaagaagatcatcctgcataattactctttatcagtaactatcatcaaaaaaattttcacagtaggatattcttatcctaaagtttttgaatgctcatacagacctgacaatttcacttataggagaaagggaattttgtaaagaagatcatcctccacaattattcctcatcagtaactagcatcaaatatatttttactttaggatgttcttatcgtaaagtttttgaatgctaatacagacctgacagttccacttacaggagaaagggaactggatgccattttccagttcatttacgggtatttcatatcgtatgttgctttaacctgggacagaacccagcagccttttaacactattaaaagctctatttggttgttgccaattataaagcagatgtgaaaagaaaaagaaaaagataaagcagatttgaaaagtagacctttaagaactgtttggatatatcgagtttttatagccattcaaaaagaactcaagataatcttcccacaggacagtcatggtgattaataaggaactacataggaagtaaagttgtttcttgagtttaccaatttctgttggtgtttttctggaattttgacttatcactatatactggaaaaaaaaactcatcttcaaatgatttcagccaattcagtacatttaatcttagtacctgtttacttcattgatagtattttgccccaacaatagtagactagaactttttttttttttttttttttttgagacggagttttgctcttgttgccccggctggagtgcaatggcacgatctcggctcactgcaacctctgcctcccaggttcaggtgattctcgtgcctcagcctcccaagtagctgggattacaggcatgcaccaccatgcccggctaattttatatttgtagtagagatggggtttcaccatgttggtccggctggtctcgaactcccgatctcaggtgatccgcctgcctcagcctcccgaagtgctgggattacaggcgcgagccaccgtgcccagccaggactagaactttttaacgtattttattcatattgccacaatggagaattattatgacacctaaaatagataatattttatcaataaaagctaatgttgatagatttaaggtgactaatctatcataggtattgatatcagagtctcctcagttttctaaattatgactagggatcaccattaggcgtagtagtaggcctttatcatttgaaatcacaatttaatttcttggtgaattaggattcaagggtaggaggaatttgagatattgagctcttcaaaaatttacctgacttttgaacttcatcagcagtatccccaccatgttgttatgcagctattgtttgaatactttcccttaccacagttaatgctagaggcagagttcaggctagttcagtcctcatctgaaagtttgccttcccttcacattctcaaagttcattgttgatacccatttatctaactcagcatcttgtttaatatcattgtattacataagaatcaataaagtgcacactcttccaaatcttgtttgtcccttcctctattctatcttctccttcatcttttctctagctctgagctgtcaaacagcccatggtgggaaaatgaagactttaacatttaaatttaaaggaaggggtgtgtgtatgtgtgtgtgtagataggagggagtgtatttgaagctatatattacctgatttttctgtaaatctatcatattcctttaaaaaagtcttttttaaaaagttaaaggactgtgagtagaaaaattaatatttttcttttaaaatcttttgttaattataaaaatttatatacaaaaatataaaaagtaattttaaatcacctataatcttacactatctcaatgtatttacttctattcagacattttgatgattctgttcaaaacatttaaaaaactttagccatgtatataatttgaaagctgaaaatatcagaatattttgggaacagttttctattaaaacatttcttgatccattcttttcctttcccattcctatggcttccttgagacctttcgcagtgtctagcctctgttttctgccatgttattctgttcaccttagcttctttgctgttttctcttgccgcctttctctgttcctcacttctgattatctctcccttggatccctctctgtctgccttgcctctcctcatttttattgctagtgtataattgggttctacagctctactatgtctcacttcccccaaccttctggctcgtttcctcacctgataaaatggccagaacttgaactccagttcttgtggaaagtgcaccattgtcctcactaatatccagagcagggcatatgttgtcttccttctttaatccccactgcacccggctgttctttacttctttctctaaataccattattccaaggctgtcttggacatttactgaacaatttagggtaacagaggccttacacacagaacagtgtaagatttaaaattaaatgctttgtattcttgttcataaaagttacttggccatccttgccactaagaatgtttcctttttgccttagaccaggttttataaaaagcagtgatcagtgacttaagataaatgtctttagacttaaaatgatgcttcattgtatgtcacgaagagattagattctaaggaaggaattagaaaattaagtaaattttgtgctataatttttaaaagttcatttcaaaaatgcttttctattagtaaaaatcagggaagagaggtttaatttaaaaaatattcatatttggataatgagtgtagcccagctgccactgaatttttcttattaaggtggtattctgatgaaatttaaattaaaaaatgtttacttggtatattttttctataattaagttgatttgctgatcttgttagacacatggaatggctaacctgtctaacacatttagtatttattgtatcacattctttgacttaaaatctgtattataacatcagacctttaagtgtctttgtattattcataaatattttttgtttatgttataaatgtttggattttaaaatttttaacacatttttaatagatgcagtatagtcaggtaatttgtatttaaagaaaacagaagcctgaacatggtatatattacatagtgaagtgtggtatttctggggtacacaattttagagtaataaacataatttcaagcacctacagcagtgaaatagttctcattttacacttttatatttctgtaagatttgtttttgcagttttaatttatcctccattgcagggtgttaatattgttaaattatacaagggaaggattatatgttatatacttaatcatttggaaagactgagactcttaccacagttctgctgttgactagatgaatgaccttgaatcaagttacctctaagatcattgtcttatctttaaaatgaagacattaacttcattttttcttaagttatgtaacttttataactgagagatttcaaaacaaatatacagtttcaaaaaagatcctaaagtctgtaatctcaccattcatctgacacttgatttatctgcctagcatcactactaagcagcagggaatgagctttgtcaaggatagagctgtgagccccttcctccctcttggcaggaactattgacaattgactattgacaatttctctaaatgagctgatgatatgtctttactaaaaatttaaacacttggagtcatacaaaacaagtatgatccaacttctagttgaaaagccaactatattgtttttgatttttctttcatttttaaattaagcattctgtttcatctgttactcctgtatcaaggttttcatttgtattgattttatatttctttggacatatgaaatagacatttgaaatagacataataatgaaacgaggtgaactgaatttgaaaataggactggacacaaattttgaaatttgattgatttccccagcaaaatgttatttttaagtcattttggcctgggaattatagtaatgataatgttagatgcttactgtatcccagactatgttttctggtctttgactctactatcacattcagttcttacaacagtcctatgaggtatatatatctccattttagaagagaggtaactggggtacatagacactaagcagtgtgaaatagaaattattccagttatatatttaaatgatattatgtaaattaagttatgtattagaatataatttcttcccttccagaaaaatactaccatagtgtatgataaaatctactgaccttcacattagttgccaagatttattgagggcttatatgccagtcagtgtgctagtgccttccacatttgatctcatttaatcctcataacaactgcttgagatagatactgatttcattactattttatgggtgaggaaaatgagaagaattacttgcccaagattgtacaactggaaaatggtggaattataatttgagtctaggcagtcttaaccatacagttcatgcactaattaggcatactgcctcaccgcactacactgctttagcatatttgactttgttgggacaaaaaaagtagatacttcctcttaacaggcaattctaactatataagatacagaatatattgatagttactggtatgtgcatcagtgaagccctttgaaaacaattttttctacattaatttgtttactagttgcatatgaaataaatacaaagcccaaacttgatctttgatttaaaatactgcacagttttttgtcctgggaagataggagccaagagaagtcacattgcttattctagcttattttagtgaaatttaggatgtagggatattagcaatagctttttagtttttatcaaacttatcaacttgaatttaattgggggttaaagcagatttccatatctaatgtgtctatattcggatgcatttcaaagtgaaatacaaatacatattttcagttgtcttctcatctctattatttgtgcatgtaattaagagttaattgtatttctattataaatgatttggttgcttcctcttgcattatacttttccagtagtaaactacagacaaagtagttctcagagtatcagattcagaatgtgctcaaaagctcttcacttagagactgaagcactgaaaaaagttagcacgtgtgatcttactatttaacaagcaaattgacctctattatttcttatatgttgataaatacaacatgtctttgaaaattatgtttcacattgtattcttttgtgggggtgtttacagttttgtttttactttctttggaggttattcagtttggcatgatagctctcctcagtaacgctttatttgtctgtgtgccacttttcactttctttttctcaatggaacctagaagcattaaacacatctcttaattgttaatataaaaaagtgaactttttctgcgatgtgtgactacttggcatttttacctcatcttcacagatctaaatgtttgaaggaaatgataactttttatgtttaccccagtcaaaaaattttacttctaatcactaaaatttctccactgaaaataaagacaaaaaggtaacaaataattgtaaccaaacatatttctaatatagtctttttaaaagaaagtcagcttaggcacaggataagaatcatttgaaaatttcttccccgagtctctgtatttgagtataaccagcactgtaacacactgatcagatgtgcttgttttcagcacagttttatgttttctcaagcgatgttaaattgccatatttgatgaaaaaatagcaaattgaaatttttcaaaatatttattgattaaatatttccttttataaatacaagcccttcatcattttaatattattttcttttttgctttagaaagataggtttattttgacaaccaaaagtaataataataatacaagaggaggcaactcaatgtttcaaatgataaaatagttcaattttaaccaataggaacctacacaagatcatggcatttaggtttagagtatctatctctttggaccagatcatatgttatttgaatctactgtggtttgttagtatgtttcataagacatagtgcagagctgctatgatctttaaatgttaatgttcttttcttatcactttactgtgtagatacccttcatgagacccaactctgccacagctcatcctcggaggcaatcccggaaacctcttttataagtgtgattttaaaaatgtggattaaactctcgatagagtacataaagtaaaggagaacagctatattgtcctttctataagcttgtcactgcaaaaagttgccttttgcttgtcaggtttggatagaatataattgattggtttgttacttggactaacaaggcagtagatttgcctgtgtggaattttttttcctatttttcttctttttgctttttttgcacttatcagaaatatttgatgtgtgcattgttgaaaaatactggatacatgtcttgtcagaattgtcgtattaagtaatgtctttccctcttgcttctttggcaaatgttgatacacagtgtttggacttactgaagagttactgaagcctgtgggacttaataaatacaatatgctactccctgttgtgattgaacaatacaaataacaaacaagaaagacaatgcattccattagtctgctattctgtttccttcaacttcatacatagattcatatatgaagtactgcattgtaaaacaactatagactcatattaaatgttatttctatttataatattcagcaaaagtgaaagacttgtgaagcatatgacattctatttttgacttattagtcctagtgtgaaagcattaatattattagcatgaaatttttacttcagattttaagctcatgaataaagatatatctgtgttgatctctagatatttttagtaatacccaaatatattcagtccttattgttttaatataagctttctgtgttcagtataattttatttttctcaaccttaaatatgaacttaggaaataaggagggaagtacaaagattattgactatacaacctaccagctgaaagaaagatcttcatcaacatctgtatctttccagaggtatacagaattaaaatttgatcttcaagctttaatgatccagttttaagtcaacggcagaagtatgttgaatatttcatcactcaatcttgaactgatttagaagagactctttgctgaaattgaattgcacttatacatgtaaattgtcaacatgtaatttggaattttctgattaataaatgtggttttggacatcttttcgggtatagtgacaatggaaaatagtttaaactttaggaatagagtaggtaatgttatagataatcaaaagcaattgtaattgtaaagctgctgtaatctagtgatctctagttacagtgaggaacgctatgattggatgagatgtttgataaaagtaaaatgtgtatgaaattacatataaacagattattagcttattgaaagatctcataacattggaggaaaaatattcataatctttagcaaaactagtagacttttgtttaaaagaataagataggactagttgtcactatattagcttaaggaaatgttggtaattattactgttgctgaactctggctgcttttaagcaaaatgacagattgccattttctaagtggaatatactaatccattagaccatggccctcttttaatatttagtgagaaattactcgcagttgctttattttaggttttttgagaaactcttaggccttgttttggtatcactgttaatcaaaatccttttcactttgattccaattataatactatattatcatcattttccatcttgcattttcagtggtggtggatattctattccacatttggtgctagtcctaagaatctttgtcacatgttatacatatagactgcaaaattcataagatataggtcctgcaaaaagtatagttgaagtaagaaaacttgaagtaactagaatagaatactttctcctaataatctcttaaatgctctcatatccacagtataaaattattccgtgtccataatcggtccaactactataaggagaaaattgatgtgtgcttaagaaaatatgtactaaatgattcatatttcacagacctacataagaaaaaaatggcacatcaggtaaatgatagttgtttatcacacagtagggaaaggaagaaacatgaaaatatcaggaaggagatgaaatgtctctgaaatacaggaagaatgacataatagcaagtagtggttctcaaacgttgtgcattggaatcacaggaaggatttgtaaaaacacaggtgactaccctattcctctcctggatctgccctctgcccactttactccctcccccttcaccctggagtttctgatttagtagaaaatttgcatttctaacaagttcccagctgatgctgatgctactggcctggaacaccacattaagaaccattcataggtagtattttttttaaaacatcgttgtgttgtgcttaacattgattgataaaggaatgtgcttttaacatctccttaaaaggtcccttagatttcctctagataaaagaattagtaatttcatctgcaacacatacaattttttttaattttataaaatttagttaaatgtttgttttacactgactatggaaacagcactattttagatacagaaagaaatcaataaacatagcctgtgttcacaattcactcatccttttgttataaaaagacttgaaattagggttatgttttaacatgaaaacaaaatttagccttagcttttatccatcttaactttagaaattatatttatgcattgtttatagatcattgtcattcgttgttgcttaagtgttcatctgattttatatttatgatgttaaaaatagactgctgaccaataaataataaaatatttacactccattctatttccctgtattcacatcctattaatgaaaaccactggttttaaacaaagttacttatttcataaaactcaccactattttacttgattctcaatatgagaatatttcatgactatttcaccaaaatttattcaaggaattcagaaggactctccagcagagcagaatatttacatcattaaatttttaaaaaaatttaaaaatggcaattgaaacttgtttaagagactcaacttggagtttcctgacatacgaaggcagaatcattttttctacctgtctgaatcagcactttgtaagtttacataaaattaaggattgtgacttctaagataggcatgctttgcaaatatttctctataaaagtggaagcctctttcccatagtgctcactttaaggctttctgtaggcctgccgataagattcactgctgttcaggtacataagatgtaatgtaattggatgcacatgctgggctttgtaaataaaatgagattgacacccagcaattatctcatttatctgatttacattgtaaaatcaggatctacactattgattagagcataattagttaattatgaacagggaaatacaaagttacatggagcttgagctcagcaggttgtactgctgaaaaatttccaagggcatgagcagatggaaatcagtttattaaagaacaaagcagacatgtttcaggtatggaaatgtctaattcttctctcatgctgtgaagagttgcttgaccttattgtgtatttttatatgaattgttttgtctcatctttcattttcttgtttcacatttaatcttgtaatctggctgccacagatatagctaactgaattgatcccactctttaagtgactattaaatacagatttggatttggatatttttctaattttttaaaattaatttttatgtgtaaagaatatttttgtctttcttactacccattcattcattattggctgatacagaagtctgtagtggtattaatgaaataggttcaagccctccacgttagtcttatatttgtgaaatgattaaaaaccattttctaattattttgtatagaaactgctcatgtaggtaatttgcactaaaattgttgtaaattacaaggaataaaatattgtacttattgatactaaatgttattccgtattggtagaatgcagaattttgtgcaagcttgtattatttgtaaagtgatttaactcattgaccacaatttgtattttctccatctgttaagatgtttaatcaaaataattggccactattcaatgaaagaactcatcgctacctgttaatagatttgcgtagatgtttgagctgctagtgagatttttatttaagtaatgacagtattcaagactaatttttttgaacattcttgtgatggaatttttacacagaaatgaaaaagttggaaaatccaacccatcagttctctggatatttagttttttttaagtggacagacataatagtctatattttcagagtccagtttttgttttgctttatataaacttataggggctacaagtaaaatgttccattggcataaaagataatgtgattatcacaatcaacttgatcataaaaatgtacatccttgttcaagtctatgttatggattttgcttctttctaaagtttagcttacaaatggctataaattatttgcataggaggtgcacttaattgtttcagttaggttttaaaaagtagttgtagtttactcctctaatgaaattagagatgttaaaccctttggaatactgacttttggcctcttaggcattcgatgaaataaatcagctgcttctttttacttgtttgcatattctcaatagtcaggtaaacacctgactaattgcttgttatatggatcatagcacatatgaaggtaaatcatttttttccctcttctttgtttagggtgctattcttaatcatatactaagtaagtattttacatacatatagactgtgtttatttggtcactacattttgttaatgggtaaaagaccatatattaagctactttgttatttacatctatatctgttattaatctgatagctaggaagttgtatttagtaagaatctaattaggtttgcttttatcttataattgggattcctttatgctctatagtgttaatgtgtacagtgtttattagaggcttaaatgatacttctttaagcatccagtttttattttattaaaaaatcttagtgtttctttacaggttagttttgtattcttttttaatattttaagacattgccttcctatttaataatgtgctattcgtataataatctgtttttattacatagacatttgtgttatttaataaagtatattgtgttatatccctatacttttgtgggtcaatgactgcttctgaaaaagttttttaaaacattttattcactatttattttgataaattttgtcctatattatgtgctgcatgtgtttccaagtttatgtaagaaataaaggtagaaaccataaataggtcaataactactttaactccattgcagcttttaggtagcagatgattatagtcccttacgagtttttttaaatggtctaaatttgcaacatagctcagggtttgttgggtgacaggatttgatgaagattacaaagtggtatttgtgtgtaaaattaataagccactattttggccatccacattgttctttgatttcttgggttcttaatggtatctcttatatttgtccacagtttattaattcttgcaagttctgctagagttcacttgtgtccagtaagatgtttctgtgattagcacatagagctatggattttttcaattcaatattctaagatagaaacaacagatttttttcacattgaaataattttgggacatctttacaaagatcttatatttgtatatttatttatcaccaaaactattgacttcaagattggattcttttctttttttccccttctgttttttggattttggcagttcctaagggtactactactttttgctacttagtcttgaagctgaagcttttatttacttttgagtgagctagaacctcagagaacttgcctatcacccctaattctgacaagcaaattctttttcctttggaatgcatcacaaatacatgagagttccacatgtcgactaagtaattctgaaaggtatcactaatgaaggaatcaatcagcaaggattaggtcatttttaaatggcatgtatttgttatcttctgataagctagcatataaaatctttctcttcctcttttcattagttcttgagctgaaagataatttgattgtacgagtagttgaaatcagcaacagattggaactgtgttagtgtagcaaacttgttcttggtttattagctggaatttcatagctatatcaacaagaattatttatgtacattaaggtgataaataatgaattatgatacacatgcatcatgatagttgcctcaagttatacactagaaatcataatttgaaaattattatgacacagagttataaagtaaatatgcagtaattaggtagtaaattgatgtgaactaggaaaatgttaatacttcatcaagaactttgattattagcaatctgaactctggcgcactacccaaaaacctaaagttaaggagaaaagactatagttaacaaacaaaattgagcccatttacttaactcagtagaaattatcattttcatgtatttttactgtcagtttacatagcctcagtaagttttagtggtctggtttctgaatccataacagattgttgttggggaatttatgcttaagcaaacacaccgaaaatatcaggaagcagtggctgatagttttcaggcaagtgaggaccctgaaaatctacaaaaattgaatacaagaattcaaatagaacagctgactcctggtcctcattccaaggacaaaaggctgacacactgctagacctgtagcagcatatgttattcttactgatgacctgagatgacaaatataaattatatttaatatgtttatttgatgaaacgagcaatgtgatttttaaatttcgcatcaaagatgattaaaactccagtttttatgtatgaaggagtatgctctcagttatttagaaatctcagccttctcataaactcagaaatacttatactttgaaggtttctatatccataggtttaatcgaaattttggctaatgaaaggtaaatatgttgtactgagaaagagcataaaattatgtgggcttgccagtctctttatgtcacatttgaacttagcttatattatttattattctttcttaatgccagaacaacagatatttgaacattttaactgcttttaaatatatttttagatgtgtgatattgtcatagtaaataaagtactgttggtcctattggtcctatttgattttatctattcctgtagctagaactgtcatagtaagcattttttaaagtcttgaatctacaaggtttttggaaaagtacataagcttattttattcataaggagaaagttgtagaggaagaaatgcataaacttaggacattcatttgtgttttaaacttctttatatctgagtaacttaattaagttgcttaacttttctgcaactcttgattccccaaatgagtttttggaagattggacttttgtatcataatatgaaatttctactaaaaatgtagatttacagtcccttttattatgatggtttcttaaagtcaattgtttttctttgtgtgttgtttatgtaagaagagcttcttcccccttttttcctaaaaggttattgaatagtagtttttaactttaatcaagtaatatatgttctataaattttccccttggtttcttaattgcagatttcttgacatttgaagttttaaatcagtgaaagataaacaataaagaaaatctgacagattggttgagaaagtattattgtttaattttttttaaactatgaaatgaggaatgtaatcccttctataagatgtatactctttgttatttgttgttaaattttggtcttgttattccaactgatgcaaaattctttttacaaagcactgaaataatacagatttttcttcattgtcagcaggatgagattgtctgaaacgaagaataggtatgatagttttcttagattttgcacatcataggtggcaaagacactatcaaaacataagtttttaaatgtactaggaagtactttgtaaaaccaaacggtctgaagaaagtgacaggtaaatttgtgagaataaaactaaattattggggtagtgtcttacctctttgtatatttaaatgttctgttttttaacatgtaaaggttatttttatttgttgtagattgtgttagcatgctataaatgttagaaagttcacttacaatctactttaacttgaagaaagagagaaatcgggtccaaattgtatagcattgattgcaacctagtgtagcctagtagaatttctgagttttaaaattttttaaataatcaaaatgtattttattgaattcatatcctggaattatatatgtatcttattaaatactttaaaatgatttaatgggcaaatgattaattctttaagttcacaattgaaattgttgtggttgttttgaacacatgattatacatatacgttcattcatatgctcttaatatttctactgtcagtgttctaaatatttgttttgtttgttgattttattgctgttgtattttgtttttgctaaaacatttatttcaggtttagtttgcctttatcatcatcattaatttaatgatcttgtgagccaaggataaaattaacagtgttgaagttgaaatatacaatagtttgtctttttgtcttttcatgaagtagatggtttttatattatttagatacacctacctataaatctgtttaccctgcaggtgtgatgaatgcagactctgctaccattttggctgtttggatcctcctttgaaaaagtctcctaaacagacaggctacggatggatatgtcaggaatgtgattcttcatcttccaaggtaaggggagaagtctataagaaaaggtattggtgtccttccgtttgatagctttcccatgtcacacaattagcttctttaaagataattggaatatgaagaaccaacattttaaccagtacaccttaagaatatattgctatggttattttcttgctcttaaattaaggaaaaaacaactctactaaattatgtgaattttctctctggaatatttagttgttttacgtattctctattattgtaacatattaaatagtgttccgaaagcccaaacagatcactctctgctaacttaacacacttgagaatggcaggaaaattccaccctgagtcataataaattatgttagctaacagaataaccaattaaatagaattttatagatgttttattttaaaatataatatattgtaatatcttatagaatctgttcctttaaaaaaaaaaacaaaatagttttcatatcctaaatcttatttctgatatttattttagctgagtagaatgaaatttctataatctaatgtttaatagattatacccccaaatcagtttgaaaattacatctttttaatattaacattctaaacttacattgtagtaatacatagtttattttgtggtttgttaaagtgagtaagtaaatagccagactcctaatgttttgactgatttggcagaaatactgaatacatttgaatgaagacattctggtcaactgtagattaatccgatttttctttctcaaaaaagatgacgaaaattaactgtctgttgtattatggacatccagccatctttcttcaatgctacttaaatgatttttttggtcctagagtgaattaaaattgatcatgtaatcaaaaacattcttttatcattaactaaaatgatttgcttcagcttaccacagaggccttctgcaaaagtttatttattaaaaactgcaaaaagacatttggttatagaaagaaactaaactttttttaaatatcagaatttatttaaaattatacacattttttgccgggtggctcacacctgtaatcccagcactttgggaggtcgagggaggtggatcatgaggtcaggagttcgagaccagcctggccaacatggcgaaaccccatctctactaaagatacaaaaaattagccagacatggtggcgagtgcctctaatcccagctacttgggaggctgaggcaggagaatcacttgaacccgggaggcagaggttgcagtgaaccgagatcacgccattgcatgccaacctgggcgacagggcgagactccatctcaaaaaaaaaaaaattataaatatttgtatgaggattattaagatataatatttgcatatattttatttaataatcaagcattttaacctaaaattgtaaactatatagtagcaagaattattttccaggcattttattaaggcctagatttaagagagaacatatttaattttaaagattttattgcacagttcaaaaatgtattcccaaaattttatttaaatgtaaaaataatgaaacactatggagtttaaatagttgtcttacgagtctctttaataagtttttttaagtgcattttttgtttgggattttctcctacccccagcaaacaagttaggaaaacaatttttgaaataggatttcccaccttttttaaatatacctttttgcatatattcttttgagaaggctcaataatactataaatatgtagtattatgttaaatgttaagttatacagtaatgttgttaatgaacattgaaaaggcaagggggcatattttagatttgtttgaaacattgcatacattttgtacatgccataggtgccagtagccattggataaggttttagttttgttttcttctctaccacagaatgggtctttggactctgagtggaaatgcgttaggaaggcacattgttagaaaacttgctttatatttgctgtactctgtttgacctgtggttgaataccaatataaacaactaacattttcaaaattttataaaatatggtttctaatattggaatgtcacagcagtttactgtaaggaatgaaacaacagtgaaatgtatttgtattttcgttatacttatatgacttaatatactaccattttccaatgaaaaatgaaatttaatataatatttaagctgaaacttccggagacttaattgattcccttgaatatttgtgctgcatcagtggtttttcttactttggaagacttccattcatgaccagtgggtagtaaatttctgttggcattttcttctgaaagatgtttgctagtattacagcctaagaagaaagcattgatagataatgtcatgctttataattcagtgaatgctgcagaagcttttacattcggaagctgtatattattaacatccaagtcaagaaaattagtgacatcttagggcttaaaagaaacccagaatgaaagttcatatgctttgctttatcctttattctcctacatttgcttaggtggaatattatttgctaggtagcactgggtatatttgccatgttcatatattttaatgaaatgaaaagctaaaggagaaatacttattgccataagaaaggaagtaatcaattgcaaataaatttagatggtaaaatgtctccaacttctttctctgcggtagtcatgttgttaagtccaacaagtcttcacttttatttgaaattttgactccctatttgttttgcctagaagtttagataatacatagcatgtatagttgaatatttgctggaaaaatgaattgcactttaacattttgtctaaattctgtggaccaggggaaactctaaaatattgctatttatactgtcagcagctatttatatattactttgtctttcaagtaacaagtttttgatatggggttgtatgagggcaaaaatttctatctttacccctgtctattacttttatagaaattccgtaagtctaataagattcatcatatctgaattcataattttttgttttagcacatgaaagcggaaatacacctaaatatttagttttaataatattgatttaataacaattcacctaaaagtagaagaatgaccatttattatacccatacccatgaagtatagcatgataagactttctctgtctcatcaactcttcataaacctaagtagtcattttgagtttcataaaaaatagtcagttacatggacacaaacatatccacacgtatttacatacatggaggcacaaatatacacacatacaaatacacagagacacatacactcatacacaaaacataccttctcgcataggctatgcttcaaagccattgattaagacagcagccacccagacagtgcactatgcttatattcagtggagctagttcattgctacctgtcaccctgcattagggcttttttttcttgccctttactgtgttgtgaaaatcctattgttaataaatgccacatgcctggaaaagaaatgtgttttcttctttcttaacctcaacttttctcttatttttcccttatttcttcttccatccgttcacccaagtcacatatctggaatcatcctcaagccttccccatccttatctcacatagcaaatcacttcctgagtcctataaaagttttcttctttaaatatttctccagtctgctctttgctccttttttccactactactgtcttgatttagtgcctcacttcttctcattctgttatggttcttcctgtttgagaagctatctgaatagatgggccagacttatcccctttttaaccattctgcttactagagccctctaaatgaagtgtttgccccacagtagatatacaaaatgactcattaaattaattctatataacatctttttaaattttcatgtttgagtctattttcatgatttaaataagctagtactatagaacaggtacataaaacgtcacacatacatatttatgttgaggtgcatacttaagatgttttttctattgatttgcatcatcaaaaatagctttctgaaaatgtagttatcatacctctgcttgaaatctgtcagtgttttttcattcttcttcatatccaaaataaaatcagccagatcaggaagttaacattgctatattattactgtctgatcctcagatttcatttaggtttggctattaatcccagtaaggtcatttatggcaaaaggattcggtatagaatcacaggttacatttagttttcatatttcttttgtcttgaatctggacagttccttagtctttccttaactttcattagcttgtgacttttgaaaattacagagcagttattttgtagaatgtatttcactgtgcatttttcaaatattttcttgtggtttagattcattatgcatctttgataagaataccacagatgtgatgctgtgtgcattctacacaaaattttgatttgaattatagataatgatgttatatcttaggagttgtctgctagttttctaattaattagtgatttctggggaagaaccttcagactatgtaaaaatatcctattcctcatcaaaccttcattttctgttttattcagtggggttatattgaatgttattatttattgttattttcaaattactacaaattcagctaatgaaagccacttcaagctgccttctatatccttttgacatgattccgccaatcttcaggtactttcttgccgaaggtcttccaggctcagcttatctactgtctctatctccattcctggaatcagctgtttctccaaggagcccaggttccttttagtggaaaacgatatttagaaaccaagatctggtgtggtcattgttactgggatattgcttttcccggttcttctcagtagaaaaagccaaggactggatgtaggtatacgtattcatacacagccacacttacatctatatttttgctttcatagacattgaaaactaattttcttccttttcatctttgtaaataactcctttgtaaataactctctgacagaaaactggctcccattttccttaatgtatactcttgtatcattactctcctgatatgaaaccaatctcttatcaccctctactcctgcccacatggatacctactttgcttgtcatttgataacttttaaactgaattgttcaggaagaggagagaagggatgaggactgacatttgtattttttacaagttccacaggtgattttatgagattttatgagcagttaggaataagaactactgttatacctagttgttaaaaacttcagtttttacaaagttttgaagctaaaaattaactttttggaattttaaattttaaaacaatgtgtataacccaagtcaaatgtcaacaaattgacattttaatattatattgtatattgccatataagatataaagtagacttagtattgtaatttaaaaagtaggacatagctcatgcttcagtcttttccaggatattcttgataaagatctcaacaacttgtatctgctgaaacacttaaaatgatgataacttgtcttaatatggttacatgaacatgtataaatatttcttttaaaagtgcttcctccaggtcatatgtattcacagacgccactgaggatttaaatatccatcatgtactttatcgtgactatgtcagttactattgtagcttttcatctttgtttaaagctatgttttgtgagaagccatggagtatacatgacaggtcattatctgactactacaaggtgagctgtcttagcttggagacttctatttggttcagtcttatttgatctttctagtatgctacattttttgagtagtaataatttttgaattcatatgcataggaatttcatccaagtccttataggagattttctagaactacaaatgcgtgacagactagctaaggcgagtgatatttctcaataatcatttgtattaaaaatctttaagtagaggacatacgatatttttaattttggttttattttttatcttttctgcattgaaataaattctataactatgcccaaacgatatatataaatatgtatttatatgtataaatacaaatatgtatttatatgtataaatacaaatatgtatttgtatgtataaatatgtataaatatatattttcaagtaaaacagtcattgagaattttgtgtctttaagaacggaacaatctcttcaggagtatcttgccacaatacattaaacaagcacatttaattgaacttggtaatattggaaattgaatgtctgaattttatgcattgagaagatttatgaaaaatataaaattaaaatgaattatcctttaaagttctttaaaatttgaagcatataactgacgcataaaaaagagacttttaaatattttaactattcatttgacctctgggattttatctgacattagattgaattttaagtttctggattttatatggccgacagagacatcatttttaggtaagatgtataccactcagctgtctaaattcagtactcttctagcgtttgtgggacaagcttacaaaagcttacaaaaatgtgcttcatggagctttactgagttttggtttgcctttttactaatacagatatgtaaaaagtctggaaaaaaagttgtttctattgtgtcctatattagaattaaatagaacaaatctgcggtgttttgtagacttactaaaagtctgagaattaaaactgtggtatgtggttatcctcaaagatggttttagttttgtattaaactttagatttcctctttcctggtgggtgggataaagcccacagatttccagttgatcctctactgtagaacaaggtcctcaactaagttcaggcagttgctaattgcttctagcatgttccttggcaagtgaaattgtttgtataaatgtcttttaatcccttagtttctaattgagtgctgtactttgggactattaataattatttgcttaacaatcccactaattatagttggtactttgctttaaaaaaaaaattagagtgttttattgttcatactgaacatttatgtcctgaattgaacttattagtcatcattattgcctggtcaagtaggtggttttattaatactttattgtcctagacgtgttttctgaaacctatttctagacaatgtttttatcaagtaatcattttcagtaaaacatagattgtttattagtcattcttaatagtattaatagaattggaatcagtattgatctgtttggttctttaacctaaggtagttttcatgggaatcagataatatatattaaacgtatatacttcagtaaattattccttaagcatcattttgaaaatatgatttattaagataagtttgtcagtgtttatgatacacatattttgatatatttaaatatcaaattcacagagaaaggaaaatggttagaacatctaaaaatagaccatctttcactatattgataatttacaaaattgaaaaactaagccactttctaaattacgcttactacaaacttgaaaaactaagccattttctaagtggcatgtggcctggtgcatttacatagcatgctgtggaataccatatgtgatgagaaactaaatcataactgagataattaatcaaagtacagtaggttgccatacatataaatgtcttttaaaagtcgcaaacctcatactgtcctgtagtttaaaatttttttgtgtgtttttattttttgttattttgttatttcagctactaaaatgctgagagttaagataaaggacattttattacggctttacaaaagttaataaaagtatttttaccttattaacccagcatttgaaatattaaaattaggttatataatcaaccaatatatcatagatcgtactgttataaaattcagaagtcgtgtggaatatattaattatgtaaatttttattccagtttttatttgtcgtgtgagtgtgagagacatgttcattgtgaaaagatactcctagtggaattaaactattctcacaattgtgaaaatatcgcctaaataatagaaaaggcttaaatcctggcttcaaaaaaacaaagtgagattgcatgcattgtagatgtagatatagtgagagtaatttggttcctctaatttattaaacattttaattagttcataattttataaaatatttgttaaaaaatattgtttccaacctacatattgtggtttaagaagtgctcttttgcttatgactaagagacttcttcaagaaaactttcaaatctaagccaagaaaattcgaaaaatgaactctggtagttaatggaattgagttctttgaaatcaaatatagttgagcattccaattttgattttctgatggaatctttcctaggtgtgataagttgtaaattagaggttagaaacataaagtgcattatgccatgttaattgccttttaatatattcatttttgacatttctgaaattagattgtgtatctataagcagtttttatctttaagtgataatagttatttttcccaaaaaattgccattaaattggcggagttcttataattggatgcgtcgtatagtaggaagatagagtaatttaaattatatagaaagttaagtatgcaatttggtgtagatgaaagtgtttttctgagctttgaaaagaaacaaactgggctcaggtcttaactatttatagttacttgtgaacttcagcaagttgtttcacctaacttttaggttgctcatttgtagaaggttgaatggcaatactgggaagtatagaggtgctcagtaagtgacaagcattttaggcacagagagaaaagttcaaaattagtgataatactctgattttcaaatgttaagaaatgttttttaaaagtaacctgaagagtaattttctgtttcattttctgccttcacacacatcaaatgaaaatctttcctgtctcagagtttcacactaaacaggggaaggtcaagtctaactttttcatgcagaaaaatgtccatttgttataatttcttggtagcaatgaaagctatctttataattaatgtatttttaaaccatggcattcatggctccctaaatttttttaaagtatatgctatcctatcagattttctaaatgtactgtagttagtacttttaatattgatggtaattcatatttcactttaaatataggattatggtcctatgtgaatcatgcactaatatatttattttataagtagagagaatgatatttagaaactaaaggtttgttttgtttaagccatatttaagccactgactctgcctggtatgaataataggaaaagatctaactcatacggaaacttgttttttactgacgacatattttagtaacaagtgaagaaatatccaagaaatttttcttagactataaaggcatatttttttctttgtcaaggtcattaaaactgtaaacttgaaactgaaatgaaaatacaaagtaaatccagtaaaatgtaaacgtaacaaaccactgaagacagttgtaagacaatttataagtccactttgtcaaggtgtatgcagtttctgataacaaaagtttcatcatccctaaagaatgactttttaacaggtaaatatcagcaacacaccctttttattatatacatgtgggatcttttaaggatggatatgttggaaaatctgggctagcactttcacattccttgttgagtctggaagttaaggtttttaacttttagagcatattgtataaacacatttagaatttcaaagcatgattatgtgccatcaatatgccttacagcatttatgcaaaagaaaaccttacacttaagtaaggaaatgtttactaattctccgatgctactaattcttttcttttagaaaggtagactctcagtacagtagcctccccccactgcctacttaattgcaggggttatgttccaagacccctagaagatgccttaaaccagttattttttcctagacatgtcttttcagtgaaaggaaatatcttatggcttccctttggcatatcaaaattgttaacatcactactcttgcacttcggggttgttactaagtaaaataagggttacttggacacaagccctgcagtactgtgatggtcgatctagtcactgagacagctaagtgactaacgagcaggtagcacatacagtatggacatattctgggcaaaggaatgattcatgtcccaagtgggaacaagtgggacaacatgagatttcatcatgctcttcagaatggtatgcaatttaaaacttccaaactgtttatttctggaatttttttttttctataagttctggggtacgtgtccagaacgtacaggtttgttccgtaggtatacatgtgccatggtggtttgctgcacctgtcaacccgtcagacgttttaagccctgcatgcattaggtatttgtcctaatgcacttcctccccttgccctaccccccgacaggcctctggtgtgtgttgcttctctccctgtgtccatgtgttctcattattccactctcacttatgagtgagaacatggggtgtttggttttctgtttctgtgttagtttgctgagaatgatggcttccagcttcatccatgtccctgcaaaggacatgaactcattcttttttatggctgcatagtgttccatggtattctggaactttttatttactatttccagatcacagtttaccatgggtaactgaaacctgggaaagcaaaaccacagttaaggggagattactgtttgtactttttatatatatatatatatatacacacacacacacacacacacacacacacacacatacatacacacacatatatatatacacgtatatatatatacacgtatatatatatacgtatatatatatattgtgtgtgtgtgtgtgtcaaagggtagtgattcatacatataaattcttcagaaccctatctttatgccctacaattatttccctttctaccccctgctgtcctgattcccagtagagggaaccattaatgatatacttccttaatcatagcatatgtttctttatttgtttcccttcatgttactttaaaaattgaattatctttttctgggaatatcagatatgctgttgttaacacgtttctccttggcaaaatgccattaacaaataaggcaaattataagagtatggtccacattgtccttccactgccctatagttccagcttagtccagtcctgctgtatattaaattagtagtagcttcagtagtgttttcttggtcaccaataaaacatgctccctttgtcttttccaagttctgaaattgcccagctgcatgtccaggaacttctctgagctgtaaattcagtttgtcaaaatcaagaatcttcctctattattctgtgtcatgtttcatccaccttgttggtaatttcctccttttaaaaatacttctttctcgccttcagtgaacttcttctctcctgcgtttgccttttcttagcggaccatttctttggtttttttgataggcttctctaggttggtttcacagtctttttttctcgctgcagttgatagcatctatacccaaagctcaataccacacccattttgcaacaggaaatcttgggatttaggatttaagtgatccatctgctttctctgagttaatgtccctcaagagagacttttttgccttttaaaatatccttttgtctagtgattaagacaatatagcaataaatttacatatatggtttaattggccgtttcctcttatagtctccttttactaagtagtttaactgacatttacttaagtaggcgaatgtatattaatttgatcttcaaattaaatattctgaagatatgattaaatatgctataattaaaatgttggactcttgaattttgataaactttaaagctagaaagttggctgggcgcagtggctcacacctgtattcccagtgctttgggaggccgagacaggcagatcacaaggtcaggagttcgagaccagcctagtcaatatggtgaaaccatatctctactaaaaatacaaaaattagctgggtgcagtggtgtgaacctttagtcccacctactcgggaggctgagacaggagaatcacttgaacccaggaggcagaggctgcagtgaaccgagatcacaccactacactccagcctgggtgaatcgcttgaacccaggaagcggaggctggaatgagcagagatcgtgccactacactccagcctgggtgaatcgcttgaacccaggaggcggaagttgcagtgagccgagatcgtgccactacactccaccctgggtgacagagcgagactccatctcaaaaaaaaaaaaactagaaagtaataattcaaaataggaattttgtttaatatagtaaaattgatatcctttatttaaaatattgcttttaaaaaatacatgcctctcactgtttttctccttactttttccttttcttttttctaactccacttttctgaagaaagttggtatcaggaaaaaaaaatacactttggggttttaaaaatattgtaaaagtaataaatggtcattgttgaatattggaaaaaaattttaaacataaagaagtattttaaattatctgcaatttagcacctaaagatactacatttctgctcatgttttggtggtatgtcctactacaacctactttaaaaaaaattacagttagatcatactttctgttatataatggtattttgaaaaatataattgcatgtatggcagtttaccatgttgttaaatactcttacataatctatttttaagtgctgtacaatttcttatacaaatatacttttaatgtaatgactagatcaaacaatataaacatttttaaaataagaaagtatcatactaataataataatagaagttaacattttgttgagcaccactatgtgcctggcattttctaagcatttaaaatgtataattctatgtaatcctcaccacaacctttaaggtggttattgtttttttttatctcctttctgcagatgaaagaaagaaatgagattcagagaagttaaggattacacagctaataagtgatataacagtaattcaaacccagatctccctgactctagagcctgtgttttagaaactagattttatatattaaaataggtattttctatttcttattgtaagagattctcaaattagattttgtcctaaagccattttagattttcatcatgtaaaactcagataatttttctattataaataaacatgacttctaatcggaaagggaaaaatattattaagtgggatctgcttttgtctttctaatggataggggaataaaacacaaagatattttaaaacaaataagttgattaaagatggtgctatggtatggtgtgggaagatgaatgtggaagatgaggtaactcaactcctcagggccctttcttcatgaaattcaattaaataagatctgtgttaggggaggtaccatttgacaatatggatgatttatgtagacacagcagaaactaatctattgaacttggagggaggtaaaggaaagggatctaaaggtgatttttttttattagacactaagcactgtattttacctcagtcaaatcttagtttttaatgtttgtcatgagttgtgaagtttgaaaaccagtactgtgaaaagtaactacagccagccacactcaatccctttgcaaagatagtttaagaatattctcatttgtgtagtgtcagctattatactttgtgtacactggcagtttttgtatgtttttatcctagtatcagcattcttttgcagtacaagtttctcttcttcaaaagaatacttgcttctaagtgtattgagtataaatacaattcagtttacactcgtttgtgttaattcttttgctgacaattcttttgttaattcttttgattattaaacaaggagtacaaaattattacctcacctataaaaggtttagaaatggttcctgcctcattgacagataaaggtctgtatgtaactgtttttattctactatatttccacctgtgacctagctctgccacctctttttgtgatttcagacttttacaagttgttttatgtttaatatattgttctctttttttcctctggactatattcatatgataaatctaatctctggtcacctaagatacaacctattttaatattttctctgaaggtttcttaaaggtttatattatagtgttataccttcattgaaattaagtcggttttttgttaagggtaccttcaataatggctgcaaaagattatgtgcttcactggtttgaaaactctttaaagtatgcttatagaggttaacattttaagaatcgctttgaaaagttcaagctgtatcaaagcacttgtcagcaatgtgttcactttcgtgttcttgagggctggaccattctctcaatttttaaagaccaatagtattctttatattctgtttctaaaatcagagttcaaaatttagatgattagttatttgtaaatcatttttccaaagcacagatgtattggtagcttaatgcaggtaataagtataaggtatttcagcattatttctttattttaatgcagcagtttcaacaaccaacagcaaatcatcttaatgactcaatttaaaatttatcctagtatccagtcatttgcttaattattaatttttaccacttaacacaattttcagagtgtgaatgaagtacatatttttaggatacattatttactcttttataagcaggctaagtgctgtaaaggatagatatttctttacctttccttgtgacaatgttgaagctttaacctgtttacagcataaagactctgttaagtacaatcttaatctttattttttagtattctcaaatctactacatatgaatctaatttttgcagtgaaataaactttctctcttcgttatttagctgtttcaaaatccctaacttttgtcttcctgtctactccttcctttctccttcacatttccaagcagtatttggaaacatgacaatatatttttcaagtatgtttatgttcttttatcaatgaaaagcttccctaagatagcaatgtccctaatagggtaaaatacagttagctgtatttttttaacctcctcatagcaataggatgaaaaaaaaaaaaaagctacagtctgaatttgacatcattaaacaaaaactcttcaaattaaacagtataaaaagagacaaaaaagtggttttatttgttcttcatattaaatgccttaaggattctcaagtgagctatttttaacagaccactcttacgtttttattgtgatttaagtaaattttgctcttaattccaagacaaggtacaaacagaaatgagctcgattccttccatcccagtgcctttaaacatgctcatttggagcttcctttttcccccagttactctcagacaaatcttacagcttttccagttacctttaggtattaatagtcttttttttaaatatcaaagtccagtccagtttaatgtcaaatcttctattctcagcagctcagacctcctttaaactgggaaacctgtagtttggaagtggggcattctagattttgattcttgcccctccttttttttttttgactcattgctagagcttttctatgtagaggtgccttgatatgagagatgccttctgtgggttacttgtgacttccttttcagaacttagttccgtttatctcttttttgattggcattatccccatcccaccaacgctgtcctctttggctagattcctttctagagtcttgctctttaacgggcccacattttgtcctaggggaaacacacaaccccttgccttaacaagctcagaaagaacagccattcccactgcagccatgcatctttgctttgctactacagacagacaggcatgtatcatcatctagtccttgtcctccaaactcccaggggacaaactctgagtaatttttagaaaattcctcttctgagagggacttcctttaaagtacctcttctaaagaaatccttactctccagtttcacctttcctcattcttcagacttctcctttaatgagttaccataccaaattttgtgtaagactttgaagaaaatattttctgaagtattttatcagtgcatatctttaaaaatgaatagcttagaccatttacgagagattgagaaaatttcactcacccatgagtcctaaatcaaatatcctatcaccatgacttaaatcatgattttttttttcataattatcacttctttcacttcttcaaacactttataccagttcctgaactcctctcaagacctccaggccaccatttactctcctccacctttttaaagttgtaacttgacattttaatgtgcactttttaaaaccattagagtcctccattgtaactgcccaacttctcaagattcactgtattggtttatctcaactgtttcttttttggccagaaataacataaaatatatgtacttgagttcactacaaattcatgccttctaatttaaaccagacctcattgctatcttttgtgatctccttatcagatttcttatagcagttatttcaaatctttgacacatgcatcaaggcttcagttttattcccagcagacttactttttcaagatgatcttgtctcttattttcactgaggaaaggggggtgatatttttatctttctcctctcagccttaaaaaaagtctttgttatttgccctacttcattctatttcctgtctcagaaaataaaagtgccactacctcctctgttctttattccaaacatctcctttctcttcagtacttgtttctgttctcattaagccattctacacactttttcccagtcactctttgggaaagatcacttttcaaatttccaggtcagaaaatccaagaaaaaagtaaggcgctttccattgtctatactatagtatagacatcagggttttatccctgacattcaaggccatatataatctagactcatgctgctagtattttagatgtaaatcagtctctctctctccccccgcccccactgctttcctcccgttctccttccgtctctcccattctccctcctctctccctctctttttctcttcccctccttctttctcactactcttttgcaaaaagcctcatatatcatcaggttttttttcttcttaattaaatgtccagtttaaattatagttttctagttgccctacaatccttaggcctagattcaatttcttttgcactttttttgctaggctgttcatttgacatttggtagactttttttgtcatgctattgatctttttatatctgggttatttttaccagctagattacaaactctcttacaacagaggatatttctgtcatactttcttaaagcaaggaacctggatgttgcatattttttctaagatagatttaagattgttcctggtagttctccactgctagcctattttctcttagttgttactgaaattatttttaaaacttttattttgccaaatggcagtagaggtggtgcaggttctagtttttgccttagaggcccaaggctgtttattgaaacaacaaatgatgtttggaacataaatttctggcagccatgacccaaatatgcaaaaaagaccaagaagatatctgttcagcaagtttaaaatcatattctttcttagattattttcttatgtagttcactcagcatttctgttaacatttaatagtacctgttcacagatttctttggaatagacacagttttaaattaaaaggaaagtaagttgtctccttcagaataaagaacactggcattgtctaagggtataaaactaatccaaatgaaaatgcctattttgtgtgtatgtttctttttttttttttttttgcctttacataaaatttaagagacagtaaaccctttatttaccaaaatattttctttctgttgatggacctaccaatatattagcaataggagtctcatttttattggataaaaatctgtatagtattcagaaggtgtgccacatacttcactaggtgcttcagatgtagtaagatgagacataaatcttgcccttaaaaaacttagatgctagtaggatagataaagcatgtatgcatttaattatgatatcaaatttaaagtgttaaatgccattaagaagtataggtaaggtacagtgggaattttgagagtaggatgattgctttcagcaccaagcaaaaagagattggcaaaaaatacaacatttcaatagaattataaaggctagtaggatttgacagaagtattaattaggatatgctaagttatgcagcaaaaaaaagaatcccaaatttttagttgattaatataagttgatttctcattcatgtaacgtatcagtacaggttgacagagcagctctgctcattatagtcacttggggacccgagctgatggaggttttgtttcaacatatgtggtccacagcatagtagcaggaaataccacaaatgtcacactggcttttaaaatcatatctggaatttgatacatatcactccaggccacattcctcagatgacgcagtcaaacctaactttaagaagccagtaagtgtaatgctaccaccatatgctaccatacttccaagacctttctgggattcattccaggattcaaggaaatccttggagagagagagaacgtatatacaatttatatgggggaaactgcataatagtgtgaaatgtaatggtagtagtaatagctgctaatatgttctcttgatttttttctttgcttttttaaaaatagccttttggtagtatttttgatttttttgtttctttttgagcagttttaggtttatagaaaaatggagttaaaactacagatttcccatatgccccctcatcccttcctccttcccctagtttcctctgttaccatcttgcattcatgtggtacatttgttaaaaattgatgagccagtattgatacattattattaactaaagtttgttgtttacattataacttattttttgtgtggtacattctgtgggttttgacagttgtaataatgacacatgtccaccattacagtgtcatacagaatagttcactgccctaaagatctcctgtgctctgcctattcaccactccctctctaccatcaaaccactggcaaccacagatccttttgctgtctccatagttttgccttttctgaatgtcatatagtatgtagcctgttcaatttggcttctttccgtaagcaatacgcatttaggggtttgtcatgtcttttcatgacttgagagcttttttttttaatcactgagtaatgttctattgtatggatatgctcctattaaaggtaagagagagtacgtgtaaaatttgtttgttttgtacacaacagtcttgtttgtttccaagttttggcagttatgaataacgctactataaacattcaggtacaagtttttaagtgggcaccagtcaacttagtcaggaaataccaaggagttccattatgggatcatatggtaagagtgtgtttggctgccaaactgtcttccaaaatggcagtaccattttgcatttcatcccacaacaaatgagagttgttgttccatatctttgccagcattgatgctgtcagtgttttagattttagccattctagcatgtgggaagtagttttcatttgcagtttcataaggacatgtagtgttgagcatcttttcatatgcttatttgccatatatatatcttttatgagatacctattcagatctttggcctgttttttaaattgggttgtaaaattattgtttaattttaaagagttatttgtatattttgaatgccagtcctttatcagatatgtggtttgcaaatattttctccaatttgcaaaatattatcactgttttttgcagagtagaagtttttaatgttaatgaagtccagcttaatttttttctcttatggattatatttttggtattgtatcatcaaatttgtggtcacctagattttctactatgttgtcttctgggagttttatagttttgcattttacatttatgtctgtgattcattgtgagttaatttttgtgaaaggtgttagacctgtgcctacgttctctctctgtctctctctctcattctttctttttgacatttggaggtccatatggtccagcactatttgttaatattcaaaagccaattgctttcttatgttacaacaatggactactggaattttttcttgttgggtttttttaaaaattttttattgtgtatatttaaggtatacaacatggtgttctgggatacagatatatggtaaaaagttactatagttcaagttagcatatccatcatgtcacataattaccatttttttgggagggaaggttttggcaagaatagctaaaatctactcattttgcatgaattccaaatacagtacaattgcatacctgtagccctcatattgtatattttatctctagacctttttcatcttatatatctgctgctttacatcctctgacctctacttgcccattttcttcccactgataaccagggttttgttctgtctgtataattgagattttttttttttttttagattccacataaaagtgagaccatttaatatttttctttttgtgcctggcttgtttcacttagtcttgtgtcctccaggtccatccatgttgtggcagatggcgagatctcattcttttttagggataaataacatctcatttatataccacaatttctttacccatttgtctgttaatgggcggttaggttgtttttgtatcttggctattgtgaataatgctgcagtgaacatgagagtgcaagtatctttatgaggtggtgatttcatttcctttgagtatattcctagaagagggaatctgggtcatatggtctttctatttttaatttatttagaaacctttatagtgtttttttataatggtataatggtaataccaacttacattcctactaacagtgtacatgagttccccttttctccaccccctcaccaacatttgttatcttttgactttttgataattagccatcctaatgagtatgagatggtatctcatagtggtttggatttgcatctccctaatgattagtgatgttgagcaccttttcatatacctattgatgatgtttacctgttctttggagaaatgtctattcaagtctgaaatttaaaacataataccatttgatttggcaccagaaaacccatgaaattcttaggtatgaatctaacaaaatatacacaaaacctgtatgagagaaactacaaaattctaataaaagaaataaagaactaaataaatagaaagctattccatgttcattgacaggagaaataaatattttcaagatgtcagttcttttcaacttaaactatagattcagtgcaatcccaatcgaactctcagcaagttattttgtggattttgacaaactgattctcaagtttatatggaaaggtagaaaacccagaatagccaacataatattaaaggagaacaaagtcagaggactgacactacccaactttaaaacttactataaagctacagtaatcaagacagtgttgtatttgtaaaagacaaataggtcaatgaaacagaatagagagcccagagatagacccacataagtatagttaactgatacttgacaatgcagcaaaggcaattcagtaaagaaaatatagtcttttcagttaatatatttttaatgcaaaatggttgggcattagattgagaccatatcataaagggtggtaaatattatgtcatgagtttatagccactgaaaatctatttggagcccattagaggaagttagggatcagaagaggacaggaaaagctaatctccagagtgcttcccctagcaagacactcttttttcaaaatagaacatgcaatatggagtttagggcagtgtccttactgcacttttcatctgctcacagttctgctaattatacatttggattatcctcaaccacaaacacatctttatattatattgcacatattacatcataaaacgattcctcctggatgcttatctactaaacacaacaattgcagtatgcagtgatagaaaaggaagttttagtttatagaagagtttgtaggaaataattttggagtttgaacttttattaaggtaaggactaacctggaccaggtgacccaagtgaggaatttaaggatattaatcacttaagtagaaagctactaagtagtaagaggagttgacaaattagccttcccacttaaatcgtttatcaaagactatccagtgcctgggaaatttttcttgtcttgtcaggagtcagaatttgaaataggccttgtggtggggctgtaacccattaaaagatttttttgggcagcgttctaagtttaaaatgatgaactttacagtaggcttgtagaatctaacttgcttagaaactgagtactgcctgtattttcaattcaaaaaagaccttaaaatctaaagtttgtgagtgaacattttgccgcttttaaaagatatatctttaaatatattagaattatagaatttaatagctaatatggacctgaaatatcatttagagagatttgcaaactttttaaacaaaagattcattttatattgtttgctatataatttaaagatttcatggagtaaagcatgctgataatttttgctcttttatttttagatttaaaaagttaatcagtatccactaaattgattttacagccacttgtatggttaaataatttgaaaaatattgatctcatccaagcgctttattttacagatgaggaaagtgagacttggagcggtaacctcagagtagccacaggatcacacaactttttgacagctagttaatgacagagctatgaccaggtcagttctggtcagtgttctttctgccatcatttattggttcagtctatcattaagcacttcagaaattatcgtaatcttgtcattaaatctgttcagtacttaaaaacaagtttagtgctgaaaagtaatacataaaataattttgcaaaaaaacatgagtaaactcaaactatagaaggatacacaatgaataattcagtagagcaacatatagaccaccaagtaaatttttatcaaaagactgaatgcattcttatgtgtgtgtaatatgaatacttgcacataaacatgctgatatctttgtcctctggcaatgaaacccacctttttcttcacttgacagacccttctaaggtctctaacttcctctcagcaatatccctcattgcatctgttacaaaatgtttcctgagaagttagtttcttagatgtactcaatgtccctgtacttttagtcaaatagtctccttcaagaatgcagacttggagtcaaattatttaggtaactgtgtaaacttgggcaagtggcataatggctctgtgcctcagtttcctcatgttaaaatggagacaataaaaatacctacttatcagggcttttgagggggggttcttttgtcactttcttagaatctagtgatgatgacagtgaacctgaccaatacctaattcattcttctgttcagctgcacatgtccacagggaaaagaaatggttttcattaagataaaggtgaaaaatatatttgtaaatagattaatacttctgaagcagtggaaatagcacatctattgtgtttttcatttctttatttgaagaccatttaaaattattttgatactatgctggctgaactataatttttggaaatgctctttattttaaatttaattttaatcagtgttaatttttgtgtatttttttacagtaaagaaatgttctttttttcccattgaaactccatctttgttaagaagcaacaatttcctgcactggcaatgttaaatgtaactatagctttcaattcattgccgtggttatatttccacagcctgctgtaagagataaacctattgcaaatgaagacagccttcattttccttctacctcaggccacacagaattgattggggtaataaaatgacagcaccttgtaatatacggaaggctttttaatttgaaaaccagttctaacctgattcaaagcttgtttaaagctaatttatagcttacataattttcagctggctgaccaaggtaaaggatgatgtatgaaaactgataaagaattaatattcagacattcctcgttaaagttaactggtattaaaaaaagaaagagaagaaaatgtagaaaaaaattggtaagcttttggtatacataagtaacattgttgaaaatagtttacacttctgtcatctttcaaacctagcttcttgtcctttcttctatttgcatttcttacatggtaaaatccttcatttctcatcacatattaaggtcaatgtaaggctgtaaggtcaatgtggtcactgttgtgacttccgcagtgccaaatctattgtatgccgtggtgggatgctgttaaatagttctggtctgtcagaattttaattataattttttttcaagatgcaaactgaaggaatttagaacttttcatttttatttgagctgaaaaatcagtattaggccttttgcctttggctgtttttatctctttattttagcatatttaatcatttaacccacaaataatataattaccagagtaaagtatctgtactatgaatgaatccagattttcagaaatttcatttcaccattcacaagtaaaaactgaattacattttccttttttatgtttaagtcttttgcatagttattactttttatcttaaaaaagtggaggttgagcatgtcttttgccatgttctattctaacatcctagaaagtatcaaaattttaagaaatgcatttgtaattcttaatcatgtgtagttcactttgtacacaacaaatgttttgaatatgtagggtaaagaaaaaggtgaataaacagatgtatataaacataagattagatatatgagaccaagaaattctgtagtttcaaaaagacttgtctagatatttagttagacattaagaccaaacatttgtggtctaattatgatgtctgtggtcaacatggtcataattattttaattacttaaaaaaaattatgaactagcacatgcttattatagaaaacttggagaacaattaatatgtaaagataaaaaatattcaagaaataaccactactaacatttcgttaggaccttaatatataagacatatgctacgcattttcagtggggacaaacattggttcttatgggggcaaaaatgcaaaattaaagtggtttgtgactccacggcttaaacccttcccaagaaaattttattcttaagatttaatctctcaggttttcttgggtatcacacaagcattactgacattgagttcatggaaaatacagaaaatatatacaaaattaatgccacagaacatgacaaatggctgtgaggggaggacttttgatcaattgcttgatcttaaacttactttagaagaggtggccagtgcctgccaattggctgccatgtggatacttcttatgcttgatcttaagtgcttttgtgtgtgacagctctacacaattccctagttaagagttacttctcaccaaccaaaggtttaaaaagttaaagttcaccaagaatgatttttaagacatttatttaatttttttcatttactttagctggaactgcagttttaatagttttgaatggtttttttaaaacttgatttaactttattattaatatagttctaaagttaaacattaatcacttttacattttaacttaaaaattcttttttttttttttttttttgagacggagttttgctcttgttgcccaggctagagtgcaatggcacaatctcggctccctgtacccaggttcaagcgattctcctacctcagcctcccgattaggtgggattacaggcacctgccaccacgcctggctaatttttgtattttcagtagagacggggttttgccatgttgtccaggctggtctcgaactcctgacctcaggtgatctgcccacctcggcctccctaaagtgttgggattacaggcatgagccactgcgcccggccctgttgagtcattcttaatcttgtattaaataaaaaggtaacctttatacctagctctttccttgtataaagtacagctatgcatataaacataaacagaccagcagtatatctgtggcattaaaatttcatgaggaaacagggaaaaatacttctttttttttttttgagacggagtctttgctctgtcacccagcaggctggagtgcagtggcacgatcttggctcactgcaggctctgcctcctggattcacgccattctcctgcctcagcctcccgagtagctgggattacatgtgctcgccaccacacctggctaattttttgtattttttagtagaggcagggtttcaccgcgttagccaggatggtctcgatctcctgacctcgtgatccacccgcctcggccccccaaagtgctgggattacaggcgtgagccactgcgcctggccggaaaaatatttctaaagagactccttacaaggtgataatgaaaaaaaaacacagttgagaaacactggcataatcaacttttacccactttatcccttattattacatagtaaacattaaaaattatttttaagcaaagccagttttgtgccctgcgcacaattaccatactactaaattaggaagtaaacagtagattaacttgtgttaacagcatcaattgtgataattaagctaaacaaggaaatatttggcagaataaaataaaacaataacatataaatcatatacttaacaaatattttaatttctgatatttatctcacttgcatatcattcgtgcaagttctttaaagagaaaagagatcgtgagagataagtgctcaaagtcttaacatgaggagtgggaataatgtatttttaattgtattttccttgtttttacaatttgaagacttctgttattttatactcaatttcagtgtcatttgcttcactgtcgtttgcttcattgtgttacttggaactcaagtaacctatctgaataccagcagatggttgttacatttttttcctatgttggtagcttggggaagatgatatttctaaaacaaatattttcttttttcccctgaatgagttttaaaatatctaatacaagctaaggctgtggagatattataaaaatctaagggagcaaggaagtctgcaaatggtattattgttgttttcatattcacaatatttatatacatatgaaaaattttgttctagtttcactgaaattggcagtagaaagcaattttgagtaatttaacacaaaatttgccactatcatagaagtgaattatttataatttgttttaaaatttacagatttattaaaaaacatattgagagaaaatgtttaaataattttgtttgttgtttctaaaaattaggcattcatctatctttcaccatccagaatcactgtatttattttgattgtattctcacctgtttcttctgctatttggagagtgtttgatacatgacttagtgtcatttgcattatataagaagattaattttacaagttctgttctcaatttgaataactttacatattgacctatgcaggaacataatcaagttagcctaatggagttaactaattgtcacactttgatgaattttatattgtgagaaattaaagacaaacagaaatcatcagcctttgctttgaaatcaaatttaaaggattttaccaagttgtactatatttaaatgaagaatgtatctatttcacactaaccctaaagtactggaggtttaaaagggaagtcaagtgtgtattgtgtgtcagtcatttaccttggtttctgaaatatgtgaaaaataaattacaaaaactagaaaatataagacagataacttttggtactctctaaggtacaaaaagtaaaaaggtaaatgtttatagaattgatgaaaattgagtaaaattttccatagggtatgacttagtgtactattcctaataatattctaatgcatcattgtgaccagcaagtccatataataatgatattgactttgagattcttgttagactagtgggaatgacccagcctaacaggctggtttgttggagcagtaacttccagaggtctttgactagaactcacagtaagaaatacatgttaccctgtaacaccttacacgttcctacacactattctgtacacatccctacatacacctctatacacatttctatacatgactacacatccttctatatataaaccttctcatacccctgcacacacctgtacatacatctctaccaacaactctacacatacccatacacacagccctacatagcccgttatacgaccctaccgtatatacacatgcatacacccccacacggaaataaaactttttttatccttactatgtgcgatataccctattttattctacctattcaatttcagctttaaaacaaatgttcacagctcagtaaatctacattttgtttaaactagtgtgcactggccattatagtacattagggctgatatgtaggtctatatgttgtttgctaggtatctagatatatgaatgcagttatagaagcaaatatgtacagtataggagaaagtaatattttgcctatactgctaattttgtgtagggttttttcaggcttttgtgatgagatctttcattgttcagcaataatgagctatggatttataaatttcttgtttttcttatacaaagaaataatataatccataactgcaagaatatactatacagaaatatttaaagagactaccatttcaagcaaggaagttgaaataataggattttaaacatggtcaaataataggattgaaatttctatactatttatgataaaataaagagctttatgtcagtagaatggcagtagaatgcaaatgctggcattatctgaaattgttcccaagtacttactgacactgagaaatgtttaattcctgggaagcgtctttgatatatggtcagtttcttcatgtaaatgtccaaaaaccaatactgtttcctgtttgttacatttattatgttttaggtaacttcctttttcatgtctgtttccataaaattgaaattaagtaaaatatgttctgaggaacataagacagacctggatttgaatatctacttctccacttagctgtgccactctgggaaaattccttaaccctcctgagtttacatttcctcatcagggaatgaattggttctccaaggttgttttaggaaaatatcaatccagttacaccttaagttttacttgtatttctcattcatttagcatagttgagattgtataatttaaatttagagcaactggccaaattcttttagatcttgtttctgtcagggttatctctgtaattaagaaatccggagttcagaaggattgttaatgaattgtctgaagatatgtaataagtaggagcaggcccagatgaggactttgactttctgtctccaagtctaatggtctttcccctgtatagtatagaatctggtgctcattttctgattaaatctcttacagtgcctacacaattcccaaaaagtatatatatctcacagtatgattatgctagttgggtttattgtttgttatatgcagaaaaagtaaaaatgttttctcattgttttgatataaattattttaaaatgttcctggcattgtgttatataatagcctaagttgcatcaggagtataatttggtagctgtttcccacagggaagttttatcttatttacagatttcattccttgaaattattaatagtttcgtgttgcatcagtgacagtatgtaaatctctacgtgattattggtatttttgggtttcactttttaaagctagtctgaacgtgtgtctaacagctgtaagtttttcatacttacataactttattattgatatagatttttttattcctacttgatactgcctttttcttactgtcttatctgtcacaattgaaaatactgcttctgtgagagaaaaatactagcatatcttcctcaaattatcaaaatatgagaagtatttacctagaaaatttcaaatggccatattttgaatatctagaaatcagaaaaataagcaaatagcttcaatgcttatttttagattggggttttttaaatttcttaggggtttttgttgttgttagttttgctgctgcatatgcttctcagtaaaagcaaatagttttattgagctttctccaaaatgtagacaacaatgttaaatgtattatcaatgaaaaattatgaaccacaaacacatattatcccaacatataaaattacagattttttattttctcagtaaactcaggtatcttcacatttaaagctggtagaaatacatgatgcccttttctgttcttatagtgatacacatagcaattattcactgcgccataatggatcatttttatctgcatcatgtgcctgttctgtttatatagaataaatatttatgttttatcattttcctggactaggaaatacaaatagaataagtctgaagtatcagctataattcatcgcttgaaaagaaatgccttattctgatatcatgtagaaaactatctaaatcatttcagccgcaagcttataaccaagataacatcagcattttccttcttgaaaatgtgtcttccatatattaaagtaaaaaagcagtattttattaaaaatgcttgtgacaactttaacctatcatcatcataaactttagtataaagaagatcctgttaggtttcataggggaaaaaatgatgataagattttgctttagtcacttgttcactatccaagattttcacaaaactcctaagatgcaataaaatacaaatgaaatagttcctgtgttactagattacagttttctactgtaagttttcagaaacaaattgttattctaagtatacattgataaaactccgttaatgacttaatggttaattggctaatatacaacctctcagtttaaaaaatctagaattttcttcccacacagaaattgtagccctataatttacaactgcttatatcttgttgtacagtgaaatgtttgcatagaataggaaaaagttatctatttgatccacatcacttagaaattaggaatataaagcattttagttttgtcagaaatatttgccttactttgggtatctatatttcttgaatttggcttgataattggctttttcaacaatggaaaaacaaaattgtattgaactatggtttatagtactaaaatgtgtacctaaataattttttgaagataatatgctataataatttgtaaataaaatatataaacttcatttagcataaatgttttctatcaataaccatgaaacattatttttattttttgtagtgactaggtctcattgtgttgtccaggctgatctcaagcccctggggtcaagtgattcttccgcctctgcctccgaaaatgctaggattataggcatgagccaccatgcccagccaattttttttatattgttccttatctatgatttatttaataaggaattaagtgacagatcacttcaagaaataatacatttttgactgtattattttgttttcattttggaaataatacatgtttattacagattatttggaaaatgcagaaaaataaaagataaagaaaataaaagtcatgacctaccttcgagagattaccgctgcttgcatattggtgtatgtttttctagcttttctttttaccattatttaacaaatatctactaagcatcttgtaagtgtaacacccactaatagtacaggggaatactctggtattcttgcaggtcataacctttatcctcttgatgtttatggcctataaaatgtatctagacaagtgacatgaaaactggaagaaaaacccaaggtgctcttaaaacaggtaccaaaaccaaaaattgacaaatggaactatatcaaactaaaaagcttctgtacagcaaaggaaacaatcaacagagtaaagagacaacctataaaatgggaaaaaaaagtaattgcagagtattcacccagtaagtgctctgtagaacatacctggaactctaacaactcaacagcaaaaaaaccccaaatagtccgattttaaaaaggatctgagtagaaatttctcaaaagtcatacaagcagtcaataagtatatgaaaaaatgctcaaaatcgctaatcatcagggaattgcaaatcaaaccatgatgagatttctcatcccagttagaatggccataatcaaaaagacaaaaaatagcaaatggtagcaagcatgcaaaggaaagggaaatcttgtatactgttggtggtaatgtaaattcatgcagccattatggaaaacagtatggatgtttctcaaaaaaactaaaagtagaactaacttataacccagcaatcacactactgggtatttatctaaaggaaaataaattagtatattgaagagatacctgcacccccatgtttattgcagcactataatatgtaattataaattatgtacctataccccatgtttattgcagagatacctacacccccatgcttattgcagcattataattaataaactatgtacctgcaccccatgtttattgtagcactataatttataatatataaaatataaattaatgtaatatatttatataataatatataattatatttactaatgttcctaacgtttttatatcactgtaggttgactatggttaacagtaatttagtgtatattcttaaaaagttagaagagaggattttgaatgttcgtaacacaaatgataaatgtttgtggtgatgtggggggaagaaaaggaaggaaaatctgagatgtactacaacatatatgaaccttaagaacattttgccaagtaaaatagccagtcacaaaaagacagatactgtgattacacttgtaagaagtagtaagagtagtaaaaaatcatagagacagggagtagaataatggttgctaggaggtaaggaaaggagagaatgaggtattttgtgtggtataaacgggaacagagttttagttttataagatagggttatggagatgaatgatggtgatggtttcacaacaatataaatatttaatacctctgaactgtatacttaaaatggttaagatggtaatttttatgtctattttataccacaattataaaaatgattaaaaaaaaaccctcgggaggggttcaggtggcagaggaactcacctggtttgaaaggtcccagcaaaatattcctgatatttttaaaatgtggtagaagtttttccttcatttcagtactattataggtgtatgtcctcacttgctctctttttctctcttattttttaaaattccattggccatttcagtgaggctctaggaggaaaaacagttcttcctagaatgtgcatatatccttcatatctgaaaaactcacatttttaaaaaagtcactgtgctataattattgttgctaaaacttatatagactgaaaatgagcaaatctccaaattcattaggcagttacttcactataagcagaatagaattgagcattttcttaattcttataatataaaggtgctgattcactttttataattatgaaagcatttttccagttttaacactaccattgccctaaagcagcaattcaatagcaactttatttaaaaattatattaatatacttcatcgaactatttaaagaactacttttctgatcaaataactatgctttgtttgtaccacaaggaaatatactaatgagcataaaaagtaacatgcattatagatacatggaatattattatcttattttattaaaacagtaaattaacatcatagatgcctaaaccttttaattttttgctcttttacttctatcgtatacgttatacattaccatatgttatacttgttggattagcatcagcaagtaaactgaggaaaatgtaaaagcataatttatattctcattaatttttttaaagcaatggcagataactcttgaatatgttgagcctaaatttatcacaaactattaattaaattacattattatatttaaatgtcttgttggaaaatctgtggtcaagacattctattttttgacagtttctagtgctgtaaacagtgaaaatgtcagaattcctccaatagaatatttcacatatatttatatacattacaaatatattcacattacttacaaattaaaaaattatattttgaaatacaatttttatatgatttaagactttacttttgaaaatatgccacaggaatatcagatgggatatatctgccacaggaatatcagatgggaaatatctttgttccttcaagaggaatttctttttcaatattttcattgacaaatgttttaacagcttctattcttcagagactctaaccttatcctcatcccttctccagctgttgccccatttctggactatggcaaaatttctaaatagttatctagactcaggacctccatttcttcacctccatgtctctctttttcaccagagttggaaatattttaagaaataagtgaaagactacaaaatattatatacccctgactacaatcatgtagagataattcttaggacactaaattgaaattgagagatttgaatttgagtatctatctatggttggggatatagggcaacatatatgtacatttttacaaaagcatttagagaactctactatgtttgagattttcctttcatacatacattcagctccgcatggtcatttccagcagaactaggacatgtaaatataaaataagatgatgaaacatgttctgtttacaataaatgcaattgactcacttttgtgcaaatcaacgatgcagcttttttggtttttatttacttatgtatttatttagagacagagtctcactctgatacccaggctggagtccagtggtgcgatcacagctcactgcagcctcaacttcctgggctcaagcaactctcccttctcagccttctgagtagctgggaatacaggtgtgtgccacgacacctggctaattttgtattttttagtagagactggattttgcaatgttgcccaggctggtctcgaactccttgagctcaagagatctgcccacctcggcttcccaaagtgctgggattacgggcataagccgccacacccagcctattttttattcaaagtgaaagctgagaaactaggatacagagccatatgtgttgtttggttgtacaggatatatttttatgctgcaagaaaggtttcattaaatataggacatataaaatataacacttaagaagtccagagatagcagctcaaggccgtcaggagtgatttttactgtgattcttttggtctttccattatgattcgaagatggctgctacaactccagttattatccatgttcctgaaattaagagtaagggtgaagtgcaaaatagcatctctcagtccctctttaagctattttgaacagtctttggtccccattactccactacaatgactcttgttaatgtcacttacaatctctttcttatcagacccaatagttatgccgctgtctgaatcttacttgacctctcaatgttatttaacaatgtcaaccattctgtctttcttgaaacattttcttttcttggtttcatgacttctaattttctttgtttgtaactggcagacccttctcagtcttcttaactgaattctccatttgtgctcaagttgtattagtaacgcttggtcattgtgtcccttctctatttgtatgtccctgagtgattgcatgcagttgtacctgtatttgggggacttttaaatgtgtaataccatccacaaactcttcttccaagatctaaattcatatattcaaatgtttgcctgacattcccactagataactaaagattggctcaaacttaatgttaccaaaatagaattattggtttcttgattcttctctattcccatcacaatttacttctcccacagtctttcctacctcagtctcatcatttttgacaaccagcagcagtgtaatcattcctaattactttcttttgtttaattccaaagcatatcatacttctttccgttctgactacattacagtactccaagttaccatcattcctgatctgtttgcagtagactgcttccttatctctgtatttgtgttctttcctaatttctacccatctttctctatacctcaaccagaataagcttaaaacccaaaagcaaatcatattatttaaattcttaaaccctccagtggcttctcactgcaaatcaaataaccgttatgggctatgtagtcaacttaacttttcatcttatgctcgatttcctgtcccttctgctgctaatacatgctgtgctcttttctactttaggaccgttgcccttgttccctgtgcctgtacattctcttctcacagatcagtacatgactgtttccttcaagtcattcaggtctctgctcaaatgtcagctcttttgtagcagggcttccttgactaccttgcctaagagaacatgtgctcccatactttctgtccctttaccctgtttctttcactgtatcaaaatatgaaattatttatctgttaacagtttgttgcctgtctctgttgaaattgaaggccatgaggacgatacgctgttgttcaccactattaccccatctcctagaacagaacctgacacataatagacacacatttgtaggttaatagacaaacatttatataagtttaattcttaaaatataacaacttttagaaaaggaagcaaaaatgtttatttcaattctagttagaagaaaaagcgctttcaccaactgtgcatctgagctcaactttgaaccacaatttttggaaatatattttaaactttataataactgtagctaacattgttttgaacatctacttttattgtgttataaacattttactagcataatttgcatacataatcatttttgtttatttaaacccaaagtcattccttgaaatagggttttttttttgttttgttttgttttcattttacaggtaagaaaactgagaatgaggggtcatatgcctttcacagagtcaaaccaatagttaagtgccaaagcaggattcaaaataagatttgtctgacaccaaagcctgtgcattttctgctgtgctcatgtagatgttttaggtaaggccatcacagttgttttaaaagatgtattcataggatgcacacacacaaatttttttaacatgcttgatttgccatcatttaatctaaagtcatattgactcattatggtcagtactgactcgtcatggcaaacaattcctgactacaacttaggagacataaattcagattctaactctaccaattggctatgggaccctggggaagttcattatgtattctgggaatggcttttctatctacagactaaaaaaaaatggatgaaatgatttttaaataagataccttctagctctcaaatcttatggccctttaaagaaaaataatctagaaatctgttgacaatctattgcaacttgccttggcatctgatttatcttttgaatgcaaattacttatttaatatatcagttttctcttcctagaactacacttggtgggcaatattccttttaatcagtcttgaaatttagggagataaataaaagaatgctgatacagaatttaaaagttgtcttgaataatctgtagttttattttttgttatctactgatgattttcctcatgaatgaatagagattctcactgaattatcttgtttataatagtgtttcagttgattttttttttatatttctaagtatatagcaggtaaggatagtttcacctcttttacaatttttatacttcatatctttctcttttctgcttgtgttggctaacatctctaaaacaagattaaataatagtgatatatttacttttactttaacttgaatgtttctagtgtgtgaggctagcttttgagatgaaaagcatatatgttaatattaagtataacatggataaatatatacatgtaatgttgaaaatacattgcaagtcacggaagatttacatagcatcatacattcatatgaaatattgaggtataacaatatgccagggagtgattaatattcaattcactgtattggtcacatctggtaagaaggaagggaggagaatgggatggggaaagaacatccaagagagctacaatacgcattagaatgcttatggttattgttactggttatagttatggttattgttgtgcaggaaacattttataacaaaataatttgatatgctaaagaaacatgaaggtttctgtgtttgctggttataaagacgaacagaggcataaactaaacacaggtttgcctttcaagtgtataattttcttgagaatggaaatcacctctattctcctccctgtcctgaacatatggcacattataagaattcacgacataactactgaatgaataaaagaagaaagaaggaaaggaaagagagaggaagtgggaatttttatttctttcttctcattctttcatttgcatcattaaatttttaagtaaagcttactttaaataatgcatagagatttatttgtatattagaatcctctattttttccagaaagcagaatgttaccaagttttctatacagctttctagaaatcagcatactattaggtatttattgtgctgtttgtggtgtgtgtgaaatatgtaacaaattaattatggggtatatcatttctgtgacaatgattcaggctacttagattctaagagttcagactggtatcaaagtctcaaatgtctactgtggttcacttgtattcctgctttaatcagtcttttgaaattcagtatgttaataaggtttcaaacaatcctgaaagtttgaaatgtacaaacattcaagtacagtttattttctactttaaaagaaaagtaaaagaactacactgtcttaatgggttttctgtttacaataaaagatatatcaatgattttaaaaataagaaaagcaaaatagaatcttagacaaaaaaacctgtcataatgcaatggtgaaatataaatttaaattttctgagtaattgttgaacatgtatattatgagaaatagcactttgtaaacatttaaaatatttttattgaacaatgtggttgccacataatgtcactatgaagtcactgacttctgtgtattttctcatttttatatatttaaatttataacttcaggccaggcacagtgtttctcacctgtaatccgaacacttggggaagctgaagtgggagggtcgcttgaggccaggagtttgagaccagcctaggcaacatagtgagaccaccctctctataaaaaataaaaacaaattagctggttgtggtggtgcacacctatagttccaactacttggggagctgaggccagaggatcatttgagcccaggaggttgagactgaagtgagccatgatcacaccactgccctccagcctgggcgacagcaagaccctatctcaaaataaataaatttataacttcatttttgttgttgttgttcttaactgtagcattgtgtcagagttttgtagtcaatttaatagtattctgagattttcctttaagactcttgagtttgagctatcaatgttcccaagacccccaggagtcatgcatggccctagctctgtagaggcttgtgattcttcttcttacaaataaaggccatttttttcttgcttggaaaataacttattttgtaagtagctgttaaagtattgagaaagccactatatgagtgtattttaagacataagaacagtcattccaaggtaatgacagaattttatgttcctcagaagctgatccttgtacatttttccaatatacatttttcctcttctatttctgtatcctcataagatttaagaagtataccacaataaatcctaaatattttcagaatagtagaaaaactagaaggagagttaatatgtttaccaaaattttcataaataatcttcaggtagcagaactgtcaagctgttttggatttgaaaattgcttttgatcagtactgcaagatagacttaggaccttttaagataactgaataataatctggtcagtatccattgagcaaaaattggattgttttggaaaagtatgtgaagcttttaaaatttattgatcatgagcaattctaactgtacatacggtatattgaaaagggaatactttttatagtcagagctgagtttggaatcctagctcctctaatatttttggatatgtgaccaagggcagttcctgagtgtcaccaatcttcaatttcctcattggaacataggaacaataatatttatcttgcctggcttttgtgaggattataaataacgaacgtaaatacaagcctttaataatatacaataatatatttgtaatatattctgtatataggaagtactcaaaaagtcaaaattattatttacttgattcccatgcttctatatagtaaggaattcattcatatatccaataactattcataagaactattcattgaaaggctacaatatgataggaataagactaacttataaggatatcgtaataagaaaaacagaaaatctgctgtcgtggagcatgcactctagtaaggcagacagacaatctgtaaataaccaagtggatgttcattttattgtaataaatgttatggaaaacaatctgagtgatggaggaagggcagattttgtgcataaagtcaaagaactcactcactgatacctgcatgacaagaaaaatgagccatacaaaataaaagtcagaggaaacacctactgcattttgttcaggaatcagagggaagagcagcatgtttggagccaggtgaggaaactgaacttgtgagcagatcggagaactcagtgaggccggaaaggtcagaagggcctgatgatgtactttctaggtcatggcagtagtttggattttaccctaaatacaaagctactagagagttccaagcatgggtggattgtgatgtgatgtgtgtcttacaaagattactgtctcctgtataaagaataggtatacaattataaaaccaaagcaaggaggctgattaggaagctattggattaatccacaggcaagaaacatgatagcttgaattaagatggtagcagtggagatagaaagcactagacagattttagatacccttgggtgataaagataacaggagttggctatagagtataagagaaaggaaggaattaaggaatgacccctagagtttgtgtttgaacaactgagtcttatagaccaagtgaggtataagtcttttttagtgggggtaggggaagtttagggttgggaatcaagaatttggctttgtacatggtatgtttgaggtccttattaaaaagtttattggagacaagtagcagttggaatatgagtttaaagcatggtatagatgtgagggctgaagatataaatgggaaagtcatcataaagtagttggcatttgtggccatttagagtcatctccagatgactattatcaaaggatagcagagttctaaggacagcattaaacagagggaaaaactcatagaactagaagaaatttaagaggccaatattgtcattggtaaggattctttaacagaaaacccacctacttttaatatttcataccctgtatattcaaaattgagaaaattgggtggttataggattaattaaagaagactttgttttctcacattgtcagtgtgttgactttcaaccttagacttactcccatggccacaagatggctacagagtctcgaagtattgtgtcctcacattataatacatagaggcaagcctatgaaagtggtccctgtctgtgtgtgcgtgtgtgtgtgtgtgtgtgtgtgttttaagaataaggaatactttcccagaagctcccctgtaggcttccatacatgtcttatccagaatcagttcatgtcgccggtagggtctaccatgataatgatagacaaacacatttgaaagaaactaatggatttaaccaggttatttatatggaatttacattgcagtgaaacttcattgctatgacttggactattatttactaaataattactattgtatttatattaaggaatactgatatttaccatttatgtatacagagttcctcaatttaaaatcacatccacttgagtatgtgtgtgtgtgtctgtacatttgcatgtataaaagaaaaacaaaatgtaaacatcatttcaaggtgaattaaattacttttaatttctcttcccattccaatagtcagtatttctaaaaatcaaagatacaaagataaaaatgctttgtatttgtaagaatatggcctgctttcgtttaagcaactatatgcctaaaaaggtcttaagtcaatttaataaactatatttgtctaatttctgtaccaaatcattatttagtcttctaaataatagtcctacctagacctatattggtcctacctagattcccaatattgttttcatatcagttggactattatgctaacattattgctttattcagagagaaagagcattaatttacattctctacaatgacaacatcatgcagactatagagtaactctgggaagaacttcagttaaaaatgctaatcagatgcccgtggggtgacttggaggaattatttaattaatagccttttcctaattactacttaggaacaaatgtctttaaatgtaatcattcacccactttatttatttattcttgctgtctatgaataatacaattatattgtaataccaacagttgaaattgcaagatcaagaaattagagtgacataggtagaattggcttctatttaataacataatgatggttatttagctagaaaaaaaaagcactgtttttgaagaggatccttactatctatctgtaggtacctatcttcactacagcagtatgtcattaatgattaaaaactgtcgtaaagttaagcctagaaagaggaaagaatagacttgattgtgctttctgtgggccaggatttgtgctaggctcctcatattttattttatttaataattttagtcgtcaaaaatagttactgccattttatagatgagaaaactaggttctaaaagtttaagtgatttcttcaaagtatttttgggtagtgtaggtatcaaagttaggatttgaatctgggtttgccagtcactgacaacaaagcccaaatttcctccactacacaattgcatagaagaaacagaacaaatatgaagtatgtcagaagtaaccaaccatgagcactgtgtaatgctagaaccagaaaagcagaattcccaacctttctgtgttattttccactactttgctctttctcactgggctttggctgacttacccttcccactgttccctttacttagaatattcttccctccattgtttgcttgaccaactctttcttatccttcatgtctcattgcattagtcattttttggagagtaggggactttgctgaaatttttagatccttctactaaaagtcacatagcactatgtttttcttccattgaatgtgtcataattgcaatgatacagttacttgagtgatcaattgttttagtcagattgtaaactccataaggcagggacagtgtctgtcttatatacaatgttttttttttgtttttttttagcaactagcacagtgcctgacacatagctagctagttgatgttcaatcaggaaggaatgaatagatggcttatatagcttgctggagatctgttttcaagtaagatattttaaaattttattttataaaataattttgtccttatgttttatagcctatattatgaaatattgggaaaaactttatacttatgtagtagctaataggtaatagaaaccattggctaaatgaatgcattttcagacaagctttataagtgatttgatacttgccaagtggcctgttttgtgaatcatttaagtacataccagtggtggttttcattatggtaacagttcaaaacagttttaaacatttaatcattctttaataaaagcaaagtagtagctaagacataaccagtaaatccaagatgtggaaataatgaaaatagggacgttatttttgacactgataataaagtgccactactgaggaatttttttgtgtgaaattttctaaaatagtattttaaatttttcttgaagcaaattcaatttctttttaacccatgaaaaattaatgtgccatgggagaagtgttacttagatatctaatgagctattacgttccaataaaactgaagattaatgggttcactctggggaaaataacattccatttgaaataaggatatttgagcaacttaatcttttcacttggtagtaaagttttagaaattcactttctggccgggcgtggtggctcatgcctgtaatctcagcactgtgggaggccgaggcggcggatcacctaaggtcgggagttcgagaccagcctgaccaacatggtgaaaccctatctctactaaaaaatacaaaaattagccgggtgtagtggcaggcgcctgtaatcccagctactcgggaagctgaggcaggagaatcgctgaatccaggaggcagaggttgcagtgagcagaagtcgtgccattgcattccagcctggtcatagagcgagactgtctcagaaaaaaaacagaaaaaagaaaagaaattaactttctacacttaagtttatttccaaagcatatagtccttgatgttgagtttatgttaaaagagcagtataagttacattgagcagtatttgttttaaagattcacaatactcacctttgggcatgaggaagggtatattattttgatatcataactgaactctgtagcatagtaatcataaaaatagtgtccttatatgttgtcatggttcagttatctttatcacctccatgtatacctgatgcactttattatatactttctccattgcattgtgattatttgcatgcctctctaccacactggggcatgagatcctctaggcaataaaacatctcattcatattttctgcaacaccttgcttagtatctggcacacaatcattgttcaataaatttttgagggaggaagaaaggaaggattctaggaatagacgtgacttcaagagttaatatcttaaaaagacaaaatgtctaatatgagtcaaaggactaaatgtattccatactcttctaaaatgagaacattatttgatcaatacaataaagtctgtcaatgggttaccaaaaaaaaaaaataggtgttgattgccaaatatttttactttgttttgacattttattcttaattcagtgtgtcctagatcaaatgatgcttctatggagaaatttcttaagtacctctttttccctatatagtagacattgttttgaaacccttgattaaatgtactgagataaaatgtcagtattaataaggacatccacctcccaaagaaactacagttgaagaaataaaaatggatcatattacatttttaccatattacagttgaataattttctaatggttcttaaactgcaagcgtttaaaaacatgacaatgaatttcatgtgttagacatccctcagtgttactgaatgactgtatgattctactagctggcagtaaatactcatttatagtgtggagtctgtaatgagctgaaatcatagaaatactgaaaccccattttccataactctgattgcctctgcacattattttggcaggtaactttatagtactagaaatcaaatgtacttctaaatcatctaacaaaaattagatgtttgtctggttttattttttgttgagataactttagatttaaaagagttgtaaaaataggatggagtgttctgatataccctttacccagcttctctttaggttaacatcttatataagcatagaacaattctcaaacctaagaaattaatcttaatacaatactgttaaataaactgtagaatttatttgtattttaccagttttgccactagtgttctttctctggaccaagattcaatccaggatctcctgtttcattttgtcattatgtctcctcaatctcttccagtctgtggcaattctttactttttccttgcctttcatgatctttttgttcttttgaagagtactcttcagttattttgtagaatgtcccacaagttgggtttgcttaatattttctcatgattagattgagtttgtgccttaatgggaaggctaccatagatcataggtgatgtcgcttctctgtgcatcagagcaggggaacatgatgtcagtatacatactatacattactagtgatgttagccttggtccatcagtcaaggtagtatttgtcagctttctccactatgaagctactttttttattttgctttaacaaagtagttttaaatcatttgagtttggaagacagcttggggagttgttttatttttaagtcactaagcagttttaaaatctggtgaagaaactgatttcatatttttgtcaatctagtattttcatacaaacaatggggatttaaataagatatcttaggactctttcacctttaatattctatgacttgatgtctctaaggagaaatataagagaataagatgttccatgtatgtcatagttgcttacagattagcctgaagtccatctatgaatttgactggcttttgaaatgaataccttgacatcattctgcttaacaagggtattgtacactgaagacatattaaacagtttctaaattacctaactgaaaatctattatctagatattttgttatttagatactgagttgtttcttagtctcaaaattgtcagtttaaactatttacagtttatctggcctcagaagtaataatattaaaagattttaagtattgaaatatttaaatcaggctattttatatcttaatgcaaattatagttttcactctgaatcttataaacttgagtcagtgaaatcaagttcttatgtaggtaatattattttccttaagaaaatttgttacctttcattttttgaatatctgttatttattctaaagtgatgttaagattgttataatgccatttatataaattctatttgtttttggtttttgacatggtgtgatctataactattttttttaagttctggggtgcagaatgtgcaggtttgttacataggtaaacgtgtgctatggtttgcctagaacatcaagactcagcaaaggaaatataaaattatatttttagtattttctcctactttttattgtgatgtcaattaaatggccaaagatgatgattgttatttttctgtttttttctgagagaaaaatatatatttaatacatatgaaatgattttcttaattttcaaagaaaatattcaagccaatcatagtaaagatgattaccacaatagaaaagtgggcaaaaattaggaaaactacattcttgactttatcaatgtgggtatcttggttataagattacactacagctttgcaagatgttaccattgagggaaacagagtaaaaggtacaagggatctctgtattatttctttcaactgcatgtgaactacaaagatcttaaaattaaaagttcgacttaatttttgaaagtacagaaaattgaggaaaggcaatttatagaaagaaaaaattctaacaatagatgaaaagatattcctttttattcaaaatgcaaataaaaagggaatgagaagcaattttccgcttctatcaacttaataaaaaggttttcaacttttattttagattcaagaggtacatgggcaggtttgttacataggtatattgtgtgatgctgagttttggggtgtgattcatcccatcacccaggtaatgagcctagtacccagtagttagtttttcaacccttattccctccttccctccccattctagtagtctccagtgtctattattgccatcttcatgtccctgtgtacccaatgtgctcccacttatgagtaagaacatgtggcatttgattttctgttcctgagttaatacacttaggcctccagctgcatccatgttgctgcaaaggacatgatttcattcttcttaagggttgcatagtatttcatggtatatatgtacattttctttatccagtccaccattaatgggcacctaggttgattacatgtcttcgctattatgaacagtgctgcagtgaacatacaaatgtgtgtgtctttttggtagaatgatttattttcttctggctatatacccagtaatgggattgatggatctaatagtagttctgttcttagataaatctccaaactacttttcacagtggctgaaaaaatttacattcccaccaatagtgtataagcattcctttttctctgcagccttcccagcatcgttgttttttgactttttaataatagccattctgactggtattgaatggtatcaatgagatactatcacaaaagagataatatctttttgatttgcatttcgctgacaattagcgatgttgagcattttttcatatgtttgttggctgtttgtatgtcttctgagaagtgtctgttcatgtcttttgcccactttttaattgagtcatttgttttttgctttttgaattaagtttcttgtagattctggatgttagatctttgtcagatgcatagtttgtgaataccttctcccattctgtaggttgtctgtttactctgtttatagtttcttttgctgtacagatgctcttgagtttaattaggttccatttgtcaatttttggttttgtcgcaattgcttttgaggacatagtcataaattctttccacaggcagatgtccagaatggtgtttcctaggttttgctctaagattcttatagtttgaggtcttacatttaaatctgtaacacaacttgagttaatttttgcatatggtgaaatgtagggctccagtttcattcttctgcatatggctagccagttgccagcaccatttattgaatggagatattatgacttttttttaatggcagtatagaagtttggtaaaacttaattttagggcctgagcaaaaaaaatatttttctctcaatacaagttttaagtttgatacaatgagtcgagtgttgtattaaaattttcattgtccagtgagaaggataaacaaaatgctgtcatattctattaaagaaggcattgtttccacaatggccaatcctaaacaattcatgattattgcttatattaatgaataagtaatatacttgtttttttatgtgtgtatgacaaacttagttatcgctgagtaatttttagtcatttacgtctctgaaaattttaatgggccaatcactgatttttattcaatctgaaaaatctgactatggaactgtaatttgactagtgatcttgcctatcttgaacatttttagatattatttttagattttagataacatttttaaatattatttttgcctaaatatttcaaaagcaggtaaaaactctaaataaaaatattatattttatttaaataaaaatattatattttatttaaataaaaatattatattttatttaaataaaaatatttagattttagataacatttttagatattatttttgcctaaatatttcaaaagcgggtaataacttttaaataaaaatattataaatgaaggaaagttaccaatgtaggagcctcttaatatagatttctagcatacacttcatgcgtatttcccagatattagtagtttactacctgaaggaaaattttctattgtcaagaccataagttcgtcagggttatcaaacatactcaccataaaagaattcacctgtcagaaaaggctgtttacagtattcttagccccttcagatcagcaggatatcttaaaaatatgtcttttttttttttttttttttttttttttttttttgagacagagccttgctctgtctcccaggctggagtgcagtggtgcaatcctggctcactgcaacctccacctcccaggttcaagcgattcttgtgcctcagcctcccaagtagctgggactacaggcacacgccaccatacccagctaattttttgtatttttagtggagacggggtttctccttgctggccaggctggtctcaaactcctggcctcagatgatccacccacctcggccttccacagtgccgggattacaggtgtgagccatggcgcctagccagatgtcttaaacacctacaaatattcattataaaagttgtagcttttcatgtttatggaaatatataaatttatagaattgggattgtgcccattaagagtctaccctaactcatacttatcatccatcattcatttcctttcctttctttatcctagtttgccactgtcacttttcactcactgatctttgttgcctttagtgtaaatatgccctcttcagatggctgtggcaatccttagggcctttttttccccagatcagagggagtccctcttgatcccaggtcatacatgggaaatccaaagtctttttttttttttttttgatatggagtttcggtcttgtcgcccaggctggagtgcattggcgcaacctccgcttcctgggttcaagtgattctcctgcctcagcctcccgagtggccgggattacaggcacacaccaccactgccctatttctttgctacgaaaagctgccacaaagaagtaaaaagttacaggaggagctaaaaacttactctactcaatctgctccagaatcatgaattggagagagaagtgattgctcaagaaaagaaatagttatttatgtattcccatacatgaaattagaaatttgttactgccctttttctatcttgctatttaaaaaatatttgctattaataaataatgaatgaaatgttgcagtattaaataaagggagatctctttgattatcttttgtttgcatcactaaatagagaaaaaaggtaaggtttttaaaaagagctctattctacttaatgatatatgtgtttgagctgagtttactaagaacatcccaagtgactttaatttcataatatagccttagaatttctaattaaatatgcaacttgtatcatacaaaaaaattcttatgctttttacagtaaatttaattaagcatttcttgtaagttcatttcagtatctgtcatggctcactaaagttggaattcagttgtaaaatggtatattaattgccttttgtattaaatgaaataagaatctcaaatatgcaaagtcaggaaatctaattgtggtcttcaattgctcattcaatgcattggaaaactgaatgcagaagtatagaaaaataaaaggccaaaggttgttaaatgtagcatatcacacacatttcgcactttacttaatgatccaagtgtttattactatgaggtaaatgcaccatttaaagaattatggtggaattgtaaaacgttaaaaactctaattaatttcagtctgaagcatgcagtgtgctcattttgcctaaaacattttcattatcgtcagtattttccagttattaagataaattatttcttcattgtgcagcactagcatattttctgtattaaaaacacagttttaaatgctgttgagagttacatatctagcatatgtttttaaatgaataaaacaatatagttttttgaccacagatggaagccaagtagtgtatctgtttttctttctacacttgttccgtagctaccagcagttagaacaggttgagtgtctacatgttttttccctaaaagctatatatgtattcttacacttttaaaagaaacattattaaagtatagagataattctgactattaatttggatccagttataataactgttccttctctggttagtaaaaggaatatttaaaatctaaagaaaatatcataagaatatagaaacattttaagttagtgcctgtctgcaccgtctcccttcattttactgttgtaccgccatggatgtttgcctgctgtgaagaacatatttggtaaaataaaaacaagtgacatcttctctttgtattcatagagtcttgtaactcttacttatttctggaaatagtttgttcatatggccaaattataaagggacttagtaaaagaaagctatgttttctgattacgaaggaaatctatgctcacagtgggaaaacaagaaaatgtggcaaagcacaggtaagaaaataaaaatcaataatatcaacattatgaatattttaggtacttaggaatttggggtagaatgatggaaagcaaactgttaattatagctgtatatttcagtgtagaggctacaggtgccttgcatttgttttcttataaaatctgttcccatacattttacttactttatttgaatttaggaaactttcattaggtagccatttttattttctgtttctttaatcattttactttgaaataattttaaatttacagaaaatttgcaaaaatagtgtagaaatttcccatttgcctttatccagcttcctgtagtgttgccattttatgtaaccatagtacaattattgaaaccaagacattaactttgagaggctgctactactctaagaaccatttttaaattttaccagttttctcactaatgtcctttttatgtagtccaggattcctcactgcattcagtcatcatgtccccatagtctcctgtggtctgtgatagttccaagtcttgtcattcataaccttgacattcttttttttttgagacggagtctcgctcaattgcccaggctgcagtgcagtggcgcgatctccgctcactgcagcctccacctcctgggttcaagcgattctcctgcctcagcctcccgagtagctgggactataggcgcccgccaccacacccagcgaataattgtatttttagtagagacggggtttcaccatgttggccaggatagtctcggtctcttgaccttgtgatccgcctgcctcggcctcccaaagtgctgggattacaggcgtgagccactgtagccggccgaccttgacattttgaagactactgtttaattatattgtagagggtttatctgatgttttctcagattagaattaggttataccctgttgggaaggataccacaaaccagaggtgatgtgccgtttttaatacatcgtatcagggtgttaatatatattattggtgatattaaccttgaccatttggttaaggtgttgtttgccatgtttctccattataaaggtacttacatcaacatctataaagatataaagaatagggagagttgcctctttgtgtaatccttttatataaaggattacaagagtttaagaaatcttttaaacttggcagtctacaaggtaaacaaagttatctgtactcatagagtgtaatttgtatccaggtattacctgagtgatataaattccagatgctaaaatagttggccattgttaggagttggttacgtcctaagaggaaggaaaagaatggataggttttattaattggcatcaattatttgaactatcatgagaactaaatcacatttataaataaagaaaaaccgagggtctcctctatcacaaattgatagtgcaagctgactaacatttaagcaaaatcttgcaagttttatttagtgataagataaacatggcagtgtgtttacttaatttctctgttagaataactcagtctcatattgccacctggagtatcagcccattattaaatggtccatctgtgcctagaaattaccattctcactacaattctgtccgtgtaaaaagagcaaggctaaggaaccaaattttgtcatttgatattacaggtgttactgttaattgagtgcacattcttgaaatttcacatataactagcagatctgcaaagttgttatagtcagtgtatttttttagagtatgaattaacaagtttaaacattaagaggtaagcctgtctactttccagtagcctcaaaggatacattttctttacgattgtttcagaacacttcatgaaacaaatgtcaaacttgtcagggctgtcactaagaaaatgatccatgtagccagggtcttctttcattgggaaacaaacagatgtcttatctcagcagagagaaaaaaaaaaaccctcctgtatatcagaagaaatttttgcttacctataatatccagtagtaaagaaatgctttggtaaaaagcttcctttgcaattttatttattatgcagtcatttatcaattatattttatttgctgtctgagttactttaatgatttttattaatctggaactgcgtataaattcttacaaaaattgacctgcaatgtgaaaaacataaattagcatttccaaaaagacttccctagagctttattagatcaaattttaatgttatttatgataaaatctattactgttattttgataatgttatagcaattttaatattatactctagcaattagagtggaatgcctttttcaccccttcataatgcttttctgcacctaggttacagctatccttctaaaaggaagaaagagattggctcttatttgttatataagtgacttaacagcataaaaggcaagatgttttaagacaaatcctcagcacaaagaaaggtgtgaaacagttatgtacctgtcctgaacagcaggcagtgttagaaggcatgcatttataaactgtactttatttctaagaaaaattcaacaacaaaaagacaaacattatattaagaatgttacttaactggcatatctatatatatcttatccatatatttaaaacatattcaaattaatggaagttgcaaatttttatttcatttaaccatgttccaatagcttatatccatagttaaatatgaaaataaagtatataagtacctcctagtccttggggttattaagtctttacatttgtgttttgacttagagcagcaaggttgctagagaaaactagatagccaagcatgttaaaccgggaagtcatacggtggagaaacttagtagactgtccgtgtgataaaggctccatctttcttttataaattaaagggtatgagcttgataatggctgttttggctcatgttgcttcaaacatttttgcttatttttattttcactgttgttatatagtaagttaagattgctagaagtgtgagtactagcaatcttaatttacgatagttaagaacaatattgtgcttttccaaattatgtattaattcaggcataccttttattcgttcattattccactgtttcacatagttcagaaaatattgattggactacaactatatactaagtatgtcctgttagatggtaggaatgtataagatacagaagataaaaccttcctttgaggaacagatggacaaattcagtgctacatatcaaaaatttcttgccatccgtacctgctgatttaacactttctaacagtgtctctcctgaagaagacaggggaaagtgtagagtaagatttactttttattataatgtagttaaaatgtaatctctaggctgggcgcagtggctcacgcctgtaatcccggcactttgggaggctgaggcggggcagatcacgaggtcaggagatcgagaccatcctggctaacacggtgaaaccccgtctctactaaaaatacaaaaaattagccgggcgtggtggtgggtgcctgtcccagctactcgggaggctgaggcaggagaatggcgtgaacctgggaggcggagcttgcagtgagcagagatcgcgccactgcactccagcctgggcgaaagagtccgtctcaaaaaaaaaaaaaaagaaatgtcatctgtaggaacttttttctaaaagtggaaaacacatgttcattaataaattttcaagaatcaaacttaatgtatctattcactggagataaaataaggaaaaaatgaaatgacaaacagtggctatcatacttggaaaaatatatcaaagttacattgccaaaatgatattcaaaaccccattcctggtgttctacatatctataatgattcagattggttgataatattgataatttctctactttcccagtgttaacaaagtctaaatcacagattccgttgagtttagagaaacaaagtatataaaaaagcttttttcacccgccttaatcattactggcaagtatgtagtttgtcatagaaaacaaatatgcataccttggtttgcttttactttataaagtcaattcacaaagtagagttcaacaattatttaattcaatgatttaatttggtttcatcagatacagagatagagtggtatgtttgatgatattgatgattattactgttgtctagaaatacttaaattgatgtttatgctttaattaactcagaagagtacctttatgtcagttaataaaaataaataatcttaaatgataaatcagaaatattaggaaagcaagactgttttgtacttgggtgtgttgaaagaacatgtatgatgagatgggttacaaattgtaagatgaaatatttttccagactctcattgcttatactttgaaggttaccatttaatactgaacacaagatgcacttcatttctatgaaagcagacattatgatgtcatttcatctattcaccatgttccacaggaacctgctatgaattatgaggccaccacttagaattgaaactgtagaagattgtaagcattctaagccgacatgcacatgcttcctattttagacctcactgatcttcagataacatatggtggtacaagtaattggaaaattggcacacctgtcaagaaagtatactagatggggcaaaaaaatgccatgctggagcacatgaagtgtcttagcaattaaatttattgttttttgtcaagcagtgaagtaaaaatatctagctcatcccctgcaaagaacacttttcagtggcaggtgtttccaaagtaatttttagggcattgttaaaattggttgcttttaaaaacatacagaaaattttaatgtgttctataaaacagcacctattgcaaatatttaaatgttacataattttaccatttgtgtttaggattattagaatcacagtagttcatagttctacagatgcagttaaaatctgtcaagtatagctgataaatgctctaaagtttatattttaatgttttctaaaatttatttcacaggaagatgaaaatgaagctgaaagaaaaaatatatctcaggagctcaacatggaacagaaaaatccaaagaaataaaagattttctgtagtgtttttgaaaagtttgcagcttatgtaatagcagataaaatttctaattgtaaaatgttaaattgtaaaatctaatttgcaaaatgttctcaataaagtcattcaaaatgaaataggagcttgtatttggaattcgtatattttagagtaatttcgacttttttattcaaaagctggacctttaaaagtttttaaaaggagaaaaattcttaactcaaatttgagaacagagacagaatgttattttttttgtaacctaactgttaacacatttaaatgacctaaaaaaaaaacctctgaaagtcttttttcttcttactagactctgtgttcttctttaagggccttaacataattttgattatcaatataaagaaaaaccaacatagttcaaaaatgaacagggaatgcttgcacatgaaaatggttaaaaccagtcaatgccacaaggagaaatactgtttcctgatttcatctatttatatattacacgatactctaggactgcagggaaagactaaaaagaaatgataatttgacggtctctggcagaagtaatgccatgatttataatttataaaacatttactaaggacctgctgtgtgcaaggtcccacacactattcctggacatttcaagaatagttcttttatgtatttctttggcttagaaatttttcaaaattcacctgtcccctgtctttatcagagttctcagtaaccagcctctttactctccccggttctaatttccaagctgccatttgccaatgacaggaagagcaatgaatctgcttgctatttgcagagccaagtgtttttggcagatgtctttgtttgattatttaaggcagagtttcttaaaatgagaggcagagctttgggaggcttgcaagagaatgtgagagtggaatcagtgtatttgccttgaagccatattatatgcattcaacaagcccaataaatgtgtgacagcaggatacgctggcagctatgatacattgggctgagatggaggaaactgcaagtagttaagacagaaaaatcaaaaggatagtctcaaataatctcagtacgcatgtcaggaaaacaactagagcccacagatgggatccctggactaatgaattccctggatgaattttggagcaaagactttaagccaaagaaaaggttgagatggcagttcagagtctgcagggagcctttgcaataggcaaatataaaaattaatttgacacttttcccacatcaatttatttcaaaatacccacattcacatagatttgggtcatatcagtagttttacttttaaaaagaagaaataatacatgattcacataaaagctaacatgttacaggtactatgctaaatgtttaacgtgtcatgccacttaattatcaacttacaggttaggtactgttgcttttaccattttaccaaagatcaatccaaggcttagacaggggaaatagattaacaaaggttatgtaacttgtaattggcagagtaagagttcagactcaagagtgttaccacagaatatgacacttaatcattgtgtaatactaataccatatgtcatttgttccactgtctttcctaaaaatgtacagtcttattagcacttcattcatcacctgcttcctctttagttatttctcttctccaatctcttagttgcgctttagtttattttgaagactttgatttaagtaaaataagtgaaagcattgtaaccactattctgtgtgctccgtaacatgctaatcctgctttatgttttttttttttaacaccaagttatcatggaacaaggatggaagcacctatttcttctctaagatttttcaagaaatttttggccatatttttcagcagattgttcagttattagtatgctgttatctcatcatttcacacttgcatttatgaaatgaaactgttagtgtgagtcacagtgacacttagccaccttgcaggcattttaaatattaaatttaaatggtatctttgatcatttaaaacccagttttccttttcagaaagtttttcgaaaatatataccccttggtttaggatggtcagtaataaagtaaaatcaatttacatttcctttaggaaaaatttctgtatgaatcactcagatttttagggctcataccattatgttgtgtatatacacatataagtcttagaatgctacaagattatgtgactgtgattaagccagtcgctttatttgagtcaaatgtttcatattttatatagaatgttttacatattaatcggctcaggctgccataacaaaatatctgagtgggtggcttaaacaacagaaaatttttttctcacagttctggaaggtggaagttccagatcaaaatccagcagggttcagtttctgttgaggactgtcttctggcttgcagatggcctgcatcctacacggcctttcctttgtgcacgcacagagagagggaggaagtgagtgagcctctggcatcttcctgtagggacattaatcctatcagatcaggattatgatctcttaaccttaattccatccttactgcaaatacagctaccctgggagttagggcttcaacacaggaatttcgatggggtgggggaggagggacacattcagttcataatacatttaaataaagtccaagtacctctgttataataattctgagctatgttaaggagcactggagcaaaatcccaatgaaatgtctatggcaatatagattagatgtatttagggagagtccttataaacgttgataactgggatatctatctataagtcgatttctaaagaagacaaaccactaaaaaaaaaaggagctgttttgtttacctctttatccctattacctagctcattttttggcctatactaggtgtaacactgtgactgtaagtcagcctgtaacttgcactgtagaataccctaagaacaagaattttatgatacctgtataatttttacttactgaaccgaactatcttctcttcatgctagttatttgagttgtatttcttcataccttccaagaatttaaaaataaaagaactttaaatgagtatttgtttctatcatatttaggaaaagcatggttttttaaattgtatccagtatcatactctttcctccagtctagggaacaaatagcagaagcgggaagggatattatgctactcttgaatggaaattgctgggcactaagatgctcaagttttttaaatcattcaacaaagctttagtaggacctactataagatatactgttctgcttatcactggggattcaatgacagacaagcttactgtgctgttacggtcttgaaattcttagcttttgaaaaagagaccccatggttttatttttcactgacctcacagattacgtagtagataccactaatgtttatactctttaagtcaattttattggagtatattttacataaaattcactcatgttgtatgtgcaattcagtaagtttcaacaaatacatatattcatgtaaccacctctccaagatataaagcatttccatcacccgaaaagcttctgtccttcagttttgcaatcatttacacacccccactatagccaccgatctactttctttatttgttttcccttttctaagactttatacaaatggaattatatcacacacatcttttgtgtgtggctttcttcactcagcataaagttttgacattcatccaagttattgcatgacttcatttcttcttattgctgagtacttttcattgtgtgaatatactacaattatactgtgtgaatactactacaatggaatatatacagatggccaaaaaacacatgaaaatatactcaacatcattagttatcaggaaaatgcaaattaaaaccacaatgagttaccactgtatacccgctgaaatgtctatagctctgttatcagctatataaacagcagctattaaaaatgtgtagctattgaatacttgaaatatgactagtcccaattgagatgtgttgtaaacatataaatcagattttggagctagagtgcaaaaaaaaatccataatttttactctgattacatgttgaaatgataatattttgaatagatttgattaaaattttaaaataaatttcaactattctttttaaattgtggctactagaaaatttgaatttatatattatagtttccattgttttcccactggacgggcctcctgggctataatttgaaggccgataatgaaatgttggtaaggttatgaagcaactggaactcgtcatacattgttggtagaagtgtaaaatgatacattattttggcaaagagtttggaaatttcttatgaagttaaacatacccttaatatacgacccagtaattccactaatagatattacaaaaagaaatgaaagcatgtgccctcacaaagatttgtacatgaattttttttaagatcttgctatgttgcccaggctggatttcaactcctgatcctcctaccttggcctcccaaaatgctgagagtacaggcgtgagccactgtactcagccttgtacatgaataactttttattatttttttttttttgagacggagtctcgctctgtcgcccaggccggactgcggactgcagtggcgcaatctcggctcactgcaagctccgcttcctgggttcacaccattctcctgcctcagcctcccgagtagctgggactacaggcgcccgccaccgcgcccggctaattttttatatttttttagtagagacggggtttcaccttgttagccaggatggtctcgatctcctgacctcatgttccacccgcctcggcctcccaaagtgctgggattacaggcgtgagccacatgaatatttttaacagctttatttatagtagcccaaaactggagctaatttctttttcttttcaagtaaaagtcccacttcatactggttattcttttcagaaaccatttgtcacactaagctgtgtggtgtagttcacaaaattagggtttgacccttgatattttaggggggatatttgatgtgtaatatttatagcaccagtgtaaatgttagaatcactgtctataaaacatgttaatgaaagacctaaaaaaactaaacaatatacaaaattttttacaaatccaacattcaaaaactagtcagttcatatctagaggcaaaaaataaaaatagtgtatatcttatttgaaaacatttaatgtagttaaagtctttaaatgatttcacattgttttaatggtctttgaatgacccttgcagttagaaatacatttaaactcaattttaaaattataaaattatagctatatcttctgataaattgcatctactttcctggggattagaaagcttgaatgaggggaaaagcagaggtgtgtgcccagttgctccaattttaagtctatgaacaattttgagtctatgaactgctttaggtttcatttttatacataccataccaaataggacatactcttctcaggatatagtcatttttcatttgtgactttctaatcatccagatagaatgaggtgagtctgagtagttttgttcctctaatattttttgaaaggggataatgatattcttattgctcactttatatatgtatattctttctgtaaaatgttcttaagattttatacaaatgaaattatgttatacataccttttgtgtctggctttcttcactcagcataaagttttgagattcatccaagttattgcatgactgtaattattccttacactaatgattttcctctaagcttaaacagttggaggcatttgatatgtctgtactctcctacattcattataaatttgtctagtttttcccagatgcaataaactattcctctttaaattgaatgtataccaaacaaaaaaggggaatctttcctacaactgcttctttcacatggctacatcagatttattttgaagcccgttgagaaagaagaagtaagttcatttcattgcttcggcatttccccagtgcctggagtccttgaggcctgcacatatttctactggttgtgtgctaacactgcttgggactgaaacaacgtacttctgacattaggctcaacaagattcactttgaatagtgaaagttgattagaaaactactccatttctcattacctcaagaaaacaatttttacatagccatgaatgagcaaatttcacccccatccaagactatcctgagcatttatagcaggtaataaatgtcttcccatggtgaattcaatgtgaagtccaaggctttgttatctagagaggaagttaagtgctaacagcaacagcatgaaaacgcatgcagctatggtataattctgatttgttttagaaaaactattaatttccttgttacaaagccaagtaagaataaccctttaaaactcttgaaccatgaaagccattttccttaagggttttaaatttgggaacagactcctgaaatttatagctttgatgagatattctttgcctgcagtcaagatgagagctagatcattggtttcccagcatgacacctatgtgttcttgtgtgcactagatatcattaagctcataataacacagccagcatcacatttaacgtttgaaaggttcacttttgtctcgtagtttacatctttcatttgcacctattgcatgctaaatatcccactctagaaaatgagatacactctacctatattgataccgtcgatggagtaaaaaaaaattactattttcatatccatgactttcaagctgcaaagagtcaatagataatgacttctagaaacaacagataattgaatcagatattacatgtgtaagtctgaatatgaaaaccttccctgacatttaaggagcagaaaatgtgaatctccatgatgcatgtcagttccaactgttatcatttttaatattatgtttaattctaaaggtgatgcaagattattatttcttttaaagatagatgagctctttcaggatattctgattttaaggcaatgagaaagacagcttattaggtagtacctaatgatcagaaacagataataaacactgcaggaatccatcattgtatgttacatgatgaaataacatgaaaaaactctgaagaaaagaaaactactgttttcaaaattcattattttctgacattaggcaatgaaattgtgattaaggaacctatttctgcaagctgtttccttaaatttgtgcaaatgtttgaaggtattttatctgtaagtttacaattcctttaccatttattattatcaacaatttcaaacatatacaagacttgagagaagagtacagtgaatccccatgtactcaggacccagatgaacaactattaagatttttgccatgcttgccttatctgtcccttctttccctttctaccaaattgtcttaaagcagatcccagatggccatgctttttaacatgcatgtttttctcctctcaacaattcttttttaattaaatatgtttaatatatacatatttttccatggcagatgcatattttgtttttgaataatgtaagatggtcagtagattaatacataatggaagattggatgacagtacagtctgcctaatgcacttcagactatgtttttagtgagattcaaaagaagatttttgttttgatctttttaatggtgatgatgtaagcagcagaaattatacagactcttagttcacatttgcattttttgcaccttaggcagaaaaacagaactaatcagagctacaaatcataaaggagaacacatttcaacctccagagcactgtggaactgagatatcttactgatgatactaacaagagacaaaactagcacattcagcaatgccttcaaaaatgttaccttgttagtaaaaatcaaattaacaaatagaacatctgttcggggttatgattatttctcctagggaatgctttttttgagactatatatttttggcaagtattgatttgggatttatgtatttgattatatctaactctagaagtcaggaatagtcagtcttacagaaaatgttttagtagatttccttcattgtccctagacacatcacatttgggagtttcttattccctcatcctagttctagtctacctttcctggggaacaatttctgctcaagacctttccttcagaactgcacctttcctagacccctctaaaatcaacctctttttccttctcccctcaaaacccagaatctctttcccacggattccacatcctcctttcagttataacacaagaaaatagttgaaaaatatggtgagtaaattcttcatgagtatattagtcaggctagactaggatatgctatgaaaacaatccctgacatctcggtggcttaaacaaacaaaagttcacttctcactcacaccactgcctgatgtgaatcaggtggctcttcttggagaagaactgcctcatggattcatgtgttcatattgcaacttcaccatttgagtgttcttcgtggagagcagtagggtgggggctggagtgagattgagagaatgaagaatcaactcatacttcattccttcagactctgctgcatcacttccatccacatatctagtggcaagaactgagtgccatggttccaacctaaggataagggaagctgagaaaggtaaggtggtcttggatgtgtgcccgataagaggcaacactgctaactaaacacagagcattgaatatatctcaattccttttcttgtcatttgaaaactgtcttaacatatttccccctctacccagaagcactgtaacatatggcatgactcttaagagcattgggtttttattttattttatttttatttttattttttgagacggagtctcactctgttgcccaggctggagtgcaatggcgcgatctcggctcactgcaagccctgcctcccgggttcaagcgattctcccacctcagcctctggagtagctgggattacaagcacccgccatcacacccaactaatttttgtattttcagttcagacggggtttcaccatgttggccaggctggtcttgaactcctgacctcaggtgatccacctgccttggcctcccaaagtgccgggattacaggtgtgagtcgctgcgcccagcctagggcataggttttgaattagaccagcctgatttccaatcccagcttcaacacttcttgtgttaccctgtgcaagtaacttaacctgtctaagccttagttttctaggctgtgaaatagagataatatccaggtttcatgcttttctacttatattgtggtaaaaaacacataacatttaccatctttaccatttttaagtgttcagtactgtcatgttaagtagatgcatattattatacaacagatctctataacttctcatcctgcaaaactgaaactctgtggccactgaacaaaagtcttctttcttctcgcccctcagtccctggctaccaccgttctcctttctgcttctaaaaagtttgactactttaaatacctcatataaatgaaatcgcacaatgtttgccttttgtgactggcttatttcacttagtgtaatgtcttcaaggttgatatgttatggcatatgataatattctctttttaaggctgaaaaatattccattttcacacaaacacactattttcttttattcgttcgtcaatggacatttagtttgcttctacattttggctattgcaaattgtgaataatgctgcaatgaatatgagtggattcaattatttcatctacagacccagaagtgacattgctggattatatagtaattttatttttaattttctgatgaacctccatgctgtttttcatagcagctgcaccatttacattcccatcaacagtgcataagggtttcaatttttccacatccttgtcaacacttattattctctgtttttgggggtagaggccatcctaacaggtgtaagatgatgtctcatcatggtttcgatttgcgtttcccaatgattag

SEQ ID NO: 969 - DNA, 4501 bp, Homo sapiens
ctgaggcagccgccctcgcgctgtgcaatttctggtctttcgttgcttctggtccaggctaataaagtttttctttctttaattttttttcttctagttttaacgggagaaattaactccccggggccgccgggttgactgcgctgcctgggccggaggtcttctccggccagggagcgctgtgggaaggggctcgagcggccagggccaggcgaggccgggggggcggggggttaggggaccgcggggctactcttgggagcgcccctgtccggctggctgcgcgccggttttaaatagcatctttcggacttgtcttcgcggccccagtccccgacctcggcgctgcctgggctcctgcagcctctccctaagtcttctccaaacgaccacctcacggattccttatggatcgcagctccaagaggaggcaggtgaagcctttggcagcttctctgctggaagctcttgattatgatagttcagatgacagtgattttaaagttggagatgcctcagattctgaagggagtggtaatggaagtgaagatgcttcaaaggacagtggagaaggttcctgtagtgattctgaagaaaatattttagaagaagaactgaatgaagatattaaagtaaaagaagaacaacttaaaaattctgcagaggaagaagtactatcatcagaaaaacaattaattaaaatggaaaagaaggaagaagaagaaaatggagaaagacctagaaagaaaagggagaaagagaaggaaaaagaaaaggaaaaggagaaagagaaggaaagagagaaggaaaaagaaaaagcaacagtatctgagaatgtggctgcttctgctgctgccaccacaccagccacaagtcctcctgctgttaacacatccccttctgttcccactacgacaaccgctacagaggaacaagtcagcgagccaaaaaaatggaaccttcgacgaaaccgaccacttctggattttgtgtccatggaagagctgaatgacatggatgactatgacagtgaggatgacaatgattggcgacctactgtagtaaagagaaaagggagatctgcgtctcagaaagagggaagtgatggagacaatgaggatgatgaagatgagggaagcgggagtgatgaagacgagaatgatgaaggcaatgatgaagatcatagtagccctgccagtgaagggggttgcaagaagaagaagagtaaagttcttagcagaaacagtgctgatgatgaggaactgaccaatgatagcctgaccctatctcaaagcaagagtaatgaggactcgctgattcttgagaagagtcaaaactggagctctcaaaaaatggaccatattctgatttgctgtgtttgtctgggagataatagtgaggacgctgatgaaataattcagtgtgacaattgtggcattacagtccatgaaggttgttatggagttgatggagagagtgactctattatgagttcagcttctgaaaactccactgaaccttggttttgtgatgcctgtaaatgtggtgtttctcctagctgtgaactgtgtcctaatcaggatggaattttcaaggagacagatgctggaagatgggttcatattgtttgtgccctgtatgttcctggagtagcctttggagatattgacaaattacgaccagtaacactaacggaaatgaactattccaaatatggtgccaaggagtgtagcttttgtgaagaccctcgctttgctagaactggggtttgcattagctgtgatgcagggatgtgcagagcctatttccatgtgacctgtgctcaaaaggaaggtctgctttcagaggcagcggcggaagaggatatagcagatccattctttgcttattgtaagcaacatgcagataggttagacagaaagtggaagagaaaaaactacttggctctacagtcctattgtaaaatgtctttgcaagagagagagaagcaactatcaccagaagcacaggcaaggatcaatgcccggcttcagcagtatcgtgccaaagcagaactagctcgatctaccagaccccaggcctgggttccaagggaaaaattgcccagaccactcaccagcagtgcttcagctattcgtaaacttatgcggaaagcagaactcatggggatcagtacagatatctttccagtggacaattcagatactagttctagtgtggatggaaggagaaaacataagcaaccagctctcactgcagattttgtgaattattattttgagagaaatatgcgcatgattcaaattcaggaaaatatggctgaacaaaagaatataaaagataaattagagaatgaacaagaaaagcttcatgtagaatataataagctatgtgaatctttagaagaactacaaaacctgaatggaaaacttcgaagtgaaggacaaggaatatgggctttactaggcagaatcacagggcagaagttgaatataccggcaattttgcgagcacccaaggagagaaaaccaagtaaaaaagaaggaggcacacaaaagacatctactcttcctgcagtactttatagttgtgggatttgtaagaagaaccatgatcagcatcttcttttattgtgtgatacctgtaaactacattaccatcttggatgtctggatcctcctcttacaaggatgccaagaaagaccaaaaacagttattggcagtgctcggaatgtgaccaggcagggagcagtgacatggaagcagatatggccatggaaaccctaccagatggaaccaaacgatcaaggaggcagattaaggaaccagtgaaatttgttccacaggatgtgccaccagaacccaagaagattccgataagaaacacgagaaccagaggacgaaaacgaagcttcgttcctgaggaagaaaaacatgaggaaagagttcctagagagagaagacaaagacagtctgtgttgcaaaagaagcccaaggctgaagatttaagaactgaatgtgcaacttgcaagggaactggagacaatgaaaatcttgtcagatacccttcatgagacccaactctgccacagctcatcctcggaggcaatcccggaaacctcttttataagtgtgattttaaaaatgtggattaaactctcgatagagtacataaagtaaaggagaacagctatattgtcctttctataagcttgtcactgcaaaaagttgccttttgcttgtcaggtttggatagaatataattgattggtttgttacttggactaacaaggcagtagatttgcctgtgtggaattttttttcctatttttcttctttttgctttttttgcacttatcagaaatatttgatgtgtgcattgttgaaaaatactggatacatgtcttgtcagaattgtcgtattaagtaatgtctttccctcttgcttctttggcaaatgttgatacacagtgtttggacttactgaagagttactgaagcctgtgggacttaataaatacaatatgctactccctgttgtgattgaacaatacaaataacaaacaagaaagacaatgcattccattagtctgctattctgtttccttcaacttcatacatagattcatatatgaagtactgcattgtaaaacaactatagactcatattaaatgttatttctatttataatattcagcaaaagtgaaagacttgtgaagcatatgacattctatttttgacttattagtcctagtgtgaaagcattaatattattagcatgaaatttttacttcagattttaagctcatgaataaagatatatctgtgttgatctctagatatttttagtaatacccaaatatattcagtccttattgttttaatataagctttctgtgttcagtataattttatttttctcaaccttaaatatgaacttaggaaataaggagggaagtacaaagattattgactatacaacctaccagctgaaagaaagatcttcatcaacatctgtatctttccagaggtatacagaattaaaatttgatcttcaagctttaatgatccagttttaagtcaacggcagaagtatgttgaatatttcatcactcaatcttgaactgatttagaagagactctttgctgaaattgaattgcacttatacatgtaaattgtcaacatgtaatttggaattttctgattaataaatgtggttttggacatcttttcgggtatagtgacaatggaaaatagtttaaactttaggaatagagtaggtaatgttatagataatcaaaagcaattgtaattgtaaagctgctgtaatctagtgatctctagttacagtgaggaacgctatgattggatgagatgtttgataaaagtaaaatgtgtatgaaattacatataaacagattattagcttattgaaagatctcataacattggaggaaaaatattcataatctttagcaaaactagtagacttttgttta

SEQ ID NO: 970 - protein, 878 aa, Homo sapiens
MDRSSKRRQVKPLAASLLEALDYDSSDDSDFKVGDASDSEGSGNGSEDASKDSGEGSCSDSEENIEELNEDIKVKEEQLKNSAEEEVLSSEKQLIKMEKKEEEENGERPRKKREKEKEKEKEKEKEKEREKEKEKATVSENVAASAAATTPATSPPAVNTSPSVPTTTTATEEQVSEPKKWNLRRNRPLLDFVSMEELNDMDDYDSEDDNDWRPTVVKRKGRSASQKEGSDGDNEDDEDEGSGSDEDENDEGNDEDHSSPASEGGCKKKKSKVLSRNSADDEELTNDSLTLSQSKSNEDSLIKSQNWSSQKMDHILICCVCLGDNSEDADEIIQCDNCGITVHEGCYGVDGESDSIMSSASENSTEPWFCDACKCGVSPSCELCPNQDGIFKETDAGRWVHIVCALYVPGVAFGDIDKLRPVTLTEMNYSKYGAKECSFCEDPRFARTGVCISCDAGMCRAYFHVTCAQKEGLLSEAAAEEDIADPFFAYCKQHADRLDRKWKRKNYLALQSYCKMSLQEREKQLSPEAQARINARLQQYRAKAELARSWQAWVPREKLPRPLTSSASAIRKLMRKAELMGISTDIFPVDNSDTSSSVDGRRKHKQPALTADFVNYYFERNMRMIQIQENMAEQKNIKDKLENEQEKLHVEYNKLCESLEELQNLNGKLRSEGQGIWALLGRITGQKLNIPAILRAPKERKPSKKEGGTQKTSTLPAVKCGICKKNHDQHLLLLCDTCKLHYHLGCLDPPLTRMPRKTKNSYWQCSECDQAGSSDMEADMAMLPDGTKRSRRQIKEPVKFVPQDVPPEPKKIPIRNTRTRGRKRSFVPEEEKHEERVPRERRQRQSVLQKKPKAEDLRTECATCKGTGDNENLVRYPS

SEQ ID NO: 971 - DNA, 4150 bp, Homo sapiens
ctgaggcagccgccctcgcgctgtgcaatttctggtctttcgttgcttctggtccaggctaataaagtttttctttctttaattttttttcttctagttttaacgggagaaattaactccccggggccgccgggttgactgcgctgcctgggccggaggtcttctccggccagggagcgctgtgggaaggggctcgagcggccagggccaggcgaggccgggggggcggggggttaggggaccgcggggctactcttgggagcgcccctgtccggctggctgcgcgccggttttaaatagcatctttcggacttgtcttcgcggccccagtccccgacctcggcgctgcctgggctcctgcagcctctccctaagtcttctccaaacgaccacctcacggattccttatggatcgcagctccaagaggaggcaggtgaagcctttggcagcttctctgctggaagctcttgattatgatagttcagatgacagtgattttaaagttggagatgcctcagattctgaagggagtggtaatggaagtgaagatgcttcaaaggacagtggagaaggttcctgtagtgattctgaagaaaatattttagaagaagaactgaatgaagatattaaagtaaaagaagaacaacttaaaaattctgcagaggaagaagtactatcatcagaaaaacaattaattaaaatggaaaagaaggaagaagaagaaaatggagaaagacctagaaagaaaagggagaaagagaaggaaaaagaaaaggaaaaggagaaagagaaggaaagagagaaggaaaaagaaaaagcaacagtatctgagaatgtggctgcttctgctgctgccaccacaccagccacaagtcctcctgctgttaacacatccccttctgttcccactacgacaaccgctacagaggaacaagtcagcgagccaaaaaaatggaaccttcgacgaaaccgaccacttctggattttgtgtccatggaagagctgaatgacatggatgactatgacagtgaggatgacaatgattggcgacctactgtagtaaagagaaaagggagatctgcgtctcagaaagagggaagtgatggagacaatgaggatgatgaagatgagggaagcgggagtgatgaagacgagaatgatgaaggcaatgatgaagatcatagtagccctgccagtgaagggggttgcaagaagaagaagagtaaagttcttagcagaaacagtgctgatgatgaggaactgaccaatgatagcctgaccctatctcaaagcaagagtaatgaggactcgctgattcttgagaagagtcaaaactggagctctcaaaaaatggaccatattctgatttgctgtgtttgtctgggagataatagtgaggacgctgatgaaataattcagtgtgacaattgtggcattacagtccatgaaggttgttatggagttgatggagagagtgactctattatgagttcagcttctgaaaactccactgaaccttggttttgtgatgcctgtaaatgtggtgtttctcctagctgtgaactgtgtcctaatcaggatggaattttcaaggagacagatgctggaagatgggttcatattgtttgtgccctgtatgttcctggagtagcctttggagatattgacaaattacgaccagtaacactaacggaaatgaactattccaaatatggtgccaaggagtgtagcttttgtgaagaccctcgctttgctagaactggggtttgcattagctgtgatgcagggatgtgcagagcctatttccatgtgacctgtgctcaaaaggaaggtctgctttcagaggcagcggcggaagaggatatagcagatccattctttgcttattgtaagcaacatgcagataggttagacagaaagtggaagagaaaaaactacttggctctacagtcctattgtaaaatgtctttgcaagagagagagaagcaactatcaccagaagcacaggcaaggatcaatgcccggcttcagcagtatcgtgccaaagcagaactagctcgatctaccagaccccaggcctgggttccaagggaaaaattgcccagaccactcaccagcagtgcttcagctattcgtaaacttatgcggaaagcagaactcatggggatcagtacagatatctttccagtggacaattcagatactagttctagtgtggatggaaggagaaaacataagcaaccagctctcactgcagattttgtgaattattattttgagagaaatatgcgcatgattcaaattcaggaaaatatggctgaacaaaagaatataaaagataaattagagaatgaacaagaaaagcttcatgtagaatataataagctatgtgaatctttagaagaactacaaaacctgaatggaaaacttcgaagtgaaggacaaggaatatgggctttactaggcagaatcacagggcagaagttgaatataccggcaattttgcgagcacccaaggagagaaaaccaagtaaaaaagaaggaggcacacaaaagacatctactcttcctgcagtactttatagttgtgggatttgtaagaagaaccatgatcagcatcttcttttattgtgtgatacctgtaaactacattaccatcttggatgtctggatcctcctcttacaaggatgccaagaaagaccaaaaacagttattggcagtgctcggaatgtgaccaggcagggagcagtgacatggaagcagatatggccatggaaaccctaccagatggaaccaaacgatcaaggaggcagattaaggaaccagtgaaatttgttccacaggatgtgccaccagaacccaagaagattccgataagaaacacggaaagagttcctagagagagaagacaaagacagtctgtgttgcaaaagaagcccaaggctgaagatttaagaactgaatgtgcaacttgcaagggaactggagacaatgaaaatcttgtcagaaatatttgatgtgtgcattgttgaaaaatactggatacatgtcttgtcagaattgtcgtattaagtaatgtctttccctcttgcttctttggcaaatgttgatacacagtgtttggacttactgaagagttactgaagcctgtgggacttaataaatacaatatgctactccctgttgtgattgaacaatacaaataacaaacaagaaagacaatgcattccattagtctgctattctgtttccttcaacttcatacatagattcatatatgaagtactgcattgtaaaacaactatagactcatattaaatgttatttctatttataatattcagcaaaagtgaaagacttgtgaagcatatgacattctatttttgacttattagtcctagtgtgaaagcattaatattattagcatgaaatttttacttcagattttaagctcatgaataaagatatatctgtgttgatctctagatatttttagtaatacccaaatatattcagtccttattgttttaatataagctttctgtgttcagtataattttatttttctcaaccttaaatatgaacttaggaaataaggagggaagtacaaagattattgactatacaacctaccagctgaaagaaagatcttcatcaacatctgtatctttccagaggtatacagaattaaaatttgatcttcaagctttaatgatccagttttaagtcaacggcagaagtatgttgaatatttcatcactcaatcttgaactgatttagaagagactctttgctgaaattgaattgcacttatacatgtaaattgtcaacatgtaatttggaattttctgattaataaatgtggttttggacatcttttcgggtatagtgacaatggaaaatagtttaaactttaggaatagagtaggtaatgttatagataatcaaaagcaattgtaattgtaaagctgctgtaatctagtgatctctagttacagtgaggaacgctatgattggatgagatgtttgataaaagtaaaatgtgtatgaaattacatataaacagattattagcttattgaaagatctcataacattggaggaaaaatattcataatctttagcaaaactagtagacttttgttta

SEQ ID NO: 972 - protein, 860 aa, Homo sapiens
MDRSSKRRQVKPLAASLLEALDYDSSDDSDFKVGDASDSEGSGNGSEDASKDSGEGSCSDSEENIEELNEDIKVKEEQLKNSAEEEVLSSEKQLIKMEKKEEEENGERPRKKREKEKEKEKEKEKEKEREKEKEKATVSENVAASAAATTPATSPPAVNTSPSVPTTTTATEEQVSEPKKWNLRRNRPLLDFVSMEELNDMDDYDSEDDNDWRPTVVKRKGRSASQKEGSDGDNEDDEDEGSGSDEDENDEGNDEDHSSPASEGGCKKKKSKVLSRNSADDEELTNDSLTLSQSKSNEDSLIKSQNWSSQKMDHILICCVCLGDNSEDADEIIQCDNCGITVHEGCYGVDGESDSIMSSASENSTEPWFCDACKCGVSPSCELCPNQDGIFKETDAGRWVHIVCALYVPGVAFGDIDKLRPVTLTEMNYSKYGAKECSFCEDPRFARTGVCISCDAGMCRAYFHVTCAQKEGLLSEAAAEEDIADPFFAYCKQHADRLDRKWKRKNYLALQSYCKMSLQEREKQLSPEAQARINARLQQYRAKAELARSWQAWVPREKLPRPLTSSASAIRKLMRKAELMGISTDIFPVDNSDTSSSVDGRRKHKQPALTADFVNYYFERNMRMIQIQENMAEQKNIKDKLENEQEKLHVEYNKLCESLEELQNLNGKLRSEGQGIWALLGRITGQKLNIPAILRAPKERKPSKKEGGTQKTSTLPAVKCGICKKNHDQHLLLLCDTCKLHYHLGCLDPPLTRMPRKTKNSYWQCSECDQAGSSDMEADMAMLPDGTKRSRRQIKEPVKFVPQDVPPEPKKIPIRNTERVPRERRQRQSVLQKKPKAEDLRTECATCKGTGDNENLVRNI

SEQ ID NO: 973 - DNA, 3384 bp, Homo sapiens
ctgaggcagccgccctcgcgctgtgcaatttctggtctttcgttgcttctggtccaggctaataaagtttttctttctttaattttttttcttctagttttaacgggagaaattaactccccggggccgccgggttgactgcgctgcctgggccggaggtcttctccggccagggagcgctgtgggaaggggctcgagcggccagggccaggcgaggccgggggggcggggggttaggggaccgcggggctactcttgggagcgcccctgtccggctggctgcgcgccggttttaaatagcatctttcggacttgtcttcgcggccccagtccccgacctcggcgctgcctgggctcctgcagcctctccctaagtcttctccaaacgaccacctcacggattccttatggatcgcagctccaagaggaggcaggtgaagcctttggcagcttctctgctggaagctcttgattatgatagttcagatgacagtgattttaaagttggagatgcctcagattctgaagggagtggtaatggaagtgaagatgcttcaaaggacagtggagaaggttcctgtagtgattctgaagaaaatattttagaagaagaactgaatgaagatattaaagtaaaagaagaacaacttaaaaattctgcagaggaagaagtactatcatcagaaaaacaattaattaaaatggaaaagaaggaagaagaagaaaatggagaaagacctagaaagaaaagggagaaagagaaggaaaaagaaaaggaaaaggagaaagagaaggaaagagagaaggaaaaagaaaaagcaacagtatctgagaatgtggctgcttctgctgctgccaccacaccagccacaagtcctcctgctgttaacacatccccttctgttcccactacgacaaccgctacagaggaacaagtcagcgagccaaaaaaatggaaccttcgacgaaaccgaccacttctggattttgtgtccatggaagagctgaatgacatggatgactatgacagtgaggatgacaatgattggcgacctactgtagtaaagagaaaagggagatctgcgtctcagaaagagggaagtgatggagacaatgaggatgatgaagatgagggaagcgggagtgatgaagacgagaatgatgaaggcaatgatgaagatcatagtagccctgccagtgaagggggttgcaagaagaagaagagtaaagttcttagcagaaacagtgctgatgatgaggaactgaccaatgatagcctgaccctatctcaaagcaagagtaatgaggactcgctgattcttgagaagagtcaaaactggagctctcaaaaaatggaccatattctgatttgctgtgtttgtctgggagataatagtgaggacgctgatgaaataattcagtgtgacaattgtggcattacagtccatgaaggttgttatggagttgatggagagagtgactctattatgagttcagcttctgaaaactccactgaaccttggttttgtgatgcctgtaaatgtggtgtttctcctagctgtgaactgtgtcctaatcaggatggaattttcaaggagacagatgctggaagatgggttcatattgtttgtgccctgtatgttcctggagtagcctttggagatattgacaaattacgaccagtaacactaacggaaatgaactattccaaatatggtgccaaggagtgtagcttttgtgaagaccctcgctttgctagaactggggtttgcattagctgtgatgcagggatgtgcagagcctatttccatgtgacctgtgctcaaaaggaaggtctgctttcagaggcagcggcggaagaggatatagcagatccattctttgcttattgtaagcaacatgcagataggttagacagaaagtggaagagaaaaaactacttggctctacagtcctattgtaaaatgtctttgcaagagagagagaagcaactatcaccagaagcacaggcaaggatcaatgcccggcttcagcagtatcgtgccaaagcagaactagctcgatctaccagaccccaggcctgggttccaagggaaaaattgcccagaccactcaccagcagtgcttcagctattcgtaaacttatgcggaaagcagaactcatggggatcagtacagatatctttccagtggacaattcagatactagttctagtgtggatggaaggagaaaacataagcaaccagctctcactgcagattttgtgaattattattttgagagaaatatgcgcatgattcaaattcaggaaaatatggctgaacaaaagaatataaaagataaattagagaatgaacaagaaaagcttcatgtagaatataataagctatgtgaatctttagaagaactacaaaacctgaatggaaaacttcgaagtgaaggacaaggaatatgggctttactaggcagaatcacagggcagaagttgaatataccggcaattttgcgagcacccaaggagagaaaaccaagtaaaaaagaaggaggcacacaaaagacatctactcttcctgcagtactttatagttgtgggatttgtaagaagaaccatgatcagcatcttcttttattgtgtgatacctgtaaactacattaccatcttggatgtctggatcctcctcttacaaggatgccaagaaagaccaaaaacagttattggcagtgctcggaatgtgaccaggcagggagcagtgacatggaagcagatatggccatggaaaccctaccagatggaaccaaacgatcaaggaggcagattaaggaaccagtgaaatttgttccacaggatgtgccaccagaacccaagaagattccgataagaaacacgagaaccagaggacgaaaacgaagcttcgttcctgaggaagaaaaacatgaggaaagagttcctagagagagaagacaaagacagtctgtgttgcaaaagaagcccaaggctgaagatttaagaactgaatgtgcaacttgcaagggaactggagacaatgaaaatcttgtcaggtgtgatgaatgcagactctgctaccattttggctgtttggatcctcctttgaaaaagtctcctaaacagacaggctacggatggatatgtcaggaatgtgattcttcatcttccaaggaagatgaaaatgaagctgaaagaaaaaatatatctcaggagctcaacatggaacagaaaaatccaaagaaataaaagattttctgtagtgtttttgaaaagtttgcagcttatgtaatagcagataaaatttctaattgtaaaatgttaaattgtaaaatctaatttgcaaaatgttctcaataaagtcattcaaaatgaaata

SEQ ID NO: 974 - protein, 938 aa, Homo sapiens
MDRSSKRRQVKPLAASLLEALDYDSSDDSDFKVGDASDSEGSGNGSEDASKDSGEGSCSDSEENIEELNEDIKVKEEQLKNSAEEEVLSSEKQLIKMEKKEEEENGERPRKKREKEKEKEKEKEKEKEREKEKEKATVSENVAASAAATTPATSPPAVNTSPSVPTTTTATEEQVSEPKKWNLRRNRPLLDFVSMEELNDMDDYDSEDDNDWRPTVVKRKGRSASQKEGSDGDNEDDEDEGSGSDEDENDEGNDEDHSSPASEGGCKKKKSKVLSRNSADDEELTNDSLTLSQSKSNEDSLIKSQNWSSQKMDHILICCVCLGDNSEDADEIIQCDNCGITVHEGCYGVDGESDSIMSSASENSTEPWFCDACKCGVSPSCELCPNQDGIFKETDAGRWVHIVCALYVPGVAFGDIDKLRPVTLTEMNYSKYGAKECSFCEDPRFARTGVCISCDAGMCRAYFHVTCAQKEGLLSEAAAEEDIADPFFAYCKQHADRLDRKWKRKNYLALQSYCKMSLQEREKQLSPEAQARINARLQQYRAKAELARSWQAWVPREKLPRPLTSSASAIRKLMRKAELMGISTDIFPVDNSDTSSSVDGRRKHKQPALTADFVNYYFERNMRMIQIQENMAEQKNIKDKLENEQEKLHVEYNKLCESLEELQNLNGKLRSEGQGIWALLGRITGQKLNIPAILRAPKERKPSKKEGGTQKTSTLPAVKCGICKKNHDQHLLLLCDTCKLHYHLGCLDPPLTRMPRKTKNSYWQCSECDQAGSSDMEADMAMLPDGTKRSRRQIKEPVKFVPQDVPPEPKKIPIRNTRTRGRKRSFVPEEEKHEERVPRERRQRQSVLQKKPKAEDLRTECATCKGTGDNENLVRCDECRLCYHFGCLDPPLKKSPKQTGYGWICQECDSSSSKEDENEAERKNISQELNMEQKNPKK

SEQ ID NO: 975 - DNA, 2596 bp, Homo sapiens
ctgaggcagccgccctcgcgctgtgcaatttctggtctttcgttgcttctggtccaggctaataaagtttttctttctttaattttttttcttctagttttaacgggagaaattaactccccggggccgccgggttgactgcgctgcctgggccggaggtcttctccggccagggagcgctgtgggaaggggctcgagcggccagggccaggcgaggccgggggggcggggggttaggggaccgcggggctactcttgggagcgcccctgtccggctggctgcgcgccggttttaaatagcatctttcggacttgtcttcgcggccccagtccccgacctcggcgctgcctgggctcctgcagcctctccctaagtcttctccaaacgaccacctcacggattccttatggatcgcagctccaagaggaggcaggtgaagcctttggcagcttctctgctggaagctcttgattatgatagttcagatgacagtgattttaaagttggagatgcctcaggactcgctgattcttgagaagagtcaaaactggagctctcaaaaaatggaccatattctgatttgctgtgtttgtctgggagataatagtgaggacgctgatgaaataattcagtgtgacaattgtggcattacagtccatgaaggttgttatggagttgatggagagagtgactctattatgagttcagcttctgaaaactccactgaaccttggttttgtgatgcctgtaaatgtggtgtttctcctagctgtgaactgtgtcctaatcaggatggaattttcaaggagacagatgctggaagatgggttcatattgtttgtgccctgtatgttcctggagtagcctttggagatattgacaaattacgaccagtaacactaacggaaatgaactattccaaatatggtgccaaggagtgtagcttttgtgaagaccctcgctttgctagaactggggtttgcattagctgtgatgcagggatgtgcagagcctatttccatgtgacctgtgctcaaaaggaaggtctgctttcagaggcagcggcggaagaggatatagcagatccattctttgcttattgtaagcaacatgcagataggttagacagaaagtggaagagaaaaaactacttggctctacagtcctattgtaaaatgtctttgcaagagagagagaagcaactatcaccagaagcacaggcaaggatcaatgcccggcttcagcagtatcgtgccaaagcagaactagctcgatctaccagaccccaggcctgggttccaagggaaaaattgcccagaccactcaccagcagtgcttcagctattcgtaaacttatgcggaaagcagaactcatggggatcagtacagatatctttccagtggacaattcagatactagttctagtgtggatggaaggagaaaacataagcaaccagctctcactgcagattttgtgaattattattttgagagaaatatgcgcatgattcaaattcaggaaaatatggctgaacaaaagaatataaaagataaattagagaatgaacaagaaaagcttcatgtagaatataataagctatgtgaatctttagaagaactacaaaacctgaatggaaaacttcgaagtgaaggacaaggaatatgggctttactaggcagaatcacagggcagaagttgaatataccggcaattttgcgagcacccaaggagagaaaaccaagtaaaaaagaaggaggcacacaaaagacatctactcttcctgcagtactttatagttgtgggatttgtaagaagaaccatgatcagcatcttcttttattgtgtgatacctgtaaactacattaccatcttggatgtctggatcctcctcttacaaggatgccaagaaagaccaaaaacagttattggcagtgctcggaatgtgaccaggcagggagcagtgacatggaagcagatatggccatggaaaccctaccagatggaaccaaacgatcaaggaggcagattaaggaaccagtgaaatttgttccacaggatgtgccaccagaacccaagaagattccgataagaaacacgagaaccagaggacgaaaacgaagcttcgttcctgaggaagaaaaacatgaggaaagagttcctagagagagaagacaaagacagtctgtgttgcaaaagaagcccaaggctgaagatttaagaactgaatgtgcaacttgcaagggaactggagacaatgaaaatcttgtcaggtgtgatgaatgcagactctgctaccattttggctgtttggatcctcctttgaaaaagtctcctaaacagacaggctacggatggatatgtcaggaatgtgattcttcatcttccaaggaagatgaaaatgaagctgaaagaaaaaatatatctcaggagctcaacatggaacagaaaaatccaaagaaataaaagattttctgtagtgtttttgaaaagtttgcagcttatgtaatagcagataaaatttctaattgtaaaatgttaaattgtaaaatctaatttgcaaaatgttctcaataaagtcattcaaaatgaaata

SEQ ID NO: 976 - protein, 655 aa, Homo sapiens
MIVQMTVILKLEMPQDSLIKSQNWSSQKMDHILICCVCLGDNSEDADEIIQCDNCGITVHEGCYGVDGESDSIMSSASENSTEPWFCDACKCGVSPSCELCPNQDGIFKETDAGRWVHIVCALYVPGVAFGDIDKLRPVTLTEMNYSKYGAKECSFCEDPRFARTGVCISCDAGMCRAYFHVTCAQKEGLLSEAAAEEDIADPFFAYCKQHADRLDRKWKRKNYLALQSYCKMSLQEREKQLSPEAQARINARLQQYRAKAELARSWQAWVPREKLPRPLTSSASAIRKLMRKAELMGISTDIFPVDNSDTSSSVDGRRKHKQPALTADFVNYYFERNMRMIQIQENMAEQKNIKDKLENEQEKLHVEYNKLCESLEELQNLNGKLRSEGQGIWALLGRITGQKLNIPAILRAPKERKPSKKEGGTQKTSTLPAVKCGICKKNHDQHLLLLCDTCKLHYHLGCLDPPLTRMPRKTKNSYWQCSECDQAGSSDMEADMAMLPDGTKRSRRQIKEPVKFVPQDVPPEPKKIPIRNTRTRGRKRSFVPEEEKHEERVPRERRQRQSVLQKKPKAEDLRTECATCKGTGDNENLVRCDECRLCYHFGCLDPPLKKSPKQTGYGWICQECDSSSSKEDENEAERKNISQELNMEQKNPKK

SEQ ID NO: 977 - DNA, 152817 bp, Mus musculus
  misc_feature (1)...(152817): n = A, C, G or T/U
tccttcctccctccctccctccttccctccctcccttccttccttccttcctttcttcctccgtcttcccatatatttctcatttccactctccccttcttgtattttccagccttcctcctctttaacggcctctcctctgaccatgttcccagtttacaacagttgagcctgctatggattcagtttgtgcctagcaaccccacttatgagttctgctggctatgctcttctcttatccagctggccttgaagacagaaacagcttcctcctgcgcttccatatatttgcatttccatattccttttgacctgtcagatctttcaccatcactgaaattaattttttatattcagatccctctgcttgggatattgtatggttatcagttcatttggatctgaatcctaagactcttccccacatctcctttatggaaccacagattataaaaattgggtgagcaataatgacatagtctgatggttaaggtatacttatataaaggcagggaacagtttacaaatacacataaaattcacttgaatttagccttgtatgcatgtctctaattccatcttctggatttttgtcaacttttgttcactttttattccctgcattcttatataaagctgtcaaaatacgtgatgttaagccatgtttcctcaagcatatacaagatttctctttggtgtatgagagcaaactccttactctggttctcacagccctactctgtcatttccctcttcccgtatcttcttaaccttatggtctatgttatgttccaatgcagactatctggtcctgtcaaaccatcttgctttctattcttaacattcaatttcctgttctctgcttagagtcttctctagggcagtaccaccctttcctgtcttatctttgacactgacaatactcaatggagaataacaataccaacttgtcattcacaatcatcatcctccactcttctgactttcttcaagtctagcccaagcacagtttattgcctcttcattttaaactgctttgaataatctcttattgtctggtaagtaaaactctaaatggtccctaaatcaaatattcagttttcagactcccctttgagccacacgttttgtttctacagcgcattaaaaactttacttggttccttcacaggtacccgacttataatgttccagtagaagttctcactatccacccctctcagatctccctaccttttaagatgcccacattaaaaagtcctctcaattagttgcctgaattagaaaatgggtgatttttctctttcctctaaatctcactttactcaattcactgtaaattctggatgatctcatgatccatccttcttgttcatctatactacctcagtctttgaggaaaagctgctgtagaccatcttgccaatctcatttttcaattattttatgtggttccttagtgatctaggaaccaaaatgattttattgaatttaaaaaagtaaggattttgggacttatcttggagatatttgctgctcttttcttctagattctccctgccaccattcacctgaatggtttctcttttaccacatcattttctcccatgcgtcttgttgctcagaccttccattatgctgtattgcatcccacaaatgtcttgttcatttgggtagtcaattattatctgtctttgccactggagccaaagcttcataatcatcttgagtgcagttgattgtaagtgttgaatgaatagcaatgcaaaaaggaatgaatggcagatggaatggaacaaacaggggcttttgtctgtctcctaggttttctgcattccaccaagcactaatctgagtatgccattgacctgctggaaatactttcatattttcccagtttttatattagtcattttaacacccagctagtcttttcaagaactgcaattgtgtgagaatgaaggtgcaaaatgtcaagctgaaattgaaactgtaggcataggcagaagaatgagctctttaccagcatagccttgctcatgatggtgaagaacccgttgttttaacaagaaagttatgagagcactagactgtgagccagacagtctgggctcagagtaagtttggacctcatctatgcactagacatactgtgggttaggtaatttcactacctctcaatttccctatctataaaatgagaatgtagcaaataaattcaaggctcttttcagctctatatttttatagttctcaggtagtagagaattattgcaggattcatttgtgagcatcagataaaataatgaatagactgtggggaagtgctgtacagatctgattattagttttgctgtgagcctggtgccctcattacagagttatttctatttgagctttggaaattgttgaggagagtggtgatgtatatgaattgaaatatcatctgggctatttctctgtggaagatatttcaagactcatgaaaataactaattagctaggcagggtgatgcattccagtaatccccagtgctccagaagtggaggcagaagaatcagtcattcaaggtcattctcagcctggctaagaggcttcgttgtctcaagaagaaaggagcaaataaacagtaaagaaatactgattctcaaggtggaaaaaaaaaggtgaggtaggatgacatttcttgtctactatgacctagaaatattacccatgctaggcattatagtaagattaccactacatttgacccaaaggcacagtacccctggactacaaccacatagcaggaagtctggaacatagttcaacatagctctagtctaccatctttgcttgactcccatttgtgcacagacacatccaagggcccaatctcagatctctctaccttctgctgatagcaggaataccagcctacttcaatacgatgtagaacaacataaatgagccacagatggagttcttcaagaaagcaagcagaatagaagtaagaatttgtatggtacccttactttcgtttttgtctttggataactgagcttgtgtgagagcatccctgaccactgtaattggatcattcttagacattttcaattgagaagtccagtagttggaggacttggtgctcatgaccaagtggacagtgctcatggttcctaagaagtgtcacagaagatcatatgctgaggaatgacatttaacaataaccaactctcaacaccaaatcttcacaacactgcctatgctttcacttaccttattttaatttaaagagaaaccattccatgatccagagggttttgaagtaagctaggtaaaggaagagttttagtgtgtacagagtagaatgctgtctaaagaaggatagttgaattatatcctttgtggggttttttgatcaatttgcagttaatgtatgatgatgaattatcagaaaagctgattgttcccaatgtgagtagttctctttcctcaaaatgtacagtgcttctactcctacttccaggagagcttcagaaacattcagcagaggtacagtcaatatacagaaactgagtcatgccgaaatagaagatttgagtaaattaggaaatgtaaaaagtacaattgaataatcgtactaaagagaagcaagacctcactgctgaactctatcaaacatctatacaagaatttatactaattctttttaaattatttcaaataattgaagaagacaaaattcttccatatgagttctgcgacactaatgttacttagatactaaacaaggacccaattagtaagaggtagttatataccaacattcttgataaatatagatgcaggaatcattaataaaatactatcaatccacatccagcagcacatggaaggttattcattataatcaagtagaactcgtcttgctgatacaaggatggttcagtagatggaaataataaatgagacataatgcttcagcagaatgaccaaaaataccattttagtagacacagaaaatgcatttgaaaaaattcaacatttttttcatgataaaaaatgaacaatatggaaagactatacttcagcaacctaaagggctattgtagggagtgtggtactgatgctttgattgggaatttgcatgtgaacgctgaagatcctgttccccaattggttcttgatcgatcaataaagatgtcagtggccaatggctgggtgtaagagacaagacttccaggttccttcaggctggctaagagatgcaggaggaggaaaggagattcactatgcttctgaggcagagagagccatcagccatgtgagatcttgggtggagtggccattggctgcttccctgattggacctggggtagcatgcaggagattagaaacacaactaagctgagaacagatttaggatgctgagcaaggagaaggtaaccaggcaactaaattggggatttagagtgtagagcaaagagtaaagggaaggacatgctagctacaggaggcttggaagagcctagccactgagcagtaaggcaggttacaaatgagcaaatgtgtgtgtgtgtgtgtgtgtgtgttcatcctcagatccaagggaaccagggcagtggctgtagtgcagtctgcccagagcttaaagtggggtagtagaaactacatgctacagactatagatagagtaaaccatattaaagcacattaaatagaggaagcgtgagagctttctctctaagatctagaatgacgcgaggatgttcacttacattcaacataatcctagaaatcttacacagagacattaggcaagaggaaggaacagtagccactcagattggagagggcaactgtgctggttagttttgtcaacttgacacaagccaatgtcacctggggagagggggcctccgttgagaaaaatcctccatcagattgctgtcaattctgtgagaacattttcttgatggaggaataatctttaacatccagcccatggtgagaggtgctaccccagggaaggcggtcctgagttgtattgagagtaagcttatgacacatgggaaaaacaagccaggaggcagcatgcctccatggcctctgcttcaattcttctcggcaggttctgtcttggcttcccccaggctgtatgctggaactttccttcccaagctgctttaggctatggtgtttatcattaggagagtaagtcaaattgtcactgttcgtaggcatctttccttgtcttatatgtagaaaacccaatacaccaccagaaaactatttaaagaacattaagtaaatttagtagtgtatcaggacacaaagtcatcaaacagaaatcagcatcatttttataaactggtagcagataatttgaccagtcaagggagtgattctatttagaatagctgctaaagattgtgtagaatgcatttagtcagaaagatgaaagctcttcatgagaaaactattttgatgacgaattcaaagaggacacccataagcaggaagacagcctgtgttttgtgctagaagaataaatcccataaagacacccatggaataaccaaaacagcaggcttgtgacataaaaacagacatgtaaaccagtgcaacagaatggagagcctagaaataaactcagccatgctctgtcaacttagttttgacaaaggtgctaagatcaggcattggcaaaggactatgtcctcaagaaacagtgctttaaaactagatgttcatttgcagaaagataaagctaggcctgcatttctacccatgtcaaaaaaaaatcagtcggttcaaattgattgaagactttgggctaaagaactataaagcaactagacaaaacaaaacaaaaaccaaccaaccaaccaaacacacaaagaaaaataaaaccaatagaggacatgcttcaagataccggaactcgcaggatttgcttgaataagagctcaaagcacaggtatgaagaagcaggactggatacagggactcacatctaatcagaaagcttctgcctagccagtgtcagagggatggtactacctacaaagtgctgcacagggttacagacattctctctctttaggaggcaatatacagcatttatgaggaactgaaagaacaaaaccatcaacagcaaaactagcccccagacaccggacccattgatgacagatgtcaatagacatctctcaagaggagatatacaaacacttgacatgtttatgaaagaaactcggcattacttgtcatcagtaatgcaaatgtaaagaacctcacttcaggaaaaatggttctaggaacaacaaaaggcagctgtgttgatgaggaaaacgagggagaagaaacgcttgataccatcatggggactggaaaccacagtatggaggcacctcaaaaaattaaaggtagaatttctacccaatcttattggcactaccaccctacttggcaaatattcaagggatccaagtcagtagttgaagaaactgtatcctctgcatcctacagcattacccatcacatccaagacagaggatctatgtcacatggtgcccacttttactgactataacaattcttcctggatctcaaaagtaagattatctccaactcaacgagttttctatgataaatactgactgttgtaactgactccttgaaagccaaaaagtatttttttgtcttaatagaataaaacattgagatggattactggtcaactatgaattaacaattactattgtttagtcaacgcacactattgttctggctccacctccctgcccctgttggcccctatcgagagctggtggatctctcgaggggacgtggtacaggaatggccgggggcagaagagacctcaggcagagatgagcctgctgagaacagactcttgggagactgtttcattgagatagctaagctagatgggggtgagtatgaaaggtacttagacctttgaggggtgagtaggggctttggagatgagtgtacatcattggctgggcccaggatggtgggggtggctcatttgcataaggaggctatccaggtgctacatgacatgatcctttgatgggaaaggaaggataacctgtctactaggctatgtgacttcctctgggggtaaaggtaggggtgctgggctacctgtgctgggttatacaggcctagggtgagaagggagtaatcctacttctgccaatctcagcatgagatttctggggtttggacatgcttcaacccactcttgctctgggcaagcaccctatagctccactgctgcctggccccacagcacccctcatggtacctgacattttcatcatacctcttagagtctaggcagttcaataatagtggccagtgtgattgcctactgaagtattgggaaacaaacaggaaatctcacagcacaggggatgttcatccatccagcaggcaaaaacaagataatggaacccaggtctagactcctctaatattactaaatcaaggcaaattatttattgtcttctgcctaggaagctcccagggcatgaaatattgatttaggtgtttgctaggcatggatgactgtgttgctcttcttaatatatgatgaattgtttctatgtgtgccattatgaggctgaaaagcaaattaaccagggttatttaataaacatgaaatataaacactaagccctatgcccagttactagtgaggggtcatgaaagtgcacagggtgtactgctcaaacgctggtgtagctgcaggcttccgttatctactgcagacatggattttgctgcattccataagacctgcttcatctaatctgtgagtgggatggggcgagtctgtgtgttcttcatagttaacttggggaatctcaaagccaggaagctgaaggctctgggtacccgaggagaactcctactggctgtaagagtttgtaatgtgaagagaaccctggtccactggagttgaagaccagtttggggacacggtgaaggaccggggatgggggtggggggtggggggtgggggcacagaggaagcagtgtgcacttgtttctcggctgagaatctttgctttgtgctttccaaaccttcatacaattctcagtatagcgtgagaccactcattaatgcctggcatttgcatgtgctcaatttttactatttcctgtggaagactcagcagagaaacgcctgtgagcccacttcactgcgaatggagacaacattagtgtagttaatagctggagatagtccctgaagatacacttcatgatcctgcctccaactatgcctcagagggtggctcaatggatttttttgtctggttttatgacaaaaataattctgtctttggtttacctaaatcagtctgttagatttgcaacccaactaggctgtctactgtgtatttcctccaagttgactcagtttacatgaccctcttcatggccactgacattgaataaggtgctttcgtgggacataatcaatgtatattgaatgtaggagtgtaagtagatcagaactcccagatccataatttaggaccaaaccatccccagcaactcaaactcagtttaagttgacataggagcaactctggtaggaaatggaggataccccgggggatcttatggatgcactaaattgccataaaaactgtcaggagccactagagatttagataggaggacctgtgttctttgcaccataaccagctgtgtcacctgctcagtttctgaacaccagtctgttttgattttgaatctttcagtgctgaaaatcgatgactggagggaaaagttctaaattgaaccgcacccccagcaagccaagcactcttctttctgtacaaggtaaggggaaagtatttattttccagctcaaaggagctgtttacttaagaattaaggatgcagacgttacttgttgatcagaacttctccccataccttgggttcaattgttcgaggacaggaacctgcgaaatcatgactcaagggtgttcttttcgtcaacagatgcacaaagggagtcccccttcaaaaggaaaagtgtaaacttttacaccctatcatatttggattttgggtgtgatcttcggtggaacacttggcacctgcacagtggccttaaagttccctcagcttagctagctctcttgtggctccaaagcaaaagctctgccttcagtcagtcccacctctcagtacttcaattctatggctactttagaaggtgtggcaaaagcacctgctccggagcttcccttgaacctccctccaactctcattttaagggagttgctaggccagtttcctatctattccaagtgtgctttatgagatccggtttcaattcccctgtggtagctcccagatcccgttacaattcccggagctccttgtacatgtgagggagaaagagaaccaagtgcgggcaacaagctacccaaggtctagttactggggcaaccccgggctcggtgcaacgcctcggtgcgctctgtggtccgcgagcgccgcggcccctttaagagccgggcccaggctggcccgcgggccgagggagcccagagcgccgcgcgcgtcggaggagttgggagccggcgcaaaagtttcctcccaactctggccccgcgcgccgccgccgccgcccactccagcccggggcctggggccggccctgccacggtcgctagggccaccgccagaggcagggccgggccgggccgcacccgcagtttcactttggcgcgtggagcctccgcttgcgcccggccgaccctccgcgtccccgcgtctccgagcccgcgttcccgccctcggcctcccgtggggctgcaggggagcagctgtgggtcccggtcccggaggcacgcgtgggacagcgtcgtgtccgccccacgtcccccgacggaggggctgtgcctgggggccaggcacctgttcggcccagccccgcgcgggagcccagggccaggatgaaagtgacagtgtgcttcgggaggacgggcatcgtggtgccctgcaaggacggccagctccgggtccgcgagctcacccagcaggcgctgcagcggtacctgaagacccgggaccaggtgaggggcgccgcagggggcgagcatggggcgcgaccaccgcggggctcacttagtaagtgtcctaggccacgcacctgcccgttgccttggaccaggtggcgctttttctggggctcagatcacccccagcggctggtgagcgctgcctgcagccacaacttttgcaggctgctaatttaagggacccaattagccctgtcttgctatccagaggctggagaagaaatggcggcatcccactcacttgaggggtccttacaactccgccatctggggcctactcccaagtccacacacccagtctgttctgtaagacagccccaggtgtttgagtaggggtccagaacctacttgtggggacactgtgatgttaccctgtgctgctcacctgaagtgtgatttctgaccaagtcccgccttaaggaggctccttggagtttgagcattgattggctcaagaaacacctccaaagttatagctattggtgctttgagagttctcagcttgatgggaggtctcccagtgacctgggcaggaggtgctccagtggggatgctgcccttatgccagctactgcactggggtgtattcagcgaatgccacagtttctatgagtcatagctaatgagaatggttgtagtgggttctgggttactcccaaagtaaggctgacccactgttctgctgctcaagttaggaataagtagcagccaaaagccagcacacaagtggcaggactccagcactctggtcaggcatctgggtgacttgtgagagttctggtttcctctatggaacctctaaatgaactctctaaaaagcacctttaaaattgtttcagttcgtccatggcctgtttcggatgcttcaacgacctcgcgaacagataagccacaaactcttgttttagtagacaaactcctgttttagtccttttaatatttgttcgcataatgctcgttgtaaactatagtccaatcttgagatgaaaaactgtaattttaatgtcatatatgttatccaaagtatagaaatcacttttctttttccaagtacatagtttcaaatttttaaattacatatattcatttaatatgtgtatggagggtacatgtatactactgtacatatgtggagggcagagaactacttgcccaggttggtgccatgtggatggagatcaacatagctcttcaggcttggtgccaggaaccattacccactgagccgttttgccacccccacgtatttagtttagagatctaaggcatacctgttcttcctatactccacctaagaattagtgcacagagggagacttttgatgggtacatgcatattttactttgaacagtcgagaactggaggttagagagatggctcagcagttgagagtacagatgttcatgtagaggaccagcacccacatctggtagatccaacacgtgtgcatttgtgtgtgtgcacccccacacttcaaaaaaaaaaagggaatgggaagaggtagagtgaaagtcctaaggaattacacatactctttagattgtattcttcacaacagagttaaaggaggggaaagatttaagatgcgtataaatcgaggtatcaatctaacccaatgagggttttgcttagatttggtttttgctattgctacattggtgtactgtttatttcatatgattccattaaaaattgggatttgaccaagtaaacagttatctttgaaatcatattttactggcttatgaaaatcgattaaggttagcagcaacaatacaatctacacaaattattagagtagatttcacggaagaattgtttactgaggtgataaatttatcttttaattcattagcaataatgtatgtcctctaatcttctacattgagaaatttactgtaagtgtagaaatctgttgtacaaggtaatctacaagcatataaataatcattaaaaaatgaccactgatctttaatggattgtagttagaccttaaaaggtgttaaaaagccattgctactctaaactggaagcataatttatatcatagaactcaatgtaattgcttcgatcaggttactgttatttcgggatattacatttttctgtgtttgcatttatatattagtaaatgtgacatttaaaggtcacccaaagcttatgaaatctctctctctcatttttgagttttaaaatttcaatttatgtggaaaatgatgttttcctcttctctaaatattcttgtcttctttcattttaaagaatattataagaataaggcttaactaataattagtggttggaatgtaacttgaaatgtcaagaaacactttgaaaaactctatgcatttatccattgaattaaaaaaattgtggaggaagaacagtactgttaaaatacaatttgtgatgaattcactttctacaagccaggaagagaaatttaaagagatgcaatggaagagaaacctggtggagacgtgaatgtttctcccagagttctgaataatctagatgggagaaaggcttcaagacagatagaagttgtagtttccaagggccgaagtgagtggagcccaaggaggtccttctagatgttgtagccagcattacagaagggacaccaaagcaagctggaatttgtggtatgttggaaccagctgagtcaacataagataaggctagaagtaggtgagatgctgaaggaacaggaggagctttgggggaaggctttaatttgctctgaactcgggagcgttgagtttcctgtttctactgggtgactcccacgctggaggagaagttaacagtggggatagaattatgggatggcttatctttggatcctggtactatatcagtgtcttgggcactaaatccaatttagtgaagtagtttgtagaggagattgtctccttaagcagtcaaggtgtggatcagtgagtaattagttaaatttatcatcaaaattacctgtcacaggtgaatggataattgaactgtaacctgtagtcctgtcaaccctggctgaatatcacttctaattcttacatatagcatttaaaacaagacagctatctgaattccctttgccaagattttaatcaagattttaagtgtggtgtggaacttgggcacaggtattataaagagcaccccaatgcctagacttatctatcactaatctcttggaactggtgaactcaagacactgtggtatagatgtctatatataacctttaattatagcaagccaactttcctctgttgccacccagaataaattcttctagaagatgcttgttattaaggtgaacatatatacatgtacttggtgagttggatgagttgaatataacaccatagaataaggacgaagaggggtgtgtggcgaggaggtgaattaaatagttagttggatagcgggcatgggattttttttttaaagctgatgtatatatctcactgtatatatgagtaaccattgtaagtgaaggtaactttagtaggcttttcaaaatgaattttctttttctgtatttagacatcttgaataatttgttctccaagttaacattttcccagagctagaaagttagataagactaattccatcctctgattaattgtggcatcagcatctaagtgaatttatacaatcatgagatctgtagtagcattgtgtgaccagcctagaggaatagctagaactctttaattctgaacttttctgcctttgatgcctcttggtctgaattgatcttatggtttttggatacacagattagactcagcctgaatttgtaaagcatttcctaatttgcagagtctgatttcttgtggtttctaacttctgctcagttctctgcttctctgatatgtggctatgtgatattctttacagcacccagggaagctgcctccccatcagcaaggcacatgctctaacttagtctggggcctgccatcggactggcagtgtattgcaaacagggctcagggactatgagttttatgaagttcctcttagggttatattttcttattgtgtaagaattttgagatttcatatacaattccagacttctgtcttcttttagagcaaaccaatagaggttctgacaacactgggctttgctttcccatcaggcagccactcgttatcaatcagacacccctgttctctttagaaggaattactaatgctccagggtccattaccacatagccaattgtaaggctcagttttgattatcatgcttaaatatttgtttttatttttgtttacttaaaactttgcactatattttaatttagtgtatacccatacatgtatatgtatgtatgtgtatatgcatgggtgcacatgtaccacagtatgtgtgtggaagtcagaagaccacacccaggaattggtactctccttccatcatgtaggcacctggaattgaactgagggagctggttgcactactgtcttgtgaggcatctcactatcccttcttttattttcttatgggtcacttaatacattgctgccatttgtctgagccactggcaggcatgtggggttttcctatgcgccttctcttccttaactgtctttcttcctcattttcctctatgccccatgtccctctgtctctctgtctctctgtctctctctctctctctctctctctctctctctctaacacaaaacccttttgtttataatctagagactttctcaaactgcttgttagctgtgctctggcccaccacttaacttcattagtgctcttctaatcactgtgtgtgtgtgtgtgtgtgtgtgagagagagagagagagagagagagagagagagagagagagagagagagaaagagagagagagagagagaggaggaagaggagaaaaagagatagaaagagagagagagaagaaagagagagcgaaagagaggggagagagagagagagcgaaagagaggggagagagggagagagagagagacagagagagagagagagagagagagagagagactgaactacaaccccagtttgaagcatccagtgctgacctcagaaagcttaatcagtgaaatattcattcccaggctttttgttccatagatctcctgtgaggaacttgggcaaatggtaatgtcatatttccatgagactgttttccaaagggattgatagttaatgtctcagaaatctgttggtaatcagagcctcaggcttcccttggaaagtctaaagcagggtggtccaatagaaactttgggggttgtggatgttgtatatttgtgtctaatggggcctttctagggccatatgactataaaaaagtttagttgtagctagtggaaccaagaaataggagtttaaaatttgatcagcattcaatggcttcctgtggcataaccaagtagatagctaaggctctatgttcctctgatgttatccctgtgctctgtttgaagtccaccacctaaaactcagaaggcaggtgtcaaaaccttgctggtcttacagatgttgctgtttcattttgatgggaattgtaccattaggagggatcttcacttgctcttgggtaagcccaggtggtagatgaagatgtgcatcctttatttcagctaacaggtaatcctgggcaggaagaagcaatgaacaaaacacctggattagtgagatcttccctgcattgaatacttcccatagctattcttgggtattctcaatctcttagcctaccctttcaccttcctgttaaccttagtttgctacaggactgagctaggacaactcctcctctctgtttatcccatggcaagatcttccagtcacatggctccagtctgaacctctctgtgcctctttaatgtttttcacgtgcatgtcgagtgaagtcacacactgaatgcatgccacagactgaattctcaatttcctgttcatgttcatctctcccatagcctaatccagttgttaaagggccacaccacctttccagctatgccagtcaggaattgtcttcctcgatagttcctttcctctaatgaccacagcctctagtgacctacctgcaagtggccaacctgcaagttcttttgactctggcatcacagaatactcagaatctgatctctcttctccatctttcctttagcatattgatgtttgctttatatttttattttaaattctctgcctctctgtctgtctctgtctctctttctgagtgtgtgtttcatcaggatccatccattttatcttttgagataaagacttttattggactctgggccttgctgatcaggctgggctagctgaccaatgaacttacctttctgcactggtattcaaacatacatctccacatagaccttttatatgtgggtgctggggatcaaactcatgttctcctgcttgtgtgtcaagcactttaccagcccagctattattccagtctttttatttttggtatgtttgccatgtcactactacactcttcactcttaagctaaggtggtcatttataattttatcagattgtgccattgttttattccagtttcactgatggctcctatgtctctcagacagcctatagggtgctatgtgacctagatgccaacgcagaagaaatgcattagcacagcaggtgtgagattgctattctcagaagattttcatccaaagctaagcccttagatttgtggaggggtcccaactgttcactacaggaatgtcgtattggctaagattatgtagaacatacagcttgtgtagaatgcctagcttttgttttctaagtggggtatgtgtgctggaattttcatatacgttaagcagagggggtctttatgtcgagctcaggagagccttgagtaatgaatgtcattggtaggcaacacttcatctgcgtgtggtgggaactcattactgaaggcacatcatctcgattggaggatctttgcagcttgttcctaggctcctcctgacctctcactttttcttttgcaaatttttctttatgttcctcactgataaatcataagcatgtacatggcaacatatggagtccaagtcctctttgtgaatcatggaacctgaatatgctgtggactctgacatatattcgtgtacttccccatcaccatcctctgtcctccatccaggtcttactctgccccagcctcactgatctttttgcatattgtcaagctttccagtcagattccacttcaggtgctgctttctctgaaatattttctcctggttacatatctgtctacattcatattctttccattttacatgtatcctgaaggcttcttgactatcccactcataattatcccattcataattcataattataacccaccccacctctccctctccctccctctctctctgtcacacaccacataccacacacacacacacacacacacacacactttctctttgggtctatacacaaaatctcatccctttctattattctatttaccaaatgcattatccatttgcaatggaatattcagtttaataaatagaaacctttgtctatttcattcattgctatctcatagaagaatgccaggtacatagcaagctgtttataaattctgtttgagttattgttttattgtgtatccattattatccattgcagttacctcctcctttatgccaatgaccaaatattccaaaacataatttggtagggtaagaatttggaccaagcatataataaggctttggtgtaatgtttttctaggccttggatatttaggaatgtgtcttctttcatgtacttaatggcttcagctaagtagactgactagctggctgcatcacctccctggctacatacgccttaggccttggttcttgctacccactgagtttcttgtgtttttctatgtcgttcttttcaagatccgagttttcttacaagtttcttcttatgatctatgtaacaaaatggcaattgaaggctacaaagaaaacaataggcaatagggtattcataaagcttcaataggcatattcttacttctatactccattagttaaagcctatcataggtccaacctcaaatcaagagagagaattgcaccaggagctaaataccagtacacatgctccatcagactgttgccacaccatatggtgatgaagatgtgaggatcaagagatgtgagcatcatttagtctttctgcctttttaaaatttgcagccagatttgtctgctgagaaacaatatagtgaaggctcattggaatggaagatattggaatggaaggacaatgaagaggcagaaaagtggttgagggagttacaaaaagttgagggaagaccatgaaaaaagtttattgcaaaaactaacttgggccaggttgtgaaaaacgttggggactgccctgaagggttttaatgctttcagttatcttttatattagaaagttacacatatttcactcagtctaatcagtctaaattacttgtttgagtttaaagtatggaactgcttcagtttagcagtgggcttgatacaatatagagtcacctgggaagagttagtctcagtgaaggattatgtagctagtttagtcctggagcatatctgtggggaattatcttgattatgttaatcaaagtgggaagaactgttcttactggggaggtgggcaccattttctggaaggcatcctagattgcatagtaatagagaaagtgagctgagtacaggcacgagtgcattcattcattgctctctgcacttgatcatggatgtaagtaatgtgattagctgcttcacgttcatccatcttgtcttaccctgcaatcatagtgtaaagcttgaaattgggacgtgaataaacccttcatcccttaagttgttttgtcagggtatgttttgtcatagcaagaggaaatgaaacagaaacaggggcactcagataattatataatgagttaaatatctatgttaagagtgtatcacatcgtttgttacataggttttcacattttccctagctaagctattctcaataaggccactaagacctggtggcttaaactcaggtaatttttagtttctattgatggtgcccccccccaattgtctaggattttgaaattttaatttagccttcatagatacccactttcttgcatgctgttgcccacaaagcttgttctcagtctcatttataccattactttacctgatcacaaatgtatacttctagctctaaggttactttatacctaacatctccctgcctctagacgttgatgagtgtgccacattcagtagaatccatcctcatctccaggaacctgcctgccgccagtctgctttctcctgttgttctacacatgggtccaaggtatacctgtttgtactcttcagaaaccttgaaatccttcatttcagaatgaattaagctccttcatcctatatcatatgttaactgattgccatgctcctttatagtgtgcctcttggatttgctttctctgccaccccatttcacatttcttctgtggttaataacaacagaccattaaccatcccctctgtttctagcagctcctaacccctctaatcattctccaccgaggactctattgtttaaagttaatgaccttagcagcgctgttagcagtatttaatggttctctacttttcagtgaaaacccccaataaataccgaccattctgaatggtagagcatggctccagcctcttctttctaggatccccttctgctgtttcccctttgctgtcacatgtctgagcttccagaacttcctatatttatgagttaatttagtaaacataccagaatcagagcaagttatgtcaccaagggattctcctcctgggtgacaggatgtgggtgctggctcacacagtccctacccgctgctgctttgagtttcagagttccccatagagcccccacctgatgccaagagatgagcacagtgtctggaaacactcttgagtcttgaggcttggccttgtagtagcagacctcacttttattggggaaactggctgtaagtactgggcgtgagggatgtcctgtatggctacggttgggtagctaggcaggctgtacagcatggctgcagtctttttgtttttcatgctctcttgtgggatagacaagaacagggagtgtgtcttgtttattttcctgtccctacatttatcacagtatctgatgcacagagtggatactaaaaaaatgcttacaaaattataccaacctttacatttctttctttttataaaagtgagggcgaccttgtcgtcagcacagtgtttataagtttgaaattgttatatgtggtagcattttttccctgaagtctaaatgcaacttttctcttgattatcttcaaatgcctcatcatatccgcatttgctgtaggcagtcgtttagtggcccattatatctgctgcactgattgtcttaaataacagcttcacattctgacaggttgactcacttctctgagttttgagactgagtgctttgcagttctgatttcaagtgaagcaacatcataatgattttttttcttgttttttttttttttctgaacacaggtgcaatgcaatctcatatttgagcaatgtttgattttcagcattgtatccattaatttcatgttgattttttggaacagtgctgaatttcatcagttttgatggtttatctttaacagacatgatatctctgccttgggggttgctaaaattaggtctgtctcctgttgctgggctcagccagctttctgattgcaggactctcactttgtattgtgctatgatggctatgatgcaattgcagggtatcatgagacaggctggttagaaaggttttactctcaatttggtccctatcagattcagtgccaagcattcttcagataagaaaagccaatgttgctcttttttttttcccccccggtgagggtattaaactcctatggtggtctgggaccaagttagtgtggaagcagttgatagaagggtgccttcaagtcttggcttatctctcagcaagaagagaggagccatgctcagagctgcctcattgcctggtttggagtagaatgaaagctatggggaattccagccacagatttctgatgcttctattggtatgacagatatagtgtcattattctttcatagaaatatgaaccctagaaatggtgacctctaaacagtaatgggagctggcctgcttttgctgaggactggagagttatggggtccctacctttagaacgaagggaaataaccttcatctcttaagcctgtatcatacaaaagctttgtattcatgagacctctgttgggtctccacgtaggagatgttcagtgacagtcatctatagcaacccaaaagtcagtttgctgggttaggagaagtcaagacagagaacaacattgggtcacacaagatatcttgtgcttgagatgtaggttgatacaaaccctggaaagttaatggaaagaaagaccagagccaggagtgtaaatgaaggttgctgtatggtttaggacctgagggtggtaggtagagggaacttggctttgggcaagggaagtagggaactgagcactttttgctctgggaacctaaggactttgaggaatgcttggacaggggaacacaatgggaagagcacacgaggcagcctcctctctcccagggggctggtatttgttttcccttttgagatggggtgtcactgtagcccaggctggctttgaaatcaggacaatcctcctgcctcagtctccctggtgctgagagtacaggtgtgttacctcctcaagaggtgggaattttttgtttgttttggagaagtaggaaagaagagggcattttcttagggtgcttgtctgagggagtagtaagcaccaggcagtacacagcctcacgtcctttgttgtgaccagctaaagaggagtcagcccttctatgctggatggtgagctctttgacgtacttttctgcactgatagctctggacttgaggaaggagctgacactgtgaggggagaaggggaaaggggagtgaggagcctggctcaggtctggccatgggagctgagctgagtagaagtgacaggtgagcaaatgagatttgatgttcagaaggaagtgtgagaggagttccctgcatgtggtcagggcagcatgggtggacctggagaggaagcagtctgagcttcgcacactcagaattcaaagactttcagggtgtgcacctgtgctgtaactcctgggactggaggcacacagataagaaagatgtggttggtgccattaaggaggcccctgtgttgggggaagggagaaggtgaagggtttatgaaagccaggctgagattgtaaatcacaggctcataaaaatgccagtcttgtgtacttttgtttggtactgtattagagctttgcttcaaggttgagatttgagtacagatgtgggaaagagccaagtggtatccagaaacaaaagttattagactaagttactgggcttataaactattttggtggccttcagactctggtctcagtgactggaaaacctggtctccacccttctccagtcttatctgcagcacaggggctagacagtctgggcccttgtcctttgactttttactggggtcagctattgaagaggatctagcaagagaacaaaggtcaggattctccctgacaggtcactggggatgagcctgtccttttcttaaaggccatagttcatgtcaggccactaactcacagcttgtcccctatgtatcatctgtgttcctggatgtccttgggtcctagacaatggcaagggctcaccgctgttctgtgaactatcccctgataatttctgggatctctagcaaaccttcgtaaattatttctttgttaaacttctaagtacctagtttgggaaaatcatctgttttctgccagaatttggacagagggtcacagtaagaaataatgctttccttcaaggctcagtattcatgatatctacgcccacacgagacaaaagaataagttcttttaccacaaatgatattgtttggtttttattctggtttgtttgtttgtttgtttagttttgttgtacttaaacaggaagatagttggtacatattcaattgattatactgcctattagttggttaggacatgtagtttaaaagccagtagattcttgatgtttgatattttggggcattaaatggatcatcaggccagctgattagaaattcctacagctttaagtttcaattgtttatagatgaaattgttatgagggagttaaaattttaaaatgacgtcttgggattatttttcccatggactttaatgccagtcctttatgtttagtggagatacctggcttctgtgacatagaaagtgccagcacatgaactatgagccatcttagccagggttcatgtggcttaacaaactcttggagaactttagctctccttgtcatctctgatttcttttgtgacacactaatagtagtggtgactttcagtgttaggtctggattagttccctgtgtagcagagagttaaggaaatgtgagctaggatgcacaggccagcactgactgagttcccttggtacccagaagagagagagcccagaaaggctagaatggctcagtgtgagaactggataggatcgggatcgatggggtgtttgtgtctgatggaagaggggagaggagtgagggctgctatgctcctcagctgctgctcctaaacttccttcacactcacaaagagtacttaggaaaacgatctcaacttatagagagaaattaagacagaaattagaattatatttaattggtttcaaatgactccattatacgcagatctctctctctcaaaataaaaacaactgctatcagaataaaaaaatactcagaagtatggcctgaggtaacttttttttttggttttcggtgtttagattattttcatacctgccttctcactcaatccattcagtacgtttcctgaaatgtatgaagcaagtctggcctccgagctccatgtaactggggagggaaggtgcattgtgatagcatcctcacataattagaccgaggattttcgtagtaattgatactttgatttctcattctaaaaacaaatatatgcaagcgtatacaagccaggattttagccacaacgtactcagactgtttttgttcaaagtttatgaacttcaaatgtcaaaatgaggttgcaagctcatctaagggcttcactggaaagactctggcgctcatgaaagtccttggcagaactcatttctgcagctgcagggctgaggaccctggctaagggtgcatacacattggaggccagcctgagtttcagaggccatcttcctttcctgtaggccacctgtgttttcctgtcaggcaggctctcccaccctgactctttgtttgcttcatctttaggaatatttgactagcaggatggagagttagccaatgacaaccaaacatctttataaaagttagttgcagtgtgggactggaaaccataggtgtgatattttcatgtcctattacatttcagtgctttatattattatttgattagatcatctctctctatatggattgtttcatcacctatattatttgtacaacgtaatggttttctttgtggtattttcatgtatgcatgtaagtatatacatgtgttattttcatacatattcacctcatcatatacacacttttcctctttacactggtccccttggtagctttcacttggttatcccctctttctagtaagattttttcttttctgtgtttattttcctctttcatatacaaagttcatattagtgtcttctctggcactagagtaatgctcagcaattaatttatttatttacacttgtgcttatcatggaatgggtttttttcttcttagactctgaagaaagactttgttagatatagttgtctaggttgacagtactgctctctcagggcttcaaatatataatttccagccctcttggcttgcagtgcttaggcaaaggaaactgctattctgatgagtttttctttatttgtaacactatgcatctctcctgaagacttcactattgtccttttgttctgcagtcttagcactgtagctataatgtgatataaagaggctcgtctcctgccatgtgtgtgtcgcattctaatgccctctgggaccacatgttcatcttgttcccaggacttgggtcattttctgtgactattttgttcaatgtgttttctatgcgtttagcttatgctttatctccttttctgtgctcacaactcacaagttttcttctttgagtgtcatttcagaagcttgtgcgttctgctcactctgtgtttttattgctctatggatgaatatcataattggtctgctttcccacaagccttgctgctctgacttcagtccagtactggggaagcttttgatttagttcttttttttttaacttgctgagcttttaatttgtaatattcaacttgagtttttgttcattcagaattccatctatccattgagttcttcttttacgttgagcattgagtttcttatttggtatgctccttacttgtatcctcatacggtattgatctgtatccactcataattttttttctcatttttgtagttattttttaagttctctgtaattccatccattctttattgtaatcatttactgtgggatgggtaccttttggaaaaaaccgttttgcttttattattattttttttgtttgcatttctgcattggaatttgttcatttggggccaaagtgctgactaagagttttgatttcttggattctcttagatgacatggatgctgtcagggttgaggtgcagggtctctaggacttggatgcagccagctcaatgcctatgcacattcatggcagaagggattctagtgtcactaagatgagaactacagtagtagctataaggatgataacctgccatggaaatcagtactaatcaattaaaatagttcattatcataactataataacagcagagaaaaaagatatgataacattgagcaaactaagnnnnnnnnnnnnnnnnnnnnnnnnnnnnnnnnnnnnnnnnnnnnnnnnnnnnnnnnnnnnnnnnnnnnnnnnnnnnnnnnnnnnnnnnnnnnnnnnnnnnnnnnnnnnnnnnnnnnnnnnnnnnnnnnnnnnnnnnnnnaatacaactagaagtaaatagtgatttctattgctgcacaggtctgtttaccaatatcttaactttcattggcctatacaccatgttatttaacaatagcagaaagagtgagtaacagtcagctgtcctagaggcgaggatgggaagatttgccattgccaacatcccatgtaggacagacagcagaaaatagaaataaagtggagttttctcacaatcgaaatattctaagtctcttcttaagctttcttaatatttgagataatcctgaggagagggtgcatatcagtctcctaattaagatttctttgaagcaacaattacaattatttagaagactgaaaatatatggtttaaatctcagctggcgtttggggtattctgtgaagaatacgattagacaagaagcaggaaattggtctccattgaattatttgatcagaggagatgattggaattttactaatgaaaatttgctaccaaagataggcacattattttacactttataactctaacacactattatttacaatgatacactaaaaatattaaaaatgcatgagatttaatttttttatcatcatccatccgttgaaccctgagagtggtagatctaagttttagctgcaaacaatgtcaggggctgcctcctcctttgtgggctcacaatttacatatttgggtgttcttgaaaagagaacagctaaaactgtctaactgtccctaagtatgtaactcatatctgctgtcttctaaaagaaactaaggggtcacttatcttgtgactgtgtagagtcttgcagcaacagtgtatttgtatagtataaatggttacataatactgtatgtaaagcatcagtgtgcaggttgaaattacatgataagatatgtggcacgaaagtgtaataattaattgaatgacagacacacatgtgactactgtctggagatgtaactctgtcactctattaactgaacatctatagcaggtcttgcatggtgctgcctggcattcctggttctattttagtaggtagtgttaagttagtatatgactgtaaataagtgtttttaaagagaaattttagtcttgattcctgttttctttaacatcaggaggtatgcaattgcggattttgtttttaatttttctacgcagttataataaagttcagtggagtggctagggtgagtgaaatgaaaaagacttcccatttgtataaacagaggctttctaggagaatacatgtctgcacttggcccattgctttggtagcgtcaagggttaaacgtcatcaagatgataccaaatacagccctcttcctcagtatttcttatgctgactcctgttaggaattaaagtattggtgtgtattgtggtgtataatgtttctacatggaacccagcacggtataattgtatcgctggagacttgtctggtgagccaaatattgagatcttttcttagaagaaaaaaatgtaaaaagatacgagatcttatagatgaaatctgtagaggcaggaagtttgcagaagatggtgagctcaattcagtgagcaagcaaacatgtcctctgtggcctatcttgctgcagctggcataggcaaaggttaaaagattttgctatgtttatgaaggagggaccttaaagtctctaatggaagacctcaccttcaaaggttgatgtcaattttaggattgattaagcacattgctttgagcttcctcctgtcttgtcagtttatcatgatttctgtgaggatggactgaggggctcaatcagttgagaacgttgtgatctggagacctctcaagggtatcaggagtcttgactggctgagcaggaagagtaactaggaaaatgttacctaagagaacgctttagatacatcacaggggcccatagaaaagatgtactcaatatgggaacgccaactaccaaacaaataaggtggcagactgagctttctaaaacctgctggtattagttctggcttctgtaaatactgcttctatgacttaggcagcatgtatgacagaagagccaccaacattcattgctttagctggcataggcaaagaacagaagtcggttagaactataaggattctgggaaagagcattacgctttgctcttggaacctgaggtgtgtcgccctagttcctccatgaataagaactagctctggaggtgtagacaaggtccttggactctcaagacctaggcatagacacatttatctcaaaggttcctccccagccataaatatgttttatattgcctgatttattactttcaagtgttcattctaagtgctaacttccacaagctgccaaggagtggcctttcaggggcctattatgatgaagtgtgatagatggatgattcatttataattaactgtgtgtgtctccatacaaataaccctgagcaccaagcttcttgtcagagcttttctcccttacatagtcttacacacttagaattttgtgtgcagcttaaatttatctggaaagtaaagtttgtattatgccagtctcaccagacgtttattacatcaccaaaaggaaaatgctttgctttgtgtagtggtttgctttcactccaccacagcagtttaaacagcagagtgtatgcctaaatgtatgttatgcacaactggatgggcaaataaccaaagatatactttaattcacagcaagttattatgaactgtgaaatattataacatgacctaaataaagggttaggatactactgtcctatggatattagtcctgtcctatgttagctgtgtctgtggttgtgtggatctatgtaggtgtgactgacaggatcagtcacagtaaaattgccatagggaaaaagttagggctgactcataaccctctaacttttattctcaccctagaggaagtatcctgagatcaggctttgagttacttcatgattccagaataatgcctcctaattagaaaaggaggtagtaaactgtatgctcaggaatgataatggtccattatacagagaacacagtgctttgttagttttctggccagaaggaaagcaacgatctctacgatgaagaccttctgagagctgggagtcaggtgagaagcttcaaggaggaggaagagcaacatgcttgatgcaagatgcaagactgggcataatgtgcttggttaggggtggggcaaaggaggagggaaggaactgggagaaaggcttctccactacaggaagccctcacttccaggagcagtgtcccgggtgctctcagattttaacccagaaagtgagttggtggttacagtgagaagcctctctgtcactgtaaagggttgctgctgtttgacctatgctgtaagacactgcatcaaagtctaattaagagataactagatgttaatcaattataaatattcgtataagcacagtaagtatatattgcccttcccacttacagtttgttagttgttctgctctctgaagggatgggctgcacatgaaggtgctgcagagatccatttacatttcaataactaaaacgcttagagttatctagtctttcacacagttgatattcatcagttggcaaatgtgtcagaaaccttggagctacaataaagatggtagttgctgccctcttgcaggaagttctaattcttatggtacacttcacttataaaggatcttgtccacgaagggccttggaaatgatcgctccctgtggactttctgaagaccatctacagtaggtgaaacagggactcctttgcttcattaaattcctagctcagagaagtcacagaaagtgtggatgacctaggacagcctacggaggctggcttgtggccatgctagtccagtcagtttgtgcttccatttccagcccaaggcatcctgtttcaaataggatgttgtaatgagaggttaaggacagtgtaaaataagcctggtctacacaccatgaggtatccatccttcctcttctatactggttttcgggatatatttataactagaatgacttttctatggctgagataaccatggtgataatgatagcagcggtggattgataggacctaacctccacagagcatcctgaactctaggcggtttgtatgcatgatctcatctgatgccttctgacagggcggaggggtgccgtcattctctcctaccagactagtgatgtcattgggactcagggaggttagatgactctcccatgtctgtctgaagtagaggaaaagatggtcgcttatctgatctttttttctgtgtgtgtggatgtgtcgacaacctctgttcttgtcacctgccagctgatacaggatttagtttaatacttgctaagtagaagtttctaccctgaagggcactcttggtccctggtttctccttgttcagttggcatgctgtcagaacctccccaacccttgggtactgaggcatgaccatgcaggtcacagtttgtccttcagcctctttctctgcctttatattgtcatctctggctctttgtttttgcagctcagcactccactcagcttctacccttgggcatcactgtcttcacgacattcctaccactgtggctgatccctaggcctttcctgcagctcttcccaggccagggttagttcctctatttatccctctagagtctcttgtaaagtttcctgctgttgcaatgtcagctccaaaggggaagccaactgggcattgacattattcaaatcgttcattcatttagtagcagagaccctttctgggtaggtatgtgggccttgagacttgttctcaaggttgtttggctgttgtacaagcatggcatcagaaaagtgcacgattgcacaagtgactgttgactgcaaacaaaatagcctattattctcccaaatctttatttctatttatatgctgtattttcctaaaagaataatgataaagttctcttggaagctgagctagcaagtactttgtattttactaatactacttacttgaacatttatattttatgttttaaaattcagtgcttttaaaagaaaatccagaagaaaaattgaaccttctactatcacatggaaataagattcataagataataagtatctcagtttaggttctagccctgtatggataatataactttgttatagacaagtagctagatgcaatggcttttttgtatgggctttatagagtgttgcttagatgtaaataaatagtctttgttagtatatactcactgtttctttctgtgtgatatggagctatgatgttagtatggaagaataagagttgcagttctgaaatagtcagacagtgttggctgtacaaaagcagtctacaagttgggcagtggtggcacacacctttaatcccagcacttgggaggcagaggcaggcggatttttgagtaccaggccagcctggtctacagagtgagtttcaggacagccatgactacacagagaaaccccgtctcaaaaacttatataaaaaaaagaaagaacaagcaaagaaaaagaaataaatatgctgttttggtttcagataggcacatatccatcacaaaatcacaaacacacgttgagctgatgtgacctctccatagagtcctgcctgcatcccccaggctcaggctgtgaggcttatcagagtttggcacaccaggcctgactgagaatatgtgttattttaataccttttccatgtttagatcagtctttggtcttcagttgtttctggggcagcggactatcatctttcctgggtccttagtgtaaagctccatagaatttaagcctattattcctgtcccctgacttgatctttaggtttttggggtcttgctctgggaaaccttggtatgtagatcttgaatcctaaatattgaccctgttattcaaatattgcactctttaaatttgaatgtccacaaatttcaatttaaatcacgaagtccaggttaatgacccatttcctaaagctgagtgtcacggcacaagcgtgtgctgtcagcactcaggcggcagaggcaggcagggctctgagctcagagctacagtgttctacatagcaagtactgggacagctgggtctccttagtaagaacctgttacaaagaaagaaaggaaggaaggaaggaaaaaaaagccaaccaaccaaacaaaaatcttatttcatgcacatggcttcattgtaatatatcttgctaaccacacagatgtggaagttatggcatttattatgaggatgttttggaacatgctgtctcccaacacacttgttcttagttttaaagttatttatgtcacagttgtggtaaattcctaaaatagtaattacatcttgtttggtaaattctagatataaaaccaccccaatgaaaacgtttaagtactgctatacagagcctaaaagttatttaaatagtttggaaactggtatatttggctacatttttagtcaagggaaatataaactattcatccccctgacatttctttttctttttctttcttcttcttttttttttttttttttttttttttttttttgagtaagatggatgtgatctgcaaatgttttgtatgctgccatctctgctggggacagtcacctgcctgcatcttatttctgagacactctgtacccatatcctcaaattatcattttagagttgattaagaagcacccacaatattgtttatacctctgtactgacactacctagcctttgctctgatcttgaaagttttctaaagttagctcagttgctttcagaccccctgaagagaattacttgcatcccaccagcagctggggcactgctacctttgcagacccaggcctgccttaatttgtactacacgagagctttgtactaggtcccctggagcaagcagtttgcttgaatgtgtctctgtgtgatctgagggagaaaggggaggcagggggtatggtagctagtgtcaaatccatttttgatatactggtatgtcttataaaccattggctacctggatataattatatcaaacttctttgcaaattagaagttcttcccatatgaagctaatgttatttgcctgtggttcctgacatgccagtagcaggtgtgtgtgtgtgtgtgtgtgtttgcatgtaaatggatatatctaagtacgtcagtattacatgatgatgtaatatgctatcttttcacagtgtacagatttagtctctatccccctacccattgggtttctcagggatggctggtgtttgtgtcacctgtaagctcccagttgtttctctcacagtgtatttgggctatggctgtagtcattggtcatggataataataataataataataataataataataataataataataataaagctatgcttgttgaacagttctttgccagaaatttggtggcaccttcaatgtctagttttaatttcttctgagttagaacattggcttcccatcatagttttgacacagtcattttaaaataggaagtatatattggaaaaatacatatttaggcttataaatcatctcttttttgggtttggatgcatatatggtttttatttttagtagggaaatataaattacttattaaaatattcttaaaatgcaagctccttctaacaaatacttttgatccaatgtggcagtttcttactagaatatagggtcttactcgtactcttagtggttactaaggagcagatgagaaaccgaggcacagatggcttacagatgggacacttacggtacagaagacagttctaaggttcttctctgctggccatgtaagcctctgtgattaccattgttttatagtgaaaaaaaaaacaaaacaaaacaaaactggggttcagagctcatgcgtgtagtcagctggcaagggcagatccaggccccagccccagccccagccccagccccagcactgtgctgcgctctggagtaggatggagagttgaattgctccccactattataaaatattctcatttttagattatgataaaagagtgctttatttaggttagtgaccactgtttggtattggttttgccctctaggacactgtgaagtatctaaggtcatttttgcttctcacgtgggatgagaggttgctattggtttatattagagaacaagggtaaccaaaaatcatcctacaatgattctgcttgtggctaggctgtgaatagtgttgagactgagaaactacaacttggagtactttgagcattttaagttatgccagtgctttatgctaaacagtgaaaaggaaatggacagaggtgttactatactcatgtagagaagaccttggatttacacactcggctctgtgggttgggttcatttaattttagatgctgtgcttggggagtactcagagcatcatggaaattccagggaaaaggagcttttggttattaaagggacatatctttaagtccatccctatagctggctttgatgtactgtgtagagctgtgtctcggcttctgtgtggtgaatacatctttgtgtataatactttcatgtgagtggggtattagaattacctcataggagatggtttctgccagaattgagaacacagcaggtaatgtagtcacaggagaggtacaagcatgagtaattcctatctcgtgagaaagatgtaagctggtttatggtgatgatgatgtaatatttgggtgcttgatttatcactcccatctccaaagtgcaaaataccagtaactaatcaggttataaaaattcagagtacatcttggaagtctggccctttccctaaagtaggcataagtgttacctttgtcctgagatgtagctgcttgtagatgtttccaaatattaaagtcaagattgtgatctgtgtttcttatggcagaaagttcccagatgcttattctatagcatagctgagcacacaggggtcatcgtgaagtaggtacaggaaggtgatgccaagggatgctggggtaaggaagaacaccagaggaggtagtctatgaacagtcttatttgaagggaaaccttggggcttcaggtatgatgtcatcatcagtgcagcagcagtagtcacgggtgatttgttgattactcttatacaacgacagccagagtggctttaggatgaaatcatgttcttttcacacttataacctccacagatgaatagcttgggtctaagaaggtccctgcctgtccatgactacaggcctcaggcaaccctcaggcctcagagcagcacacatcagcttgatgtgtcccctgtgaccagggagtactatgagcctgttgggctatagcaaggcaaatgaatccctgtgagaaatgccctaggcatagcttcgtaaagaggcataattttggattttgtgtgagggaggaaattggctccattacactttgtatcataggaactcttggaaatgtggtgacttggaaaattagagaagtatgatatgagtctaactggccaagtgattaatttggacatttcagtatgacagctcaagtatagagcaaatatattatcaccaccaagctttcctccaacagggtgtcagaatcaagccagtttggagtctatggctttggattagctgtgagaatgttcgagctggtcaaccttctcatctactcatatagacaccatgttggggaggcagctttctttattgcttataatagtctaaattacttgattcttagctcttcaagatttttctagcttctttcccctgactctcttcactgtgaattgaaggatagcatttgattgggaaagtaatatggtaataaatagcatgtatcaaaaaaaacattatttgtgtatttgaccaattctcagaggatcaattctacaccttcctaggaaaggcttatattttagattgaagagaaaaaacaaacatgtgaaccaaaatatacaggaagatatgatgaccaaagacaagatagaagacaaactttatgaggctctagcagggggaggagatggtaggacacatccttgagctgagtcttttctgcattttgccccatgctctcccctccatgtcagcgactcttcctctctgtttcacagtgggatgccaggaagcccagcctatggttaccacctctctgccttcttttagaggaaccttttcttccttatcaatcctgtcccagtcatacctctagttccagtctttctgatacagatttccttcatgccttctttattatccctttctttttcctgtcttctgactttactcatcctgtcacttgttacattggtggccagaaacatggggtgctgaagaattgtatgagaatatacgcagcgcaaaaataaaatacagatgactacattcaggtgaaagaccatttaaatgcttagctaaggttcaaagtgcacctatgttataagtgtcatttcggagcacttgctttattagaaatatgctatattggtattgttcacacctgacctcattaattagagaatatggcagggttgtcaggtctttgtaaaagggttctataagaggggctgtggccttgccaaccctataatagcaatttgtgtgacacacagagcaaactagattgttggaaagaggcgtcaagagaataaaagaagcataaatttggaagcacaattataatttgtgaaagtatatttttatatcttgtggaaaacaggtgacatctctaccataatttaaaattcacttaactacttgattctccattgaaaagctttcttctctttgttaactattggattgcagagtagggatcagagtcccccagcctatgagaagcaatctaacagatatgtcatactacatcttatcaaatggttgagtgtttggggtccaagcactcactggataggctaggagcagaaggctgcccattagttctctgaacactgacttggagaactgtgaaatctacttctgggcttgctctctgggaagtcacttaattctcctgaaagggattttagatgttgccttgcatttctaagtaaattatgtgttctcattctgcctcctttaacgttttattccggtcattaaggccttgctgtgtccttgttatgtgttgatgaatgtttcctaattgccctacaactaaaatttgaacttgagtggatacgtagatttttatttatttattttataaaacctcaaaggaagaaggcaaaaatggtggagaagaggaaagccaggagcaaagtgtgaacaggaaggaggtacagtatgggggacaacacagtctgccaggtgacttatatgggtttactgtatatctcagagcttttagggtctctctttaggaattttatggaagtgtgatactattttaatattgcttatgctttaaagatgcaaaggctgaaacacaaatgtgtttactcttttgcccaagtatacatgtgtaagaagttggagattgactttgaagtcaggcaattggttttatcctttaaatctaccggagctctaattttggattcggctagtccacttccagccccacagtaccatttcctggttgtctgagacttctttctgcattgtaagggtatttcatgccaggctgtagtgtacgtttgcagagagctttaaggtgatgcatgtacatgcacggtggcttgtagaagtgtggtgtcagttgcttcagagcccttccattctaggtcctgaggagtaaatggcaagggcagactagagtgtggactcttcctgaaggcacgtcagacatcttgagagatttgtagattatttcaacagagccaactcagctaggaaattaccaagctagctcaggtgattcctaagattatgaaatatgaaatattctgtacataccccagagagaaagcttattccataaatgtttgtatattgccttgttgttggtctgcttgtgtgtgtatacaaatggttaagcacccgattccctctttggctaagataagatttatctagcaaatgtgtctcttggtattagcgttttcttgactattaagaaagaggagaaacatgtttgagtgaagacggttggttataatgttttaaaactttttttcatgtgatttttggatctcccagaggtcacaacaggacgtaccgaggctcttaggcagggcataagcacagcagggcagggtgtgtggctgtgaagaccttaatgtatggcttgagtctggtctgaattgtaaagggacccctcccattgcttttactgccttcacaactagccacatcctacaccctgcccacagctgatcaggctctctctctgtagggaagcacttaacaaagatctggatatttgaatgggtaccatttgcttcttaaaaatagcaatgtcatagtaaatctgtgacatttactagtatgggctgaagaccacatcactgagaatcctctgaggtacttatttaataatgattttagtacatctgttggcaccgaattagaattacagagcaactgttttgtggctttcatgtgtgtaatgaaaagcagcagtatatatgtactaaatcctttaaccttgttcagatggtgatatacaaggactgttttttgtttgtttggttttttttgtttttttttttttttgtttttgtttttttaactcagtggcatgttgctgccagtgagctgacgtcattggcattggtgagctgttctgggagtggttgttgagggtgtcagtagaaggggatttaggagaggtgaatcgtcagagcaagaaaaggctggaggatggtaacagattttaggagttagattcaagacagatggtttgtgctgaagaagctgaattcaggatttctgaaggcagtggggagatgacagacttaggtagatgaaagacagaaacagcagaacacgcaatgagggatgaacgcaggtgtggttacaggttcagatcttgtatggggagccttaggaagtcattaattacaggccttttcctcaagctttatgacacagcttgtcagtccagctactgggaatctgacaactgaggggttagacactgagcatagtgaattacttgaattgattgcatatattctttataaataaaggataggatggattatagcttggataagaacagcagagaatctgctaaaaacaaacagctcattcctgaaaccatacctatacctactctaaacatattgatctagagagttctagaaaacacaagaacacaccaaacatactttagcattttaatgcaatatttcccagaccaaccatatataaggatcactgcaacaatgtctgtctgtctctctgtcctctctccctctctccctctctccctctctccctctccctctccctctccnnnnnnnnnnnnnnnnnnnnctccctctccctctccctcctcccccctctctatgttttaatgatgcctcgtttctacttcagtgcatttgatttcattgctctctggaatatggtagggaggattagggttttaacatgctttcctctttgtttgtttgtttttggtccttttgtttaaagctgaggaaatacaggtctggagagattgtaaatttttccaaagtgaattggtttaattgtacagagaggactgtatgaaccaccatctcctgattcttagcacagtgtccagaggcccctgttggctttacaaacaaaggaaatttatcacagggcattgtttcaaaagcccaaatgatgcaagtcttgggaaggcaaactcctcaggtagcccccgaagaccagcagtgggaaatggctgtattattctaaggactggagtggtgatgcctgtggggttgtatttggatacctggagttggagcttctgtggactacagtgggatcaacataggaagctgaggatgccgcttgaagcacaggggaagaaggacaaatccctgtgcttttctcatcttctatcatgttctctgattgctaccaatacttcctatttcccagcccattttccaagagatactatcttgggagcagagaaggacagaggaagaaaggagaaggaagcagtgggtgatcagccctttggtctttataatgccggagttttgtgttttgatgttttcagaagggatgggtacactgcagtttcccagtaaatcgtatggtgctgctatagcaaaacaccacaagttgtgacataaaggacagagatttaattctgaccgttcaagaggctgggaagtcgaagatccaagatatatgtgtatctggctgtctggtggtcttgtatcctatgaaggagaggagctgtgtattcttacatggtggaaggcagaagtgcaaatagctaaaatgtgtaagagatttttcatgaagaccttaatccattcctgagggcagtcttcttgaatcagagccttatggaagcccccacctcctactatatatctttcccactaggtgtcagcacctatatttggggcttggtgttcagttcatagcaaggaaggggtgctctgtttatgaagactagctatattaaaatggacaacttctttaatatagatgtgtacacttttgctaatgtcttctttttctgacaatcaagggctatatttttttaatttacatgcttacattttataacctttatatttaagatatgtatgggtttttaaataccaattagtaattttctctgtacgaagtctgaaacagttgctcctttgaggagtagttactttctagacgtatgaccgaagacaaaatagtcctgtgtgtacaagtgagatggcaggccttatttcactgtcatggaaggtactttttttttctttttaaaagaaaattggaattaaaatgtactgtgttttatttgttctgcctgatgggccaagcgctttgcccccagcagagctgagccttgccatcctgctgttctaacagtagctcccctgtagagcacagcattcttaagacttggataatgagcccttccgctcgactcgagactcgagccccgggctaccttgccagcagagtcttgcccaacacccgcaagggtccacacgggactccccacgggaccctaagacctctggtgagtggatcacagtgcctgccccaatccaatcgcgcggaactcgagactgcggtacatagggaagcaggctacccgggcctgatctggggcacaagtcccttccgctcgactcgagactcgagccccgggctaccttgccagcagagtcttgcccaacacccgcaagggtccacacgggactccccacgggaccctaagacctctggtgagtggatcacagtgcctgccccaatccaatcgcgcggaactcgagactgcggtacatagggaagcaggctacccgggccctgatctggggcacaagtcccttccgctcgactcgagactcgagccccgggctaccttgnnnnnnnnnnnnnnnnnnnnnnnnnnnnnnnnnnnnnnnnnnnnnnnnnnnnnnnnnnnnnnnnnnnnnnnnnnnnnnnnnnnnnnnnnnnnnnnnnnnnnnnnnnnnnnnnnnnnnnnnnnnnnnnnnnnnnnnnnnnnnnnnnnnnnnnnnnnnnnnnnnnnnnnnnnnnnnnnnnnnnnnnnnnnnnnnnnnnnnnnnnnnnnnnnnnnnnnnnnnnnnnnnnnnnnnnnnnnnnnnnnnnnnnnnnnnnnnnnnnnnnnnnnnnnnnnnnnnnnnnnnnnnnnnnnnnnnnnnnnnnnnnnnnnnnnnnnnnnnnnnnnnnnnnnnnnnnnnnnnnnnnnnnnnnnnnnnnnnnnnnnnnnnnnnnnnnnnnnnnnnnnnnnnnnnnnnnnnnnnnnnnnnnnnnnnnnnnnnnnnnnnnnnnnnnnnnnnnnnnnnnnnnnnnnnnnnnnnnnnnnnnnnnnnnnnnnnnnnnnnnnnnnnnnnnnnnnnnnnnnnnnnnnnnnnnnnnnnnnnnnnnnnnnnnnnnnnnnnnnnnnnnnnnnnnnnnnnnnnnnnnnnnnnnnnnnnnnnnnnnnnnnnnnnnnnnnnnnnnnnnnnnnnnnnnnnnnnnnnnnnnnnnnnnnnnnnnnnnnnnnnnnnnnnnnnnnnnnnnnnnnnnnnnnnnnnnnnnnnnnnnnnnnnnnnnnnnnnnnnnnnnnnnnnnnnnnnnnnnnnnnnnnnnnnnnnnnnnnnnnnnnnnnnnnnnnnnnnnnnnnnnnnnnnnnnnnnnnnnnnnnnnnnnnnnnnnnnnnnnnnnnnnnnnnnnnnnnnnnnnnnnnnnnnnnnnnnnnnnnnnnnnnnnnnnnnnnnnnnnnnnnnnnnnnnnnnnnnnnnnnnnnnnnnnnnnnnnnnnnnnnnnnnnnnnnnnnnnnnnnnnnnnnnnnnnnnnnnnnnnnnnnnnnnnnnnnnnnnnnnnnnnnnnnnnnnnnnnnnnnnnnnnnnnnnnnnnnnnnnnnnnnnnnnnnnnnnnnnnnnnnnnnnnnnnnnnnnnnnnnnnnnnnnnnnnnnnnnnnnnnnnnnnnnnnnnnnnnnnnnnnnnnnnnnnnnnnnnnnnnnnnnnnnnnnnnnnnnnnnnnnnnnnnnnnnnnnnnnnnnnnnnnnnnnnnnnnnnnnnnnnnnnnnnnnnnnnnnnnnnnnnnnnnnnnnnnnnnnnnnnnnnnnnnnnnnnnnnnnnnnnnnnnnnnnnnnnnnnnnnnnnnnnnnnnnnnnnnnnnnnnnnnnnnnnnnnnnnnnnnnnnnnnnnnnnnnnnnnnnnnnnnnnnnnnnnnnnnnnnnnnnnnnnnnnnnnnnnnnnnnnnnnnnnnnnnnnnnnnnnnnnnnnnnnnnnnnnnnnnnnnnnnnnnnnnnnnnnnnnnnnnnnnnnnnnnnnnnnnnnnnnnnnnnnnnnnnnnnnnnnnnnnnnnnnnnnnnnnnnnnnnnnnnnnnnnnnnnnnnnnnnnnnnnnnnnnnnnnnnnnnnnnnnnnnnnnnnnnnnnnnnnnnnnnnnnnnnnnnnnnnnnnnnnnnnnnnnnnnnnnnnnnnnnnnnnnnnnnnnnnnnnnnnnnnnnnnnnnnnnnnnnnnnnnnnnnnnnnnnnnnnnnnnnnnnnnnnnnnnnnnnnnnnnnnnnnnnnnnnnnnnnnnnnnnnnnnnnnnnnnnnnnnnnnnnnnnnnnnnnnnnnnnnnnnnnnnnnnnnnnnnnnnnnnnnnnnnnnnnnnnnnnnnnnnnnnnnnnnnnnnnnnnnnnnnnnnnnnnnnnnnnnnnnnnnnnnnnnnnnnnnnnnnnnnnnnnnnnnnnnnnnnnnnnnnnnnnnnnnnnnnnnnnnnnnnnnnnnnnnnnnnnnnnnnnnnnnnnnnnnnnnnnnnnnnnnnnnnnnnnnnnnnnnnnnnnnnnnnnnnnnnnnnnnnnnnnnnnnnnnnnnnnnnnnnnnnnnnnnnnnnnnnnnnnnnnnnnnnnnnnnnnnnnnnnnnnnnnnnnnnnnnnnnnnnnnnnnnnnnnnnnnnnnnnnnnnnnnnnnnnnnnnnnnnnnnnnnnnnnnnnnnnnnnnnnnnnnnnnnnnnnnnnnnnnnnnnnnnnnnnnnnnnnnnnnnnnnnnnnnnnnnnnnnnnnnnnnnnnnnnnnnnnnnnnnnnnnnnnnnnnnnnnnnnnnnnnnnnnnnnnnnnnnnnnnnnnnnnnnnnnnnnnnnnnnnnnnnnnnnnnnnnnnnnnnnnnnnnnnnnnnnnnnnnnnnnnnnnnnnnnnnnnnnnnnnnnnnnnnnnnnnnnnnnnnnnnnnnnnnnnnnnnnnnnnnnnnnnnnnnnnnnnnnnnnnnnnnnnnnnnnnnnnnnnnnnnnnnnnnnnnnnnnnnnnnnnnnnnnnnnnnnnnnnnnnnnnnnnnnnnnnnnnnnnnnnnnnnnnnnnnnnnnnnnnnnnnnnnnnnnnnnnnnnnnnnnnnnnnnnnnnnnnnnnnnnnnnnnnnnnnnnnnnnnnnnnnnnnnnnnnnnnnnnnnnnnnnnnnnnnnnnnnnnnnnnnnnnnnnnnnnnnnnnnnnnnnnnnnnnnnnnnnnnnnnnnnnnnnnnnnnnnnnnnnnnnnnnnnnnnnnnnnnnnnnnnnnnnnnnnnnnnnnnnnnnnnnnnnnnnnnnnnnnnnnnnnnnnnnnnnnnnnnnnnnnnnnnnnnnnnnnnnnnnnnnnnnnnnnnnnnnnnnnnnnnnnnnnnnnnnnnnnnnnnnnnnnnnnnnnnnnnnnnnnnnnnnnnnnnnnnnnnnnnnnnnnnnnnnnnnnnnnnnnnnnnnnnnnnnnnnnnnnnnnnnnnnnnnnnnnnnnnnnnnnnnnnnnnnnnnnnnnnnnnnnnnnnnnnnnnnnnnnnnnnnnnnnnnnnnnnnnnnnnnnnnnnnnnnnnnnnnnnnnnnnnnnnnnnnnnnnnnnnnnnnnnnnnnnnnnnnnnnnnnnnnnnnnnnnnnnnnnnnnnnnnnnnnnnnnnnnnnnnnnnnnnnnnnnnnnnnnnnnnnnnnnnnnnnnnnnnnnnnnnnnnnnnnnnnnnnnnnnnnnnnnnnnnnnnnnnnnnnnnnnnnnnnnnnnnnnnnnnnnnnnnnnnnnnnnnnnnnnnnnnnnnnnnnnnnnnnnnnnnnnnnnnnnnnnnnnnnnnnnnnnnnnnnnnnnnnnnnnnnnnnnnnnnnnnnnnnnnnnnnnnnnnnnnnnnnnnnnnnnnnnnnnnnnnnnnnnnnnnnnnnnnnnnnnnnnnnnnnnnnnnnnnnnnnnnnnnnnnnnnnnnnnnnnnnnnnnnnnnnnnnnnnnnnnnnnnnnnnnnnnnnnnnnnnnnnnnnnnnnnnnnnnnnnnnnnnnnnnnnnnnnnnnnnnnnnnnnnnnnnnnnnnnnnnnnnnnnnnnnnnnnnnnnnnnnnnnnnnnnnnnnnnnnnnnnnnnnnnnnnnnnnnnnnnnnnnnnnnnnnnnnnnnnnnnnnnnnnnnnnnnnnnnnnnnnnnnnnnnnnnnnnnnnnnnnnnnnnnnnnnnnnnnnnnnnnnnnnnnnnnnnnnnnnnnnnnnnnnnnnnnnnnnnnnnnnnnnnnnnnnnnnnnnnnnnnnnnnnnnnnnnnnnnnnnnnnnnnnnnnnnnnnnnnnnnnnnnnnnnnnnnnnnnnnnnnnnnnnnnnnnnnnnnnnnnnnnnnnnnnnnnnnnnnnnnnnnnnnnnnnnnnnnnnnnnnnnnnnnnnnnnnnnnnnnnnnnnnnnnnnnnnnnnnnnnnnnnnnnnnnnnnnnnnnnnnnnnnnnnnnnnnnnnnnnnnnnnnnnnnnnnnnnnnnnnnnnnnnnnnnnnnnnnnnnnnnnnnnnnnnnnnnnnnnnnnnnnnnnnnnnnnnnnnnnnnnnnnnnnnnnnnnnnnnnnnnnnnnnnnnnnnnnnnnnnnnnnnnnnnnnnnnnnnnnnnnnnnnnnnnnnnnnnnnnnnnnnnnnnnnnnnnnnnnnnnnnnnnnnnnnnnnnnnnnnnnnnnnnnnnnnnnnnnnnnnnnnnnnnnnnnnnnnnnnnnnnnnnnnnnnnnnnnnnnnnnnnnnnnnnnnnnnnnnnnnnnnnnnnnnnnnnnnnnnnnnnnnnnnnnnnnnnnnnnnnnnnnnnnnnnnnnnnnnnnnnnnnnnnnnnnnnnnnnnnnnnnnnnnnnnnnnnnnnnnnnnnnnnnnnnnnnnnnnnnnnnnnnnnnnnnnnnnnnnnnnnnnnnnnnnnnnnnnnnnnnnnnnnnnnnnnnnnnnnnnnnnnnnnnnnnnnnnnnnnnnnnnnnnnnnnnnnnnnnnnnnnnnnnnnnnnnnnnnnnnnnnnnnnnnnnnnnnnnnnnnnnnnnnnnnnnnnnnnnnnnnnnnnnnnnnnnnnnnnnnnnnnnnnnnnnnnnnnnnnnnnnnnnnnnnnnnnnnnnnnnnnnnnnnnnnnnnnnnnnnnnnnnnnnnnnnnnnnnnnnnnnnnnnnnnnnnnnnnnnnnnnnnnnnnnnnnnnnnnnnnnnnnnnnnnnnnnnnnnnnnnnnnnnnnnnnnnnnnnnnnnnnnnnnnnnnnnnnnnnnnnnnnnnnnnnnnnnnnnnnnnnnnnnnnncttgaaaaaatgttcaacatccttaatcatcagggaaatgcaaatcaaaacaaccctgagattccacctcacaccagtcagaatggctaagatcaaaaattcaggtgacagcagatgctggcgaggatgtggagaaagaggaacactcctccattgttggtgggagtgcaggcttgtacaaccactctggaaatcagtctggcggttcctcagaaaactggacatagtactaccggaggatccagcaatacctctcctgggcatatatccagaagatgccccaacaggtaagaaggacacatgctccactatgttcatagcagccttatttataatagccagaagctggaaagaacccagatgcccctcaacagaggaatggatacagaaaatgtggtacatctacacaatggagtactactcagctattaaaaagaatgaatttatgaaattcctagccaaatggatggacctggagggcatcatcctgagtgaggtaacacattcacaaagaaactcacacaatatgtattcactgataagtggatattagccccaaacctaggatacccaagatataagatataatttgctaaacacatgaaactcaaggagaatgaagactgaagtgtggacactatgcccctccttagatttgggaacaaaacacccatggaaggagttacagagacggagtttggagctgagatgaaaggatggaccatgtagagactgccatagccagggatccaccccataatcagcatccaaacgctgacaccattgcatacactagcaagattttattgaaaggacgcagatgtagctgtctcttgtgagactatgccggggcccagcaaacacagaagtggatgctcacagtcagctaatggatggatcatagggctcccaatggaggagctagagaaagtagccaaggagctaaagggatctgcaaccctataggtggaacaacattatgagctaaccagtaccccggagctcttgactctagctgcatatatatcaaaagatggcctagtcggccatcactgcaaagagaggcccattggacttgcaaactttatatgccccagtacaggggaataccagggccaaaaagggggagtgggtgggcaggggagtgggggtgggtggatatgggggacttttggtatagcattggaaatgtaaatgagttaaatacctaataaaaaatggaaaaaaaaaaaaaaaaaaaaagacttggataatgagtctgatgtcatcaagcgagctttattaaaataaatactctaccatatttccttcctaagagcattctgattaattgcatcataaatacttacctgacactctttttcatcagtagagatagcaaagagacttcattcagctagtgacattgaaggtactgagggtgcttcccacagtgttctgttctgacacccactctggtgtttgctaatctgtgatctgaagacctttgtctaacttagcctattacatcgaactgctccgagagtaattaaatactaatgcttgtccttgttttgaggctgtagctacttacatagtaagagattaaatgttgcctcaaggctgtagaattggttcctaatatctagctttgtgtttgacttgccagccacgggtgccaatactggagttccatctgtattttccttctgtagctcatgataacattcataaccaaagagaacataagatctggatggtttctatacgtctatgacttttagggatgggcacatggttcagaggttaagagcactggctgctcttctagaggatactgagttcaattcccagcaccaacatagcagcttacagccctctgtatctccagtccctgggaacctgataccctcttctagcctcttcaggtacggtatccatgtagtgcacagccacacacgtaggaaaagacccatatacatgaaaataaagaaataataaataaaacataaaaaagaattccgtgactttttagttgactcacagagatggatatgctgtttattatccttctattctttattagttgactgtactatattgagtatttgggctattttataatttaccatgtcaaaataattattaatatgaaatactaaatataatatgtctcaaactttaaatgtttttatgtcatcacctaatattgaaaatatatgagtaaaactaataatggttatttnnnnnnnnnnnnnnnnnnnnnnnnnnnnnnnnnnnnnnnnnnnnnnnnnnnnnnnnnnnnnnnnnnnnnnnnnnnnnnnnnnnnnnnnnnnnnnnnnnnnnnnnnnnnnnnnnnnnnnnnnnnnnnnnnnnnnnnnnnnnnnnnnnnnnnnnnnnnnnnnnnnnnnnnnnnnnnnnnnnnnnnnnnnnnnnnnnnnnnnnnncatttagcaaaggaattatcatccagggaatgttgtattcaaggtgttagacaatgatcctcaactaggtcctctaggttaccagaatacaaatcatagatgaaatagaaatgaaacagaagtaatctaatgactcttcagagtttattaagtatgtttgtgtgtgtgtgcagtgtgtgtgtgtgtgtgtgtgtatactcacattcatgcatatataatgttaccaaacctggaggtgagccaaggggactggagaggatatgcccatgagataaagaagacatggcatacattggagccagaaagcttattatcagagagttgtttataggacaaatcttttttacaggacataaagaagataaaaagctattttatgatggttaattctgcttatattactgcattatttaaaactcaaagaaactttaaatttttcttaattttctattttccatctacattaattagttttagggagccacaattattcattgctcatagacaagtagaattgttgatagacacttttactttagcactgttttataactgaaatataaagaaatttggattgctttatgaggacgtttaaatataagaaataatttttgtatgctttgattgaaagaaaggcacttcattcattctaagttctttttgtaaagcttctgattactacaattagatccattcagctcaaacatgttttgttttgttcccagaaagaggagcagtccacggaccattggcattttatttgtccaacttcgtttcataaccctctacaggaggttatgtattaggattccaatgggatagaacagagacaccataacaactgatggcatctgactttagaccccacaccacttactcacccactgttgagaccaactgtagtgaatggcccatgacctcttggctatgtctgttttagagtctttcatgaagaaagatagaaacagtgtgctcatatggcaggaactcccttacatgtaatgagataaaggttggctgttatagcactctttcttctttgtttctaatgtaaagaatggttaagttcccagtgacaaggtgacccgtgaatatcatacaaaactgatacacaggcactggtcttggggaaggttcttgctctaatgtatcactggctttcccaactgttggaacttttgttcccctttatagtttttagagacagtacatgctatttgctaatttcatttactttttgtaatgtaaggtattcattatttttaaattaagtcttatcctagagtgaaagatgcgtttctttctgttagtattcagaacacttttcttaaactgaaactctaccctaccaccctaaccctgcaaatgagaatagtccagaggaaattttttccatcaattatagttttaaactagatgattatcagcatccatttcaggaccatgcagaagtgtggagtgccacatgtggggaaataaagggcgggggagagctccagactgctgcaagcactctctacactgcctgggtgggtgtctgtctgtgggaagccatggaaccctagtactcaggggtagagagggagcagtctggggtctctgggcctcacaaaggccagagatgacagggtctcagtctcagacattccagatgctgcagtatgtcagggaagaactgaggacaaagtgaggactctaggggccgcccagtcaacccccagggccaaagggagaagggagcagggggagaaagggcactgggcatttcccatgcaggtgagagtctggctagctcaggctgctagctcagcagtcagcttgggttggctggagcacaggaaggcctcgcagttagacatggctccttagagggaagcccgttccattgcttcaacatggtgggtcttgagtagagatggtccatggttttggagctttattgtagaaaggcagagagaaagaggaaaaaagaaaagggtagagaagcagaggccagccatggccatgtggagagacggggggagagggggagaaggagagtgaaaggtaagagtgggagaacaagagcttaggagagagaggaggggcctagcagccccttttatagtgggctggggtaccttactgttgccaggtaactgtggggaggaacatacctgtctattgccaggtcaactgtgggggtggaatctagccagaataccaggagcttgggacattgtctgtgactgatagtcacaggattatgaagctgaggactcacggtctcaggcacctgcgtctgggaatgtggctcactgttctgtcccttgaaggagtaagccttgcttaaccagaacacaggccgccttttgcggtcccacacagaagtctttgagatttgttttctatagcatgaagaagaggctggggcagtgtgcttcaacttggaaatctccagtttcgtttacatcctcctaacatgtggactctggatggctcatggtcttagctttgtttttcttctcaagctttttaggatgccacattccacaagtataacatgtagtatatatgatgtgttacaatagcagcttgcgtctgaacacaacacactgggtccaagcagtaccacgtgtgagaggtttattggggcgggggatatggcagcagaaagagaaggggaaaaagagagaggggaggggtgttccccttatttatatggaaaatgacataatgcaggtaaaggtgggaggtgagtcaaatggattttggaaatatggtagctgttgtcttggtaacaggtctgtaggccgtgctgtcacctatctgatgtcataggttagggaggtcctgatgccaaccatatatggttaatattatgctatattaagacctgaacagcatttatatggaaagcttattagtatgcttaaggacgacccatgcaggtgagaccagaagaggctgaggagaatatgctgtgttaaggagtgacatgtgttaatagttggagtgacaatgtacattcacatggaataagtagggcagcattcgggtggcttctgattaggctatggagggtaagtcatgaattgtcagaggcaaagtggtttggaaataatcaaagagtggaaggaagtggaacttaaccttgacagcagatggggactaagacatgtgtgggtatagatgttagggtagatgatttgtgaggagattgatctatttttttaaagatttatttattattatacataagtacactgtagctaacttcagatgcaccagaagagggcgtcagatctcattacagatggttgtgagccaccatgtgcttgttgggatttgaactcaggaccttcagaagagcagtcagtgctcttaccctctgagccatctcaccagccccaagaggagactgatcttaatgagcagtatctgcattgtatcataggagtaataagatagaaaaatcaggtaacaagaggcgtcaaacatcactatgttgaccttgaacttgagttggagtctggagagccagtgtaggctttcagagcactggtgtgataagacacagatagtacacattttgctcttattcattttgaactatttagagtttcctgcagtgggaaaaaagagaaaacttcaaagactgaatatcattattacacaaaattcttgacaataaaagcatatttgattgacccaaagagttctactttagagtgtattgagcagaaaggaaagagtcaaagaaaagatcaaaaggattattagatgtagaaatgatcgaggttcggaatgtatagtgacttaggcacttgggcatcaaggactatgttggagtctatgacaaaattggagaatttatttggtttcatatttcagaattgagatgtggaaatttactagacaactcatgtattttatttttcatgaaaaatcacacgtgaactctgtccagtccaaagaaaactccatttacccaaatttcagaaagaaacctgaaaggacaaataggtatctgtggggcctgttaacatatcaaagcacatgctgacctctagctcccttgtaccacaaggacctgttaaacaaataagtcatggagcgccctagttctcactcctcccttacccaagctccctcaggtcacactccatcacctagccactctctagaatgctgctctttcatctacttttattctctcctggtcttttctcccactctgtctcnnnnnnnnnnnnnnnnnnnncctgcttctctcatggtcagatccagtctgctggtcaggtttagtttagtactctctctcttgggtctggactcttccagatgtcatatagtagttatattggtcatgttctcagtgtatatagtatttacctataagattaatgttaggataaaataaagataggaacatgacagtcaaatcaagccccaaaggcaaaatttcaggattttgataagtacaagatagtgtttctaaggcaaaggcagaaggagtccattgtgatatagggcatggtcttgttctccagctctcctagtttggctgtgagcactggattgtctgctcttttcctcatgtcacctttcctctacctctacacactcattccctgtcaaaatctgcctttttgtgtgtgtgtgttccatattcataacatgaaactactctaggcattgcttttaggtttcttacattctggaataaaataattttcaaaatttgtataagaacattgttaatttccctctacatctcaggcatggtgttgtggccttggtggtgttgagggaaagaggcagtggcatctaagtgagctcactgtgtagagggggatgcaggtcagcatatctggcatgatggaggcctgtgcagagagaaggacctcaggtcatagcctctgcatttgtggacagtggctgactatcagggagagctttcctgaggggctctgagctaggcttcagagtagtaaacatcacggaagagtgaggccatggaggttcttaagaagtatatttaatcattttgttccctgtcatatagacttgcattatatagaacttctgccatgcatacctatctttggcaatttttctagaagtgtaagggagcctggcagaattggatcctgggagaaaggggaatgactaacaccagggctcctccagccagtatacatagggtaactgtgtaacctattactcagactggggctagaggagttctgttaaaaaattaagcctgggtattctggaggttccagacctttcattgcctgcaacagagataatctccttctgctgtggttgtagtatgacaactgttggccatcagttgtcctttaaacaattgtctgtagttctctgtttggaagagccccaagattcaattctgcagaatagcaaacctgagcggattttggactgggtgtggagctccagtaaaaatcctcttccatgcttgcagcagaatagtatcattctgagcgagtggcagtggtacgggggatgggcgtgcagcaaacatctacgtgacttctgattcaacagttaaggcctggggcacagggctgagggaggagtggtgatgggaatcctagttctgctctgccttgattcagttctatcctgatcaagactcttgcagcagagtgggcctgtgcttagtgaggagatcccctcagcattccgatgtctttaccacatgtactgtagttccagggcttgcacagatgcgtttacctctcattctcctggagctcctggagatagcaggcatgagtggaatgtactgggacacctagagtgagccaacctgaggatatgcagatgcccattctttgtatgctcacagggtgggaagcagtaattgggacaaacttcctgctaataaaggtactacactaaaatgtagtcatattcataaaataaataaatcttttaaaaggcactaatcccaccctgatggctctgttctcatgacctggttaccctttaatgctaatctcttagaggttagagttttgacatttgaattctatataaatggaaacatatagtcacaacagtgatgtaaaagagtttcagcgaatgctggtaagttgtcatgtaaatgcatcttctgacctttgtgcatccattggtattggtgcaaagggtttaactgtcaatgaaggagcagctagcaggtgaaattcagactgtcatggctgggaagggacaaggggctaggaacttgtggtaaaggacctttttgtccgtgactgtttttggcagcatcagagatgacatggtttacagccagaggtatacagcatctccagggaagtgtttatgcttgcaagggtttcttcttagaaggagtaggagtcagtctctgaagtaaactatccaaggctaaagggtctctgtgtgtgttgaagttagttaaaatacccaacttcacttcttaggaacgatggtatgtgtatatttgtgaatacttattcatgtgtaatatatacctgagcattgaatgaaaacaaggaccaaaaggtattttcaacgtacatgtgacttataagagggttttgctctataggtagtgaggttctttctattgttgtttcttcagcatttataataaatttaatatctcaagttggaatgtagtaacttaaaaggaaaaaacccacagttttaataataagtacagtttgattgcctactttatcttttgtattaaaatgaatgctacaatttctgtgtgtttaatacgtagaaaactctgttccattttcatcttcaactataaaaagtattacttctaagtaggcatacagtttatcctggtaaataatctaattctaagtatatgtttgttatgaagctgtctttcagaatacaccaaatggaaggagagggaagctgattgtcttttattatggggctgacagaatgtttattaatggccatggatttgaaacgagcatcttactaaatggaagtctttggccgacctctgaccccctttgtcgcaaaggtttgcgaacagataatacgatagaataccagcgcttttccagatggctgcatgcctgaagctcctttatgtttagctgtcattcaaatatgaatgcccagtgattataagtgtctctttctcttttctggactgaaatgaaaccttttatgcattgtgtgttaaaacagattaactatttggctcatcagtagggaaattataacaatagctgccaactcgatggcatagtaaaagaatgtcctttggggctctggggcaaatggtgtgttcaagtgtcaggcttgcagagaacagatgagttatagaataattattttgcattttaattttataactatgtctggaccagagtagtcgtatgcttttataagaatgcaacatttggatcaatttttatcagagttatatatacattttaatggcttatcagtaatttaagtaccactgtgcaaattgagtgaaagtgctgtgcatgtatatataatgtgtgtttcatgagatgataattccatgtgatattttctacctttcactgtgctacagttggcttttaaatatatatgtttcctgaggtttccataacagatcctttaaatgccatttctctaatcctactaatgtggttttgtagtttgaagagcagctaaagatggacaattaacctttaagcctggttgaagtgcagacctgcctggagggcagaaaggatctagtgacccttctatgacctttgtggtgacagggcaaggggtagagggatcatccacatttatgctaaggaaccagggtactttacagcatgttggatagagttaccactcagcagggagctgtaagttgattctccattttcctggcaacccatgaaatgaataaaatacaaattctaatgatcaagaggaagaaagagaacatccctatgtctagttttccacgcctacttaacacgatggtggtatgtattgtgcatttcaacaaagctataagacactgagtttttcctcgtagacatgatacatttttcagagcattgatttgctgacgctgatttgagcattatgtaatttatacaatttatatttgctttgaaaataaataatactaatttataaacatgtatccttttataagtgaattaaaaatgaatatttaaataatcattttaaacaaaagtgattttgttttagtgatagctcatggagcagcatccaagaaggttaccatgacttttgtcttagtgatatgtgagtagataataagcagtctgagattaaggacttgtaaagcagataatgggtcaaagtaatttgtgtggttatttccttgatacctggaggtggggtaggatcctagtgccaagagattcagaacttgactcaggcgtgcacagctcaatcactaaatcattgatttgttcagtcattatcatgatatcttgagcatttcagcacgtactgtattgatcttttatagtgtatgtctggcatgataagaaataggcaatgtatgttacccatggagtccgaaaacatgtgttctcattgtaataatgaagaatcaaaatagtcatcattatgaggaagatttgaaagaaatgaagagatgtaaacaccaactgttcaggatcaggattgcactgcgacttacaagcatctagggaggtaggtacttcgatctctcatctagatgagcaaggaagaagaagttattttgcccaagatcaaaattacagcctatggtagagcttccatgcctctgctgtgaatgtctaccgtctgcttgaacacgtagtaaaagaatgtcctttggggctctggggcaaatggtgtgtccaagtgttaggcttgcagagaacagatgagttctccaatgttgaactactgctaagcaaacataacttcaaatctttccttcactgagcactgtgtacatgcttgtaaaatgccagtgatctgattgctctgtctcttgtctctacctattttattatctgagctatcaaagtcatgtatgttctttggaaaaaaagtcacaaaacaaagtaccttttcttttcttcatactttagtttctgcaatgcaaatagcagaaaattaggaaacaaagatgttgactgtgatgagttttagaaagtgtggtgacaggtgcttcctccgttgtatcttactctcactaaacctcaaaatctcaatgtttcactagggtcatgagtctaccttataaatatagctccttctaagaggttaattgtgtacaagattgttctttggttcaaaggagtcagatgtgccatcaattcagaaattcatttttggttttagtttgcctgcatagaccaagaacatttctgtagagaagttcactcagaatgcactcttggtatggcactttgcacaggctccaaaggagaggaaaggagagtttcttgtggcatctcctgcctctaccacactgcctgattggtagaggggcagttccctgtccacatcaatgacagtggatgacggtggagctcatgttggaagcattgagagatctaaagctgaggtggagtttgggaagcccataaggagtgttggcactgcaggaaagacttggcagttccacttcttcccattttcatattgttcccccgtgggccaggaccgatgacaacagggtactgtcagtactagtgacaggaatggagaaggcacttaaggaagaagctggatggggcatttagataagcatatcaaatgctgttgactgtcttgtaagaggcaggaattctatcatttagccaagttaaactgtcattgtgggaggtcatttcagttgtcatcaaggttgttatccttgcctcctgagtcaagtatatttgtataaagaaagttgtgcagataaaatgtgagcatctgtcctcctcctcttcttcctcctcatcttccatcttgccctatgtcagtttaggaccctagtcacaatggaggttggaatactaaaggaagtgagagagagaatgcttgctcttgagcttagctggagcctccagtgaagcaaaggagtgggattttgtctgttcatttagcaaacttttttctgtccccccctcccccttttgagtagctgattagttgcaggtgcgaggctagatgctgcaagtgagacatgcactcttctgtcacgcagctagccgacagactgctgggcagaactacaatgatggaaaacaatagagcactctaatgagtcttgtgataatttttttgatagagaatgaatttaataaataattatactcagaattatgaaatcatgagataaactaatataatgccttgtgttattgtctaataaccatgattgcctcctatttttctttgagaattctttttattttgaaaatattcaagcttacacaaatgtagtcagaatatcttatgagcccctttcctccacaaatctccatcactcagcttctgaatcattagctgtggtcagtgtggctttgcctttttttttaacctctgcttttctaatgattttgttgcctgttttctttttgtacattctgagcatcttgtagtggacagacagggctttctgtgtgacagtggggctatattgagcattgtttaattcttgtatttgtatatttatatctagttcatgagtacatgtatgtttgtgcatgtgtgcattgtgtgtgtgtgtttaaagagactacaattcatctgaagctagaattacaggttgttgtgtgccagatattctgggttctgggaaactaattcagatcttctttaagactagaagtgctcttgactcctaacccatctcttcagaaaataatcctgagcattattttccaagtaatttctatcctttttatttggacaacctgagagagaatgtatgaagctgactatgttttgaattgttgaacagaatgaccataagatatggaaactctactttggggtccaagtttgaatcacagtgctcatatagatgctggcttctgtttatagggtgaggtaaaaagaaaagggaagagcaaaagggaagagaaaaatctcttcattatgtgtaaatatcaaattttctctaaatacaattcaactaagttaagcttagtaagaaaaacaattggagtgaacattcgtgtctatgatacatacatatgtatatgtgtgtccatacgtgtgcatgtgtataaaggcagcaacctcagacttttaaggaattgaactaactacagattggatgtaggaaatgaacctgcctaattcattggctctgtctttggcatgctcacagtgtgcaatgagaacattgtattccatggtactgtgtcatgctcctacaattcatgtctgagaatggaagaattttcctcttgtagcaggagctgaggtggattctttctggtctagatctgacacattaatcctatagaacaagcgagggcctctacgataagtcctgactaatacacacaatcctgtccacagtttactgctgagagcaccctctgagatgctatgattaccttattccaggcagagcagtggcaacaggggaaagcagtgcaactggtgttagcccaagaatatcaagggaaggtagttgtttgcataggattatatggctaacatctgaatgtgctcggcaaactcatttcagttcttaaacatctctgttagaagctctggagcaggcaattttgaccatctttacctacaagtagactgtgtgagatggcccagtcagtgggggagctgggcctagagctcacgtctttttacctgatgctgccattttctagtagggctaactctgattattagtatgagtgactgtcgggggatgactctaaaacgaacctgtgcagaacatgctttctggatcactggagttatggggactttgggaaggtgtgtgacggaaaggtgtttgggacagtcgctgaaagtctgtctatgtcctccagcaaaagaacctccttgcctttgattactcaaaggaagtgattgctgtgccctcctcatccatcacacctactttcctgtgtcttattactacggataaaagaaagccctttgctgactatccgcagattgctagcttttcagagcattagcatccagcagttaggactgtgaggctaaaaatgaggctcaggtatgagccatggcttctgtctctcaatgcattcctttcggttatctgaggcagggacaagtttacaacttgatgatctggactttacattttctagctttccagcttccagagttgacttttactttgatcacttaataaagtaaaaataaaataactttcctatatgtaagttggacaattacaaagtagaattctattatcatccagagaatcttcaaggaggctggctgcattcacacatcagtttctcctatgtctgcaataagtgacatcattgtcctgcagcctcaacttcctcatctgtagtttgggaaaccatagtgtttatgcaatagactgttagaagaacttgctgaagcagcatttattaaatgtttggagtaatacctagcacaaagaattgctctaagagctaagttaaatacggtgtacataacattattacctttttcacataccatgcatcaatggtggatttcatgtaagatgattgacctggggcataatgaaattaaaagattcttatgtcttaatacttccagtgtggtttttcagtggttagatgtttagctacataagtacttgccattgcatcgtggctgattacagtcctcagtctagtcatatgagttctctctttatagcttggaaacaataggctgtaccatatggtgtcatgtagggcagaccgtagagcaatatgtaagtacattttacagtgtttctacaacaaggaaatttaccactggctgactcatttcttagactgtatgttcactgttattgactattgtgtaccacgttatattgcatgtacatatcactttgtttaagtggtgccccgttaggtatttaggttactacacatttttcacaatggtaagtatttctgtattaacactttttcccatgtttttaaagtattactatttttttctatgatcaacttcttaaattgcagcttctggctgcctggtatgtgtatgctttaaaagttatcgtttaagtagacaacttgtcaagggatccaaagttgctcacacccatgttttaggtatattttaatttttgcaatatgggggatgcaaagactttctcacttaaaaagcattactattataataaagttaatttcagttgcagggtagattggccatttttatttctgttttggttatttctatttaaaatttgaaagtatagactattttctttgtgtaaatacttggtttaaaccacttttgttttatttcctaccccaactatgcttttctcctactgttttcagaacaaagtatgagattcatagttttgaaatgatatttgtatttagttttactgaactacacacttgagtcttcctgttcaagcatctcggctaatagaagatagtatttttctctctgagtacatctatttatgatgatctttaggtctttgtttgtcagccagttggttgagaatagaatacagaggattctttgaggactggtctttaagcactgttcctgcatatagacctgacgacctgcactttatgataatggaagtgaaacattacatgcatcgaatcttctcatgcatataacctcgttttctactccatttatttgataattgtttcatcatttgagattcaatttgtaatagcaatgaacactctttaatatttttctaataaggattagttggagaggttaatatggtcagaaatttaaagaagcccagagtcatcttaatgagtgtcaggtaattaacctacatgaatagattaaagaaatcgagcgggtacgctgatgggttttcctttcaagttcaaatttagaacaccatctttgcagtggttaggtcttgcacagtagatggtgattgctatattgtttcttaatatataaaaggcttaattgtggaaccttattagaattcctcatcaaatttgattaatggaagaaggattatgatgtgtgatatgaattatgaattcttagttacaaattatacttttaagataaacagactcgctcaaattaatttatttgtgaattaatcattagtgattaaatatataggtctcttgttactagaagaaatcataatgtcaggtttcagtgttcatgaactacttaagtaggcctaagaaaaaagagagtagatggcagtgaggatcccagcctcagggactgctgccgttcacactggatgcaagcccgtcagtgtcagaggccgctgcaagtcagaagggcatggtctataaatcccgagtggtttggaggcaaggcttcatgaaattattcaaacatgagtgtatcttttccttgaagaattctagaaacttggagaagtttctccttatttaactattgcagtggagccagcgtgactgttggttctgctctcctgtgaggttagttggtaatattatccttaacagtattagcagttttagatcagaaacagctcacaccagagttcttctttgatcacttcactgaagagcaggtggcaccattttggagaattagaccaaatctggatttgtatcagagctctgccatttggcattgagtctttgacactagtacttgttttgtgcaatgatgtcaccaactacctctttcacctgtgcacactaaataaggtgtttatgaagacacatcatcctgctactcgatacaaatacccgattctttctgtatattttacatgtaatttttattactcctagataactctcatccaagctgaatgaaataattttgactgtgactttcagtattaaaacatttcctcttatttgaagtctgtcttagttactattccattgttatgaaaagacaccaatgccaaggcaacttataaataaaatcatttaattggggcttgattgcagtttctgagggtaagtccatgatcatcatggcagggaacatggcagcagacaggcaggcatgctgctgaagcagtagctcagagctggcattatgagctgcaaggtagaagcagagagagagagagagagagagagagagagagagagagagagagagagagagagacagagagagagagagacagagacagagagacagacactgggcctagaatgggcttttgaaacatcgaagctcatacctagtgacacattgtttccaaaaggactccacctcttaatccttcctaagcagcctaccagatgggaaataaacattgaagtctatgagcctatgagggccattctcactcaaaccaccccagtactcaaggaccttattaaataacagcctagagaagcatgatgaaaatctgactggtactgagtttgaaggaaggcaaagtgttattgttagacctccatgtacccttcttaatctgtggttaatcaaaatgccaagttaggtcagaatgtagattatgatgggcattatagcttgtgtcctcattctgttgccacagaagacagcatgacctctaatcaatgaaagtatccaagagactaagtagtataaaagaggctaagtgagtatattatggagtcttccagtatgacaaattctatgctgattgttggtagggggaagcaaagtatataacattccacagcctttatctatctctcttgctatctatctcagaagataacacattacacaggatggttgacattacaagttatttttttgtcatttagatttaaaaaaatagattccaaaaagaattatctcaatttgtcatattgttggacattgttctttctttctttctttctttctttctttctttctttctttctaacattttgttgttgttttttgtattgtttgtattgtttgttttttgagacagggtttctctgtgtatctctggctgtccagtgtgtgtagaccaggttggcctcgaactcagaaatccacctgcttctgcctcccaagtgctgggattaaaggcatgcaccaccactgcctggtttacactgttatttctttagcaggcagtcaataatattttcaaagctctagaagcaggataattgatctaaagccctaccacatttagaatacattagatgctaggtaatattatcgcctaaagaaaatgcgtttgcttcctgaattccagagctgtatgttcccttattttaggttctcttattctttgaagtagtctatgaaagttcctgtttagtataggaacaagaaagtacagatggaatagtctctaaatcagaaaagttaaaaatactgtatccttatcacatatcctgaggcaactaatttaattttcttttatgcctttctgacttcagttttattaaattttcagtctgtcaacatcatggagaattttcttaattttctggattgactttctgatagcatgcttcatattaaagacaatattttagctgtggttgaaataatttataggttgttattaattcatcagtagtatttcagaaaccttcttaaaactttgctcactgccccttgtttgtttgtttcttggttgggacaaggtaagtgctgggcaggaagctgaagtgtcacggggagcctttctcctccctgaggactatgtaggaaccagagtgaaagcgttgcaagcttaatctaccaatttgatagaattttccttaaatcaggacataggacaatttttagtatcttcataatcatgttaggaaaaagggagaatcttctcgcctgtcagctacatactcacggaaactgtacttgcaagctgcatttggtttactctgttcgtgaaatgcatttggcagagaggatgagaagaccaggaaaagcatgtgcaccatcatgcaaacctgatgggactgtgaggagaaagaagtcttccaactaggcggatgcttcaggttttcagagttttctatctttgaagggcattctccctggatacatgcttacacgagactagttgatttagtatgttctctgttgaaaccttttgggaaagcctccttattaatcttctactgactgacacatactaggtaggtcctcttctctctggaatggagtaatttgatcagttctatgtaggcttgagtagcagctgatgctgaggcagagggggcaaccattgagatgatgtttatcattaatgacttcatcgtctaatctttgaatgttagcagtgttaggaaagcttgcttgtagagagtatgatgaccagtgctctggtgtctttgatagcctgagtgtttgtcctctccacatagaactgaagagtgggcctgagattattaacatgctttagattctttactataatgttgttttattttttttcctagaataaagttttagagggtagctcagtaacagaatacagtatcagaactgacaaatgtcctgtcatgcaaattaaaaatttaaataatttcccttatgtatgttgaaggaagaaatatgcatctgaatatatattcagcagttttcctaaaacactctgagattaaaaaaaaacagtatgtatttaaaataattggggccaaaatgatttatatatgcaagtcatttccaatgtcttttaaaaaagaagttctatttcaggcctgtctttcttatgcagtgacaagattatctctgttttggagactcaagccaaaacattttcttttctcttctgagtgcctcttttcaaagtctgtcggtatacttttttgtataaaacagtaaaaattcatgtatctgtaggccaatggcttccaagactggttgcccattaaaatcacccaactgctatttccaatgactagtttggaactactggagccccactactttagtggggctcagaaccttggtgactttaaaacactcctcaggctgtttgattgaaaccagaatacagagcaaaggggccgtaggaaacaaatgtcagtgtaagtctgctgcatgctacttattttgtggtgaattatcctctttggttggatttttgctgctggggtatgagtaggagtcataaagattgactacaaagtagagtttggtcatttgtattcagacctgaatagtgcttgatgctagcggaggctgatgagacggctgtcgagcgagtaagtcccattattttaaaaacatgatttcacagttctgacttctcagatgactcagtgcctctcaaccttttttgtaagaagcaaatgggagaaaggacatgctaaacatggtggtgttagtaccctatacacagacagattctcactcacttagggggaagtggagagctcaatacacaagtgattttgacagttaggtgatcttcagagttcttttaataaacatggaagtccacttgcctgttccagcacagtaacttgaaaattatcggtttaagagatctatttcactatatatcttcatattgtggacaaggaactttttagagtttgaatgtgacattcttctaaccatgaagtgtcaactaggatcatttggtagcttttctgtagcatccacaatcagttaattcaaatgcttggcactttggtagtgatagctggaaggtgggcccagttagggacctaggttgggatatatttgacagagcttcttcccaagacattcattttgtcatttacatggtaactcgtggttcctagagactccaggggaattaggcatcagctactgaaaagctttttatgacctggagttggaagccttgaactttgcttctacaatgattgctggtacaggagatctgaaagatagcattgatgccagcagagggggagttatttgtgagagatatagaaaagaacttgcagctgattttaaactcccattcactgaaggcgaaatgtatgctgctaaaaccacatcacaaatttctaaacaattgactcatggattaagcgtcttagtatagaagctcattgtcttttacttgattacgttcagaactccctaaattcgtgtctgtgtatgtaccaagcttcttttctttgacctatatttttgaagtacaatgatattatggaattcttccttaaaactacagatgggactgaactcgcccattttacagaagaccgttagtgtcaaaaagttttgtgtgtgacgatatggtccagtgatgattatctgtggtggtttgaatgagaatggccccttaggctcatataattggatttttgtttcccagttgatgaactacttaggaaggattaggaagtgtggctttgttggtggaggcgtgttaataaggatagactttgagttttcatgtcagatctattcttactttcctgctttttctatcatgtggatcagaatgtaagctctcagctactgctccaatatcatttctgcctgcctgctaggtgtcttctcacagaaatagaagaataactaagatactcccagaggctccagagagacacagtttggattcaagctttggtgctgctaccttctcatgtggcagctgtgggcagtgcattctctccatatattttgccatatgtaaatgagaactacctacttcagtgggtggttctgagaagtaaatgtataatatagagaatagaatatgctgcaacactggtcgtagttattgttcttgttaaagctttgtgggatggtgtagcattcacatcctgtcatgcctgctgtagctcagaattgcagcctcatttcccatgactgccctgtactcatgctgctgcctcagtctactgtcttccactgtcttccacgttctctgaacatttgttgtcatttcctttgtttacactggttcctatctgctaggaagtagactcctctctctgctctctaggaagtgctattatctcaaagtatttctaaggagtctgaatatggggaaattggaatgtctacaaggtcaaattttgtctcttaaaatccagtttatatattttgtcagttcaacactttgtgtctggatttaagttttccatacacagagcgcggggtggtgctcacatattgatgcttaatattagtcttagtacagggcagggaaggctaggctgtgccctatgtacatctgcaaaccttgatgcctcctgcagcagcaccttctcagttctgctttctcagccatgaattcacggtgagctagaagaagccgatcatgtgctcactgaggcctgtggctgggggacggctctgtctaaagccctgctttcatgtaacagctgcagaggaaagtatagggatgcatgcttggctcttaccatgcacacggacgcccatgttacttctgttcccctgtcattagccagatagataaatggtcatacttgatgtctgtatgggtgaaaaaatacgatcctctcatgctatcagcctcacagaatcaactatttatgaacaacttctagtggctactgcagatgactcctggtctcattaactattcccagaagatgcattttggttaataggtccacactgctataaagtttgcacctgtgggcacctcgttaagttgtaacattcaattcagctgagactatagatcctcttttatggcccatttggaggcatgactgttcaactagaggagagcaagtcataatcatgcaacgagcagtcacatctgtgtgactgtgtggttttgttctcagagacagtaatgctctcaaatttctcatcttttcatgtttgtaataatgcaaaaaatacatggctgttgtgtcagtaacatcccatttgtgtaatgtaataaagtaaatgctgagaaggaagagatacactatgatactacaccagagctatcactgactgagtgaaaaatagaggcctgggtgaggagggcactaggattatgacttgagcaaactgagcatgttgaataatttaaagtaatagtgatcatagtcaaattgaaagctatccaatatgcatgtgataatcttcagtgtttcaaagtttaagacagtaaacagaaggaaacgataaaatacacttcctatatatgaacaattcagctaactcagcttaagaattggggagatctttgtcttatggaataatctgtatctagggtcatgacagaaccataacatttcgagttctaagagctaaagtatagacatctgtgatggtttgaatgaaaatggcccccaaaggttcatagggagtggcactatcaggaggtatagccttgttggagtaggtgtggtcttgttagaggaagtgtctttggaagtggagtttgaggtttcaaatgctcaaaccagacccagttgtcactctctcttcctgatgcctgccaagccagatgtagaattctgaggccctgtccagcatcatgtctactcacatgctgccatgcttcttaccatgatgataactgactgaacctctgaactgtaagcctgccatggtttcctttataagtgtttctgggtaatgaagtctcttcaaagcaatacaatcctaagatgacatctatgggtgtacaggagatatgggcttagtgtgggagtgaatgacttgccatcaatatatagctaatagaagattcaaggtgactgaatgtgctagcaaattgaggcttctgctaatttccttatgttggcaacatgatatccatatacatatttacacacacacacactatatatatacattttatacatatatacatatatatatataaattgttttatgtgcattatgtgggaggggaacaagtgtgccatggtacagtgtggaggtcagaggacaacactataaactctgttttctcctgctttctcatggtttctgagcatctagctttttagcaagtcttttacccatagagccatctgccaggccaacataatatatttaactggatcttgcatagggtgtaaagcagtgcttattctgtctccttgtcacctttctatagtgtgaaggtaagattcagaggctaagaaaggtcagcaagttgtaaataaaagcacccataggatgggaacaaagattagggagtcaatgaaggagactggatggttctaactctccagcctgcattcctaacagaaacttccttgaaaggatttcagatgggttctttcttaaacgtgcataatggctccattctgtggacagtttaggggagtgggcagggatggctgcaagagtcaaccagtgaatgtgaacaataatcatgtgtcagctgtgatgattttcgaaggatttgaactcttttagcaaggttgacatttttcaaaccgtctgtctcgaactgtgcacatgtgtaccctgcaatgtgtttaatttgtttatggaactgttgcttcagaatcgtagtagaaaaaacaagtaaatacatacaacagggctgacttataccttcaacagctccctcataagtgactatggtgataaggggagatgtgtcagtggctgagcaataaatggtttttagtcctaggcagcagcatgtgcttgtggattctaacagtgtttgcgctaattcaacattaaatattgtaagggccaaaggaagttcacagcagaacatatttgcttgggaaaaggtttcatggctctccactgtctgttgtatgttttgctcttcagaactttcacactgacttttttcccccaggaaagagatatctgctccttcccacacgtctggacctgttgtgtgtgggtggctgtgtatctccactggaaggggacagagtctgaagccaagtggagtgattctaaattggctgagtcttaactctctgagggctatggcttgtaaggagacgggccttggtaatacataccaagaacatgaactggttggttggtaacacaaatcaattcattggcccattccttttgggaatgttggtcacatttgttggtaagaatctgagttacccatgaaatagtgctttccctttgtgcctggagaatttattctagaactccccagggacactcaattctgtggatattcaaatttttcataaacagtggggtagtatgtgcaccgaatctatatcctgtggtatgctgaaaatcatcttgattccttactttcccgaataccgtggaagcatttgccgattgttatgtcacttaggaaataatcatagggaaaaaggtccatctgtattgagtaaaacacatatttatacttctttgagtgttttgatctgtttttggctgaatccatggatgctaaactcatagattcacaagacacctctgctcacatgagtactgggtttcctaactttggtggggtcaaggtcattgcttctctctgatgtttccatcctacatatacacaaaaagcacctgcatctttgtgtggtagtagacattttgggaagagtgaaaggttctcaagacattttatgacaacttcatatacatgtgtgtgtatgtgtgtgtgaattaaggaaattatatagatgttcagtatagggctaagcactcaacagtgctttgaccagctatgaagctcagtgctgttggtaaggagcatgtttgaaaacctgattcaaaaatgaatgtgtgggactgtttaagccttctgttatccaatgtttgtcgtttcaaatcgttaatgattgcaattttattactatgggctgccctaggattctattgtgataaaccaccatgattaaaagcaacttagtgaatgaagggtgtatttcaccttagcagtccatcactgagggaagccagtgcaggaacttagggcaggaactggggccaggaactgaaatggaagccatggaggagagctgcttactgtctgctactcatggcttgctcagcctgctttcttatacaacttaggaccaccagcccagaggtggtactatctaccatggtctgggccttcccttataaatcactaagaaaaaaatggtctgcaggcttggccacagatcaatcttatagaggaattttctcaattatggttccctcttctcaaatgactttagcttgagatttgagaaaaacaaacagaaagcccaaaacagcagcagcagcagcagcagcagcagcagcagcagcagcagcagcaacaacagcaaaaacaacagaatcacccaggacatggatcttccgttaatatgcttattattttacagttatagtacttttagggtatgctagtcaaaagttgtaaattcactcagactttttacttaaattaaatttgaagacattttgttctctattatgcttttggatctttacagtcacatacaatttctatgcacacacatgtatatttatatacttacatacctatatctgtattctgaattgttttgcatgggtgcatggtatcttggcaggattaaatagctgcatattgaaggattttccaaatgggcctgtttgtttgacaaaacagttctcaagagtgattggtcaagtagtttgctggcagggtttcacttcttgtccttgcagagacttctgatatctcagtctgcttcactataaacttctctccaggcagtaggggaagcagcacctctctatctctgaggagtcttggaataaagtgacctgctggtcacacccattgttgctgacaccaactgtcattttggtagcagcatttctgtcttgtacaattcagttcataaatgcttgaaaaaatataagcatttaaagacctcaaaatattttttataagttatactttacatgatttttaaaaaacacattttctgctccttcacactgcctcctcaacgccatctctccagtggcagtcagcagataggtggaatgacaccttgttggcagaataattctgtcacaggacagggaggtctgcagcacaagctctctttactgtaccttcatgttttgtaaaaacagaataaaattatcatcccgctaaggcaatggttagctcagcaggaacccaaatatgaggacttaaaaggagggtatgggattttacccctgggtcaggtgaccaattcctgtcattcccatgcttgtagctcttccatgtaaccaatttctaaacatgtcatacagatttgatacatggttcaagctaacattttcaaccccatctgagaaagtggggacccttgttatgaataatgctgtatagggcggcagcctggaacagtcaccgttcatgttgccttcagttctaaagcagtgttcaattctctgtcactttagctaaaatgttactttggaaggccaaggtctttgggaaactgtcttatgatgtaaatgaaaacagagaagggttttaaagttgtgctgctctctttcatttcacttgtaatgtttctaccctctagatatccagcttgaccagaattctgtctgtctgtctatctataaaacaacaaaatgaagaaatattggatctatcccacatttctgtgtaaatatataacaatatctgtaactatttaaaatatcctgaaagcgtatctagtacgaatttcctttatttgtgcagttatctgtgacaattgtgatttttcttaaaatatgaggtcttctatcttctctttactttcaagagtgtgcagaaaaacagctcctattagatgcaggagtgagatgctgtgttgctcatttgtaggggaatacaaactatgcatggcaggtgtttactttcatgaaggaacatgctgatctgagttctgcagtcagctccagtgacaggctgtatggtccagcagcatggtctgtacactgtagatataggaccctgctgagccactataagagggcttgcttttgactcactttaggatgaatttaaaacaaagtggacataaaatttatttacagaaaaacatatatatacatacatacacacacacacacacgcacacacacacacacacacatatatatatatacatatatatgtatatattcatatattggttccttagccaataaatgtgaatggtctctgaacttccttgagaatgtatagttttttttaataaatgcattgcctttatgaagttgtatatgcattcctgtgcttattcattttgtgatttgtcattattttgatctttcttactttgagacaattgaacataatacatatgtattattctcttaaaccaatgtcagcaactccattctgctttcttcctcctcagagacaacctcctccaacttctttaagtttttgttatcatgtataagcaaccttcttgattgcatcctatattgcttaatataaaattcaggcattttaacttgttcaattatagttaagaatttagttccttttaattccttcctcccatgtcagactttcaatccctctctccatttctctgcttattattgtttgagaagtcaacatttggcctttatgctagtttgatggtaaacactgtttaaagctgatcacaaaattataaacttctttgtttcttgattgtaataactttgttgtgtcaatcccataatgtatttctataatattcctatacatgcatttaaaacatatctggttgttttctgggaaaggaaaggtcctttgaatataggcttttggcatttatgtcctaaaatgtcagtttttatttttttactaagacttgagtcacagcatctgaaagttaggtggcagccttttagcatgttggaagcaatgtgtaactgggttaattttctgtgttgttgagcaggcctttttattgctatagcctcaaccctctccatttttctctagttacctgaacttttatgtgtattattaagacattttataatgctctgcagcttggatatttattagaactttgactgtgtagacctatcttgtagtttatagagacatcctttctctcttttctttgctcaatacatatgattttcaagctggccttttgttgattattccaaattgtattttagacctggagttctcttctatttgtcacttcattttttcccttttccctctttttttttgttactttattttaatattctgtgaggtatttttcatgtttagcttaactgtttattggtctgtatttcttcctccgcctttaagtttctaagttccccattacccctcagcttgtttacttgtattgagtagttctttcgcttgcagaatgggatgctgtctgatctcagaatatatttgttaaagttcttgtgacactttcctgttcttggcactctttctccataggctgtttagtttcagtttgtgtcggtctctgacttccttgctacatacagaattactaagactgtgtggtgacttcagtggattgttgtctggtctgactggctgcccatgattctcccttagggtacatctacctttcactcattcctttacagtgtatattctcctttaaatttagaaagaaaatcttgctcacatagatgtctagtagtcattaaaaatgaccatacttttaaaatatattttaaaagaaaattatgacattttttggtactatgcccatacctaacaagtggtccttaaaggttggttgaagactagagcacacagtccaacctcatgacttttcatattcaatgacatcataaagcacagatctttcatccttttgaagttgaattttttacttgtatatggtctgaaacacttcagaacacattggtcattttgcagatactggttgactgaatctgaaagtgttagggaattttgaaagatcatatttacttatgtcataatcaatctcattaggaaaacccttgaagactgagaaggtgtcactctcatgacaggttatatggtgtcaccacatcctaactttttcatgaaagtgaaaattttatcattaacaataagcattcagttgtcattctttttttctttgtttgtttttatttttatttattttattttagattttggtttttcgagacagggtttctctgtgtagccctaactgtcctggaactcactctgtagaccaggctggcctcaaactcagaaatccgcctgcctctgcctcccgagtgctgggattaaaggcgtgtgtggctgcataaataaatggcagtattgttagaaaatgagatgccacaacatgctagaagacatacccatctgggcagggactatgacttactatgtaagtatgaggaccttaattcagatccacagcactcatgtaaaagataggtgtgctgttgctcatctataacctgagtatcggcaggtagatacgggaggatccctggagcccatctgccagtgatccgagaaaaaaaccagtgaatgccaatagaaaagagatactttctcaaaaaagaagttggagggtgattgaggaggatagtagatgaaaacctttagcctgtatacacattcacacacatgaacacatgcatacatgcacatacatggacaacatacacagagcaaatcagaacatgagctctcaaaagagcaagagacacaggtcctccatggccagagagattgtggaagaaacctgaatacatatcacaaagtacaagcagatgatcttgaaggacagcacgttgtgcttagtctactctcggctgttctggaaaggaaaaggcaggggagagtgaaagaaccatgttgcccgaatcagcagagctgggcaagaacagagctccagatctttgggtcattgaaaatgttccacctaacactatgacagtagatgcatgccatcatatatttgtttagactcattggatgtacatcaaaagtgaatgcatgagttttgaaggatgatgaggtagccatgaaggttgatcatttgtaactaatgtgttagaaggaaacattgataaccagggcatgtgtgtgtgatgagaagtaagtggccaatcttagtactttgctcttaagctcaaaagagttattaaaaataaaaatgttttaaaaattgattaaaaagaaaacgcaaagcatttacaatgcaaagacttccagtttagtttcatgcctcttacagcctcccttctagtaacttccctgtttttaccttatatactattttttcccttaaggaaatcatgataactttttctaattgtagcctttcagaattctcaactgtgccatcatctgttaagtgctgcggcatccttctagacgactgtggtctctaatgctagagagaaatccattcgtgtatctactttgctagccttctgtagaaacaagctggtctcatactaactccttatattttgttccatcctaattctcccagacatccttcagctggtggctggatggacacatcctcaaattacagcagcaatgagggcatgtctttttcttcctggtgactcatctttgaaacactgttcaaatgctacctgttttctggtcaaaatgcaggcattccctcttggatagtgtagtctaggtcttagcggagagatgttcaggctagtatgagatcaatgtgagccaagcatcctaaatgagtgtgtactaagagtgctttccagtattaagctacatagccgtactttcttcaaacgtaccttacctactgtctagggacaaagaatagaatatcttactgcttactaaaatatttctcatcttcactctagtgcttatctttctggaccgtgtattttattcagtttacatctcaatcattgccctccttcctggtctcccccccctcccaagcccttctcccatcccccactccttctcctctgagagggtggaggcccccttcctctcccagtaccctcccagtgtacaacggataatcatagtggtttggtttgtacaccctcactatttgggtaactatggcaatttgtgtacatttcagtttctgtatttatagaagggtatgttattaagttgtagtaatgacttaaaccaatgaattaacatagttaaaatgtgtgcagagtgctggagacccccatagtggacacacctctagctggaatggtgaggataacatctgaaagtggagatcaggaatctatctcaaacagaagtgccttggatgaaaactcgtccttccttccttccttccttccttccttccttccttcnnnnnnnnnnnnnnnnnnnntccctccctccctccctccctctctttctctctgtgagtatgtgtgtctgtgcacgtctgtgtgtgtctttctatgtgttttgttcatgttgtacacatgtgtgtgggtgtacatgcatgtgtttggaaggtctactttagctgtttttctcaatcatgccctccattatttttgagactgcgtctctccgtgagtttggagctctttggtgctgctcagctgattggccactaagctgtggcaatgaacttgttctcatgtgggcatttcagatggacttgactggcctttacatagatgctgggaatctaaattcaggttccagacattttactaactgaactacctcaccagtcgtaaggagtcttttaataaatcaacttttttttttaaactaggttaagaataagacaaataggatcagtgccttgctcagacatgatcatagaagcttccctatgtggcaaatgagagaaaacacagagacccgcagcagacattaacgcaggcagtgagagaacttgtaatactcagccctaaatgggatgtctcaatcaaatccatcccgttagagctcacagacctctgcagaagaggaggcagaaagagcttaagaggtagaggagatggaggacaccaagaaagcaaggtcctctaaatcagcagagctaatgcacacacaagctcacacagactgaggggcaagcatagggcttgccccaaatggggtcctagctcaaaggagaagtggacacatgcccatatccttaactcacaagcagtctccaattgatagccgtgtgcaaataaaattttagttttctccaggggtgtttcactggggaaacaaactaatcttaagatggtaggcatgcccagtaatcaatggcctgtagtatatgaactcggtggcatctttagaggttccttgtctcacaatgtcatggcagggctctctctctctctctctctctctctctctctctcttttctctcttattatttattcatatttattccccccttatgtgctctttgtatatatattttggtttccagttttgtggttctatggaatcccagtgtgtataaatgaaagggtttctgtgtctgtgtctgtttcttattcctttgggggcctcatttccttctgtttgttttgttctatacaacatgcttgtttttgtttatctttttatattacattttattattattccttagaaacccgctttctaatgagagtgagaaaggaggtggtccagatgggatgaaattgggagaagtaaagggaagggaaaccatgatcagggtgtattaaatgaggaaaaagtactttcaacaaaagaaaaacatttaatgaggtaatgtcaagtttcagttcctttctgtaacatactggagtatttcctactttgaaggaggccagtgacactagactcttgacatgagaagtgtctcctggagtgaatgacaacacagaaagagagatggaacagcctttagttttatctccaagttcttgtgctgcatactgcagatttgtgtttaactcctatgcatatggctgagagcactttggggacctgattttctttgctgctttattacacttttgaaattattgtttcttattttgtgttctgaaatagttacactgtaaacacttttcttgaataaagaattcattttttttctccttctactccacatcagctccgttttctctcagaactcctataggcttgaccactgcctgtgcctcactttactttgcaataagcctttgcctctctctttgtctccctgttgggatgtggctcttcatcagagctacaaagctgagagtgaaggtcagcgtctgagcatccctttgcattccatgtgagtgctgtccgatggcctcactgcatgaccagggctgagctcatgtcttcgggtgcttaatgtacgctgagggatgctccacagagatttaattgtcatcagctcctgtggaagatacagacctgtcctcttcttttgaaaaagtacaaaaatgcctgagactatctcaaatatgtcactattatcaacagttgtatttatagtatccttcacagagtgagtggtatgacaagacacaagcaaggagcactttatgtcatgactcatcgctagagaggaatataccaaaattctcaaatgtgattgcattggtttattttcacgtgaaatacaaactaccaagtgtaacttctggccattcattgttaaggttgtttgaacaaaacttattgccacatcagtcatgtcctacaaaagcaatatgcctttcccttaaaatttatctacctttaaagtccttaagttgatgataaaagaaataaaactcaatcacacttgatatacttactacctgatttttcttagtatcggaaactactgttggaatatgaactaaccagtacccccagagctcgtgtctctagctgcatatgtagcagaagatggccttgtcggccatcactgggaagagaggccccttgcaaactttatatgccccagtacaggggaacgccagggccaagaagtgggagtgggtgggtaggggagcagggcgggggtggggtggggtatagggaactttcgagatagcatttgaaatttgaaatgtatataaaggaaatatctaataaaaaacagaaattactgttgggttatttaatgagttaacaaagcatgagacttagtactttatattataagtagttttcttgctaagtaaaggttttaacataaagttcctttattctaatatgatttatgtcaaagaaaaataaatttttaatgtacatagtttgtgtttagagataagtgtgcactgaaatcagcacagcagtcaatggcataagtatattcaccacttctcttgccttttcttttgattttttaaaataagaatgcatactataagggcttcctttttaccaatgtaaaattgtttgctatgtagatatcaggctgtaaatcaatctcaaagacttattcatcttacaagactgaaactttgtacctgactatcacttcctaccttatccctggtaacagtcattctaatatctcttatagccatactaaaaataaccattcaatgcttgtagtcattgcaaagttcccaaggttgtgagcaatactgtttctgcagtcctgctctgtggcagtaatatacagattgattgcttgtgggcattcaattaagtgtgcctttaaaattagcatgcaaagataatgtgctttgattttccattagattaatttggtgcaggtttttatgtgataattaccttagtgtacaattatatttatcaattgttttccctgatattcatcaggactcttaaaggtgaattttattttggaccctaagggtttgtttgtttgttttgctttttgtttgtttttgtactagagtcatttttgactattcacagaaaaagaaaacttgactaaactccctcagagatgcttgcaacagaaagtcccatgacaacttcccaataatttctttacttgggtttttaatttgtctatgtttccatgtcctgaggacaaacctaacaccagggatcagtgagcagctatttgactacctgacaggctttctggacttctgtaaacgcttgcacttgttgtacacttcgtgttctatattttgggacactgggcagggcacatcatgtggtgactgccaggtaaatccaggatcaggcttctagggactgaactgcttctcatgttgaccattcatccacctactatgatgaacatttttgtccagtcatccccatgtaatttctcagggttgatgttcttactatatcccagacctcatttgacataaaggggattttacatttcccttggtcagtgcagttcaaaatgaccagttgttgatgtggatttgttcaactccacagtttttattacttaaatgaggaataagcatttcattaacttcactcttgtttgtcagtattagctctcttccattccatatcctccttgttagtaaaatatgatgaggatttctgaatgccagagaatttgataattctttatgaataaactatcacaactgaggaagggaagctggagggaagcagagagtttgtcttccatttgggcttaatgctagatttgctgtgaacttctgggcataccccaggcacctgtgtgcatggttggttgaactctattttctctttcctctactgtggaagatgcttactctcatgcagaaggcttgcagaatgttccttgaacttttaaataggttcataactctggagttacacacttcttgcttcatctccacctgttcacctctgttctgtttgcactcatttattctgcctctttgcccttctgttcagtctcttttaaaacagcagtagcagcaacaacaacataaaattggacatctgtagcactgcggtgtagagtaatgaaagtatacatgtgtatccatccattctgacaggtcaagtacttgcagcaagaaaaacagtcctttaccttgttagcagtcccgataaaggaatagcctctttctataaaaactgaggacacacaggcgtcctggataagaagacttagagcttccagaggcaataaaaactctaggcctatgagatagctttgcaggtaaaggcacctgctaccaagcctaatgacccatgttcaatccccaggacctacagaatggaaagagaaaaaccccagtgactataagttgtcctctgaccttcacatgcctttcctggtgtttatgccccacccagtcaaataaataaatgcatacaaaaaatcccagcagccagaaacaggcctcagataatacaagttatttttatatagttatccaatggcttaacaccatcaatgattctttcttacttatgcaaattgttctgtgtaagttggaaggtgctccttttgattgttgcctattatttattgtcaggctgaggtctcagactgatagagctccacattagcataacttttactaacaccaagcaaagaagagtgccctgtaaatgatttagcctctctgaaatggtgcagactagtagtcacatatattctctctattcaagattcattggcctgagtaagtcacagcactgtgtcataaattctgatgtcctgaaagtagctggactgtgtgcctggaaggagcagaccgtgaaccttaatgaacagtgctagctagcactggctgtagctgatgtgctgcaataactctgggttgtgtggaaggaacagtaggtgctccagacagctctgaactaagaggctattatatataaaagctcaaattatatactggatcctgcataactgacagtgacgcaggggcttcccagcctaggagggtcagtggaaaataagttcacctggcaatggagacttgctatacaagaatctgtgctttagtagtctgagattactaagtgaatggagaaaggagcatacggaatttgacgaagttctgtatgttcttatgtttaagatggttttatctgtatttaaaacaaattatacactaaggacatttttgatgatttagaaatgtgagtacttggctttacaaatgctcctgtgttctgtatatttaaaaggaatagcaaacttatatcaccctgtgtttgggttctgtttggaggtgggaggggtggtagtggcaaggtttgaaatgacttcaaaggttgctagcacaaacaaacattcagtaagtatttaaatgaatgagttgtaaaaggtaccagtactccagtgtgaagggtgtggtatcaaaagatcgctcaagaaatattgactcttctagggactattagtcgccaaagagctgagttaggataacagtgccttatccagtgaaggccatccagggaggagggctgcgactttgcctttgtgctgtcagctccacttaagtccttgcttgcagattctctcccaagccttgagacctggtgctttgtcgatgttaccgttttatcttggtcatgatgatgcttttaatgtttctagtctttgtaaccaactgatgctctccatctgtcttatacaaaaccttctgaaagaatattttcttcaatgtattaatctaatttttacctattttaatctgtaatattatctctctctacagtttataaacacagaagatatttcactttctagttatgttttgaactgtggtgaacatgtttagaagcatctgatctagtatttctgtgagtcttcattgtttcaggctggggctttggttgattttggggtgaacggggataactgttcagcctgcactgcagtcagcatggcagtgtatttacagtcttttcctgttttgatgatacactatgtaactggactttggctactttgtgagtccttctttattctactcttttcaccctttcaacccttaatactagataggagaggaaaaagaaagaatagaggggaaagaaggtgatgttattgttagactacttcctgctagttaagggcatcaagtttcttggggaagtttgatatttaattatttcttcttcttcttcttcctcttcctcctccttttgtgcatgactaattaacaaaccatgaccaatatcaacccacagcctctaaccaacaacttaccaacaactgcctctcagcggccctaacatttatatactctcagaatagtcctcagaattccaaacattacacaatcacagaaactatatgcagctggcaaaatcatgtccctgcataaggcaaatcataatcagctgtggtggacaatctgcagcagtcccatatcccacacctgggattaaatgaaaacacattcattcatatttcagagctttcaaaagaaactaaaattttctctacaatgatatacctcttttagctatttaggtgggccttctcaaagatggtaaattatagattggtgtccaacgaagatatacaggtggctaaaagtgtataagtggttctcatcaaaaccataaagagatattctcttacatctattaaaaggctattgtcaccaaaacaaaatagtcaaggtgacaaaaattcttaaatgttgttggtgagactgttggatagtatagccatcatggaaatattatagtagcaattattaaaaacatcagaagtattataaattgcacttctaagaatgtagcaaaaagaatttagatcaagatcttaaagaggcatttgcattcctatgctcattctagcagcatttggaaggaactgcttccgtaacagccagatgtgtctttttcttttctgggtaatgattatagactgtaattcttttaatcacttacctgttacaggatattttggttgtgcctagcttttgcttagcacaacacatggttatgaacaaccacagattaactctcaggcaaggagacgtggccactgctacagggaagaacattgcctgcaatgggtgggggcactttgtcttgcaaaataaccccatcagaatcagctggggacctcccacaaaccatatcccaagttacaggatcacatgcttttccaattactggcccactttaactgagaacagtaccagcagctgtgatttaaattcatgtctgaagtccatccattgcatgatgaagcttgtgtttggtttccatccacttaagaggtctttggacaataaagaaatgatcctctttcagggcacacatacagatgcttagattgcatgtgtttggagctgggaaatttcatctttccttgtgtttttttttttcatccagagatactagcaataaccaagcagtgtcattattgtactagctttcccaggactgttccaaagttttacaaagggttaattgggcataacaaatgctttctcttcacaaagggttaactgggtgtaacaaatgaacttatagagttcttatatagttgatgtgctcttcagtctatgttggaagaacaaagaagttgggttctctgtgaaaggttggcagtatcaagggttgctgcacttatcagcaaggagtcaaatcatttaggcaaggacctctgtaagtctgtgtgactttcagactgtgcttttccccctggtagaaggtctgcccctctcagtagtctcagtaactctctaatacagcctgtcagaggtgcgtctctgacaaccaagattgccatgatattttagtgatttattttaatattctagaatatgtgagtccttccttaggtaaaatgcctcctcttcttctacccctcatcctctcatcctttcttttgctaacaaataaaccttgccaggggaatagttatgagatttcaagaataaaaacagaacaaaacaaaacatggggtgcttctgtgtctgcctgccctctgcttcctgaaatccatgaacaactaggcagagtacagagtggactcctgaagccagggcatttgttcccagcaccgcagctccaggcagggagaacactcctcaagagctaaccagtactcccagagctcatgtctctagctgcatatgtagcagaagatggccgactgggggaactttatatgccccagtacaggggaatgccagggccaagaagtgggagtggttggataggggaaaagggcgagggtagggtatagggaactttcaggatagtatttgaaatgtaaataaagaaaatatctaattaaaacaaaaaagaggtggctgcagagtgccatttgccattctatagaggaaatgcctatacatataaatcacatatgctaagaagaacaactttacaagggctctcttccaggatggagtgaggtggtgttgtcttagttccaaaatccctggacaagccatcagcaaccagggtgataaatcccagacttgttataaataccagctgatttcagacattttcccgattcagctttgttctttccaggtaattgagtccctttaactaaagcaaagcattgctgttagctttaggtatgtttaggtataacaaatgccttaaaatgacattttaaatgaagactgacctaatctttgttttgagcaggttattatataggaatttttaaatgtgtaaaacacattttatagagttatttccctgtataatataaggaaatttgtttatgacataaagaacatctattctcatggaaggatgtaggtttcctaagaggttacttacatcagttttcatcttattatgttttttttttcatgtctttgtattgtattgtatatatgtttaaaattataaaagataatttgagattggtttggatagatatttagaattttttattttagttatcacacagtagaaaagccttagctttgtgtttatgaggtaaatgacaactttaatatctctgtcacaaataaatgataactattttctggaaaataattatttttacttttgctttataaaatcattaatattttggtaactgagccatcagaagtagtaatcatctagatggacaatttgggagagtttgattaaatatctatttttgtttgagacattctcatggaactggagatgaacctgccaccatattatgtttgtcagatgagtcatttgatgagtatccccatcaaattaaaagtaagtataattgtctctgctttttcacggggcttggttctaagacctccttaaggatgctgaaggccgtcattatacaatgatataacatttgcatattatctatatactccctcctgtttaccttgagtcatccgcagatcccatgtggcacaacaatacacgcagcacattgctcagtgcacagttgtattatgctgttggaaatcaatgacaagtaaaagacctgtgctttttcaacacagaagctccgtttctcttttcagaatatctgtctctgggccacattcagtaggacttttagggttgtagaattcatggttttagaaaactgaatgtatatttcttaatcaagtcattgccttcttttcttttcatgatccagttagctgagatatgtgtaactttgtttctcatttagctggtacaggaaggaggaaagcttaccgtaataacactttctattgacgtgatgcaatttttaagtacttgaagccaagggatgtggatggccacatactatctttagtgataagtagaaggtaaatatatactttttttttctttttccttattatagaaataggtctgggtgaaaaacaagactgtgagaaataagaaaccctggaagacaacttagcaattgtggaataaatggaattgtttccttctgtgtattttcgaattattacattctagtcttccaaagttttaataagtctgacctctttttactgaagtgcaatgtgtctgagttttattgcctagcatccccaactttaaactttaggaagataagaatctgctctcctgcaacatttactgtgaaattttgcaaaagcggagtgaagttaaaatgttagagaaatagctttatgtccaatacctagtttccaccaatatatttgtattttgttatgttttacattattgccaaatgctttctattatgatcattaggtatacaccatcattttcacatttaattttattagcaatagaatgcacatttttttgttatctttgctcagatttgactaatctatacaccttcttacgcaacttctctcaagagaagagctttgttgttactccatagaccctacatctcccttcacacacaagtccccctattcctgatgctcacattaaaggcacactgttcaatgctttgcttctttcagtgagctaatgcctttgagattgttccttgccattatttgcattttattattccattctttattcacaggtagcattttctccatgactatgctatagttgatttcttcctgttggaaaggaccagtttccggaagacttttaaccctaggaggctaccttttatgatttaattatatagttaatacatgttaatagaaaattaaagatttcatttgtgattagaccatccactcatttttatgtagtctgggtagacccacggtcacaaacactccaacaaggcatatgtgtgtgtcctagtgccttaacttacttccaaaaagttatcatagaatggattcccttcaacacctttacagaggaaagaaatcaactccagctgcccaaagagaggagtaaatttgaaatcccattgaaaatgtctagtggaaagattatgtcacaaaaatttgactttctaagaattagaaatttgtgctgattcttacatgtttgggattcttgcatctcatacttgacatgggctttagtggtccctgtgtgaactgttggattctttctgtcccttgctgtgtgtttgcctatagctggaaacactctcatgtctccaaagatgtttcaaatcccacatatttgagtcactgccctagccaagagtcaatgctttttattttccaagtctcttccttcttcctgttatttctgcaccatctccgactttttatcctctttctgatgtcttcagaagccttgttgcagtgacagtaaccatggtcgaagggttagcagctgtgtgcccagcatcaacatccatctctagcacctgtgtgggaccaaaagggccagatatgaactctctcattaaatattacggtgtctctatcctctcaatattcttattatgtctaataatatgttacattacctgaactctattgaatttgaattataccccatttcaggtccacctaagtattttttgtttaaaaattttctctcgaaagaagataactaatttatctaatatttttatttttggttgtgagcctagcctttaatggctcagccatctctcctgtccttatctaatatttctaataaaattacatagtccttttcctgttcagaagtattttacaaaggccccaaactgtttctgatatgtatgtgtatgggggtgtcacagacagattccaggagctgggatggaggcctggctctgccaccgctcccgttgtttgataccttgtcatgtaaggtagaggtgagtaagaagctcaagctgcgtatggaagataatatattgtaaattctgaatgtatcataatagacatcatttcccggcttattaaaagataatgagatcatctgtgagccactgaacttgggttagcttctttcctcaagatttgtttacccttgttaggcacatttttccttttctgttaagccacgaagatggccttcctaattatctttagttgatctcctctgtagttcaatgtatatgtttaaaagtgtcttgacgtagacactctgtagattaaatatttgtttggcttaacgcttaattaactgtgcttatattaatttgatcactaaaaagcataagacagatcaaagtatgggggacatttgaacattttatttctctcattcagtgtcatagagtactggtgcctctagactttcttttctaaggatgtggatgttgcatccatattatatatgaaaactaatatttccctttgtagaacctaatttcatagtgttgactttataacatggagacatatggcaagtgtttgtcaagttaggtggaggatgccatgttggctattggaatttctgtgtttgttatcatccctccttggcgtgtaggcctttcttagcattggctctgaaagcctgggctactttggtgtgaatgttaatctatttgagctctaattataaaaactagcctgttttttctacctgtctctctttacatgttctgacctccaccttcagccatcccatttctatttccttcctacaaccccgtgcacttgacagtctgaacttagccttctctctgttctcatagccttacattaacctggcttaggcctctagaccctccctcctgtgtcaaagataatatggtaaaatcctactttagagtgttaccattgcattctgtcctcagcaagttttaggcaacttttatagttggcagtggtcttttctatatagccttcaaaccaacttcacaatatccatctattcatcatagtgttcatctgtgtcctatggcaggtggtgtccttacaaggagttgagattgtttctcttcactgggtatttttcgtatgaagggaaaggggtgtaaattctactattctttcaaaccacaattactcttcttcctattgcttcagccttgccacttctctgtgggttttctagagtgcatttgctttgatttattttaacttttatccctctgtataatcaagatgttatcagaagaattatatatgtttggtcattggattcaattaacactgaaagattttaataatgttgtctgttgtcacattaaaatgtactaatagtttttaaagatatatatgaaacccctagttactgcactcttgtcctaattacatgcctttaagatttaatacaaccccaaatttaatataactcttgatttaatgtatgcatcagcttgaagaacgtataatacatggagaacatgctttattattccctgttatttgatatatactgaattctaataggtacacgatcataaatatggagaatgcctttttggacatagactttaagatttaaagttagaagagaatcctagaagttagataaccaggctaaagtaatacttttaatacttctatataatttttttattcctgatttctatatttggacactaacagctcatgcagtgaataagatagtcactgattcctgttttggacagtcttcccatacttctctacacaggtcagggcagttttgttgttgttgtagctttaatttaataggcccctaagagttggagcagttaacggctttccctttggaaactttcttgttctgtgaaagcagagacccattttactgctgtgaggcacaggaggtttcagagatggggctgtaagcagccttgagaggaagggtggtgatcaggatggaagggtgcaagatgaaaattaattttctgttttgttgatatcatcctgagtaccaatgttctatgctaaagagtagtaagcctgtgacgtaatgttaaaaaaaaaagatagctagattcttggtaaccaagaaaaacgcatgtaaacaatgaagtgcacccgaaggcttataggaagggtgtcagttttgagctttgctgtgggtactgtaactgggttggctagttcagaacctaaggcaaatctggcaggtgtgaaaagagatgtttacacttatatagaaaatcagtgaagagcctacattgcttagcaactccacaggtttactgaagtgatttagagacatcgtctaccaccctgtgtaattgtcgttggtgctgcagttggctaaatgaatgtggtcctttctgttcaaaaagagaaccaaagagctgtgatccagcactatgtcatgatgaggtgattttcttgtaccaagggtacatcacagtgtgtatttaagctggttttagcaagatgtgattttgttatctggagtgatctttgtgatggtattgcatttagctacccatgaccacaaaaagcacatttatagagtctaaataaagcagacatcatgaacattacaataagccattttatgattatccattggttatgccattggcaaatgtgttgaggtatttttttttcttcaaatatagtaattgtacatcatggttagcacttttcatattctcatatagcgctcaccctataagcagatggaaatgataacattttgtttttacagaaatttagactcttctgacaacccccacattatcctttaattctccactgcactctccccttctttacgtttgcacagttagcctccatggccaggcattcagccctaccatgcatggcctttaccatatatccttgaccagtgtctcttcatttttctggaactttatgaaaagggaattataaatgtccataaatcacagcaaatggaagcctattttccctggcagataggtgccagtaccactgacctgcactcaagagtgggcagataccctaaaaaaacattataggccctagaggttttggtagaaatcagaagacatctcaaatgtagacttgtaattcaagcctgattcaggtttatgaagggaactggcacagaaaataaaattcagatagtccatgtgcccttgaatacagtttttatgaatggaacttctagaaaagtatgttttttgtttttttttaatgcttcccacaaggctttattcagttgagccaccgaagtacaatgaggaccaggcagtctgtgcagaggacagccgtgctgcccagctgtcggggcaagtgcatcttccaggagtcaggaatggggtgctagaacgtgccccaaggtagagggtgcccacgggcagggtggcccaggaacagaggtccccaaagcctctggacctttcaccaaagctcagtgggcagatgtgcagcttccagtcaggcaggaggggtatccctggccaagactggggcagtggcagttggaacccatggatgcccgggatacacagcaacatgtctccagtcagtcacaggtgcatctgcttatcctgtccacgggccacatcattgggctagctaccctctctgagcagctcagagggaagggctgagagcctgctgcaaggcagtgcctcgcaggcaggcagcaccctcagcaaggaaaagtatgtttaaaaaattatttatttaagatttattttatttattatgtgtctatctgttttggtgtgttatataatttatgtgcttattcctagttgtgcgtacctgtgtgtatatgaaggccatatgagggtgttagatatttgatctgggattataggcatttctatgggtctaagtctgggctcccaccctcatgatgtttcagtaagagtacttacctgcacatcagtctcacttgccccattgcactttcccttcaccacatgttctatcatcagacacctgctgaaggatcagcagcacagggacagaacctgtttatgtcacctgattgcccccatcaggtacaaacacccatgcatacacacatacatgtatgtaatacacacacacacacacacacacacacacactaaatcaaataaatcttaaacaaatgatttttaaaacacactttcctagaggtagtctggctggcttggctttgctctatgggggttgcatctttgaggtgaatccccatccctatgtccctttaggccgtgggaagaatcactgatgagttcatgtgtaaccagacttggcatattaccctctgttggttttcataaactcaaagattttacaaacaggtcttttaaatgagtgggaatgtgccatttcttcatactagagttctatcatctactttgagaaggtaagtcacactaaggggaatgcttgagttgttggcagtttgcaaacatcaagaatctgcaatggattagaggctgtgctgggtttgagagtaaatcaagagccagggatcctacactaaacaaaaatgataactattgctatataataaggcagtgtaattcaaatgatagagttggaattgattagtgaacttttgtggcctgtaatcaaatggataagtatgccatcagaacgtttaaggaatggtaaacatagaaggaagagttgcaaaatgtattttgagtgaactgagtacaagattttaaatgaggctatatgagcctcaagtgaacagtagaactgggtgaaatatatacttatattgaaaaacattttgtattttttatattgctttttgaaaatttattttatcccctaattagtgctatgctgctagttgtcccctgtttattatagatgaaaactgaatcaatgtagttacagtgcctatgtgagtccttttttacatgaatggtgagctctcctgagttccaactacttgtgtcaggcatatatttgtctttggacacaccagagttgtaattcatactcttggttctaataacactttcaaatataattatcattactttgtaattatgacaacaaaatgtattcttttggaactattctgttatttagaatactggaagtaagtgtgcttagtaccagttgtcacagagataatcttctagtgcttgaatttctaagaaatcagcctctattgtacctcaaaacaattctgatgtctaataaaatcccctttgagatggtagctctttgtagaatctgtaaaaggaaaactttacatcaagaataataaaacattttatttagaaatattaagaaggggaaattctaaaactatctaaggttaaaaaaagtgttcaaattcataggaatatactttgccttgtgttttagtagttattgctagccaaggttggaattaagcttgtggacagaatgcatgtgtataggactaggctcagcctgtttgctcttcagaattctcctgtttcacatgagttcttagaaagctgagtggcttagtcagggtttcagggtttcggggtttctattcctgaacaaatatcatgaccaagaaacaagttggggaggaaagggtttattcagcttacacttccatactgctgttcatcactgaaagaagtcaggactggaactcaagcaggtcaggaagcaggagctgatgtagaggccatggagggatgttctttactggcttgcttcccctggctagctcagcctgctctcttatagaaccaagactatcagcccagagattgtcccacccacaaggggcctttcccccttgatcactaattgagaaaatgccttacagctggatctcatggaggcatttcctcaactgaagctcctttttctgtgataactccaactgtgtcaagttgacacacaaaaccatccagtacactgaggtagttctttctaagcttcctttactgagggttctgtgatgcactgatctctgccttagaatacttaggtcatgactatggacacaagagtagcatcaaaaggtcaatgacaccaggatgtcagcagtggtcaacatggtgcttggatgggattttgcaggtcattgcctcagatagaaactggccagaatattgtgtgaagtggacatttccggttgtgtcatttgatattttcatgaagcagactcatttaatgttttgctgaagctcacccatgagaggacatgtgatgtttggagagagtataagtaggacccaattgtcagtgacaaggtgcttgtatagctagctgtgcaatgcttccttggtctcatagtttcactgatcttcacttcattgagaaaactggctttctggctggttctggttgctcttgctctcaatgactcatgaccatttggtggaagcctggctgtttctgctggattgtaccactgctgttgattcatgtttggtgatattgtttgaactgaactactggtatcctgacactactgaactggactgctggcatcctggcactggagattggaattgctccaaagaactacttctaaacaggtccatattctcttgtccaatttaccatttttttttgttcccttacttttgaattgtaggctacaaaggtgggtttgaattgtttgagaatccttattaaagtagattttggaaaaatctaagcctacagttgtaaataggcatttaatgatgtatgcctttcacagtgatttaggtagacatctttatagggaaggttgccaattcagtatcaagaatatatagcagacatagttctgtgatgtgaaatgtgaatattgtttatgatttcctgattattacagtggtagcatggaagcaactgtaggaatttttttctcttgtcaactgatttccaggaggtccttctaaaggcttctgttgtcatgtcctagactctgtccctcaactccataaatttgtgctcagagctgcttaaatatctcatcaccttgctcactgcttgtatgaaatagggctgaggttcctgtgaatgtgagtccctttttgactagaaaagatacaaaggacacttgctggttgcccacttagatcagaaactgcaaactcttttggatatgcttcccagtgtaagttgaagttcaaaaaccttactataattcaagcttgttaatttgttcctcttggagctaatataaaacaaacaaaaaacaaatcgcagtcttgttgagatgggctctaaggccactgtgttggatttcctgtctgcaggtgagttgtcttcttgctaccctgaactctactgtgagaactctactgttgtaatcattgtttgtttttctggagaaaagctgttctgtgctctacaaatttggttaaacacctcttctccttatgccttggtagttctcagcctggtgacttttattcactttccaaaacaagcaacaccttttatggagctgaaattgtgttttcagaatgcttatttttcaaatgtttcttatgtgtatgcaaaaggccatttatctttttaaggattgaaaacttcttgacagggatgtgaagtagaaacttaaggattctttggaaaatcagttgtgttggatggtgtttttctgcggcaaacatgttaagaaacgtttcactgaagcagacacaggtgaaaggatattctgcttaaacactcgtgatgaaggattcttctctagtgacacgcatgtattggcctgccttacactgttgggactccacagagagaaatgcaccaacaacttatggaggtgtgctttggcttcttgttgcttccgtggacttgagccaattggcacagtgatagcagctgagatagatgcacatgatgaggcaaggcctgtggtgaggcaagatccatggaggacaggtgatatttggggggagcataactagtctcagggacagtgatatgagcgtggcttgcttgcatagttaaagacttgttggtcttgtgtctacaatgtagatgggattttctctaaagaaccatatctaaacaggtccacttcccctgaatcttttcttttccactacctctggtgggtggtgggctagaaaggaagttaaagtgtttacgagccatcattcaaaataagatttaaaaaagttaaaattaaaaaattaaaagttacagtgatgtttttattttactaatgagagcacatggcatgtgtgtgtgcttttaaaacaaaacctttgagtagtaatttttgtgtgtatttcaatcctgctggttaccttaatataatatataatcttaaaaatatattttatatgctgaaataaccattttattattatattagtgctatatcaattgtaagtgaaaaattaatccattattttaattttcaatttaaaacctattttaactggcccagtgagatgacccatttggtaagcagcttgccctggagcacgaggacctgaatcttctctcccacaatccccacagaagtctggcatggttgcgagcactcgcaatcctggctctggggcacagagagcgctggtgctttcaggatgcccgtgccactgaattggaaaacttcagcttcaatgagagatactctttcaaaatacacaactatatacactcacacacaaaaggtgaattgaatcttaatacgcactagtttgttaggaaaggaaatacatgtgtagaagattaaagttctttgaaggcactgactctcactgatgcttgacaagcagagctgagcctgcatgtctttgttgtatatcctggtgataccttttcactgtgcccactcaatggggtttgagcccagggctagcacagactagacaagtgctctaccgataagccacttatccagcccctcgtggtactttatgaaaaaaaaatttaaagaatagagaacaaatgaaattttggttgtgcctgttggtggggttttctttgggaacagctgctcaggcaaaattgtttaccaacctccatttcaagtcttgggtggccttgtcaagatttatacagatatgttgggcttgtgcttcttaagagggttctggagaagtcatatttcataataaagccctgataatccaaatggagaacagtcactctgggtcagtttgcaaatcacctgtactgtgtcagtcaggacgagagtaaagagacagagtgtctacatttgcatcacggtgttaaacaaacactgaggggtaactgcaggctctcagatacaaaatgtgtaatacctcaagcacaataagtttattataaaaacaatagtaaaatgtgttcaattaaagtgccacgcagagtttagttgacttgattatggctcctttggtaactacagttattccggaggggcattcacacccctctgttttcttcctcaagtggctcactaattatgtgaaggacaaaactgttttcagcctcctgagctccttgggcactagcctataatttacttgctggaaatgctaagtcatttttctgtacatgagaactctagacattttaaaaaatttatgttttgagatcataatatattctcgattttctccattctctttcctccccaaaatcctcctatatacccttcttagatctctttcaaattcatgacttttttcattagtttttgttacatatatgcaaatatatatgcctaaatatgacctgctcagtccttataatgctatttgtattatttatgttttcagagttgatcatttgatactggataatgaattggtgtaatcatacatatatgtatgcaaatatatatcatcaggattattcatttctcctacagaagtcttttcctttattctagatgaagagagagctttgaatttatgactgtttttccttgtttctcttcactatctgaagaatgtccaatcatttgttttagttttacatgttattttgggctgtacatgtacatgaatgcaaaattacgtttggagcttcattcgacaacatatttgaagctggacctggagatacagtgttacaggcctataatcatagttactctggaggctagcagatgggtagattgtagcatcagacttatttccaagcattatttctagatttttaaatctggggaaaaagatgataacagttgtactatctccagataaaagctcacttatgagcaaatctcaaaacccatttgctcaggttctcaggtgaaaacttgtgcaaaatagcttggtcttttaaggggtgtgtgtgtgtgtgtgtgtgtgtgtaggacactatggtgtctttctgttgttgaaagttcagcattgtataaataattgcatcctttttctacatttgacagcaacattttgatataaaaaagatcttataaaatattgttatgtaaggtgagcccatgctcagttcccttcttagctaatccgtgggtgtttattcctcctgtctttataggagacaaggtgattgaaagagtaatggcgcttgagtgaacaggattgctctctaacttggcagtggggtcataaagaagagtgagcacacagggagtgtgtgcttctgctgcatcagtgaggaagctcgagtgtgtgttgggtacctctggtcagcctctggctgaggagttgatgggaggaaagcaatgtggtgacattggctaattctgccacatcagctggctggaggagtggcctttctatagacaggaaacctttgtgccatggtggttaagatgttatggctatgtgctgtatgttgagttttattatttttttctgtaacattgagtaatggggcatctaaagctgagattttagaaggaatctcctgagggaagagtttatatatatatatatatatatatatatatatatatatatatatatatattttttttattattacgtattttcctcaattacatttccaatgttatcccaaaagtcccctacacccccccccactcccctacccacccattcccatttttttggccctggcgttcccctgtactggggtatataaagtttgcctgtccaatgggcctctctttccagtgatggccgactaggccatcttttgatacatatgcagctacagtcaagagctccggggtactggttagttcatgatgttgcacctacaggattccagatctctttagctccttggatactttctctagctcctccattgggggccctgtgatccaaccaatagttctgtgtttgctaggccccggcctagtctcacaagagacagctatatcacggtccttgcaacaaacgcttgctagtgtatgcaatggtgtcatcgtttggaggctaattatggaatagatccctggatatggcaatctctagatggtccatccttttgtctcagctccaaactttgtctctgtaactccttccatgggtgattgtttccaattctaagaaggggcaaagtgtctacactttggtcttcgttcttcttcagtttcatgtgttttgcaaattgtaccttatatctcgctatactaagtttctgggctaatatccacttatcagtgagtacatatcatttgagttcttttgtgattgtgttacctcactcaggatgatgccctccaggtccaaacaagagttttttgtttgtttgtttgtttatttttgtgagacatcagtatttttttcatatgtttttctctttggaatttttattttgaagggtaactaccatttgaataggaataaatctttaatttcatgtttatttctgggcacagtgccagtttattgatggacaggggtttgtcccctaaataatctaatttctgaaatggtatgtgtatctttagtgaactgaacagatctcttggaagcctgtgacataggaggatcttatacatcaaagtgcagcttcatgagactagcacccctctccctagaagccattatatgtagggttctattttgtcttatacacacaattgcacttgccagaaagtagaagtcatctgttgtgactttagagacttgtcatttggtttgctggaacaacacatatcctgtggtgaaccctcttttagatagtgtctgtagccacattcctggtccagttattgccatgtttctccctttgtagagctctgttttaagcaatgcctttgttgaggactatatatgactcagtgcttctgtcaatagttagtgctccctggagtcatgtaataactgcctggacttccacatagtagtggttgtcttttctgttcttcttcagactcctgctgctctgcccaactgtgcttgttcagagtaagataacatctatctaacctgcattcttcactatatttgtctcttactgtgaaacaagtacttaagcactttttctttatttatagttaaacattttctgtgtttatacttgcttttttcctttcaacatgtgctaatcatctcatgctatccctacattataatctacatatgaatctttggatgcaacggtgaatatgacaggatatttgaattgctcacactttaggtcatagtatactcaggtatagcatgacatggttagaattagctatgtgaatgtacccgatgggaatgctaaacactggcctgttacctgatacaaagactcaaatcattgcattcacctgcattgccttatagagtaccacagaatccagcatacagcatacatgggggtttactgttgtctatcagcctatagttagctgggggtattctgggtttgattgtatttgacatttttaaatttagtttgactctgcagtccttgtctgggttctttcattagcattggggaatatagcaagctgtaggatgctgtattggtcgaatttctgctgctgtgataaaatgtcataagcagggtaacatattgaagaaagggttggattgggtatttgatgtcagagggttagagctcctgatggtagaattagggcaaggaggttggaggcaggagcatcatcagctccataagcaggccaagagcaccctggggatggcacgagtcttttgaagccctcactgacacacgtcctacaacatagttacaccttccaatccttccccaactgttgtaccaactgggtactagggattcaaacataagagcctatggtggccattcccattcatacccccaggatttcttaaaaaggggagtcagaggaaagattttttttcctggtgatttcttctcctcttgcaggctgtcatggctttatcttatggtaaagcaaattagcaaggaacaattagaagtcaatgctatcactatctatcctcaaaaactgggcagagaagaggaaaatgcactgttacagtcaactatcagactagagaagaaattatatttgaattaggagtttgccatataagtcaccaaaccttgtgtcaaagcaaagtgggcagaagtaagtaataagggttcacatgatgagagaagtatggtatgagcagcttcagctgcaggctgttcctggtatagtacccccagtgctctgtttactctcaatgctttacaccttaggctggtcccttgttagagagagctagccagttgtcagataacattatcacctgaagtggatctcactggaatcaggtctccttttccatggcattcctctctccatctgcactacccattccagatttatattattgaaaggtaggtatgcttcaggaactatttcctaatgtgacctgcattctataatgtaaatattatgtcttagcgttccttgctgtggacccatcagagagacttgtgcaaatattgagggcagaaccttacccccatgggctgcctcctcttgttgaagattttatgagttttaaataatttagaatgtagtagcccctggggggtatgtcaattggacactggttcttttgtgttgtagataaagttataaagccccgannnnnnnnnnnnnnnnnnnnccccgaggtcacagtgcagttgttttagaactgcatcttcccggggaccaggatcaagggattatagtggacttggagtgagttctaggtcatactgtttgacccacaaatttcatccctctgctttatcacctgtttctctctctctagaaatatagcaagatctggagcagaaaactacttgtgtttcttgatattacacacttgcttacatataaccatatattaaaggttgggatttataactttcttgctgctggagaaaaatgacaagatgaggtagaagtacatcaatttttctaaggctatgtgcttagttgttttatcttatttagcatggactcttatttttgatcatacactttcaggtgattatataaaagcataatgagcctcagtccaatgcatattgtttgaagactatacttataatagggagatgacatgaaccacctttctccattttatttttttccatttttattaggtatttagctcatttacatttccaatgctatacccaaaagtcccccatatccacccacccccactcccctgcccacccactccccctttttggccctggtgttcccctgtactggggcatataaagtttgcaagtccaatgggcctctctttctccattttatttgttcagaggtgggaaacaaacttagagtcttccctgcagctaagtacatattttcctgctgagtagattctcatatttctgtaagtcatatttacaatatttttctttactgaattgttttgatttttgtggtgtgtgcctgtgtgagtttgtgtgtatgtgtgtgtgtgtgtatttgttgtaaacagataagtaatcatggtcatattcaataaggtttaaagtgctcttcaaagtgctactcaatgttaaaagcttaaaccttttgttggtaagtgtatatgcttgattatcatatttgtactgttttgtgggtgctcagttgtttactgatactctctattcttgaagctctgtgctagctgctgtggataataggcaggtgactatgacgtgccctcgacatatcaggtcaagaaagacaaattgtacagctaccataaagggctgtactatggaagatcatatttctgattacttggtgacattaattttccattttgcattttggatatgctagaattttatactttgacctttactcaaaaactattctgaatattgaaagttatgggggaaaagaaagcttcatcttggatatttgcagtcaaagcattacaggcaccaggtaaagggcagtggcaggtagaatgttaggaatgagcagcaaggacggtgttccttctactttgtcatagataaactgtcttggtgggattccacagataaactcataagtgtgtggcaattggctgtacatttttggaaatgtctctaggacttagtgactatgatgacctgagaaagggactctggagacaactgtcttcatcctttgcagatatgcacatctcttgaaaaaaaatctgtcgatcaatttttaaaaattatttttgcttacctcaaagctgaggattggtagaatgccaaatttatataaccctaacacagatacttaacatatagatgcttttttcatcattagatagatttctagaaattatgggtaatgttcttatgggtctcaagtaatttcctattcatttgtctattaatactgactgtattccttcnnnnnnnnnnnnnnnnnnnntcccttcccttcccttcccttcccttcccttcccttccctttccttccttcctttctttctttctttctttctttctttctattatatatctgaatccaaaagaggtcattgttgtggtaataactttaaaaagaagtaactcttgtctttgaagaaacttaaattttgctaaaccttgtagccaagttaataatataccttgagatcatttaaaactctggactcagtctgcctttctgctgtgtactcaacctgttaaagtttaacctgcccttaggaagacaatgcaatcagctttactatacttgcacttcccatgtaaccagctttacagcctaagataaacgcacacctttcatctttaagtatttacctctcaccagaataaagtatgtgtgtttttgtgtgtgtatgtatgtatgtatgtatgcatgtatatgtataggtgtatgtgtatatatgtatgtatgtgaatatatatatgtgtatatatatgtgtatatatatatatatatatatatatatatatagagagagagagagagagagagagagagagagagatcatgtatcaagtcagggccactcaaatgttatccctgtggcattttagtccacttttggcaatgtgtaattttcttctaagtgtaacagggaagggaaaggccaatttctatgttgacttcccacctttattatcctattcagtgtaaatactgcagttgaacagtccagatgtgatttgccacacagtctgtgcttttcaacatgtatgtggtagtgtctgagagcatttaatcaccatcttaaacactttcatacattattcaacagcagcttcaaaatgacatgaatctgtctttataaaccatgggcactatttaccaagaagattatagtgtgactatgtaggggcaagccatagtttatatcacactgagcataaattgaccatgggttctgcgcaatgtaatcttgcattaatgctattctttctaaggttttcagtctccataggagattcagagcaacatgaccacaggggaaagcctccacagatagcttaccttagcctgaactgagaaggtgatgtgaagggactgctgataaacctgagtgagaactggagaatgtgcctccctttctgctacttgccttaggaagaagcaattcaaaatatttgttgagcattgagccatgtaaattatagatgtccactctccactcctgcctcaggcctccatgtctcatggttctctcctgcgatccccacattctgtttcaactgtgttactattgcaattagccattgtcttccaactgctctttgaaacttcctagaaaaccaacagccagattcatcttagtttccctgtcttatcacagctattaaacataaaacctaaattacttattgcttatctgtagattcccaggaggatatggtatgttgtatggatgattgatgatgaaaatatgtaacatagggaatcatgcacgtttaaaaaagatgctaattttctggcctgtcaatactgtctttggaaacagttctgctaatatagaataaagcattggtggacgatgcccaaatcttgttaagcactgatctgggtttgccaggttgtagacttagttgcatttctaaagtgactctggcacgaagttttaatcttttaaataaggcatggctttaattgcctaatgtttttacccccttttcctgtgaaggttttttctttgtattttattttttgaagaatatagcattaattgttgctaataatagcaattgtatatcttgtaatcctggaaaggtgttgccaaaaaatctagtataatatatttttctataactttaattttataggactaacgagtgaatttatagatcatgtaatagggtttgtgatttcagcccactatgaaggcattaacttccaatgtatgtttacctaatatatatctgttccagacctggcacttgcatgtctggcatgtaggtgggtattgatgttctactcagggagaagcacagccttattgcaccatgattcctctgggttgggactcctttaaatcagacttgtaacccatcagctgctttcttcacagcaacagcagctatttccaaagtctgtcatgcttgtttgttgtactgtctgtaaggagcaggtgctaattctcctctcagctcaccctcagaagcatgcccctgcacagattgcccagtggtatgatccatactaggtggagttttgctttccacaatccttaccttcttccaacctccagttccttgtggagtactgagaaaggttctgctgttgtagactgtagagtctcctcagatcataggaatgaacacaaactctcacttagtttcccttgagttatccataagtaaaacacttagtagtcagggtgcccattgtttagattcagccataataacaaggaaccatttcttcttcattttgaatgtataaattaaaaactaaactgtatattcttacagagttctttaatgtgtaatttaatggaaaacatctgaattctcaaccttcctttagtctgttgtatatgctattttggttcatttatagtctaaaaagttggaccacacacaaacatgtagtaggaaaaggaagagtcattttaatatcatatttaagtaatagaaaattactttaatattacccaaagtggacaaggactgctttcaaaagactttttggagagcttaaaataatatcaagaaaactttttgtgcccagttataataaattacaatgctttcttccattctggattcatcttttacctgtatgaaattttgggatgtcatatattgagtaaattaagaggtgcatctttctcagatatttatacatcatatgtcatcagaattatctcattacttctaaaactaacaatattaccagaaaggtttttaaatatttgggaaatacaaaactcactatagtaaatatcagttattcagaattctggctttctttggtaagctgcaatttttgttacttgtaataaatattataatttgctttccttgaggtgatggtctttatctttaagagcctttcattcaaatagcaaagtttagaataatagtagttagttacttgttcaagtagaagtagcatggccctcaaacagcagtgagttctcaaagaggagtcctgcaggtcttgtcttttgagaaccatcttgtagcaggtactttatgtatactttctgctctgtcacacagaacattacagtgatgtaacttcaagggtggaggtttaataagctttatagtcttattgcctcgtgagaatgctttgttgttattgttgttgttcacttccttgtccagaactaggaagcagctagtggtaagaataaagtgtcagcacagtgtggtgttgtctagagtatagtacccgcctccaaaggagagcacactaagtggagtgaatatcaattattgtggaaacaggtttgatctgttgaaagtgccctgagaagatctggagactctcaagacctagttgaccaaccgtgagaactgttgttcatgatctgaatccctccatcccaacatgattctgttgttcatgctctgaatctgtctgtctgtctatggccaacgctgagaactgttgttcatgctctgagtccctctgcttgtctatgaccaacactgagaactgttgttcatgctctgagtccctctgcctgtctatgaccaacactgagaactgttgttcatgctctcaatccttctatcgcactatcagttttacccttatactacacacaacatcatacttacttggaaggatggctgtgctgtatttctcccttcttcaaacctcaaaagcaagcaaagagatactcgtgtgtttgttacttacttacttacttacttacttacttatttacttacttacttgaatttatcagtaagaatgggtcagcattttcccccaaaatttaactctactggctgctgtgttctctgcattgttaccacttacaggaggccacaggggactcatgcaacccctctcatagctctttgcctgtcttggcatgtcattgcagttggctttctaaggctaccataacttatgttcagttgtacattgacattttttgttgaattgtaacattttgttgatgagaatattttccttttccttttttattattctgtcagtacttaagggtatttactgaatttggaatattgacttgaatgcaagaggccttgggcttgattatgtacacacacacacgcacacacacacacacacacacacacacacacatatacacacacacacgagaggggggagggagagagggaaagggagagagagggagaatgaaaatgagtatgaatggatctacagaatttactaatccatacttctggaaggtaaactcatacctgttttacagattttatcaaatgaaggaaattattttatttgtttaattgctcttgattctaaaaatataaacacactgtggaagggagctagagagagctcagtggttaagagcacttctgctcttccagaggaccatgtttgatctctaacaccctcactgcagttcacaaccattggtaattccagtgctaggggaactgatgccctcttctggcctctgtgggcaccaggcacatgtgctgtagatagacacacatgcaaacaaaacattcatacacattttaaacaataaaataaaaattcttaagaaaatgttagtgaagacagattcattgggttagaaatatttgatatatggccttggccttgcaaactgtaggcttgattgtctttgacgttctctgagacacactgtctcctctacttctcacatctgtgcaaagatgttcatattgtttatctgtagttgcatgcagattaattttattttgtagacaacacgatggatagcagcttttgaaatcatcataatttatgaacttggtaattagacacttactggttctatcatatatagttgcactattttagaatgaaattgtgcccttgtgattcataaaagtatttttctggcatgtgtacactgctaagattgtgaaacacatattttaagtgtgcatgtaatggatagcagatgagaaacaaatgcaagaaatcttttttcaatatccaaacatgacagcaaataaacttgttttgctcaacaaataggatctttaattggatggaatttttattttattcttgatctgaggctaatattgtggtttgggtgtattctaaccccattactgtctaatagcttacttacacaatggttagacatgccagtaggtatgctttattttgaaatatttgttcttaattcaaatatcaaaagtagatgacaagggcaatctgagatgaatgaactgaatatgaactgaagcatccgttgcttgttcctctgtgttacaatcttttcatgtaatggggcaattcctaggtacttcccatccttggcatgagtcatgattgtccatagtaagtgagctatagagtggttgtctgcaaggaacacaaataaaatttgtgccaactgggggataaatatccactcgtctcccttccaggtcagttctttgcagttctttgcacctattggtacttgatcttcctgttgctatcaggttgtgaatgggagtggctcctggaaaagcacttactaagaaatgatatttcttgtttccacatttaaaaaatgatcctgggttttaaggaagtttccttataagcacatttggctctggtaaaatccacctcaaaacagtcaatagcatttgaggctttggtctcattagtggggtgtactcctttggctatacttcctgataatagtttcctattagatatgcgaatgtcagggagcagaggtggtaagcatttctctctgctgcttattcgtgaatgtacagaggaaggggaccatgggcagtctgaggaatggccactcccttctacttccctcatttcttatcattttcaatatatttattgggtattagcttaaaactttgctctcaataggaagcttgacaaatgtaaagatttgatgcaagtattatctttgttcagttttgcaaatccattgcccccctgaagactgccaagggaatgtttgtactgattttggaatgttaagaatttgggagagtggcttcttagaatcctgcaatatggtaatcatgtttatatgtttggggctatcgttttcttgatacatatattgtacttttgtctaggttttaataattctttagaaagaacaaaatgcttctattttaggcttcttaaaattgactcaaatatgtttatagagatagatgcatattgctgtaagaagtgctggcatagtcctgaagaaggaacagtcagtggttattttttgttttttgtttttgttttttccatatgaaagatagtgtctcagcctggcaatgtccagcccaccagctgtttggctcttgttaaaagggttacatggctcagtcagagcaacaagatgctcttctggcaatgttcttctgtgcaatctggttcagggctgtggcctcacactcaaatgcaactcatagatgaagagctcagcatgtgactcttctgttttactcagtatcagtaccaattcactaggaaaactgtgaggttatctctgccactaaccagtactgaatgctcagggagtgtgtttagtctggcttcactgtcctcatctacacagtgaagtagatagaaggctgcagtgaaattgtctatgatctctagatggtaaattttacatgtgttctcacaaggaaactaagttacaaagaagtagaaattatgaggatgaatgaggtagatcattgacattggttacttctgaagttttagaaatctccagtggcatcatggtgctatcttgagcaatattgtaaacttacaaactttaagggttcttatgtcctcccagaatgtgaagctaggccatacccacacaaaataaagagcatcttgtgggaagttgaccgagtggttactgttgccactggtatggctttcctcggaacttatgtggattctcaccaatctcctcaatctgagtaaaagatgtgagatgatagctgtgtgaaatgagttttaaaatgtgtatgtgcgcatacgagtgtgggtgcaagtgtgcatgctatgcccgtgaatgtcagaggacagcttttaggagttccttctttctaccttgagttcagacactcaacctcagactatagggcttttcctgacttttgtagacccatattgtgatagttttgaaatgtggaaatcattactgatgtgttacgatcaatttgccttttaaatactgttttggggtctcttagtataggaaacaaataaagttgatgaagacatctccctattgttaaggaagaagaaacatatattccactagtaagggcaaataaaataaaagacaaaagtagacaatgggatgtggggaatgttataaaagaaattaatattgatgggagaacttaggatattttcccacacaaaataaagagctatcggagttgtctttgtagagatatggctagtgttaggactataacagttaacaatcactttagttatttagccaagggagaagggcttttaggatacagctatcataggatatagaacagacatggaacatagtgagaaagaacataggtgagaaagaccataggtgcctattataatgaacacaaaggtcagaggctactgtgcttaggggaatagctgacaaagtaaagaaaagtcagaagtagaatggatagtggacagactttttgtgggattgagggggagatgatgatgatgaagatatagatgaattctggaattgtggcttatacaactggaaaaatattaccatatatcaagaaaagtaatgtctgtgtgttaggaagatagccatatctggtcatttgtattgagatcctgtagggtagagattagtagtaaggcttagtagatacacctttgacagctatttgccttgatatgaaacatgaaggcatatgtctggatgagctcatcatggagaaagatacacatgaaaggtatctaagactcagtgtatattgcaggagatgactgtaaaataaaagcagaagctatatattgaccatagaacttggcagatgcagttactgtgagtataacaggaagtggtatatacaccaggtagataatgatatgctcaagctagagagtaaatgaaaatgatgaaagctggctaggtaagatcttaaaatgctggcaattgtctcttcttagagtttgtttagtttgcatgtaacactggttcccagctcctatgagcaaatgttttgtcctaatctggtcatgctctttgggaagcttgtggaaacttcaggactgtggccaagatagtagaaagtgatatccacttccagatccaaacgtcctgtttcttgcctcctgtgatgtggcctcctgcctctacctcccagggctatgccttccctgctgttgtccactggcacccactgaaatcaatagccagaataaacaccctcccgtaaataactttgtcatgtattcttttaccgcactgaggaaaataacatataatggctagacagaagtcttcataaaaccagggactgcagtctgttcttcactactatcaccctagtaggatctaaggatataatggaaacaataaatcttgaaaggtgcttttatactcattgttttacttcaaatttcctcagatatgatttataaattgccatgtcctaggtttactctcccctgagttcctttcttacgctctgagctgcattttgcatgatgtacttgcaagcatcttaaattcattatttttctgccttcctattcttttaccacggtttcatatttgttatagattttaacaaatatcctctttcataggaaaggaggacagggtgggagaaaggatggtgcgaggaagaagagggaatggtgagagggatagaatggaccatttatatgcagcgctgccctttatgggttgttactattataataaatggagtggcctaatagactcctcagcaaactttctgttgtgcattttgatgtctgcttatcatatgttcatactatagcagactagaagactttgggtttacctggggtatttttacaaattgaaaaattttgcattctgacttttttctcacgtaaaaggctaatgaatctttttagagacaattaaaatggtgcctaatgaggtaagcttagagagagctaaaacttcaattattactttacaggaaaagaaagaaaacaggtagtcagtcgtttgatgacgaagctgtgtttccatcctagaaggaagcagatgaaaacatagaagggttctttgaggctggaaaatcaaatgcactatagcataagtctagtcatttccccacctaagagagctgattgaacaaagaacggagtccggtttccctgatgaacatgacctctgttcatcacagaccaaggagctgctgaggccctttcaggccaacctcactggtcttggtcagttggcagctcttctacttgattggtgcctctttgctttaggctaaaggtagcagttaaaataagatctgagtttcctttgaatgcttattgactcaatgatttaaaaccttattttaattataattttctatatttaaatgtctcttgaactatttcaaataaataattttcttgggtagaattttctggaatatcagcagaaaaaaattgaataagatttgatatttcgtgaatgttggatttctaaattcatattaaacttttgtgttattttaaaggctcatgcctttaatctcagcactcgggaggcagaggcaggtgaatggccagcctggtctacagagtgagttccagggcagccagggctacacaaggaaaccctgtctcaataaataaataaataaataaataaataaataaaggctcaaaagtttattttatttttattatcacatggtgtgcatgcaaggtgggagtgtgggaggggacagtttacaggatttggttttctgctttcattgtgagctcctgagaattaactcatgtcatcaagcttgtttggtatgtacttttatctgtcgagccatcttgcttgtctaatatgaaaaatgtaaagatacattttaagttacatcttcaagcttggaatgtaaccccttgacattgccagcattactggtatagataagttgaatggttattttatatagacttgacacagtctactgaatctagaatcactaggaaagcctcagtgaaggattggagagtttgttctggcttgtaagcatgctatggggagtatattgatgttattcatttagttgggaagacttgtccagtgtaagtggcatcattttccaggcaagaatcctgaactgtgcgaaactggaataagcaagctgagtataccacacatgcattcattctctctctgctcttgatttggagctatatctatgtctatatctatatatctatatctatatctatacctatacctatacctatatctatatctatatctatatctatatctatatctatatatctatgtccatatccatacctatatttacatctacatctatatataatctatatcctctatctctattagtatcttcccattgccttgacttttccaaaaagtcttgttacctgaaattgtgagccaaatatattttctttcttccttaagttcttattgaggttgtttattacaacaacaggaaataaaactgtgacaaccatctaaaatactggcttttgctcatatttaatataaaatgattatagctattaaaatatcttttaaaaagccagggaaatatattacaattggtctcataactatgtccaagtcccagcccttagaacctctgcatttgttctgttcagtagcaaatgagaaaataacttccaggattctaattgatgattgtgaagtagaaagtttgctttaattaacctggttggatataatttcaacacaaggttctttgtgtgagaatgaggctgcatgaaggaaggtcagatctgattcaccactgctgactgtgaagataaaaggggaccatgagccaaagactgtgagcagtgtctgaagcttgaaaaagctaactggtagattgttccctgaggcctccagtaaggagtttgcttccattcaccttcattttaatcttaccagacccagtcttggtttctgccagcagaactagtagataatgatagattgtaacctgtgatattttaagcctctctgtttgtaagtgatttattataggagtggcaggaaagaagtagaaaccttcattgctagttgtggttggctgccattgctgctactcactttctctgtggcaggaatctgtcttttttttcttaagaaaaattaacacatttttagtttttgtggtaaacggaaatgattattactctcataaagaatatttcttacctaaacaaaactggacataatttattttatttgtgtgtgattatatagattttggtgaggcaataggttgcgaaagtgaatgtttagggactggagaaatgaatcagtggttaagagcactagatgttcttctagaggaccagggttcaattcccagcacacacaagtcaactcaaaactacctgtcactctggtttttctgtgggcatcaggcattcatgtcagtggtacacagatccatgcaggcaaaacaaacactcatatgtatgaaacaaaacaaaaattgactggattatttatatattttgatcctaagataaactcttatagatagcatattaaaagtagactaacatagttataagtaaagagtcattgatggaaaggagagggaggaatccagaccttaatgatgtgtgggatggcaaaataatttctcttttagcatataagggacacttttttttattaggtattttcctcgtttacattttcaatgctatcccaaaggtcccccatacccacccccccaatcccctacccacccactgcccctttttggccctggtgttcccctgtactggggcatataaagtttccaagtccaatgggcctctctttgcagtgatgaccgactaggtcatcttttgatacatatgcagctaaagacaagagctcccaggtactggttagttcatattgttgttccacctatagtgttgcagtcccctttagctccttgggtaatttctctagctcctccattaggggccgtgtgacccatccaatagctgactgtgatcatccacttctgtgtttgctaggccccggcatagtctcacaagagagagctatatctgggtcctttcagcaaaatcttgctagtgtatgcaatggtgtcagcatttggaagctgattttgggatggatccctgcatatggcaatcactagatggtccatcctttcgtcaccgctcccgcaatacctctcctgggcatatatccagaagatgtcccaaccggtaagaagaacacatgctccactatgttcatagcagccttatttataatagccagaagctggaaagaacccagatgcccctcaacagaggaatggatacagaaaaatgtggtacatttacacaatggaatactactcagctattaaaaaaatgaatttatgaaattcctaggcaaatggatggacctggagggtatcatcctgagtgaagtaacccaatcacaaaggaactcgcacaatgtgtactcactgataagtggatattagcccagaaacttaggatacccaagatataagatacaacttgccaaacgcatgaaattcaagaagaacgaagaccaaagtgtggacactttaccctttcttagaaatgggaacaaaacacccatagagggagttacagagacaaaataagggacactttttaattggtgtattaaatgtcagtactctctattggctttaaacccttggaatcaagttgcagtgggagtatagtcattacagaatagaatgtaaatgtttgcaacttggatgatagattcggaagaaggtcaagaggatagggttaagcatttaatatgaaagtttcttcctaaagggtaaagaggttgtccttaagtgataaagtctcaagtctaagttattaattaaagatttaagtattcactaacggaaacagaagaaggagggaaaggttgtaaaaccttgaatgcactagcatcctggttcacgatatggtcacagtactatttctgaagttatattttcagactttgatgcttataaagatattactattcaacacgattaaagatgtgtaaaataattgtctctaacatagatgaaatcatctttctgtttcatttaatttttaatgtcaacacaaggctcatatatggcttatatcaggactgtcaaatgtttttgtaaagagcccagtaggaatattttgtcttggaaaataaataatctctattacagctattttctatagaaatgaaactgttgctgtactctatatctgggtgggtgagctaggctttgttgtagtgtgcagagatcaaccagaacagcccttccttcaccatatccaggaagcaatgactaaacacttcatcttaaaagttattttctgcttgatgctaaacaacagtgaaccaagcatactattgtgcttttgtttctaaataagaatctgttttcttttaatccatcaaatttagacattatctgtttccattctattaaggtcgttggaagttctggctttctggctgttcacctattctcacagtccctttgcttcctactggattattagaatatttacccagtctgcactctgtgctttcagtcgtgttcactcttgagctagtaactggttgatttctatcttgtgcaaattgggtttctctggagctgatgatgtctttgattagttttccttgaatctcattctttctttgtacccccaatagttgtataaaatgactattagtgactattagtgaaatctccaaagagttaaatccagggtaaaatctatggacttggggttttatctccttcgagcacttcattgtcatgatatgatcagaggtgggctcatttgtaaggtctgcatagcagccatgccatcatcatgtatttgagaatttcctttctgactcttatgtgttgagtcctctggatcccgagttcctcattttcagagctcacattcatttgatagcttgtgaagaggctgcctctctggggcagaatggcaggggagcaagattggtcttcactgtatttacctctgtaggcctgtgtttaacccctactgtgccccatctcttggagtcaggatttggctctattcaccttctcctccatagagttgacttcttgcctccttaaaggagagacaggtgggaccactacatagagactccagtattccttcaaggaattttcaggtaagtttagttcacccttttcagccttctgctgcctctattttctatggaacttagtctctctggactttgtaggaatgattggctttttattttacagtgcctatcctgtctacaggcagttgagcttgacatttctgagaggtgattaacttccttgtttctccttttctgacacattgtactgtgagttactcatatcttctgctgtcataaaaatggactttgagttctgttttgttcttctccttctagttccattgcttggatataattttcagaaaagcacagaaataagcatggtctcaatagctctagccggcagagtgtgttaggagatgtattaaaatatttttgtaataatttcaaaacaaaaagaatttattttttggtacagggtaaaatttctataatcatcccagcttttgttttgtattaattacatatactgcttaatatacataatgtatataatatatgaaaataatattgtatattgtcttcctattaaggcatactttgcagttatgttttttgttgtaatttgcctcctgctaattatatttatagcatgtctgtgcaaaattggcttaatgatgtaatgacaatataacaatatggtgacttctgtaataatattagataatactatagtaatctttgtctacataatgtatactatgacattgtttactaaaggtggatggccacttttcccagtgctcctggaaccattgtggttgcttgacatattgttttgtttattcttctaaaacaaatagacacttgatttacgttcagtgtcatgttcatagatgtcacttcaataaatggttgcaataacattttagtggcttttctcaatttctctctctctttctttctttctgtgtgtgtgtgtgtgtgtgtgtgtgtgtatgcatgtacttgttcatgtttgcacatgaaaagcaagcagtctaaggaccacattgtctcactgtcttttgatcacaggcacagagattgttttcctttcagtctaaatttgacataggaaaacttgtcctgcatctggatatttttcttaacatgtgtttctcatatctccttggctttctttctcaggtttcctaggtagctagctctctttaccctcccactactcagttctgaagtctggtgaagggtgatagatagggcctgggcaatgtacctagtacaggtaaggagagggctgtgcttcatactgggattcactacagcactgtacaagtcagaaataactctgtcttttggggactgagagtaaggtgccacaagtaaaactccacatgtagggatatcatgtgtgcctgtggacatatgtgtaatgaattattctcagtcctgcagggattaaatatagtgtctctattctatatggactatagagcttgaatttcattctctgatttttaaagctgtatatttttcactagaagcttttattttggcaagtatgctagaatacttttattttacgggacaagccatgtatcagcagtttgaaagacacatctgcaatccccttctattactatcctttgaggcttttcttctaacaaataaactattttagtacattgagtgatactgtcctctttgcagattttttttgctcattttatagagtaaaactcttactgtgtttggtagtgtgcactcagtgaagaggtgctcaccactctctggtggtcttgcagttttatatgtaagtaagcccattctctcacacatgtgtgtttcttatgtgagcttcactttctggttcatgtatgtgtgggatggccttggccttagccatgcatcagaagactggaatacccttctcaggtttatcattgacttgcctcaggtgtcatcctgtcactttcccactctgcctctgtcttagttgctgtttctattgttgtcataaaacactatgacaaaaatcaatttgggaaggaatgggttctattgtttttgctgttattgaagaccagctttaggccatggtgatctgctaggaaacatgggattatttcaacattcttgtgtcagtggaaggttgttttgtgaccagttatctggttgattttggagaagttccatgaagtgctgagaagaaggtgtattcttttgttttaggttgaattgttctgtagatatctgttaaatccatttctttcataacctctcttagtttcactgtgtctctgtttagtttctgtttcaatgacctgtctattggtgagagtagggttttgatgtctcccactattattgtgtggggttcaatgtgtgttttgagcttttatgaatgtgggtgcccttgtatttggggcatagatgttcagaattgagacttctcttggtggatcttccttttcatgcatatgaagtgtccttcctcatcacacttgataacttttggttggaagtctattttattatacattaggatggcaactccagcttgtttcctgggaccatttgcttagaagacctttttctatccttttactctgagatagtgactttgttattgaagtttgtttcttgtatgcagcaaaatgatggatcctgcttctgtattcagtctgttagcttatgtctttttataggtgagttgagtccattcatattgagggatattaaagactgttggttcctgatatgtttgtttttgtaggtggttttatgtgattgtgtttctctccttttggctttgttgttggatgcttaatatcttgtcttttctttggtgtaggtaccttccttgtgttggagttttctttctaggatcctctgtagggctggattgatagatagatactatttgaatttggttttgtcctggaatatggaatattttattttctccatctatgttgattgagagttcagctgggtatagtagcctggactggcatttgtgttctcttatagtctacatgacctctgaccaggttcttttggctttcatcgtctttgttgagaagtctgatgttattctgataggtctgcctttgtatgttacttggccctttcccttgcagcttttaattttctttgttctgtgtatttagtgttttgattattatgtgatgagaggattttcgttactgctcccatttatttggtgttctatgggcttcctatacctttatggccatctctttcattaggttgggtcagttttcttctaggattttgttgaagacattttcaggtcctttgagctgggaatcttcattctcctctcttctgattatccttagatttggtcttttcattatttcctgattttcctggatgctttgggttaggagttttttacgttttgaattttctttcaatctcttctacttctacggtatcttttacaactgagattttctcttctatctcttgtattctgttggtgatacatccgtaattcctgaactatttcttagtttttccattttcatgtttgcctccgtttgtatttgatttattgtttctacttatattttcaggtcttggatcgctttattgcttcactcaattgattgtgtttccctgtattattttaagggatttatctttttcatctttaagggcttttacttgtttacatgtgttcttctgtgtttctttcagtgagttattgatatcctccttaaatgtctctattatcttcatgaaataggattttaggtcaacttcctgattttcccgtgtgttggtatattcagggcttgctgtgttgggagaactaggttctgatgatgcccatgtatattggcttcttttgcttatggtcttgcgcttgcctctcaccatcttgttatccctggtgtttgctggtcttggtgactctgtctggagtctacctcttttgttcctgatttgcttcaggtctccatataggctcatggccctggctgtagcagaccacctgtgaggctttccaactgggggctcttcagaggggcaaagaatctgttgatctgttgcacaggctacagtagatctcctgggaggccttcagactgttgggtcttcagagttgcagtcaaactgttgtcctgtgtgaagatgttctccagagtggcctacagacagtggtttctgtttccctgtgtgcagcagaactccagtgaggctttcagtctgttgggtcagttgctctgcatgccacagagctcccaggaggtcttcagactgtggtgtctgttgcactgttgccctgtttacaaaggagctcctggggtgccttaaagctatgttgtgttcaggggaaccgacaagctggtgatcagttcctcagttgccctgtgttcagcaagtctcctaggatgcctcagctgtggtgtcagttgcccaactgctctgagtgcagcagatcttctgggataactcaggatatagtgtcttcaggggagcagactggctagcagtctgccccagcagaaaggactggacagaaggggagtggtattcggtgggcgggggttttggggagtgatgggtcctgagtccactgggctcccagcagcagctgtgggactttgtgggtgggttcttaccaactgctttgaatgcagtggatcttctgggatggctcaggatatagtgtcttcagggtagcagactggctagcagtcttccccagcagaaaggaacggacagaagcccttacttatttttaagctttattttgcccaagaactagtttttctggctctgttttattcatagatgccaagatccacacatgtatttattgcattcaaggaaactcccattatgtggtgtagagtgcttgccattctttcatgcttctagtgacagtatgaaaagatctaggtcatgctatctgagcttgcacaaggtagagtgagatggttttctgtgcagttccataatgctgttggcctgttaactcccttctgttttccctatgataagtcataggatcaaacataagtttagggctgggataagggagtgaaggagatgattgaggactgaatcaaagaaacctgtgttctagtttggggggccagaacagtaaaagtgaacaggtattgaacggaggataacttttgaggctgctcttagaatgctggctttaggcttggaagtctctgaggccattcccaagaactgaatggttgaagtcagctctccctgctccctcttctatgcttgttggttcccccttagccatacctgtgaatagtctggaacattctagggaaatgacattgtccctggagaaataagctaacagtagcaagcaatattatccttaatacttttgaacttcagagacagactttctttattgatgccatgctaaagatattgttttataaatagtgtgcaggagactaaagtttgggatttgtttgtcttagagttcacctactttataaccagtcacaactaccattgctgttacaaaggaaattctctattctaggttttaatctctccagggctgtaggtgtaaaactgtgttcaaatacaaagctagaggcctgggctgttgcctaaggaatgtttcaaaccattatattcattagtgcatacagagatacaaacacacatggggagcagtgtcttgcaaaggtattctttggagtgagttaggaagttgttattcctagatcagaaactttgagtttaggtggctgcctgaaataaactatgagttatatagattttcatcttcaaattcattgttaaaattcattattgaacagatactctttagggttttatattgggtgtattgttttaaaacttactcttctctccctttcattggtgggatggctgctttcattccctggctgtagacttcacattcctctggaccacacaagtttctaaaacttggcactcatagctctggactataaaacttcattggaaacaaacaatggaaaccatggttttttaagaatcagcgtttttctttcaatttattttgtgttgttgattttcagtgttagtaagttggtaatgttttaaaaattgttcctattggaaataaaaatgtattaattaaatacatatggatttttgtaaatttcagatgttcaatgtttgaattttgttttataactttgcctttaagactacactgtatttatccttgttggtttataggaaactcattcttttatgtgaggagaatgagcatcttttccagatctgtaagtaaaggaattttagtatttgtcttagtcagggtttctattcctgcataaacatcatgaccaagaagcaagttggggaggaaagggtttattcagcttacacttccacattgctgttcatcaccaaaggaagtcaggactggaactcaagcaggtcaggaagcaggagctgatgcagaagccatgcagggatgttctttactggcttgcctcccctggcttgctcagcctgctctcttatagaaccaagattaccagcccaggatggtaccatccacaaggggcctttccccccttgttcactaattgagaaaatgccttacagtcgatctcatggaggcatttcctcaactgaagcttctttctctgtggtaactccagctgtgtcaagttgacacaaaactagccagtacagtattcttataaaaattctgaatgcatctgatgttatgaggagtagattcgaaaataattaaaaatattctttattttataaaaatgtgccatctctatatctagatctctaattcttcatatatgcttaggttaatcacagatcaaaagaaacctttctgccacagtataaaacttctgagtttatggatataaagttgaattaaaaaaagacgtgaaattgttgatattcttaatatgaactaggatacaaaatgtatacctgagttttaaagcatttccctttctatttaaaaaataagtaaaacttagtttatgagataaaataagattccatggaattgttattgttgtgatagtgaaatcatttttgtttgggactacatatcacaaggcaacacctaccttttctgcggcttagcccttgtgttttctggattcctgttaggcgggagtctagaagggactttctggtcagtagccaggggttcccactaaggtttgcactgaaaaacttatgggtttggctttgccagctgccagctgcagggggatgatctgtttcttccagcttgagaaacagtcacagagaaaatacatctttaaccaggataattctcagtttcttttaaagttgtgtaataaagttttatgtcttctagtaagacacttgaataagtgacaaactgacaattttgaagtatgtcgggcttacagatttcctacttaaaggtacactgtaagtctgccatcaggctgagctgctgaatccattgtgtttgtgtcacagagactccttatttcaagacatttctctaactgtggattcgaagccctttctggggttttaggagctatagggctgaaaattggaagagatattcattcacagaaatcccatttttttaacccaatagcatggtcatgttctggccatatagccttgatatgtcatattccacaatgtggtacattacacacagggtttttgaaagtttttttttttttatggtgagattcagtcaacttctttattatctataataccttttcaaagttgtgcataagtagccatgctttcccttaatgtggaaggcttttaatttgatggaaagtcccctatggccatttatttttcaagtatttacatataaaagtaatctcaaatgggaacagaggatccagattttaatagcatagctaactagtctgaatggtcactgagcatggatcccagatgtaaccacagcaccagggaccctagcttacctctgtggtgtcatttcccacatacagtgtatggcagtgggtttatctgtcacctgactgtgacttaagtgcttagagtaagaatttttatataacatgttctctaccacaatcctaacagttaacctggtgcacacctgaacaaaaggatgagtaatatcctccaatcctaggaaaaaggcactgcagtctcggtcttattgagagaaagtgtgttttcaacacggcatctctctcagggacattttagtaagcatttttctcttacctgtctgaaacatccagtgtctcaaacactacaggtctactatctttaaaataacaaagcactttcctccttgttgtctaatgtaagtgaactttgtttagcttgctcattataaatgtatttataggcctctaatcaccatgattactgtcatggtgttctcaagttagtgatcttttcttaccatttcttaaaacctgacaaaatattttaagtgtcgtgtggccatatcatcacaggcttaggttggtccttggtatattctgggaacagtacttaatgtcatagtctgagatagagcagtagctataatcattttaacagattggcttatttaagtctttggttgcctgatccaccgttgtatatgctagatatctgaggtacctggtggtcagtgagccacatgttttgttcataggataacctagccttctgtcttccacaatgtctatatttctatagcttgtttatgattctcctcctggaaatttaaactgccattctgaacagccttctgatttttattattatttttttaatcagtagatgtataatctttgaagggaaccattagatatgccagttgaaaaaagaaatctcagttttgaagcaaaaaaaaaatgtttttgttacattttattcaaatatcttcgaaatgtagcacacctgtaggaaagcatacaagtagatgtagagtagcacacaggtcaaaaagttagcttgtgttccaggtagcttcctcgcttccctttccactactgttcttcaacttgttttgtgttgtgagataattatgacaaccttgaatatactgtacatagaatcctacagaagcactttcaaaaagtgatttggctatatctgcatcatcttattttgtgttgattattcatgctgttgaatgagcttgtagtttatcattcttgatcatgtataggaattgtttgaagtgcatactactatctattctgctgtgatgagtagtatcttgcattttaagagcaggaataattctgctggagagcctaaatacatgtcttttgacaactttgtattctcattttcgtttgggaaatagagaggtagaatttctaaaatatttgggaatcttatgtgatggcatattttaattaatttttttcagattttaattctttatattatttatttagttctggtttttgagacagggtctctacttgatgcaggctgtcctggaactcactatgtatagcaggatggccttgaactcaaagatctgcctgcttctgactcctaaattctggcataaaagacatgtgccaaccattccagactgatttttaatcttcaagctgatataattcaggaactccttagttgttctgttgactcagattccggatcgtaaccctaaccttgctgaatttgagcaagattatcaatttattagtccatgagagttttctttatttttgtcctaaagttttatattctttagcagaaatgtttgacatgtaagctagaataattttaacattttattcctgatggtattataaatattatttaaatgttttgatactattataaataccatcatttaaatattctgatgtttctataaatgctataataaacatttttatatttaattatttttccttttctgatttttttggttactggttttcaaatttgctacaatatttaaagaatatgtttattattttttcaagaatttcatacactttattttgttcatatttatcttctcccatctcctttaaaatccatcccccatttcatacctacttacctttctgtcctcattcattcttttttaaaagtgaatttggtcaaattgtgctgttaatatcacctcgggtatgtgcccatcctctggagcatgctagatctacgaggggccacactcttaaagaaaatggactttcctaacccaataattgctggtaaccaacacatgggacatctatatcatgcaaggctccttccaaggctcagaggatcattgcaacaatattttgttctgaattgttgaaatatttgtaaattctttttctgaattcattgaggtgatctttagggttatactaacttttacatattaattatctaaatgaccatggttgacatttgcatttttataactcttatactactacaataaatcctatctgattatattacttttatatacattactgaatttgattttaatatatttaagattttcccatatgtatccaggagagaaaaactacaatgaaggcaattagtgactggaagcagggaaattaacctctcccaggaatgaatcccttgtttgttgtccaatgaagaatggtgatccctgaaaccatgtgcatatatatgcaggtttttttgcatacacatggatacatacttacatgtatagcaataatcaaagaaaagggctatcaacttgagaattgggaggcattgttggggtttgagggaatatacctgggaagggctggaaggaggaaaggggataatattacttaaaaacatacaaatttaatgagtttagtgaatatcccatgcactcttgttgaaatgtgttttctgagctgttttggtttcattataataggcatgtatttttgttactatgtataaaataaagaattgggtctaatatgttaattgtgtttaggagtttccaaatttgcatgtatcgtgcatagtatgatctttctgtcccgtggcaggatgctcactgcagcaatgctattgggtatgtacagggtgagaagccttctcttcttggtggattttgcctttagtaacagtttccctgtgtctcttctgcctgataatagtaagactgcatcacctctcttttgataggattatcgaacttcgagctgaaagcacatttgtagaggtacttactcgtgtgctccttatttttataatgtgagattaagtgtcttgtggcattcaccagatattactttgaacccacaatgaaacccattgcaccttcgtatttgtgaattcttcagaagcacagtttatgaaaattgtgtcagcaatgttgatcttgtttggctttcttctgaagtttgcagttggataatctattctgggaacatgaaggcatgtttagaacgcaattggggaggaattacaacatgaattatatgcaccactgccttgtggattgcaggaaccttggtatgccctactttctgcctgagctctatcctgccaggtgtcagtggttggggcctgcgctgccttcctaagcgtatgtggcctggttactggttcctcttgctttgggttcatcctcctccccagacctgccctaccctttcttttccctgagtgccctgcaaagcagctctcatttctggcctttgaatgaagaggagaatgaccccaaaagatatgatagaagtgctaagtttttgcatatatatatttcataattctccctccaatttctgatcccccaaactcacctctctatcctttctttacatggttgcccaaatcctgcattctaatgattaggaattctgtttacaagcttttcccacttgtctctctcacttctgctcagacaaactgaagcaatacatctgggccttctgttagcacccactgtgtcctctagactttgacctctgagataatacctggtacaaaaagaccctggagctgtcctggttactaagggtgggtcagctgaagcccagtgaaataactttagtccatacacttatatttgaatggggaaagacccattgctccatctgagtcctatacaattatgtcttgtaaagttgtcctaaaaatacattctttaaaagatgttttaaaattgccatacaaacctatgttctgagtatataaccccatacattttatatatataaagaaaaacattcgattctagtgtttatggagtttctgaccttgaataagacagttcacttctgttgctttcttcgtctgtaaaatggactaacaattattttatgaggatagttgaggctagatgagttaatcctataaagcacctggtcactatagtgcctcacctcagtgagatctcatttgcgagtgcatgccatgaaatctgaaaagttctgcaaagagaactctgtttcttttctttttacttaactcctatcctacagttggctttgcattccaatggctatgataattccagtgacaatttaagctaccaggagcccaggggcattcttgaactttgttggtgacacagttcaggctcagtgtggtccttcagtcattggctttttattttggggcttttctccttcaaacttcatgtcactgcaaactgtttttcttctcttctactactaagtcttgacttagagacctacatgtatctcctgtcttttgttccctggagcaattttccagaatttcagcacttggtttgccagtctactgttgtaggcattgcacattggaagttatagatctttcattcttagattaatataattttaaagcctaagtcaaattttatgtcgtatagtcccagtgaaatttctttattaatgtcaatacatgtttggaacaatttctgtatttgatcattgcaaatactgttttactatcttgttcttttaattaatatttttatccaagtttctcaaattcatccctgtagactggcttattttagtttaaattccaggaagatttacattaactgtgtattattagaagtaaagaaagtacaacatatagcatgttggttttcattactttaatgatccctggagtatagataataagatttgttgaattgaaaaatgagtacatacacagaactattttaaaatagtattcatatttgttacggatacatgtactacatgaatgtaaactaaatgtcacaatcatgaaaaaactacattaaagtgactcaagggatcaattgtgaaccatgtgtgaatctttttatatttgattggtttttttctgatggtaataaaaccatgcaaacaaaatgcaaaatgttgactgcaatgtaatggttgaaatgttgacattcataaaaggatcagagtgaattatgatggctgttggctgctaattctgaatccatactcttacagtgatctatggaaacagagctgaatgccacagagacagaaccatggttggtacattcctggttattgattctcccatctgagtgtattaaatactcacccgagactgctgctttactgcttgcctctttttccccagggatagatgtgtgagcatataagcttactcttttctttttaaaacagtaccagtgtgtgagtgtgtgtgtgtgtgtgtgtgtgtgtgtgtgtgtgtgtaggtgttagagagagatacatacaaagtgaggagagagagacaaagagaaagaatgggtgccatgacacaggtgtagttagaagacaatttcagaatgcagttccctccttttactatggttaccatgggaagaactgggtcagaattcttgcacggcgaatgcttttacttgatggaccctctcgccagccttcatttttctgttgttgcgtatgtgtaaaataactgaatcagtgtgggagagtgatctaaagttgcatcttttcactaaaagttcagtactatttattcactgtttttttgttaaatgataacagatatatccaacttcttgaaaattctcaatttgtatctatactctttccatcagatgaagtgtctaagtcctatgctttggtttcctgctggccttagattctgtaacagttttcatagaaggagcactatgtggcttcgtagcctcttctgctgctatttgtcacccagttttattttaatgataagaaatcctactttatggtatttttattgttagattgttgttgttttaactttttcctaattttaaattagaacttagctttccctttccttctgtttttacctcttacaaggaagtaaggaagactcaatgggtctggcagttgttaatgatgattgtctagttatgggttacatggactactcttacaaactgaacccaagggaagagaaactggtagcattcttctttgaagtagtcctatttaaagagatattttcagaatgcttcccttttacagttatggcgtgctggttaattgtagaaagggagtactggctgtgtcaacaacacaaactagagacatctaagaagaagtaaccttatttgaggattttttagatgagattggcaggtctgggtctggagggcatttgaatgattgctaattgaagtagatcagcccaggtcactgtggtcactgtaggtctgggcaggtgcccatggactatacaagaaaggcagtggctggtgagcctaggagccagccagtgagtagcagccaatgagtagcagccagtgagcagcattcctccctgacctcttcagcctgcctccaggttcctacctcagcttctcttggtggtgcactatagccaatcagtcagctaacctttttgctttcccaggttgctttttgtcaaagttcatcacagcaacagcaagcaaactagaccacatgagtatatttcaacaatataatatttttaaaaattattgcagttaatgaacttggactttttttcctaagaagcagtataaagcagtttcctgggtggtgtgcctatgtgaagagaatgttacttgtggcctacctgtattagtttttaatctctgaaggtttctagggagccgatatagtcagatagtattgtcttctgtttacaaacctagagtactctgtctcgagtcttacttcctgcatttagctcatttttgctaacacaattgctttgagttggcacaagtctctggttatgggtttgagagatgagtattctgcactttgcttagttgaatgtgttcttactgctcaatactttggcttctcatctgggcaatagaggtaggcatctcaagtttcctaataagtcattaggttttgcatttataatcctagaattagaagcaaatgaaagccttattcttcttgaaatttccatttagatactctgtttaaaaaacaacataattttgagattgttaaagctgagcgaaggagaattgcttccagttgaagtctttcatagaatttcttcactttgtattattgtaaagttgtgtatttgggtgtcacctcagtcaagttccgtatagatgctgtaaagaattattatttactagccagcctaagcttttctccaggggtcacagggaaagctgtatggcagtcattcctattagcttttgtaaactcacaattgcattctatgggttctgtgacttcttactcttaataaagattcatttgataaggcttaaagcttcatccaaggaggattttcaactccttttagaaactggaatttgtccctttaccaaggtttgtttgtttgtttgtttgtctgtatcttaatgccttctaagaatcatagaatcaagttggttttagcttggttattccttaagatctctactgatacttgaattctcttcattaatatgttcatattcattgctagcattccttattttctttttctggaataggtagtacacaaataattgaaataggtaacatcatcattgcatttaatatcaggctgtcgtgttttatactaaaatgactgttggaaataatctaagtcataaggttggtttagaaagcaccatgttactttgggcacagctacccagagaatgtcacgatgtgagaaatgggaacggggctggagcttttctctgggccccatcaacaccctgaagctgagaaggcacagtgagcatgggaagttaaaaaggcaaagggattggggtgctgataccctcccccacttccaattccaccgatttgctaaagttaaagctgggagagtcacatatttctgctttggaaattttatattatagtttaaactatctgaagttgaggaaataccttcataattattctgtagaatatttttggcattacttaagttgaaaggtgcttttcaggttggtagttcattttctgcatagtaatttaatttcagaaaaatttattagatgggtagacctcaagttaaacaggataaaagtggcagttatttatacataagacctttgttttgtgttaaaagttttattggtgttccaacttgacacaactctagatatatgtgagaagagggactttgatagagaaaaatatctctataagattggcctgtaggaaggccagtagtactttttcttgattatttattactgtaggagggccgagctcactaagggcaccttcctctggggcaggtagttctgagtgccataagaagcaagctatggccgagcaagctctggggagcaagccagtaagcagcactgcttcacagtgtccgacttcaggtccggcttccagacttcagtcctgttgagtgtctgctttgacttccatcagtgactaattgtggcttgagagttgtaagacaaactaaacctttgactcctcactttagttttggatatggtattttctcacagcaataggaaccatagctataacaatcaatataccgtatctttattgagattaatcatctctgttaaaatgtgtcttactttggtagaaatagattgagtcatcagatttgcttgttccaccacaggatcctggatactgggtgaagattcatcacttagaatacacagatggaggaatcctggatccggatgatgtcttagcagatgttgttgaagacaaagataaggtagatgactctgaatactttcttcattttcctataccaagcagcatattttcaagccattcaatttcttaacaaactcatatgtcagttattattaaaagataccatctgttttggtttcacctggacagctcataaatcaaagttcttcatcagatgtttgcctgaagtttgtcgaagtttgggaactttttttgtggtggcctaattagcagactcttcattctcaagagctcccaatacatctcaataaattagtgtcagctacagaggctgttggagccactgctgctgttggagtttattccagacagttgctaaatattcatcttaatgcctgaggttggaacgtgttttgtgttttatactggataatatagtagggtatggatgactcccaaagagccacagagtagatttttctcaaagtagatggcacactgtatcctgtgtatgtctttctttcatgttaatcctcaccctgaaacaaaagaaaagcattgcactgagtatgttgaatatttaggaaattttaaaactgttcttttaattatttgggaataattcatcacaaatgtagcattttaatggaattttgcttcttattactttgatgaggtataaaaggaaagtatcccatggcaatatcctagattattgtcattgaaacacactgtttaatatgagctgtgttgtccttagaaacagaactgcttccaagatttcttctctataacattagcactgtttatttttatttgtagcatgtctctctctctctctctctctctctctctctctctctctctctctttctctctctctgtgtgtgtgtgtgtgtgtgtgtgtgtgtgtgtgtgttacgttaatatttgcaaacatagtcttctattttatatttcttttgacacttggcttgacttacttcatatggtagtcagccacacagtaagcaaattgtgtttctaagtagattgccaactcctagaaggcaggggctgaagatcctttcctcctctgtatttcttatgttaagatatctggtaaggcatttaatgaccgttcttttgttgtggtttcattttagctacttagattgaccatgaaatcaagaacttccctcacctgagcctccagagtgctgagtttgcagcctgagctaccgtgcatagctacagagtgtttcatgatttcccccttataacaccaaatgatggccattcatttgccttttcccagttcactttctgcttcttccctgggaacaccttccttttttgagatagttgagatatttggcttgatttttaataatgaaggccgcctgcatctcaaattccactgccagtgtgttcatacaaaaagcaagaaaatgctacattaaagaaagggcagaagataccggctcatcctggccttatttcaaatcccatttcaggaagggaaattctgttaacaatatctgaggagatctgtctgatgcagcactttcctctgatgcattctttcaactgtttcctcaaggccttttcaaaatgtagcttgtatcttagacacagaaacagcgttattatgtgtgtctttttgaaatgggacttaacaccactattaaatacggagacaaggacacagtcagctaagagcctagcagaggatccatatatgttagctacagctacagctttcctcttagtgcacattcatggctctccatgatgcctgccattgtgctacacaatcgataaggatttgcacttttcgtgttgcctgaagaagaatcactcaattttcttctttttgttaaaaaaggaaaaaaataatcagtgaaaaagagagctttcttatatttcctggaagcagagcccaccaaacttgtttctcttacttttagtcaattcacagtaagtagtaatttcaactgatggtttgtggacctcctgttggatatcaaacctgctcaagaaggctggaggcacagttgggcttttatgtgtaaattacttggtgaatactcattcacagatggaatatggacagagagcaggcacagagaagattggctgggtgtgaagactcatgctcaagtcataacacttgcattcctgggatggactacctacaggggaactggcaatgagggctgtagataggctggaccaagtaatggagaagccaagatcccaacagcaattacagtcccaaagcggtgtcagctgtggttgctttgctttcggaaaatcagtgcagttcaataaaggctagaaactagaggtggaatgatttgatgtaaaattggagaaagatctaattcatttacttagtttgataaagagatgacttctgaatcccatggtcttgttactcaataatagactcttaaaacagtaactcacattgtgaattgttggcatggttaaaaaagacaactacaacataaaactatgtaaatatgaaagtatataatttttatgaaaattgaattccttccataaccatacatacatatgtatatatgccctagccctaacctccaaccctaaccctaactgtaatacatatatacacatatgtgtatatatatgtaatatatatacatacacacacacacacacacacacgtgtgtgtgtgtgtgtgtgtgtgtgtgtgtgtgtggtgtggtgtgtgaagtatagtataccatcacagaaaatttctttatttacagctaggttttacagatgggaagtgctaaacttgaaggcaggccaggagctcttgacttgcacaactgggccttgacccttgaataccatgtgctgtctcatgttcaagtactacactatcagctcagctttgtctttgtgtttggtataagtacttgttagacttttgtctgccttatcctcaggttcaacaatttatttaacagcaaaatgttagttagtgtagtgttagtgtagaagagttatgtgtttagtgtcccttgctgtcttttaatgatataatactattattatgatattttcatgtgcatgtcttgatttaagtactaagtgtttgagattaagtactgaaacaccaaagaaactaacttaatgcatactttaatagtttcaaacaaatcttataaaatttgttttaaagttatttaattgctcaaaatagttttataaggagatacttgattaatatgacacaatatttggattaagatattattattatgtgagaaatgaaatgccagcaggactaaatttagaacaggaacacactgtctgttaacatactcagcattcagggatcttcacatattcaaagggagactcttgtgcacagtgaatgaactagtgacctagtcagacacactgccacttgctttctcagagcactctgttgccctctggtggatggcacagtcacttagaagccagctcagaaaacagtttgaaatttgacactcccccagttagaaaatgtcttttgtctttttagtatagatcccagatcagaggtggatagtaaagggagagtttacacatacatatctctgctctcttaagtttttcaaaaatggccaaggacactctttgcattcataaaacttgtttctatttttggctttctcaacttcctttttactgactgaaaggttgatggctgattgtactaagatatgtgtgactttagtgtgtaactagacaatccatggtgtatgttgtgttttgcttgggaagtgttgttgctacattaatcctttttaaaagatactgaattattatatatatttttttacaatcctgggttatttttgaacacttaatttattagtgatacttctaccttaacataaaataattgttctaaatctattatattttcttaaataataatatagtaaatttaattctggaacacttacattttgaagggatcttgaagttatgatgtgcctagaggtttaaacagtgcttcagaaagaaatatggaagcttgtaggggaggagagaagtgcttctgcttacaaggcccatggcacgggcctcaagatgactttctgctagagagtaataaaattatagaattttagatccaaagtatactagtcttatggactaactttaacatcttcctaaacaggaagtatctgaaccagggaagtctcttggactcctggacttcatgactgtggctggtttctttccggagtccattttagcatttcctctttggcattctgatcgaagctgctgttgagggccgacttctgccaggggcaagccctatgttctcttttctctcctgtcaatagaatatccttcttctagtcttgaactaataagttttttcaaagtcttaatcatctgagcacagtttatttttaattcttttttcgtgttttttatccccatctttgcatttacagagataacaattttaataaataaaagtccagactaaggttatggcaactgttgggaatgatctttgttattggttttcttacctgaatggctttcagcaacgtagcccctttctttgtgtcatggctttctcatgggtaattgaagctaaaacaatgcagtaattttatgtgatattatatcatgtgtgataaataacctagccacagtgtgaagccacatgctcaggagaataactgttaggttctagtgtgttacattacatagtaaatttagctatcaaatatactatcaaagtaaaaaagattggatttgcattattttaaatgtattgcttaaagcatatcccatctaggaatgtggttttcaatctgtatttacagatttagaatctctggattcaaacagctgtgaatcagaagtaccaagaaaagaattccagagagcatcaacgacttcacttgtgtttgccctgtgtcagggctacactgaatgtgtatgtaagcacaccccacctcacaggtcctcaatctctctttaacatttgttccaccattgttatctggaagcctaggatggttgtccctgctgttgggacacattggttttacctccccttggctttaacacatgatcaatacaatagctgcatatggaatagttatgctctgttagctatgcttagtaatgtgcccatgctttaaaatacatatataaagtacatatgactcatatgcaacttcttgtcctgttagggatgtgggcatctatccatagaggttggtgtctgaaggacatcctgggacctgtcactgtggatgataataggcatttgtacttgaataaagtacaagtctcataggttctgttatgagtccctggaatacccacttccccccagctgtctgaagcatgctaaatggcaacagtagtaaagctatggtttctttcttacatgcacctcctacctgttctatacttccagtgttttacttgtttagcatgcctattggtccttgtgcctggtctctgataatttaggacacatacttacatatgtatatgtatatgtatatgtatatgtatatgtatatgtatatgtatatgatgtatatgatgtatatgtatctatatatgcatatatatgtatacatatacatatatatatatatatgcacacatatacatacacatacatacataatattggttgatagttttatccattgcttgtttccagtgcctgtaactgtgcctagcccttacttagaattcagataatgtagaaaaaataaatgaacactttccaatgttaaataatttgatcattcagaatttcagttttctcactggtaaaatgggagtggtaaataatcttagtgtcacagggaaagatagaagttgtgtgtgaaaattcaatgaaaatattaaagcactatacacataataaggatatacttgtaccacttccttattttttatcgatctttaaatatccaggtcaaactattttttagcagtcaatacttttagatcacttcaatcccaagtggctttttgagcactctaacttcatatacataattaatactttaatataagcattaatatttgacccttggcattttgaaaattttaatgtaagaaggggatggttttttaaagattattttttagcaccttgacttagtatgggtggtggtgttgttgtcgtcgatgatgatgatgatgtttttgtttctttgattggatctcaatatgtagaccaggtttgcctgtgaattactatatagactaggctggtcttgaactcacagagaatcacttgcctctgcttcctaagtgctgggaccaaaggtatttgtaccacaccctatttatacttttgttttaataaacatctttggttttagtcactgataaagttgaaactaaagttgagagtttctatttcgctacctttcctttctaggaacctatattgccccttaaatattgcagtaggaagcagtgtgcaggcatgtaccaagcccagaggagccctctgcattaatacttctgtgaccttactatggcaaagataaatggttttgggagatagtaactacagctaccataatcctgatgatggccaagtcaaatatggactccccagtgccttctacagtttacctggttggcatctatagcatgtctatacgtgtacacgtgaatgagacgcatgcaggtgtctaaccgctgtggttcagctttgcagtgctcaggtcagggaagcaagagttccctcaaaggacaaaaggaatcatcaggcttgatgctactgctcatgcagctgcttcctgtagtacagcaaaaactaaataaaaaatgtttgcaagaatgcagataggacaaggaaaagatccagtcacacttgagatcacaataatgctttatttagagccaaaaagcaagtcagagaaaaagagtcaaggaacctagcctccttcaccgtacagtgtgcccttagccatacgttgtcttgctgcttactgctctacaaattttctctgtcacattagtttctcttgatgccacctccataagtatatatctatgctgagattaagggttagtcagtctctacagaaacatgcatgttatgtaagttacaaattacaattgccctatgctgttttaaattatatcaaatagaatactgcagggtttacaaaacaccctcttttaaaatacaaatacctgcaggggttaattggtaacccatcaattatgaattaattagactgtattccactaatacctagctggatttaacctcgtcagagcttgcagaggactggaagttggtaggatggttctgtttttcttgatattctagcattcctcattacaaactttctctcttataaggtcaactatcactgctccaactgccctgaactaggagaatcccaaattaaattagcattaacacttaggactatgttgagccaaataaatcacttttgtttttagcagcactaagaagtatttatggacgtttccttgtagactggaagggacctgccatgatgatgtgagtagattaagtcattcaggaacttgagagacgcttagaaggaaggctgcctgtgtcaaaggacctcagtgtcctatcaaggagatactcaggaggagtcagggtagagaagagtgggatgctccttagaaactgattgagtaggacgagatactgtcagtgtcacgttcaaacagggagctgcagacagtcgtggagggagggacagtgccttttcctcctgatgacttgtaatcttgaaaagtatgtgtgtgtgcatgtgtgtgtgtgcatgtgcgtgtgtgttacttaatgaataaaagtagattttaagaaatgggcagatgtgcttttaagagttgcaaatgaggaggaggggcataaagaataacatctgttttaggaaagaagagacctcaaggaatgcattaggaagttataaaaacaaggcagcaaaacacactaaagccctgatacaaagaggacacgtgtgtcctgaaacaggccaaagaggatgctgttcaatggtgaaaaattactcatggagcctagcaagctgtccattttcttggaagtttcatgaagacatatgagctgtgtaacagtctgataggagtatcatctggtaggctttgaatatcatgtggtaggctttctacttgactctgactggttcttttgttcctagggctccaatattttatattattaataaactgcactgagacaaacagacattaaaggctacccttgcaattgaagtagtatttgtaacacttctatgaggtacttttttcaagttttgtataaatgcctgaatttataaatacattttaataagcaagaatatccaattcttttactcttttacattatagttgtttaaagctctctaagttatgaattttttttgcttaagaagagagtatgccttttccattataggaatctagactcttcacttagggaatcatgactggatttctgaacttaatactgacagtttgaacatttcagcttctctctttagagttccttcttttgatgttaccaatcagttttgaaagatcaagtgacattccccaagaaataaagaagataaccctcctgtgtagacttcaattggagataaatagctcaaagcaagttcagttacaatgtctttaataatgtcagcctaaaatatgctatagttcaaatatagatatttgtgtaatcttaactataagctaattagaatgatgggaaaagagtctcatataaaatgatctttcacagtgcgaatctcagaaatatccagacacataaaacttgaagagtctcatagctcttagtgggtaatagtggtagaacttctagactgacagcttagtgtggccactgtattcaatctaagaggaagctagcatatgatagtataaggcgattttctaaataggtcaccttttaagtggaaattataccaagcctgcagttagcttatgtgaaaatgaaagtgtgtactgctcttgatgatgaacaaaggagggagacatcttagtgcagaacctcaaagcaaaagtctcagaaatggctttggttctctagctgaaagtaccaagagaaagctctggtgtctcagctcccatgtgtggctcaaactccttttagaccagtggttctcagtctgtggtagcgacccctatgggggattagaggaccctttcacagggattacctaaaaccatcagaaaacatatatgtaaagtagcaacaaaataaataatattacggttgggactcaccccaacatgaagaagtgtattaaagggttgtagcattgagaaggatggtaactacagcctagggcctagatccttctgggcaccggctttgaaactgcatttcaagatcttcacagtaaaactcagttgtgtggtttttttttttgttttttttttttgttttttacacttctattccttctctcctaaggtcttaaggtcttcagtcttgaggggaaaatgttatagtagccttgactagggatccattgaggcattaaagaaatattatgttttcctggtcaaaagaatgatattttttctgaccttgagtgaggacttaacatttttgtgtatgcatgtatacacatacatgtatgtacatttgcgtgctaggttctgcttatgaaaggagcaggtgttttttgtctttctcatttcagatcaccttactaagtactatactttacagatttatctattttactgaacatttcatttttctttatagctgagtaaattccattgtgtatctgtagcacataaccattatccattcagcggttgatagacatctggattaggattcttttcttgctgttatgaatagagcaagagcatgtgcaggtacgtctggcaggatgtgaaggcctttgcgtgtgtgtcccggggtggtatactttatccgtatgaaggaagaacaaccctgatcaccgctggttgcttattagtgcagtcattacagaaactcgtatagatttttatcaaaacaaaactgaaactgtttgtcacccagctatacctatggggtctgttccctggactttggaatttctatttttacataggtgaaatatgtgtgactaaactcaaactgctgggatttcccttcatctagattcaatcttatttacatgaagaaactgcagactgttggaagcaaacaatttttttttctttaaaaaaataaaaaagcaaaagtaaactaccttaaaagtttgccagggaaagatgacaattttacaatctctccctcatttgttatggggtcagctgtggtattccagtgtcccctcagaaattatcatctttgattgattgattgattgattgattgatttccagatcctcttagaaaagaggggcctttaggtcctgtgaaggttctatgccccagtataggggaatgccaggactgggaatgggagtgggtggattggggagcagggggcggtgagacggggtgggggttttcaaaggggaaactaggaaaggggataacatttgaaatgtaaataaagaaaatatctaactaaagaaagaaaagaaaagaaaaggaaaggaaagaggggcttgactttatggctctcccttttactatttagctatggaatcatgatgaaaagttgggtgaagagatatcatgatgtccctgatgtagcaaaggcaaatcagaaactcccaaggagcaattggccctggatggggtggttatagaaaatttcctgttctccaaggaaacaagaagtccaattctttagacactgggaacatttgtgcttgtgtgtgacacagtcaatgtgtctcatacccaagtaatgtaaaaaatgttatcccttcttactatgacatcaaaaccataattgttcttttctgaagtggctagataacaattaaacctagggttctttgaagcagctacagaactttccttttttcccctcaaggacaaagcataatttggaactgaggtcaagtggatgagacaccagaagaatttgtaaaaataccatgtaaatattgaggtgggtaaatggacttgattagtaagaagtcatttgaagattcaatgacctggtgtttgactatttttaaattgctatgatgaacatgaagaagtaacagagaaaaatgcgcacaagagagtgatagaaaaaatgatagagcggtgtttctttagggagacctgatggcaggggtataaataagccacacaaacatctctttcccaaataggaacttctatttaagtaagttaggcatttaattgtaatgaccgaacataatgaaggaaatatcctctgctcaacagagactttaatatgaaataaattgcgtgttcacatatagtgaacacacaaagcaatactacttagacaaataaactttaaacattagagttgtgtgcacatttttatgtgtatagattgaaacctgtgcaattttcctactttaatattgtaaattaatatttaaatagaagagaacttttaaaatcttgaaggtagtattccttaaacattttctattgtttggaagtcagaagctgaaaatgaataccagattgattgaaaagagcatttggcctaacacattccctgataagtttaatttaacacactgctttggggttttaaaactaaatatttccctcttaaatggagaaatgtttcttgtatgcaagtacagtatctgatagcctaaggttgtcaagagtaaatatgggtaatttaagatttagactttttttttaatggaaaatgtggttttgaacagtgagaattattatggtagaaatacattgggcactgttttgacagtagtgtacttcttaagaaataaacaccacaaaggctttaaaattagctagtgtctccatataaggagaggaatgcaatgctggattgagtttttgacacacaatcttttattatgacatcaggttgattaatatctcagccaaatcattgttttaaaatatcttcgttctctgtccattagacgtggagcagaaagcacacataaaagctggcatctgcatcgtgctcctgaccgtttactttggggcaatgccagtaacgtggttatagtgtttacagtctgaatgacttaggaattcatctcaggcaaaacacttacaagtctgtcctgctggagccaagctgcacacagaatgttggataacttgttaagaataaattgtgaaacacttttgagcacaaggtgcaggtctaatttttcctttcttttctttaactttaaaaatattctaaaattattacttattaaatgtcaaaatgctttaaatgtagaacagtataagaatgagattactcagctcatctaatgaaacccagccaaagtaattattacccgaagatgggtatatgcatcccttttatgtgcataattaagaaagcacatatataatgaaattaatccaatttttgaattaacataattttgtcattgtttatattcagattttatcacacactatttgtttgttggtttgtttagggtgtatgtgtgtctgtgtgtgccacatcatgccggtggatatcggaagacatcttgtgggagggaattgattctctccctctaccatgtaggtcctggagactgaatcagtcatcaggcttggtgatcagcagtctgcctgctgcgccatcttgatggcgtgtctattgtttgaaagatgatttcagatatggacattgcatttcatgcccgtttacacttttagcatcctttctttgctttctgtttgaagaatctgctgtgattcagaccaataaatactctactaattgtaatattaaaatgatatatttttcagacaaaagttgaagacttaatcatatttttgagtaggatattggagtggtgggtaaggtattagaggaacagcagggaatggctggcatatgaacagttcggttcatgtatgaaattagaataaatagaacttaccacacaagagtaaataaaaattttttaaaacttatagaaaattgttttttttaatgttggttttttaagaatcttaaatatggcgtggactcctatcaaaatcccggttaaatgaacatggaggtgatcatgctgtgcaggggttggaatagttctgatcactgctctgatgctgagtagaacgagctccatttcttctacagcaccattagtaaaatgttaggtctagttgctttttaaacatttttccttgaaatacacaggagagatttaaaaacaaacataatgtcgacactatgcccctccttagaattgggaacaaaatacccatggaaggagttacagagacaaagtttggagctgagacaaaaggatggaccatctagagactgccatatccagggatccaccccataatcagcttccaaacgctgacaccattgcatacactagcaagattttgctaaaaggacccagatgtagctgtctcttgtgagactatgccggggcctagcaaacacataagtggatgctcacagtcagctattggatggatcacagggctcccaatggaggagctagagaaagtacccaaggagctaaagggatctgcaaccatataggtggaacaacattatgaactaaccagtaccccggagctcttgactctagctgcatatgtatcaaaagatggcctagtcggccatcactggaaagagaggcccattggacacgcaaactgtatatgccccagtacaggggaacgccagggccaaaaaaaatgggaatgagtgggtagggaagtgggggggagggtatgggggacttttgggatagcattggaaatgtaattgaggaaaatatgtaataaaaatattaattaaaaaaacaaacaaacataattttaatcttgaaagtctattttgtataaatataattttgtacacttaacttttcctttattaatgccacagattaaatctctttttacttttatttattatttaatatggtattattaattttctgagagtttattgggtgtattgtggtcatatttacaactaaccactcttcttgggagggacccttccatcctctcaacttcatatcaattacattatctttttcctaatctgaaaagaaatgtgtggggcatgacttcctctgaagtagtagttttaaaatgaatcgttgagaatttcatatatgcatatgatatacttctattcctgagtccaattagtgccatccatata

SEQ ID NO: 978 - DNA, 555 bp, Mus musculus
atgaaagtgacagtgtgcttcgggaggacgggcatcgtggtgccctgcaaggacggccagctccgggtccgcgagctcacccagcaggcgctgcagcggtacctgaagacccgggaccaggtgaggggcgccgcagggggcgagcatggggcgcgaccaccgcggggctcacttaaatgtgaagctaggccatacccacacaaaataaagagcatcttgtgggaagttgaccgagtggttactgttgccactgaccaaggagctgctgaggccctttcaggccaacctcactggtcttggattatcgaacttcgagctgaaagcacatttgtagaggatcctggatactgggtgaagattcatcacttagaatacacagatggaggaatcctggatccggatgatgtcttagcagatgttgttgaagacaaagataaggaagtatctgaaccagggaagtctcttggactcctggacttcatgactgtggctggtttctttccggagtccattttagcatttcctctttggcattctgatcgaagctgctgttga

SEQ ID NO: 979 - protein, 184 aa, Mus musculus
MKVTVCFGRTGIVVPCKDGQLRVRELTQQALQRYLKTRDQVRGAAGGEHGARPPRGSLKCEARPYPHKIKSILWEVDRVVTVATDQGAAEALSGQPHWSWIIELRAESTFVEDPGYWVKIHHLEYTDGGILDPDDVLADVVEDKDKEVSEPGKSLGLLDFMTVAGFFPESILAFPLWHSDRSCC

SEQ ID NO: 980 - DNA, 1093019 bp, Homo sapiens
  misc_feature (1)...(1093019): n = A, C, G or T/U
tgaggcccaatcttgggcaatgaggctctgttccattgagggtaattcctggttagtggctcagatgagattctcagctgccaacaataccagcatcaccggatgagtattcagtcctgaagggggagtgggtctgtgtgattcactgtagcgcacattatactatagtagggtaggggtggaaaaggtgtaaggcccttcctcacccatcgtaagggtcatggcctacactcctacagtaaaagacagattaacaagagaaaagcataacaaatttacttaatcaaagttttatgtgacacaggagccttcagacatgaagactcaaatacccagggaaaactgtacatttttatgtctgaatttgatgaagaataggcaaacagccatgtataaatgtaattggacaaacatgggattaaataatggtaataggctagggaggcagggacctagcaagacctgtctgttcagattcttcttggcctctctgtgtagagttccttccttctagctatcaggcaggactcctctggaacaaaagtcttatgctctactaccagctaaggtagatcagagaacttctccatggccagttcctatacagaaaggttagagtaaggggaaggctagagtcgtatttctgggttttatgacttactttgggaaagatgggttctattttctatgacccaccacggggaagaggaattctggtttctatgacttgctttggaggagaaagaggggtagggggcaggagataggagggcagcagaagatcagagagagagagagagactttgcttctgaaactgcttctgaggccttccaacctcctttagttcaaaggactagcatgccaaagtgccatactttgggatattgttttctgagccccagcagtagggttcaaatgctcttctggggagttcctcctaacaatatgcctctcaagaataaagtttcattgtctctggtttctgcctatggttggccatatttgcaaccatcaaatagttattcaagaaaaaatggtttgcttgtttcttctggaatgcagaaaagtcccaggccttggctctgttcttatgctgtatcttcccatcctaaatgggtgtttccttggtgattactctagtttagctcataaagtgtttttgtttttggtttgtttgtttgtttttgggacagtcttgctctgttgcctaagctgaagtgcaggggcacgatcacatagcttcctgcagcttcctgcaatcacggcttaccaactcctaagagccagtgttcaatttcctttcttcaagaaaatttattcaagtttccattgacttcccaattactctagctataatccagtttattgtcagtaggccctgggttcattctggcaaaaatatatgtaaaagccttgggtccatgacttattgtccattaatttatctcctcttgaatttacttttaagttctttttgttctttgctagaataagttgctttggttttaagaatcagtctcactcaaaataatgtgacaaaaaataattggttagcaggtgactgttattttgacaatatttgtaggttagtactggggtcaatggacacttgaggcagctccaaaagtgcttttatctcacgagccactgaaatctcaaggttttggctttttgattccttcaataccaagcagccaatcctcttctattctgtagcctacatactagaaggagccaatctgtgtggcttagctgatcaccaatgactttacttgcttttaatatcagattatatcaggggttgactagcctatgcatggctgtctttgagtcagggaccactcttagtcttatccatagctatcctagtccttcagcatatagcactgcctctttgagtaaggaacttgcaacttaatgaaacttattggatttggtagaggcatgaccgacatatgctactcattgttaataccatcattttgtgggtatcacttgccagaagttttatatacatggtaaacggatagttatttttgtttgctgtgaaattgctcttttcaagtcttgtgagacatgttaaagtccatatataacctatttattttctttattctatttatattctgattatataataaaagagcatttaaaaagttgtaacatatacatattaacaagtgtgcacacgtttgaaggaaaatatggattaattcattttttgatattgaaataaaattatacttattcatgtatacatgtggcaaagcattaatggctgtatcaaataattttatacaaatgaatcataactgtaaatcatatagtctttcaaatcttccattatgaattcatggattagaattcatttagaattcattatgaattctaaaattatagcatataaaataaatgaaatattatcagatagcacgtagtttgaccgcagcatttaatattaataagatttttggatttgctgcttacagtactatgcaatcatagctaaaccaaactattaatttgagttgataactgagcaagagtagaaatttttttatttcttaaatgatgacggaaattaatggtgattttggcaatcagggaagagcttatatttcactgttaaaatgtagaagtgctttctcttgagaaaagcatgaatttagcttagtctgggaaaaaaattcatttttgcaaatataccagattgaattggaaacattgttagtgcttctcctaaatttaaaatattagtgagatttaaaatctctatttatgaatcgttgtagaagcccactaggaaagaccttctgggcaaattattaggtttgttcccaaacacttccttgcccttctccctgctaattggcttcccgccagtcctgctagcactacacactggtagaagcatggaagggggaagaaaagaatccagggggtgggtatttgtctctcgtcttcttttctctctccttctctcccctggttgtgttttctggctgtggctgcaactcctcctgatagttgcaggtcttctctggacaggctctcagctcagtccttgctttggttttagctcctgccaggcggcccagcttctgggttctgctgacattctgcatcctccctgcatacagccagccctcgccctcgagaaagaagcagcttcctgctgtggctaatctctgaattgccttcccatgtcttgcttggcttcccagccctttcatcaacagtgtaattaatttctcgtattcaactccctctgtttgatacagggtatgttttcagtttgcctgactggaccctgaatcatacggcatttctccactttccattcatggaatagcagactaaaaggactttacattaagcaataatacagtttactactctggataaacatacgtaaaggcagagatattttacaaatatgtacacatgtgacgtttcacttaaattcagcctgatatgacttactccaacatctttcttttggattcttcccaaactcaatcacttcctactcaaagtctttatatataaagatgtcaaaataatgactatcaaatgctgttttatgcatatgactactttgttcaagcatctagaagctatctctttggtgctttagatcccaaatccttaatctatttctcacagctgtccctgaatcattttcctcttcctgaatctttctagccttatatcctatgttatgctctgatgaaacctatctgttctggtcagacactcttgctttccattcttaacattcaatttcctgttttctactgttgtgtcttcactagggcagcagcgccctttcttatcacatctttgacattgataataccttatagagaataagaataataccttatcatcattaacaattcatcattatacacatatgtaacttctccagatctccctctttttgaatattggcattttccaggattctagtctaagccctattgccttttcatcttaaactccttctttggatgatctcttctcttctgacaagttgagcttcaatctatgacccctgaatctcaatatatagtctttagactttctcctgagctccaaacttgtatttccagccgactaaacatttttacctggttgcttcgcgggcacatcaaacttagaatgtcccaactgaacttactcttttttttccctaacatctgcaaaggcctccccactttccaacttccttagctttaactaataatgtcacttcttcttcttcttctttttttttttttttttttttgagatggagtctcactttgtcgcccaggttggagtgtactggcacgatcttggctcactgcaacctcctcctcctggattcaagtgattctcctccctcagcctcccgagtagctgggattacaggtgcacaccaccatgcctggctaatttttgtatttttagtagagacggggtttcactatgttgggcaggctggtcttgaactcctgacttcaggtgatccacccgcctcggcctcccaaagtggtaggattacaggtgtgagccactgtgcccggccaattatgtcacttattaactagttgtctgaactagaaaacaatgtttcttaatttttccccaaagcttaccatcctccacctatcacaaattcggaaagatatccccaatcttcccctcttcatcatctgtattgccttagtcttctaggaggccactgctgtagacaatctcttctacctcatttcctgcctgtcttttggctcattaatgctccaggaaccaaactggctttttcttaattcctaaaacacatcactcttggtcttatctcagagatatttgcatttactgttcaccttttctctgggttcttcccaaagtaactttttttctcttaccaatccaatataaataggttctcccttacccaattattctctattacagaaccctgctgtttgtaccttttattatactttataacaatgtgcaaatattttgttcatttgattagtcatttattatctgtcttcctcactagggtctaagcttcatagtcactttgtgctcagttacgttataggtgttgaaaaactactgttgcattagaaaatgaatggtggattgaatgaactaagatggggcttctgcctgtctctcaggtcctctgcattccaccaaacacaaatccgatcatgttactgtcctgcttaaaatcctttggtggtttataattttctgcaatagtcatttaaatactcagcaaacttttttgatatttacaattgtggggagaataagtgttcagaatcttaagtttaaattgaaactgaaggaataggtagaagaatgaacaccataccagcacttcctagcccagtgagagttcaaagccttgagccatggctggctccggtagctcacacctgtaatcccagcactttgggagctcaaaaaaggcagatcacttgaagttaggagttcaagaccagcctggccaacatggtgaaaactcgtctctactaaaaatacaaaaattagccaggtgtggtggcacacatctgtaattccagctactcaggaggctgaggcaggagaattgcttgaacccaggaagcagaggcttcagtgagccaagattgcaccactgcactccagcctgtgcaacagagctagactctgtctcaacaacaacaacaaaccacaaagccttaaactaatgttggtcaaatatctaatgttataaattctgttaccagacagacagggaagtgaagaaagcactggactatgaccaagaggttctgggttctgattctggctgaaccagtttccttgacctctctaatccagtttcctcatctacaaaatgaggatattgtatcaggtaatctgcaaggccccattcagctctgtaattctgtgattctcagatactagattaaatgtttccggattgctttttgagcatcaaatgaaataatatgtagattgtgaattagaatacacatcttaacattagttttgctatggtcctggcaccctcattacagagctagttacactttgtctccagcagttgtgtacttgatgtgcagtttctacgtatcatttgaattgtttcactttgcaagtagtttcagactcaatgaaaacaagtgacatttagaaatgctagtaagtggaaaaaaagttgaaagagggcaatatatcttgcctactatgtgttgagtgctttatgtatattacaccttaaaatagagttatcatcccattttacaaaaaaggatagtgacatatgactaagattacttagcttatcactgcgcacacatgacttacacactgaaatgtccaggcccaaatctctctctaccttctgtcaattacatggatgcccgttcacttcctctccaagtaaagggatataaatgagaatcagaaagtggcctttggtaaagtaagcagaattgaaaagagaactcttggttgcacccttacctcaaagctatctttggacagctgagcttgctggagagcaccaatgaccactgctattggccctctttctaacagtcttctacagatgcctagaggtgaaaggacttggtcctatccagagtagggcctattcctgtgcttaccgttaatgggccccagtgagcttcagagaaggagatcacacattgaggaaaacaactaattaataatcaaaattaacttaatataacagcatcaggacagtttccttgcttttggttgctcattttacttttttttttttttaagagatgctcatttcatgattcagctccttttcaagaaaacaaacttagggagaatattagtttctacagagtagaattcaatataaggaggggtgatatagctgtaccatttgtgaagacttgtgagtcttgcttataggatgggcaaaaaatggaccttccaaaaagccggtggcccataatattccccttagggtgaagagcattgttatttgtgcatccaggacagctacagaaataaataaccaaaaatgtcaacaaatgaatgccatgcagtatttagagacaaacagctctaaagaagaatccattcttgtccagttaaacaataacccagaccatttgcttttaaatataaaagggaaaaaatgaaaacgaatacccatttttctctttcattatttatgcaatcattcttgcacctgctttcagaaggaagcaaagaatgtgatcttttatactaatgctccaagggttttataaataagttaatttaattagtaaaattgattcaatttttttgtgataaatagtacttgctataaataattccttgaaaggtaaaaatattttgtttaacagtgcaaaacatgagactcaattactggtcaactatagattaaatattatcattcttcattcaatgtatacctgatagtacctgacattttagttaggcagggtggtttaataatattggtcaggattattgttctttctctgtataacacttctttactggctactccagtacttgctaagctgttggataacaaatggaaaaatatcacatcacaggcatatttatctaccgagcaggcaaaacaagaaaatggaacccgggcttggcatcatctagtgttactcaatcaaggcaaattatttattgtcttctgcccaggaggtcccatggggcatgaaatattgatttaggaatttgctgggcatgaatgactgtgtgttgcaattgtgttcttttttttaatcccttgataatatatggtaaattgtttctatatatgctgtgatgaggctgaataacaaattaaacctggctatttaataaacatgaaatgtaaacactaaactcttcatactaacttagggctataaaaggtcaccccatggtgtacaggattgcacaatgcactgttcacatccttgtctagagtcatctcttccttcatctcacaatggcatggcctctgctgcatcccctaggtcccgattccaacttcccaagtggaactgggagagccggagtgttctttatggttcacttggggattatcaaagccaggacttggggtgggaggttctagatattgggaaggagctaaagctgggctaagagggaatttgtggcgaagaggaggagctattcatgacccaagcagaagaaaatgagtctggagcaactgtaaagcaaaaagccacgatgcaggaaggatggcaacatgcaaagttatttcatcagtggaaaatctttgctctgtaccattctataggtccatgaaataccgaatattaaaagtgagggccacacattaatgcacggcatcagtatctatttgtttgtttgattcactcattggtacttctcatgtaagaaacagcacagcagttacgatgaagactctggaatcagatgacctgggttttaagccagcctctgctactttctaagaatgagattttaactaaatcatttaacttcctttggcctcagctcctcatctctaaaaagaggataaagtgtctcctttgaagagagctggcctgagaatggagaccacactgaggaacagatagagctaagagctggacagagctagctggcccctgaggacatagtttgagttcctgctttcaaccttgcctcaatggagtgccctctggatcttctgattttatgaggtgatcaattctgtctttggtttatttaaatgtaaattagtttgtattggatttacaaccaaattacaatggacttggtttacgtgatcctcttggtttgccactgactttctatacatagaagacaaccaatatatacttactgaatgtatgaatgagctaaaatttatttttttaaaaaacctcttgaaacccatgaatttaatctcctctgcattatcataccatcctaggcaattcacgttcaatttaagtgtgtccacataggagcacatccttctgtagagaaacacatgatgcagccctgagggtcttgctggatgaactggatggctaagaaaactgcagggagagaccagagattgagctcagaagacctgagttcttttcaacagaactaacaccatggtctgctcagtctcttgacctctccgagcaccattcttgatgcacaagatgcgaagaataatatctacctaccgggtagttgttaagctcaaaggagctcatttacatgagagctaagaatgaaactaacgtaatttgttggtttcccccacatattcccatttcaattggtgatggatacacacctgccaaatcatgagcctaagggtgttaacttttttttttcctaataaaatgcacaacggtagtcgcattccagaaggctatgtgtcaacacacgcgatcatatctgggtcttgggtgtgacctttggccaaatactcagtgtcctcgagggtctgtaaaaggaaaagtttccactggcgcgttctctccaaggttcgcttcagctctgctatcccagggctcctgatggcagcggcacgggctgtgcttaaggcgagttcctaacaggccctcggggcactcctgcatctccgcacccggcagcctcgccccttgggtgtttttggtgggcgtgactagaagcacctgctcctgggctccttttgcatcttgctgcagtcccctcctgtgaagggcgcagctctgcagtctcctcgctcttccctcgggtgttctttctgagatccggtttcaatcctcgagcgtgtagccctcaggtccccttacaactccccagagctccgtgtgcatgcgtgcgagagggagagagccagggagagacccaggtgacgagacgaggctcccgggctccagttactggcccgcagggccggggcacgtcgtcgcccagcgtgcggcggggcccgggagcgccgcggcccctttaagagccgggcccaggccgtcgccgggaccgcaggagcccagagcgcgggcgccgcagaggagttgggagccggcgcaaaagtttcctcccaactctggccccgtgcgccgccgccgccgccgcccactccagcccccggcttggggccggccctgccaacgccgccagggccagggccagggccaggaccagcgacagggcagggccggcagtttcgctttggtgggcgcggagcagccgcctgggccgggcaggagtaggagcgggaggaggaggaggaggagccgggccgcggagctgccgcgtcccgggccgccgggcacctgggaggtaacccctttccgcggccgcccctccccgattcccgccacctgccgcctggccaggtggaaggggcgctgccgcgagcctccgggcctcagggtgttccggggagcggcgccccgggtctctgggcccacccgccccgggcgtcctccgagagtgggggctgcgcccgcggggtcagacacctgttcggcccggcccggcgtggtcgccgggggccaggatgaaagtgaccgtgtgcttcggcaggacgggcatcgtggtgccctgcaaggagggccagctgcgcgtcggcgagctcacccagcaggcgctgcagcggtacctgaagacccgggagaaggtgagcgcggcgcggaggagtggggcgcggctgcagccaaggcacctgccaggtgcgacccggtggcgacactcaggggatgcagaaaacccaggggattatggggcactgcctgtagctgcagctgttgtctattgctaatatcagtgatgtgggtgtctttgggtgtttgtgggccttgagctccgagggtcgtgagtggacctgcagcattggaatctcttgggagcttcttagaactgcccaatatgggcagttctccaaacccaccgactcaggatctgctctttaacgagatccccaggtgattggaatgcccactgaagtttgagaaccactggtttagaacttgtttgagggaacgtcttaaaaggtgctgctcacctaagtgtgatttttgacccattaaggcccgcctcacttaggctccttggagttagaaagttgattgtgcaagtgacacatactcggaagttacaactgatggggcctttggagtttcagccttgtgagctgccctgtctcagtgacttgggcaggaacacaggtgggagcatgctgtttgcttagccaacctgtctacattttgagtgttttcagtttaatgtcacagattctatgaccatttactatgtgtgtgggctgttgtcaggtcctgagtgactattaaaatgagaaagacgttcctagctctgtagctgaagtcaggaacaagtataaattaagtgacaattttttttaagtgtgcaatacatgttgagaaaatatctggcactagaacttatgccaagtatttgggtaacattgggcctctgggacttcctcagtgaaacttttaaaggaaggcattgaataaccttttaattttttgaatcttcacatggaacattttgtatgtcccaaatgctcctcaaacagggcaagtcacaaattcttgttttagcggccaatggttctcttaatatttggtctcgtgccatgtgactaaaatagtgggttggtcaatctagtgatggaaaaacgtaagttttaatttcttttaacttcttatcggttatccaaagcataaaagtaattgtttcttacaagtgtatagcttaggggtttaagaaaatacttgcaccttctttgcctccatgaagaattattatacagaaaaaaaattcagctctggacagatacatgtgcatattgctttggatactcaagaactggaggagagtacaatgaaaggtctattaatatattaaatataacccctaaagatgaactctttactgatggaattgaggtggaggagggaaaaaattaaagtggtttataaagctgtgtgaaaatcaactgcaatgttatgtgtgtgtgtgcacgtgcatatgtgtttgccattgttaaaatagtgtttgctgtttaaatcatgtaattcagttaactgatgtttaaacaagtaaccaattgtctattaaatcatatttcactaacttttgaaagtgagctaagattaatagtaacaacattactccagacagattattgaaatagatctcattgagggattgtcttaccaaattgaagttactttttaactattaaataatttatgccctcaaatcttgtatatttagaagtttagtacagggggctatccaagtaagagataaactacaagcttgtaaataacatgaagagaactaaccagctgatatttaattcactataatttgatcttaaaaggtgttaaaatattgacattctggaatggaaacgtaacttataatatcacagaacaatgtagttgcattgatcagtttactattattaccagacttatatttttctgtttacatttatatattagtgaatgtgacatttaaaggtcacctgcagcatataaatccttcctcttattttcacttttaaaatttcattttaagaagtagtaggtgatgatttttcccctccccaagtattcttctcccatagttttattttaaataatattgtaatcataacaagatttaacgaatattaaatcgtattcataatggcactaaaaggtcaataaataccctaacaaattccatgcttttattcattttttttaaatgagaaaaggccagaaatgtcaaaattcaatttgaaaaacaatgtgtagtaaattcactttctgtaaatcagtgaatttctgcacttcgtaataataatcacactaacatgtaacatgtattgtgcttattctgtgcaggccctgttttaggaacttcatgcttatgacttatttctcccaacaaccttaggagataggtactattattatccccattttacaaatcaggggaaaaagagacacagagacatgacaagtaagtcgtagatttgggtttagaaaccaggaactgtgtctttagatgtttgctctcagccattaactgcatagcctagtactatgtatgttgttatgaattggaatttatccatattgtttgttttttaatgcttgatttaaaaagacatttccatctactaactgctatatcacatcaacctaaaaatagcaattttgcttctggaatagtgatgggatatccacaagtttctcttaattatatattttatgaggtctacatgtagaaaatctagtttctgaggcaaatattgtaggatttgcaaatcaactatgaaaaatattcctcagtctaactacaaatgggaaaatgggcaagatcttagacatccaggtggcgagtgctataaagaaccaaatttggtgggaacatgaatgtaaagtaagtccattattttctgaggcactgagtaatgtagatgggagaaagacaggtttcaagattgaggatgaagttgaggtttctaaagtttggaaagtaagtgaagtccaagaatgccattctatatttcgtggacagcgtctgagaagtaaccactacctgttgagaacaaagaaaacctatttgtggaatgttgggaaccccctgaatcaacatcagataaggccagaggttgatgcgatcctgaagatacagggggagcttttgggaaggctttaattatgctctgaagtctgggcctttgaggttcctgccaccatttgatgaactccattggaaacgtggtggactgagaggtgagaactgtgggattgcttatctccgaatcctgacactttatcagtgtcccagcctccaaatccaatttagtgaagttgttagtggagaagtgattgtcttcttatgtgcttatggtggggatcgttgagtaattagttaaatttatcatcaaaattatgtgtcacaggtgaatgggtaattgagctgtatcctgcagggactctcaaccctggctgaacttcagtaacctctaattttcacattaaacattttaaacattacaaatacctgtgtcccttcccccaagattctcattcattgggttaggagtgggtcctgggcataggtattttaaaaagcactccaggtgattctaatgcccagccaaggttgagaatcactaatctactctaatcttttcgtatggctgaactcattggattttaaactcttttgatggcagatactgtgtcttagatatctacacaccaatctgttattaagcaacagaataagcacaatacatgttatttgttaatgggattattattatgaagtgcagggcttaaaaccttgctgtctagggattcaaaccttttaagtgtctttcactgatttacagaaagtgaatttattacacattgtttttcaaaatgaattttgacatttctggccttttctcattaaaaaaaacaaacaaataaaagcatggaatttgttagagtatttattgaccttttagtgccattaggaatactcctactcctacccttaaagaattcttcctatagaaggtgctcaaataattgcttaaagtgaacattcattttatatagacagttgtcccttagtatccacaggggattgattccaggacttccctcggataccaaaatctgcagatgctcaagttcctgatataaaatgctgcagtgtttgcatgtaatctacacacatcctcctgtatactttaagtcatctctagattatttataatacctaatacaatgtaaaagctatttaaacagttgttatactatactgtttagggaatagtgacaagaaaattgtgtgtgtgtgttcagtacacgtagttttttttctaaatatttttgatctggggtttggttgaatccgcagatgcggaatgcatggatgcggagggctgactgtgtgtgtgtgtgtgtgtgtgtgtgtgtgtgtgtgtattcactgaggatgaagtgaataagggaaaggcttgtctagtaatgaggatgtatagtgtgttctggggttggaatgaatgagaaataagagcattgaattcgtggaatagcaggcatgctggaatttacaaaggccaatttgtggctctgactgcgtatgtgagtacacccttttttggaaaggaaaaattatatttgatagggttttcaagatgaatcttttctgtattcagatattttgaataatatgtttgttttacaagttgaggcagcttcccagaactgggagtagtctgattagactaacaattccattccctgattaactgtgggatcggaatctaagagaatttgtgtagttagaagaatctggtatgataatgtgtgggagtagcctggaggaataggctagaactcttgaatttctaaacttttcaggctttgatgccttgttacctaaatagattttaaggttcttgtatacataagctaggcccagactggattcctcaaatgcttttcaattgattgggcactgacttacttgagtgctttatttcctattcagacctcacttctttacagcatgtggacagaactgactcgccatcagcattacacatgcttccaacttggttttggttctgctactcagcttgcattgagcagcttctaagtttgcaaacagagggctcgtggggcctgctgtgacccacagacatatttttgtaggtctgctcagtgttatattttgacttagttgtcagcatttaaatattttgagatttcatgcaaaactccagattcctatcttctttgggggaaaagcaaattggaagctctgacaatgctgggctttactttcccacatagcaaccatcagttggagctgagacacctctgctctctttagaaagaattattaatgcttcagtctccattattgcttccctaacagtgaggataagttattgtcatcatgcttgactgtttttactctgtgcttattttctcacttatggccttaattcatggttgctatttggcctgctggtgggcatttgagtttgtgctcctggatcttctctcccctccctcctctttctctttctctccctctcacacacacatccccacacaccctctgtgtataatccatgcacatagggtttgctgaaccgggtttggctggttatctgagctgagttaattgccctgtgcgcgattgggagccacagccctgatttgtagcttgaggccctgtgcttaatcaagtggcttagttaaccaggaattcattcccagggtattctgtgctacagattccctttgaagaagttgggcaaatggtaatgttgtcagatttttgtgagactattttatgagtggactgttaaagacatctgaggagtgtgttaaacattcagagctttgggcctctcttggaaaatctaaagcagtgtagtgcagtagaactttctgggatgaagagatgttctagatctgcatctttcaagagggcagccactagacatatgtggttgttaagtagttgaaatgtgcctagtgcaactgaggaactgaattttaaattttaatttaaatgtaaatcgccacaaatggcttgccttagtggacagttcagattcaatgctcttctgatgggttctgtcagctgcttttggaaaccactggcttaaagaccagatcccaggcagtccttaacttgacattgctactcagttctgttgagaactttgccatcagaaagggatcttcagccactctttggtatccacaggtggtagagagagcctttaaaccttaaatgctccacctagacactagcacaaaaactagctgggtttgagagtaagcccaggttggcctcagtttacacctttggtgcaacaggctgaggatgtacatcctctgtctctggtactgggtggagagtgggccaagaaggagcagtgaacaaaaatctgggccatttttagtgagatttagatgcttctcgactgatagaaatactaaacaccttcagttcaattaagtcccagctatttatctttgcttttattgcatttgcttttgggttcttggtcatgaaatccttgcctaagccaatgtctagaagggtttttccaatgttatcttacagaatgttgtagtttcaggtcttagatttaaatccttgatccactttgagttgatttttgtgtaaggttgagaggtgaggatccagcttcattctcctacatgtggcttgccaattatcgcagcaccatttgttgaatagggtgtcctttccccacttaatgttttcgtttgctttgttgaaaatcagttgactgtaagtatttgggtttatttttgggttctctatttctgttccaatggtctatgggcctatttttatactagtaccgtgctgtttggtgactatggtcttatagtatagtttgaaatgagagcttttccatggcaaaaggaacagtcagcagtgtaaacagacaacccacagagtgggagaaaatctttgcaatctatacatctgacaaaggactaatatccagaatctacaatgaactcaaacaaattagcaagaaaaaaaccaaacaatcccatcaaaaagagggccaaggacatgaatagacaattctcaaaagaagatatagaaatggccaacaaacaagaaaaaaatgctcaacatcactaatgatcagggaagtgcaactcaaaatcacaatgtgataccacctcactcctgcaagaatggccatcatcaaaaaattttaaaaaaataggtgttggtgtggatgtggtgaacagtgaacacttctggttggaatgtaaactagtacaaccactatgaaaaatagtgtggaggttccttaaagaactaaaagtagaactaccatttgatccggcaatcccactactgggtatctacctagaggaaaataagtcattatatgaaaaagatacttgcacatgcatgtttagcagcacactttgcaactgcaaaagcgtggaaccaacccaaatgcccaccagtcaacgagtgggtaaagaatctgtggggtgtgtgtgtgtgtgtgtgtgtatatatatatatgtatatataaggctatatacatatatatgtatatatatgtatatatatggctatatacatatatatggatatatatttatatatatccatatatatatatatatatatatatatatacacacatatatataaaggaatacacctcagccattaaaagagagactgaattaatggcatttgcagcaacctggatgagattggagactattacggcaagtgaagtaactcaggaatggaaacccaaacattgtatgttctcactcataagtgggagttctcactgacacaaaggacttcagggactcagggagaaagggtgggaagggcatgagggataaaagaccacaaactgggtgccgtgcatactgctcaggtgatggatgcaccaaaatctcacaaatcaccactaaagaacttagtcatgtaatgaatcaccacctgttccccaataatttatggaaataaaaaaattttaaaaatactaaacatcttaagcacatgcttcctggaacctacactctcctgacttttttcctatctattgtccattctcaggctctttggttgttccttctttcctcctctacgtcttagcactacagtaccccaggactcaattcttaagtctccacctgtctctctctgcttacagtaatgtggttccaaataccactggggtagttccagcccaggtgtcttccctgaactgccagctctatatacggctttcttgaccctttgcctggacatctggtaggcatcttacacttatagcatgcccccaaatgaattcctaatccccaactccaaatcaagtcctcctacaatctaagcatgtcattaaatggcaaggccatctttctagctgttcaccagaaatgcttgtcatcacccttgaccaatgtttttctctcatgatccacatacagtcattctgcaaatctggttgactctgctctcatactagatttggaatctgactacttttcagtctctttcctgttagtatactggagcttgatttttattatttttttctttaaatagactttagtgtctccatttctgcccccgagactcccacattactgtctctccttaacacaaaagctagagtgataatttaaaattataatcaggtcatgtcattcttctactgaagatcttccaatggtgcacatctctcctaaatggccttggaagtgctacatgatctgactatctgtgcagaaaaagttaatgtagcaggcctgagactgctatccttagaaagccctgcttgcgaagcggggccttggctggtggcatctggaaagttagatttgtggagggctaccatcattcccttatcggaatggctcactgtgcaaaactgtttctgcaaacaatatggcttatgctgaacacctgctctttttctgggagtctggaatttttgtatatgctaagcagaaggtgcctatgtgatcagtctgcagtaaaaaccttgggtgcttagtcactaatgagtgttcctggtaggcaacatttcgcacatgtggtaagaactcactgctgggggaattaagcaagtcctctccactaagggaagacccttggaagcttgtgcctggtttcctgcagacttcgctctgaatgccagtttgttttgctgatttggctttgtatcttttcactaataaattatatccatgaagggcctggtacggtggctcacacctgtaatcctagcactttgggggctgaggtgggcgaatcacctgagctcaggagttcaagaccagcctgggcaacatggtgaaaccccgtctctactaaaaatacaaaaattagccagacgtggtggcacacacctgtaatcccagctacttgagaggccgaggcaggagaattgcatgaacctgggaggtggagattgcagtgagctgagagtgcatcactgcactccagcctgggcaacagagcaagatgccgtcttaaaaaaaatttatatccatgagtatgagtatatgctgagttccttgagatctcttggtgaatcatcgaacctggaaggtcttgaggactccagcaccctatatttgacctctctgacctcatcatctaccacacagctgtctgttctcctgtctcagtcacactgatcgcttgtcatgttattcaagcatgccagacagactcttacctagtgccgttttctctcttcctaaaatattttctctcagttatccacctatctgcttctttcatagtttccatcttaaataattgttttcttcttcaggaagccttcctaaccaccctatttatgattataaccttctgagaaccctttctattgcccttccctgatttacttctatctacagaccatattcttcctaccataccacttattttaactgtatttcttgtctccatcactagaatattaacttcaataaaggtagagatatttgtctcttttgttcatttctgaacccttagattctagaagagcaccaggtcatagtagggcatcagtaagttcttttcaaagaaataattattttaccatgcatccatcaccacctgttgcagctatctcttgttgtattacaaactatcaccaaaatgtagtagctgaaaataccactcaacaacatgattgtgtaggtcaggaatttggaccaagcacatgggggaagtctctgtgtgatgttttctaggtctgggatgctcaagatggcatcttcactcacatgtctagtgcctcagctagaatggctctactagctgtgaagataaagcagccactctcgggttttgatgagtttcatggcctcctggatgataaggcacacacgtgaataagccagttttgctttagtggtatgtttgcagggatacaatatagacaaataatgccctttgaaagagaagacactaaagccgttttgaaagatgatgaagaattttccacgagaaaagtgagataagacattctaggtggagggaaaaaagtggttgagggagttgtgaaaagttgagcgtagcctggagaggagtgggtgcacacactaatttggaccagatgctgatggtccttgggtgctgccctaagggattttcatgctgtcttaatgtagctctccattttgttacgaatatactcacattttgcttaatttgcatgagtttaaaaatatgtgtataaacttaaaatggagcattttcagaaaattggggaataaattacctaactttgtagtatgtctgttaaggcctcatcacttggttggttatgctggttttcacacattcccctgcaaaactgttttcaacaaaattatcaagatctagtagctaaaggccatggttaccttttacttcttgtttttgatgatgtcccaccttttaaaactctctactcatgggcttttcaggatttttttttttttgagacagagtctcacccaggggcttttcaggattcttaaacatctgtcttctttgagtcttcacagatgccctctctgccatcttcttgtatgttggtacactggggttctggcctcgtcctccatgggatctcattcaccacatggcttcacctacccgtaaatacacacttctagccctgaacttgctccagatcccaatatctgcctgcctctggacttcattacctggatgtcccacagacaattcaagcccactctattctctgtgaatctgcttgccccattccttgtagcctgttactgcgcacatggcaccatcattcacttggttgtctaatctagaaacctggatatccttcacacctccctcatattccaccacatgtccagtcgctcagaaatttcctttgatgctttgaagttatctctcttggatctgcttcctccttatcgtctctacatcccaagaacagagagtgagtcttctttattttcttatctctgtttttagcacagtatttgatatatagtgtagatactataaatgcttgctaaactttgtcaaattccacatttttaaaataaaaatgagaatgagcttgtagtcaacatggcgtttgtaagtttggagtctatatatggtagatatacatatttttaaatctaagtgcaacttttctcttgattatcttgaaatgccttatcatctccacatttgctgtaggcagtagtttagtggtccattatatctgccacactgattgtcttaaataacagtttcaaattctgacaggttgacttgcttcttagatttttcagactgagtgctctgtagttatggattttccatgaagcaacataatgtttttgcttcatgcaggtttgtgtgatgcagtctcttgtgtttgaataatgtttgattttcagcattcattaatttcatgttgattttaaaattatctggactacctcaattttgatggattctttatttttgacaggcatgatatctctgtcttaggagctactaaattgagcctgcctcctgttgctgaactctcgttttttggattgcaatgtggtggaattgcaggatatcaagacaggccggttaaaaaggttttctctcagtttagtctctatcagatgcagtgccaagtatcttccagataaatatgtcctgcattgctcttgtctgctgcctcaagttgaggatgttaaactctctgagttgtccctgtttgcagatgacatgattgtgtatttagaaaaccccattgtctcagctcaaaatctccataagctgataagcaacttcagcaaagtctcaggatacaaaatcagtgtgcaaaaatcataagcattcctatacaccaataacagacaaacagccaaatcatgagtgaactcccattcacaattgctaaaaagggaatataatacctaggaatcccacttacaagggatgtgaaggacctcttcaaggagaattacaaaacactgctcgacaaaataaaagaggacacaaacaagtggaagaacattccatgctcatggataggaagaatcaatatcgtgaaaatggccatattgcccaaggtaatttatagattcagtgccatccccatcaagctaccaatgactttcttcacagaactggaaaaaactactttaaagttcatgtggaaccaaaaagagcccttattgccaagtcaatcctaagcataaagaacaaagctggaggcatcatgctacctgacttcaaactatactacaaggctacagtaaccaaaacagtatggtaccggtaccaaaacagagatatagaccaatggaacggaacagaggcctcagaaataacaacacacatctataaccatctgatctttgacaaacctgacaaaaacaagaaatggggaaaggattccctatttaataaatggtgctgggaaaacaggctagtcagatatagaaagctgaaactggatcccttccttacaccttatacaaaaattaattcaagatggattaaagacttaaatgttagacctaaaaccatgaaaaccgtagaagaaaacctaggcaataccattcaggacataggcatgggcaaggacttcatgactaaaacaccaaaagcaatggcaacacaagccaaaattgacaaatgggatctaattaaactaaagagcttctgcacagcaaaagaaactaccatcagaatgaacaggcaacttacagaatgggagaaaatttttgaaatctacccatctgacaaagggctaatatccagaatctacaaagaacttaaacaaatttacaagaaaaaaacaaccccatcacaaagtgggcaaaggttatgaacagacacctctcaaaagaagacatttatgcagccaacagacacatgaaataatgcttgtcatcactgatcatcagagaaatgcaaattaaaaccacagtgagataccatctcacaccagttagaatggcatcattaaaaagtcaggaaacaacagatgctggagaggatgtggagaaataggaatgctattatgctgttggttggaatgtaaactaattaaaccattttggaagacagtgtggcaattcctcaaggatctagagctagaaatatcatttgacccagcagtcccattactgggtatatacccaaaggattataaatcatgctgctataaagacacatgcacacatatgtttatggcagcactattcacaatagcaaagacttgcaaccaacccaaatgtccatcaatgatagactgggttaagaagatgtagcacatatataccatggaatactatgcagctgtaaaaaagggtgagttcctattctttgcagggacatgaatgaagctggaaaccatcattctgagcaaactatcacaaagacagaaaaccaaacactccaggttctcactcataggtggaaactgaacaatgagaacacttggacacagggtggggaacatcaaacactggggcctgttgtggggtggggggtctggggagggatagcattgggagaaatacctaatgtaaatgacaggttgatggttgcagcagaccagcatggcatatgtatacctatgtaatgagcctgcatgttgtgcacatgtaccctagaacttaaaagtataatagtaaaatgtgccatgtaatcagtgaggtctcagtcagacttccaattaggggatcctgtgtgatgattgcctgtaacaatctgatcatctaaaagtcactttagtcacatggaggaagatttagacagtgactttgggtcagtattgtgttttttgctgaggatatagagtaaaataagacacagcttctgccaccagtgggcttatagatttaacaggcatagaggagcatggcaacaaatggcatggtatgatcaaggtgctttggggcaaggggaggtggggaagttgagcaggtttcactccatgagctgtacgtggccaggggtttgaaggatgcatggacagttgccagggaagtaggagtggaagatggggcaggacatgagggaggggtgggggcagcctaccgctgtttgaaggtaaacatgtatgttttgtttgaaggaggaggttggggagaagaggatagaattgtgggaagtttctccaggacagttgtgggacgggtagtagggaaggagtaagggtcaaagccagagttaaggaagcatttggggcaggatggagatattgttggacctaccttttttattgattgcgctagagagtggagatagagggagctgggactggaggtggaggaactggctcaggtcctgctgttggagtggaggttagatgtattgaagcagaagcagaaatgagctttgaggtttagggggcaaagtaattaggcttgggggttgactctcagtgggaagagaagtgtaggtggaactggggagagggcgcagtctctgagacatttcagtgaatatgcctgtgttctggccacccaggcctggggttccgagataactaagacatggcctttgctttacagaacctgatagatagggataggagaggtgggagactgagaacagatgaaagggttggtgagcagtgtgagggcctggagcaatcagaaatcctgagttcgtaaagatgccaatcttttgcaccagttgttcagcattggattagagccttgattcaaggttgggattagagggcaggtgtgggaacaacctggtgctcagaaataaaagttgttaggctcagttaatgaaagtataaattgatatgggtggcttttagactttggtagtcacagtggctggaaatcttcctttgttcctccggacccgctcttgtcccttttccagtcccctctgtgacccaggaggctgagctgagtggactttcttgccctctggcttctagttagggtcggccattggggaagccccagtgagagaacaagagggtgggcagctccattcctgccaggtcactgtgggctggctgcttccctttcctaaagtccacagctctagccctatgtactcatctcccttgtattttttttttttttttttgagatggagttttgctcttgtcacccaggttggagtacagtggtgcgatcttggctcactgcaacctccgcctccagggttcaagtgattctcctgcctcagcctcccgagtagctgggattacaggtgcacgctaccacgcccggctaactttttgtatttttagtagagacggggtgttgccatgttgggcaggctggtcttgaactcctgacctcaggtgatccaccagcctcgggctcccaaagtgctgagattacaggcgtgagtcaccgcgcccggccatctcccctgtattaaggtcactcctttacctggcctgttgggtctcaaacaatggcaagggattgccgctgttaggaccattgtcccttgatggtttactgccaaagtttggactaataaagacagaaatatttgcctgcatgactcagtatctacatacacacacacatacaacaaacccccgtgccccacccccagcctgaaacaaaagtttcaggagagtacttacctttgctgtgaatgatgccctcagatttctaaattctattttgtttcactgaaaaagtagttggggtgtgctaaattgatttcactaatgggttagggcccatagtaaaaaaaccactggagcttcctgatgtttatggacacaggatggaccatcagatcaagtgactcagaaatcctcacagcgctaagatctgattgcttatagatttatccaaagtgtgaggctgaagttaagcttctaaaatgaacttaaactcctaaaatcaaatgacattgtaggtgttaataggtgaatttttctgtggattataatgccacgtaccttatatgtgtaatagagataatttttggatcttgagacttgtgtatggctagtgtgtgagctaagagtcatcctggcccagaagtcgctgtggctttataaaatcttcgagaaactgaaagagttttacttgtcatcttgtttttcttttgtcatgacatggtgatagtattggtaactttaaatattaggtctggattacttccttttgtagcaaagagatgaggaagtgtaagatggataaataatccttgcctctgtatttatagacacatttatagagattcagtgggcttgagttttgacagcagtgtttgatcagaaacattttcccagaaccttaaaaaaaaactgcagttcaaatatttctaataaaaaaaatttttttttttcgttgctgtaactagatttgcatttccgatttttctctctcttgtttcacttttgtctgtggctgaggaagggccacttgggaaatgcagctgtgggtcgtaaggagtccctcactctatcgctctgtgtttcctggggctgccatgacaatgtaccacaaactgggtggtttaaaacaagagaaatttattttctcacagttctaaagtctgtagattcaaatttaaggtgttggcagggccacgcttccttcaaaacctctagagaaggattctttcttgcttcttccagcttctggcagcccagggcatttctgagctatggcagcataactccaatctctgcctccgtttttacatgccgtcttcccgctgtctctctctctctctctctctctctctctctctctctctctctctctctttctctcttctccctttataaggacaccagtcatactggattagggtccaccctaatgacctcgtcttaatttgattccatctgtaaagactctgtttctaaataaggtcacattcataggtatgggtgggggggactgggatctcaacatactgtgttttggaggataacacacttcaacccataataatggcaatttgtttttaatgcattttttcttgcttttccactaagacacattgggggaattctgttgatttccccattgcctttcttacaatgttactctctttatttcttatatttttgctccaaaatagtccacatataataatcattctgtattattgagaattgaaggttattggtgtgattgacttatctactaccttctccatgtaaacattttggtatctgcttccttgttctcatttaccttttcagttgacacttttgagactcatgtatgtcctaaattctatctcatgtcacatcctttgtggtctgctttattttttattttttgagacggagtcttgctctgtcacccaggctagagtgcagtggcgctatgtcggctcactgccagatccacctcccgggttcacgccattctcctgcctcagcctcccgagtagctgggactacaggcacccgccaccatgcccggctaatttttttgtatttttagtggagacggggtttaaccgtgttagccaggatggtctcgatctcctgaccttgtgatctgcccacctcagcctcccaaagtgctgggattgcaggcgtgagccactgcgcccggccagtggtctgctttattaagcattgattgaagcccagtggctggtatggattacattgctattcagtctgtaattacgttcttttacaggtggcaggtggagtgttttggagcatgtgtcatgtcccccacgtagctcagttcctttccttcggggcttcacatgcatacattttgaaatgaagaaagccataagcaggtgccagatgagtttcctgggcactcagaaggaagagagcctgcagtaggctggaatggccaagtgggaaaatggacagaatttagacaaatgcagtagaggatgagggagagtgtatcatgtggcagagatgatggaagtacaagcattgtagtagttcttaatttgttgatcctaacacccctttgccctcatattttcttagaagacctgagggaacgtttcatgtgcgttatatctatatttatcatattataaatcaaaaatgagaaattaaaaaatatgttcaattgatttaaaataacaaagtgcccattacaagttaaaatacttatttttaggaaaaataactacaaaacaaaaaaaaatgtggtgagaaccatagcactatataccatttttttgcaaatctctttaatgtttggcttattagctggattctcaaatctgctttctcattcaatctgttgcaatgttgttttgatttaaatatatgaagaaaatcctgcctcatacagatatgtagttggaaagggagaagcattttaatagcttcgtcagataattgtagatatgctttttgtagatatactacatgaaaattcagtaagttatagtttctttttcttgcttaaaaatacatttattatatcacagtttctatgggttagcagtctgcacacagcttagctgggtccttttcttagactcaccaggctgcaatcaagatatcgcctaggctatgctctcatctggaggcttgactgggaagaatctgctccaagctaactcaggttgctagcagaacgctttccttgtttctgtaggattgaggggcctagcttttttctggctactagctagaggccaccttcagctcctggaggccacccttctttcctagaggtcacctgcagtttcttgtcatgtgggctttcttaacccaactgcttactttatccagccagcaaggagtctctagagcaagtcagctcgcaacacggagtattatataatacaacataatcatgggagtgacatttcaacatggtttcttaaaggttcattgcaatgttgaatttggaatcacaaccaatgaaatattcatactccattacaatgcattggttcatgtggtactttgactgatcttgtattcctgtgtgatttaataccatacattggtcatttggaaactattagttcactgagttgtatcagttttccaaacgttgacatatttcattatataatatcaaaaactacgcatattaacattactatcaatttcatcagaaacatctaagtattgagaagctatcaagctcacagtggtggatacaggtgttaaaaatttttaatttttggattatgattgacaacaaatgctgtcatctgttttccttcaagtgccgaggtgtacatcattcattctcaagaaatacctatcaaaatctcaagaataaatatccagagttcatctgccagtcattcccttcaagcaaaaatggtgcaccataaaaaaaccagttagttcagcctgcagctcagtcagtcaatcaatcagaggagtgcttttctctgaggtgaccactgtacttcagtatgcggcagaatgctttatgtgtacttcccatttccttacacacaatgtcaaaaacatgtgaaatcaaaggtcaagagataatgaaattttacctgcttcatcaagggcatgcttacattattttttaactaccaatgagtggcagtgaataatattaatacaatgactgctagtatagtttagtgtcactacctccattcaagctaaggcatcagtagtgccagtgttgaacatagttgtttcaaggataaaccatgagattccaaaagttattagacacattgactgtttaagcaccagtgtttattttcagaatttcacatttaaaaaaaatcttcaatcagcatcagcaccaattagtcattttataatccatttgtaaggcaaaggtacagctctgcagttgggatgtgaactcagtcgtcatgtttgtagacaaacctttcatttgaggagttactgtgtcattaggaaatggcactgccatgttttttttaaactaacttatccagcaggccttcagcaatgtcagtggtacaaagttttcttagtgtctcagttactgtgtgtttttctccagctaatgcagtatgataccctataaggtctttcagtggctttttctcttctctcttgaaaaactacaacaacatttgtcttataaagttctcatcatgtctgcattaaaaaaaatcaattccttttcctttaaatccttagtgattattttcaaaatgatgttgcaactgaactatttgaaaatattctgttgcgtaagacatagtataaattactaaatatctataaagacaaggtaaagacaactttgttaatgtttttgtttatttataattttcctcagggttgttttgattttttttcttaagtagttgcttcccttccatggatcagaggcctctaatgtgtcagtttcatcttttttagtatctttaggcataaaaagtatgtatacctgtgggtaggaaagcaggctttctaaacctctttttttttttttttgagacggagtctcgctctgtttcccaggctagagtgtagtggtgcgatcttggctcactgcaacctccgcctcccaggttcaagtgactctcctgcctcagcttcccaagcagctgggattacaggtgcccaccaccacgcccagctaatttttgtatgtttagtagagacggggtttcatcatgttggccatgctggtcttgaactcccagcctcaggtgatctgcaaccccttagcctcccaaagtgctgggattacaggcttgagccactgtgcccaggctctaatcctcctcttttatgttggatttttttttcgttaaaacgtacataacataaaatgttccattttaagtgtatagttcagtagcattaagtatattcatattgttgtgcaactgtcgccaccacccacctacaaaacttgttcatcttcccaaactgaaactccatacccattaaataataactccctattccccactcccccaggctctgacaaccaccatttactttctgtctatgaatttgactactctagatacctcagaagtggaatcgtgcactatctgtccttttgtgactttattatttcatttagcgtaataatgtctttggttaattcatgttgtatcatgtttcagaatttccttccttatcaaggttaaagaatatttctttgtatgtatgtaccacattttgtttattcatttatccattgatggatgcttggttccttccacttttggttattgcaaatagtgccactgtgaacatgagtgtacaagtgtctgttctactctctgctttcactattttcgggtgtatacccagaagtagaattgctggattatatagtaattctatgttttattttttgaggaatccccctactgtcttccacaatgctgtatcattttacagtcccatcatcagtgagcaaaggtttcaatttcttcctatctctgccaacatttatttctgttttaatagccattctaatgggtgtgaagtgtctaatctcttttaaggcaacaatccatctttaaatataaaaagttagatatttattttagaatgatatagtaaattctaaattatagttttcatacaactaaaatatttagaataatttttgaaaagatttaaaatactattgtaaatctgtgaaatgacaaatcaaaagggcaaataaccttttagacttgagaaagagttttgactttgcagattttcaaaaaaggtattgggatacctaggggtttgtagaccatacctgaagaactgcttgatgaaatatagtattagaaacatggtctcagcttctcatgaaactctttccataggtggataaataatgatttcttttgatttacaaatttgtttactaagaacttaaaaaatgttttttcacattctacaacaaagattttatttaacaataacagaaaaagaaataacaaatcagttgccatggaattaaagttgggaaagaagaatgttttgttcttgactgggaaaccatttagaactggcaatagaaggcaggaataaattgtacttttctgacaataggaatgttttaagtctgttcttaatctttaaaaaaatttttttaagatcatttaaggagggtgtatgtatcagttttcaagttaagagatttctctgaagcagcaattacaacacttatttaaaatatttgaaatatgttgttagaataccaattaggtaattacaagaaattattgaaatttcattcaagaaaaaattacaggctggtttcggtggctgacacctgtaatcccagaactttgggaggcccaggtggatggatcacttggggtcaggagtttgagaccaacctggccaatatggtgaaaccctgtctctactaaaaatacaaaaattagccagatgtggtggtgtgtgcctttaatcccgactactcggggggctgaggtaggggaatcaattgaacctgggaggcagaggttgcagtgagctgagattgcgccactgccctccagcctgggtgacagagtgagactgtctcaggaaaaaaaaaaaaaaattgcaggaaaactcaggcatattattttgttttataacccaaatatatcattgctttaaatgacataccaaaacccatcagcatttaaataagcttatttctttttcttcccatcagccatctactgaatattgggagtgtggtgctgaaccgcagcctcacctgaggtcaggggaagactcagtttttttgctttcactgcacagtttgcatatttaaacattcttgaaaagaattgctctaaatatcactaattatctccatgcgtatagctcttatcttttatttttcatgaaaccaaaggttgtgatctctcatctttacaatatgacatctttttacttagatttagatgctatatgaaaccgtaatgcctctctttaagctccaattcagatagtagatttggatagcataaatgtttaatactgtatgtaaatgtccacatataggttgaaattataagatgtgtaacatagagtagtaatcatcaaataggtgacagatatccatgtggctattcattggggaatgtgactgtgaatcactgtattaaattcacctcctgcagtcatgggctaggcggtgtccattggtgctgcctagcattcttagttttggccattttgtttaggtagatagttgtctattaagcaagatacttactgtgtgttttgtaactaaaaattgtttgagagaaattttagatcttccctttggtttcaacattatgaagtatgaaattatgaatagtgctttagattgtcccatgcagttaatgatgaaaaccagttggagaaggtgatgagagcactctaagaaaactacttatttgtgcaaaaaagtggggagatgatgcttaatgtggggatgcttcattgcacattgggccacttgttgctatagtctcaaagatcatgatgttaaacatcatcaagatgatacaaaatcaaacctttctctgaacgtttgccatcctgtctcctgtttgggcctggaatattgagctgagattttgtaagtgtgtggcaaaatttataacggggctacaagacactcagagtaatggttccaatgactggaggtgtgtgtgctgatcattactgttggagtcaagatattggggcctcctttgtgaaggcaaggtctgaaagggaatgaaatttcatagatgaaggctacaaagtcacaaaatgtacagtaaagtatgaactcacatctgcaagggagagcttgttgtactctgagtgagccaagtcttgcttccagtgagtgtctggttcattcctcacataggcagcataggtgggaagtataaagaacttggctgtgtttatgaaagagacagctttaacttctcagtggggctggactgtagctcacctttagggttgatgttgggaagacaaataggctgctttgtgccgccttctgtattagcaaggcaaagaacagcttgacagtttctttgctcttctgacatgattctgtccatctagctggaatagggggctcaatttctgaggacaggtagctgagaatattgtggtttggggacctctcaaaaatacggagagtcttgtttgcctggataggagctctattccaaaggtgagggaaggaagtgataatgacttgttaaaagcaaccttttaggtagattgaccaggggcagagtttacaggatgaatgggaaatgagaaagagtgaagttcaaacaggtaagctgttgtaactgaggtgtataagctgttataactgaggtgtatgagctgttgtaactgaggtgtataagctgttgtaactgaggtgtataagctgttgtaactgaggtgtataagctgttgtaactgaggtgtataagctgttgcaactgaggtgtataagctgttgtaactgaggtgtataagctgttgcaactgaggtgtataagctgttgtaactgaggtgtataagctgttgtaactgaggtgtataagctgttgtaactgaggtgtataagctgttgcaactgaggtgtataagctgttgtaactgaggtgtataagctgttgtaactgaggtgtataagctgttataactgaggtgtgtaaatccggctgctgttagttctgatttctggatactttatttctactacttcaggcaatatttagagtagaaaatccactaacttgcattggctggcaaagaaggtgaaatagatccatgtggggttttgggaaaaacactgaacttggcatctggccctggggatagccctgactcttctatgaatatgaactagctctgaaaccgtgggcaaggcccttgaactctcaagacctcaggcatagagtagcttatctctaaagctcatccccagccataagagtgttttctagtgtcttatttattactttcaagtacacatttctaagtactaataacttttacatgctgccaaggagtggtcttttaggggcctattatgatgaagtatgatgaatagataactcatttgtaattaactgtgtgtatgtccatgcaaacaatttctgagctctaagtttctcataataattcccttcccataagtagggttaagcccttgaaattttgtttgcatttttaatttatacggaaaatgaatttttctgagatacctatatctcgtctccctaattagattgtaacctccttgaaagcattttgctttgttttgttgtttgctttttggttttaatccattataatgccttaaatagcactatgtgtattagggacttaatacagtagtagatgagtgaatgagaagttagagcataaactttagttcagaccaaattattgtgaactttgaaatattgtaacagaaattaataaagatgtaagtctatgatcttatattactgtccttaattaaataatgtgtgtgtgtaattattattgccgtggctacatgtaaatgtgacttaaaaggtcaatcacagtgaactgctacagaaaaaatggtaggagtggattcataaccgtgtaactttttttctctatactgaaaggaaatatcattttctccccaagatcagtctttgagtaactttgcggatctagaatagtgccttgcaattggggaagggagaaagggaaagtaaactgaagagttcagaagtgacagtggtcagttacatagagaacaaagtactttgttagttttctggccagatagaaaagaacacttttcttgactggagatgatttctgagatgaaagctttctaagatatggggtgcctggcctccacatctagtttctttgggagccagagacaagaggggataaaaagagaagcttgaaggaggaggaaaaggaggggagggtacatgtagtgggaatgaggggcagagtagcagacattattgcagaaaagtgggggaggaaagaaccaggctggaggggctccatagcctggaaggaagcagccctctccctacaccagtagctccctcaacctttgttctccttccacctagcatattaattgctgttcatgatgataaatctgaccactagttacagggaatggggctttttaacctatattttaggactttgcatcataagccaattaaaagagatgtctagttatttatcagaaatatttctataaatacagaagctgtgtatttttttcctgacaatatcttagttgtttggtcctttaaggaactgagcttagtaggtaaatactctagacagctgtgtaaattttgtaaataaaaatcagaaagctaactattcatttatgtagccagcattcattggctggcaaacgtgtcagaaactttgccagccaatggaaatacaataaagatactatgtagttcctaccctcttgtaggaaactataattctgtctgatggtgcacatcacttataaagcaccatgtctcagagaggctgctttggaaatgaccactctcttcttgggaaattgggatttcagaaggcctcctggaagagatgaaacttgacttctctgctatcttaaattattgactcaaatgtgatctgttagctaaagccacagagactgtgtgtcaacataggtgactgaggacagctcaacttggctggtggctataccattcaatccatctgctcttctcttgccaccctgagtccggctgtatctcaagtgtgatgctggagtgaaatgtaagaggcactctgaaattgacccaggtctctatactctgcagtctctatactgtccttctcataactagttttcactcttgatatcttttccactagaatgtaagcagatttgtgggcaagataaccatagcaatatggtagtggtgatggtgatgataatatgtaaaattcatggagcattactgaacaccagtatgtatgcgtgacctcatctgatgcctataggctctgcagctggtagtggggtggaggggctgtcattctctcctgacttagcagtgatgtcattgagacttaaagaggttagatgaccctcccatatcagtcagcagcaccaggagagagatggttacttgtcctttttttgtggatgtgtccatacaacttccctgccacatgcccagctaatacaggtttttgtttgtggtaagtaataagcgacagattctgctctgtagggtgagtaagttccatggtttctcctcgttgtgattggtataccatcagagtgtccccgatgcccttgggtactaaggcattgaaatacacatcactgtttgtccttctgccttgctcttctcctttcattttgccagcaaagactgttttcttttgtcagagtctacagctcagcactcctgcttagtttctgctcttgggcatcacctctgtcactgtggctcatccccaggccctttcagacactgatggcacctgctgagcccagggttaactactttctttactcctctttattcctctactgtcttatagcgtctccaagtatgtcttagcagccactgcaagaggttggccagctaggtaggcatttgttttgcttgacttgaccagtcactcactgtcagagcatcttcctatttgtggcctttcttctgggcttttccctcggtgggtgtgggagctcaagactgctactttgttctcagaggttgttgtttgtttagttattgtgtacagctgccaagttggagctgtttaagaaccatgatatcagaaagatgcttcattgcaatagtagctgttgattagaaacaaaacaatctattaatttcctaactttattatcatttatgttctatctccttctaaaagaaattatgacaaagttttcttttttaaatgaatcccaactagcagtgatctcatactttattcataataaattttgtttggatacatgtattttatatttttagctctctggttttgacagaatgactttcccctcctttgggcaatttgaatgttcttctattatgtagatacttaacatctgtgagaggttatagattcttgatttttacacgatggtctaagggagacatctcagtatggacaggcagcatagcgtgtttgtcatttgtgtgggctcttgagcaagattttctagattgaagtacaagctctgccatatactagttgtatgatcttaggcaacttacagtcactgtgcttctgttcttatctgtaagatggcgttgcagggttgctgtggaacgctaaatgaggtcacatttctgaactgcttatatggtgctggacacacactaacaatctaagtgtgtcttctgtatcatgtctgtgtttctcaagcagactttgagcaggtccagctatggtatctcttcccagtagctacatggggcccaacacatagtttctactcaggtttgtgagtagatacatgaatgtataaattaacagcatacgctttactaaatttccttagttaattgttttttatttaataagttgttcttccaagttccagttctctactcttcagatgactctgctttagttatgggttttttattgattcattataattactttgctgatgttttttttctggctgtcatagcaagcagcagtcattagctacaagaagactcagcaatttagtaagaactgtcttggttttgagttgtctaccaaatataacttaacctaagacagtaatatacatggtttcattacaatctgtatattgttaaacatgcataatttctaaatttatgcaaacaaacattcattgctgtgtgtctcctaatgctgtacttgaaatgaatttgcttttggttttaaaggcattcatttaatggttggagtgaacctttaaaatattaattgcatcttgcttttaaaaatttagacattaagccactcccatgaaaactcaagttataaagaacctaagaattatttaaatagttcagaaaatatgatatgtaggcttcttttaattcatagcaatatgtaaattattgaccctctgaaaccccttgatgctaagaaagcagttctcgttttcctcttccattcgttgatacagctgaactggcattttctcttcccttttgtatagaatggacttaggctggaaatgcttttggatgatgtggtacttgcgtgtggtgtcatctctgctagagatgcaggcccctgcctgttctcctcctggctctctctggctgtggggctcaccagtgctgagacagctggagctgactggagtcagcactgtaatacactgttagaggttgaggataggtgtgcttggttgatttaacactttatttacctggtgagttcagcttttgtggtcttggatgattcctgtgctttgttcagtagaatcagtcttcactgtccccttagatataagcccctgtggagttccaaatctgttagtcctgtcctgtgatttggttgctcaggcggttcttgcccttgctatggggagccttgatacatggcttgtaggtcctgccatgttaattgactgttagtctaatatcgtatctctgtattgtaaggttttcaggttacaaacctcttatctcttccttctggggacccacttccccctaatctcccttattttagagttactgaagtagcaactagaaccttgcaataaatagctctctctgccttgacatcatctagcctttggtctgatttttgaatatttgatttggatatttgactctttttaaagttacacagtagcttgagggtgccctaaagagaactgcctctggccagcaggctggggtgctgctatttttgaagacaggccaccctaaccttgctacactagaagtttgtgcgcaagtaccctgggacacaaggtacatttgaatgtgtctctgtaatcaccagcaaaagaaggggagttggatctaagtttacttttcttatggcagtatctgttttgtaaatcaatgaatacccatacattgttgcggcaaagttttttttccagttaaaaatgataactcttctatctggtggttctcaacatgatgacagcatgcatgtgtgtgtgctctttttttcaattaacaataaaataactcctctaatgctgatgcaataggccggtggttctcaacctgacagcaggatgtgtgtgtgtgcacgcatgtaaatgaatatacatgcttgagtgtggttatattatataatggaatcaccagtgagacttttccacaataaacatgtctagtttctacccactcccacacatttggtttcccaggggtggtggcgagtgtttgagtcatctacaagttctcatctgcttccccttatggtgtctttcaggcacactcatgagagggttgtaatcatttgtcatggatcataacaacaatatggaatacaaccataataacatatactgagcaattactgtgaatccactgcacaatcagaaaccgtgccgtgtttttaatggatatttttctcttgcactaagctagggcattgacttcataattctaccatgatagtatttgaatttgaaataaaacttgaaaaaaattatttttcttggggggggatgggatagttgggtttcgtaaattgatcagagtgtattgtttttaactctaccagagaaatcaaaataacttatttacatatctttgtactgcaggctagagctaacaaatatttataatattgtgtggcactattcatactacatggcagatgaggaaccttgggcatagaaagttaaatgatatgatgataggaatacctagtgtttaatgtgtgcttaatatgtgccaggcactttctaaacactttgcatatgttaatctatttaatcctcacaacaattccaggaaacatttactattatcattattattttgtaggtgggtaaactgagtcttagaggtttagtacctagcccatggtcacccagctggcaatcggcagagcccggttccaagcccagcctgtctggctcatgttgcacaattcccttggaataaaatggggatttgaactgggtcttctgcttcagtactttctcttagagctacattgccccggtttttaaagggttttctcacttttatttggttttaatttttttagagacaaggtcttgctttgtcactcaagctggagtgcaatggtgggatcatagctcaccgtaaccttgaacacctgggttcaaaggatattctcacttcagcctcctaaggagctgggactacagcatgtgccaccacacctggctaattttaaaaattgtttttttttcttttctttatgtttctcatgctggtctcaaactcctggcctcaagcagtcctcccaccttggcctcccaaaatgctgggattatagacatcagccactgtgcccagccagttttctcacttttaaatgatggtttgtaaagagtgatactttatttagatcagtggccctcgttgggggtggctttgtcccctaggacattgtgcaatgtctagagacaattttggttatcacagcaagtgagaaggtacttttggcatctgttagagtgaggccaaggatgccgctaaacatcttacaacgtagtggacagcactacccacagcaaagaagtgtcagcccaaatgtcggtagtacagaggctgagaaaccctgtttttagagtgttttgcatgatgcctttttctctaagaggaatcaatactttagtgtacagttctgcaagatatttttttaggctgaagagtaacaaggaagcagggtagagctgatactaaacttacatagggagcgtcttggctttgagactcttcatccatgactggattagttattttaaaaactctgcttgcgtggactcacaggatcacaaattccaaacttaaggacctttcatcttctggaatatagctgggcttgaggtattatatggagtgtgtgtctatgggcatcggtgtggtgaatacttctttgtatatatatattttttgtgtgtgttgtacaagagtgacttcataaaaggtggctcttgccagaattcagaacacagcaggtaatgtacttactgaagaggtaagagcatgagtaattcttgtctcatgagaaagatgtaaactagtttattataatgatgtaatatttgggtgcctgatttatcatccccatctccaatgatgcaaaaccttaagaactacacaggtgataaaaattcaaatggtgtctttgaagtccggcctattcccctgagcagttaaaagtgtcacctttgtcctgatacgttgctgtttgtggatgtttccggagatcacggttaaaatcttgaactatgcactctactatgggaagttttgggatgtttattccgtgagagaggtcataatctgggaagatgagagtcattcagctaatagggcaggaaaatatcacagtcaagctgtagacttgggatgatgggagtatggaagagatgattcctcctgtgtactgaggggaaccaggagagggagagttgtcaggaagcgtgtggtctttgaactggatctcgttttaggagaaacttgagttgtcccggttgagaaccagcttaggcaaaagtgtggccactttagggcaggctgggggcggggatatgaaaggaaatcatcatcatcatcatcatcatcatcatcatcacaacaacagtaataatcataatcatggccgccattttgtgagtactgctctgggaaggcacactctagaggttttaagatacactcatttaatccttgcagcaatctcatggggttggtattattatagctgttacagacaggaaatccagggtctagtaaggccagggtccggtccctcctgacagtactcttgtgcccctcgagcagcagtcccttctggttcattcttggtggttcccagggagcgcgaggaatgatgtcagcagagccgtgctgtgactggatgaacacaaccctgggaacaatgcctttggcacagctctttaaaaagaagtaagttggggcttcatctaaggaaactggctctgttctactcagtctcgtaggaattcttagaaatgttgtgacctggaaaattggagaggtatgatttgattaatttgcacatttaagtatgacagtgtaactagagagtaaacaaatggtaattatgccacaaagctttcctccaatggagagtcagggtcaaggcaatctggaatctttggcttttcagattagttgtgaacatggaacaacaagctcattcctcccctctacccagggtggacccctgtgtgggggatggggaagtagttttccttgcttggctacaatagcttagattaccatacactcatctctgacttagattttataccttcttttcccccatcctaccctgtgaagacaattgaaggctagggtttggttaggaaagtagcaagttaataatgtatcagaaagttgttggcagttgtgtttccttgaatgactcttctttgaagctacattgttacagtgatgtgtgtaatttgacctactgttcaaaaagaattcatttccatcccttccttgttcgttcattcatcatgcgtttatagaagccagtccttgacccagggggacccatagtctagactctggaggagagcacaaacatgggaaccagtaagtatagctgtggatgtgaaaagtaaagagacagaagtagagagcttccttctaaagagagaggggaaagagtgggaggcagcctttatttctaggggtactttctctctcttgttccatcctccgtcctggactgataccctccctgccctttgcatccatgttttttttccctcttatccagagtgagtctcctgggaaacccaggccttctttctgggagctcctctctcttcttcgtcactcatgcccagggtcacactggagcttcaccacctttttctgatactgataagtttcttcagctttgcattcttgcctcatttttctgtcatctgaccctagccgatcctatcacttgttatggaggtagctagaagcacgtgagatatggaaagtgttgtactggaaaatacacagcagatatacaaataactccacctgggcgagggagcattttcttaggctgggtatcaccttgggtttgaggtgcaccttctccctaggtgtcattttggagtccccgccttcttaaaaatgtgctatataagtattgtccacgtatgacctcattaattcattgaatatggcagaattgattgattgggatttggaagggctctataagagagactgtgatcttgtcaatctctctaataacaatctgcgtgacacatacaattaatcccttccttggaaaggagttgggggagtagaatcataaatttggaagcaaacatatcttttgttaaagtatatttttaaattacagtactcatctggaacacaggtgacatttctatcagcagaatttcaaatttatgcagactcgttattctgctttgaaaagctttatttcctttgctaactaccagatgggatattatagttatgaatccctaattctaatgaaatacaagccaatagatgtatcacactacgtttttcaaaccatagactattacaggcatgaagcacaagaagtctaacccattttaaactgattaatttaattaggagacaggtttggaggaacagaaaattgcttcttgttagttctctgagcactgcagttataagactgtatgctctgctctaacacaggtctgttctctctgaggtcatctaattctcctaaaaggggttttagatgctgagttgcatttgtaagtaaattctttattctttttctaccttctttcttttttattccatagtcattaaagccttgccgtgttcttgttatgaactgataaatgctttgtaattactctgtaactaaaaatgttaaacttgaatggttatatggattttttttttatttttttaaaaactcactggagaaaggaacagtgttgtgggggtataaaaagaattctgacagagaagagcagaaaacagaaactaggtgtggtgggggaggaatggcagaagtgccagggtctcttggtccatgtcttgagcatttactgtttgccagccacctttatgtgggttgaccatatataccataccagggcttgatatccctaaatcctcaaaaaactccatgaaattgctacctgttttcaggatgcaaaagctaaggcacaaaaatgttagttatcttgctcaaggttacacagctagtaaggtggagactaaatttgaatccaggtgggatgattgcatcctacaaagttcttgaccagagaactaatgtggggttggacccacccaagttccagtcctactctgctgcttcccaacaatgtgaccttgggtaaagttattttaacccctttgagacttttccccaatttgtaagtgggtttaaagcacagtataaggttgccgtgacttttaaatactgtgatgtgtattaatggtttggcatgcagaaggagcttggtgaacgttgcctttttgccctttcatgtcatgtcctggggaagtagcagtgacagcctgcagcctctgttcttctcgaatgttcccaaggtatgaggcacctctgagaactcccagagctctgcataggttgcttaaacgtacagcccactcaatgagataatttctaaggtttcttcttgcccttatctttagtgactccaaagtttaattttcataaattcatgtctacctagttacatcttgcaaagtgtaggactgcctttgcagttgatctgtcagtttgtgtgtgtgcacagctggaaaagtgtgttttccatgtagaatgagagaatttgcctggcactgtcatttatttttcttaaggaaagataaaagtttagttctttgatttctttcttgggattagttttttcttgactatcaagaaagaagggaaacaagtttgagtgaaaatagattgaggttccccccccctcatttcacactattaaaagagtgacacccaacttcttaggtttctcttccacagcacgggtgggttttgtagattaatgtatgctactgagatgttgagtcagggttggattagggaggagctcccctccttgcatttctcccactctgtcctttcagtccctcaaccagctaagttcatgcctgtagttggttagaagggaggttttctatacagcttgagagaaacatttaacagggtatcttcatgtttgtgtagatgtcatttgcttcattaaaagcaacagagtgactttttaatgattgccattctaactggtgtgagatggtatctcatagtggttttgatttgcatttctctgatggccagtgatgatgagcattttttcatgtattttttggctgcataaatgtcttcttttgagaagtgtctgttcatgtccttcgcccactttttgaaacaacaggtgctggagaggatgtggagaaataggaacacttttacactgttggtgggactgtaaactagttcaaccattgtggaagtcagtgtggcgattcctcagggatctagaactagaaataccatttgacccagccatcccattactgggtatatacccaaatgactataaatcatgctgctataaagacacatgcacacgtatgtttattgcggcattattcacaatagcaaagacttggaaccaacccaaatgtccaacaatgatagactggattaagaaaatgtggcacatatacaccatggaatactatgcagccataaaaaatgatgagttcatgtcctttgtagggacatggatgaaattggaaaccatcattctcagtaaactatctcaagaacaaaaaaccaaacaccgcatattctcactcataggtgggaattgaacaatgagatcacatggtcacaggaaggggaatatcacactgtggggactgtggtggggtggggggaggggggaggggtagcattgggagatatacctaatgctagatgacgagttagtgggtgcagcgcaccagcatggcacatgtatacatatgtaactaacctgcacaatgtgcacatgtaccctaaaacttaaagtataaaaaaaaaaaaaaaaaaaaaagcaacagagtgtatacctgtgacatttactaatgtgtgaggtgtctgaggaccacctgcgtgagaatcccctcgggttattacataaagagattcctggcccactacagacccacagaatcaaacttgtagtgtcattattttgtgatgtgaaaatattcttttcgtgtattgatcaaacctctgtttgagaagcaaccatgcaaacttatcacatcatttgaccttgttcagatcttggtgcacacattttcagggctaattttctcccactgcagcttgctgctgccagtgagggcctgcttgcccaagttcctggtgacctcactggtaggctgggctgggagtggttggtgacgttgccagggagactgaagttgggggcatgcagcctgtgaagccaggcaaggctggagccaggaatttgtagttcacagaattagatgcaagggtgaggtggtttgtgctcagaggagatgaatttaccaatcttagtgggcagaggagagaaatgggattcaaataactgaaaggagaggtagcaggagactccaatgtgatggggatggagatggggcaatagggccagaccttggatcaggtcttttcctcaaggtatttatggtatgacttgacagtctagctactgggaatttttgcggtaattgaatatttagacattgagtataatgcattatatgggttaagtgtatatattgcttatataagtaaagagtataattgaagatagctagtaacagctaagagtatagctagtaaaaacatactagaactaaaaataagctcatttctgaaaaatgcatcctttactaccctatacctactattttagaacattctagaaaatgtaagaatacacaagcatacgttcttacattctagtgcagtggtccccaaactttgctgcacaaaagggccatctgggtaataattttaaaaacataatgatgtctggcttctactcctagacattcttatttaaattctatgggatatgatgtggacattggggttttaaaagctctccagtccctcattttatagatgagaagattcaggactagcaagattgtgaatttttccaaggccacgtggtttaatagtggagaccggattgaataaagaaaggtcttctgactcttagctcagggcccagaaaccactgggccttccaaacaaagggaatttaagacagggcattgtcgacacaggtgatgcaagagttgaaaaggcaaactccaaatggtgaggaactcagagaccagcaacagcaggaagcaactgcatcatccgtagggttggagaaatgatgggagcaggtggtgtttctggatcccagagactggagcaaccttggagggagctaggaccaagatggtagtggaagactgtgtctgatgggagccaagactctagagggggctagagatgccacctgaagtgcatgtgttgggtggatacccttgcttctccctcttccctcttgttttcttgtcttccaccagtgcttcctattggcccagaccagttgggaagtgtggtttccttcaggacaatggaggcagcagacctgaaaacaacccagcagtaactagccctgtggtctttctaatgtactgaggtcttgtgattagagcagaactccatttggacactgtttctctttctttcttctttttctttcttttcttcagatcttgctctgttgcccaggctggagtgcagtggtgcaatcatagctcactgtaacctcgaactcctgggcctgaagtgatcttcccatctcagcctcctaagtagctgggactacaggtggatgccaccatgcctggctctttttttttttttttttaattttttgtggagacagggttcagctatattgtcctggctggtcccaaactcctggcctcaagtgattttccttccttggcctcccaaagtgctgggattacaggcatgagacaccacaccagtctaatgggcagataatttcttatattccttttcataagtggtgtgattgataggcttctaggttgctataatatacgtctgcacattttcattaataccttctttctgtgacgattcacctctctcccattcaacatgtttacatttttacattttttatacttaaaatatatatagttttaaaaatacgcattgtaatcttatctgtgctaaatcttaaacatttgttcctttgaagactagttacttcctagatatattgcctaaagccagatgatcctatgcatgcatatgagatgacagatcttactttactatatcatttaaaagcatttttaaagaaaaatggaattatagtacactgcattttatttgttctgcctgatgggccaagtgctttgcacccagtggagctgagccttgccagcctgctgttataacagtagctcccctgtagagctcagcattctttagacttggctaatgagtctgatgtcataaagggagctttattaaaataaatatggtaccatattttctttctaatggcattctgattaattccatcataaatgcatacctgacactcttttaattaattgagatagcaaagggattccagctagtgatattgaaagtgtagacggtgttttcaacagcatgttcctaccctgacaccagtatcagtgtttagtattactgtagatcagaatctgaagacctatgtctattttaacatatgtcactgaacggctgtgagagtaattaaagagtaatgcttgcccctgttttgaggatgtagctacttaaacactaagagattaaatgttgccgaaggctaccagcaagggagttgtggaggcagggttagaactggtttctaatttctagccttttgcttaaattgccaaccatgggtcccggtaatgtgttctgactttattttccttcagacttaatctgcggttaatgatagctttcacaatcagaaagaacatgtaggtctcgaatttatgacttccataaatctactactttccaacatacccacaaggatggtttggcagagacacagcttgtggtacacctattatcctttagttaattgggctgtttttactatttgggagatcctatattttaacatagtacgtgaaatattaatagtaaatatgaaatataaatttcaaactttaaacattttgtaccattacctaatttttaaaaatgcttatgactaaacctgctgaacatggcatgttcgaatgattattttacttctgtggtctattcctctcagaaacattgccgtccagaaaaatctaatgatttcttcttgtggaatagtggaatgctagataatggcacaaaaccagatccttcagactgtataaatgcaatgtaaaaatggagtggaaacattcagttttaggaagttagtgactcttcatgtcctgtaaaattgtgtgtatgcatgtatttttttttaaatgccaggaggtttgccaatgggactatagaggatatgccagtgagacagagaagatatgacttatacagacaagccagaatgctcattatcagagggatatttgtaggataaatcttatcttttacaggacgtaagaaagataaagaactattttatggtggttaattcagctcagattgctgcattatttaaaactgtgagggaatctttaaaaaaattcaattttctatttcccatctactttaattactttcagcgggattttattcattgtaggcaatgaattgtccacggataaatggaattgttggtagtcactttcactttggagctcttctataatcgaaatatgaagatatttgcattgctttatgaggacatttaaatacaagaagtaggtttttatatttcagattgaaagcaaagaaagctacctcactgattctaaattcactttgtaaaatctcgaattactgaaattaagttcattcagctcaaataagccaattgttttccctttgctccaagggagaagagcaggctctgtaccatcttgattggttttttatttgctcatcccctgatatgatttggctgtgtccccacccaaatctcatcctgaactatagttcccataatccccacatgtcatgggagggacccagtgggaggtaattgaatcatggcggtagttacctctatgctgtttttgtgatagtgaatgggttcttatgagatctgatggtttaataaggggttttcctcccactttgctctggacttcttgttgccaccatgtgaagaaggcctccccagccgtgctgaactgtgagtcaattaaacctctttcatttataaatgacccagtcttgggtgtgtctttattagcagcatgagaatgggctaatacatcccccttttgtaataccgtgagggagggcgtgcattagaattgtggtattccagtaggaaaatgaatacaccataacaagtcatggtatctgactttagaacacaaaccatttgtttctgatgttgatgtgcagactggcttccgtgacttggacttgcattctcttggtcatgtcagatttaagattcttttatgcagaacaagctaaacaatatcatggagttataggaacctatttattgtacatgtaatgagataaaggtggcctgtaataaaacagtgctttttaatattgaagatgctgaaactcctggagaagcaggtaacctgcgtatttaattcaaggactgaatcataagagctcatctttgggaaggagcttaccatcatttaatgctggatttttaccttgcttcctacagaaactattccccccactttgatatgcaaatatttccattgggcttttggtttcttttacagttttccaaggcactacatcattgtatttggtaatttcactttctttgtgtaattgttcctaatctttattctaaaatcttatcctacaatagttcaatgaaaggtgcttttctttttcttttaatgtttggaatactgcacttaatggagattcccatgtttactttaaaaatattcaaattttcagaaaaatgtattccccactttatccaaatgaagagtagtcactgcagaaatctttttattagaatcatagcattaacattggaaattatctacatcagttcccgttcaatgcagaagtctctaggcttagttttgtagagtacagagagggctaggcatctgtacttcaatctacaaatcctcttttcctcaacatccctcctaaaatgtggtttcaaggtggctatggccttggttttctttctttctcaagctcttcaggatgccacattaaaaaaaaattgacagatgtgataaaaattttgatgttaagacccgataaatatttttatagatgcctcaccagtgtgcttaagggacacccacggaaggtagactggtggaggcttaggacagtactgtctccctcaaggagctgtatatacctggaattatggcacatgctcacatggcatagttaggacagaacataagagatctgtgattaggtggcaaagcatataaaacaactactagaaaatggtcatgggaagggaggggacagtgttgagccttggcaaatagatattggagcaaatgatttgcaaggagactgatctgatggaacagtattcatgtttgaggctggtagtaataagatgggataaatcaaataggacaaagtcactaacaggcctcaaatgtcactgtgccgattttgaacttgacattgaagttactgggagccagtatggactttcgagcactggttgactaaacgaaggcagaacttttatctatttcacttgcttagaatgcctagcaatgtgaaaacagttaaatctagaagaccaaatatagctgttgcacaaggttctagaagaccaaatatagctattgcatgaggttctaggcactgagagcaagtttgacctgaagaggtccagctttggatggatggaccagaaaggaaaaaaatcaaaaggatttttggtaattggcaacgataaagaggttttgaatctaagataaccatgagttttggtgcaaatggcaaggacaatgttggtgccattgacaaaattaggggaattattttgtttcttatttcagcactgaaatatggaaatttaatttgcttttgagcaaatcaactttttggcacagtcccttgtttcaatacttaagaccaggcccagtgagcagatgggagatggggacttgcttctggagaattagagctttgagttctagtctgccattgatcgattacaatcaagcaaatcccttcctcccttgatatttcccacatatgaaatgggaaggataatgggtttctgcttagagggtgattgtattagtctgttctgactgctataacaaatatgccattattatcacaattctgaaggctgaaaagcttaagatcaaggtgggggcagacccagggtctggtgagggcttgcttccaggtttgcagatagccatcatctctctgtcctcacagggtggagagcagacaatgaggaaggtagctctctcctgtctcttttataagggcactaattccattatgagggccccatccttatgacttaattaccttcccaacgccctgcctcctaatacatcccatttgggatttgatttcaacatatgaattctggggaaacacagatgcgcagtttgtaacagtgattgtaaaggatgtgcaaagaaacgttggcaagaatgctgtgcaaatggacctgtctttatgcatactctcctttattgttgatgtgggtgttaaagcccatgaccagtcattaagaacccttactccactctcttctgggcatatggcaagtgagattctgactttaatggctgggatggggagaaaggagctgggaacatatgagaaggacctctttgtcttgtgtctgtttcagcagcaagagagaagacattgcttgcagccagaaggaaagggactgtctccaggaaaatgtagcctttagttagcagaacttactttagaaggactaggactcaggcttttaaataaagtgttgaagtctctgttcatctgcatgtgtgtgttgaaagaattagtcaaaatatctgaccttcactttttaggactgaatcaccattctttgctaaaaaccctgagtatggagtgataataacaagaatcaaaaggtgttttcaagttgtatatacaacatagatagggttttgttttaaagataggcagtgagactttttctgtattgtaattttcattagcattttgtaataaatttagtatctccagttggggttcaataacttaaaatgagaaaaattgcaattttaataataagcacaggttgattgcctactttgtcttttgtattaaaatgaatgttgcaattactgtgtattaatacccagcaaactatgtttctttttcatctggaactagaaagtattacttctaaacaggcacacacaatttatccttgtaaataaaataattctaagtgtgcatgtatatgtttattatgaagccatctttcagaatgcaccaaatggaaggagagaggagctgattgtcttttattgtggggctgacagaatgtttattaatggccatggatttgaaatgagcatcttactaaatggaagtctttggccaacctctgacccttttgtcttaaaggtttgagaacagataatacgaaagaataccagcttttttccagatggctgcatgcctgatgttcctttatgtttagctgtcattcaaatatgaatgcccagtgattataagtgtctctttctcttttctggactgaaatgaaaccttttatgcattgtgtgttaaaacagattaactgtttggctcatcagtagggaaattagaacaatagctgccaattcaatggtatagtagaagaatgtcctttggggccaggggctaaggttcataagcaaatggtatgtacaagtgtcagactggggaaggacagacaagttataaaaataattcgcctgaattttaattttataactgcgttggagtagtaatatcttttagaagcagggaggatttagataaatttttacgaacttttacatattttttagttgctccattaataatttcttggagtgctgttgtacacgatgaatttaaaatgatggatttatagataatgtgtcttatgaagacataatgcagaattactgtatgtttccttaactttttagtgtgctaaagttgtcttttaaatatatgtatttcataaggtagaataatggataatttgaatgtcatttttctaccaatactaacacttttgtaatctgaaatggaagtcaaggtggacagctatcatttaggtatggttgcaatgcagacctgcccggagggcaaggggaaaactggtgacccctcagtgacctttgtaggagatggctggaggccaaaggtctgaggggaccaaccgcatcaatttaggaaactagagtactttacaaaatgctagacaaactcacattgttagctctgagtagtaaggtggctgtcattttccatggaaatccatagaatgaggaaactacagtagtcttatgacctagtggacgaaaaagagcacatgtgagcttatttaacccctatgtaaagagattattttggtaacaagaggtactttttatgtattgtttatagaaaagcacaaaggaaagcctaccatgaaattctgttgttttaataacaattgtgttttctaaaacatccaaagatgaaaataggcttaaataaaataggcagctataccactttgtaaaacttattgtcatagtatatttttgatattttcacattttgttttgtattatactttttaaaatgattttatgcccagctaatttttataacagctttattggtgtataattcacatcctaaacaattcacccattaaaaaatgcagaaatcaatgacttttattatattctcagagtatttgcatccatcactacacagttttggaatgctctcatacattcttccccaaagaaaccccactcttcttaccagttatcccctattcccaccagcccttgacaattactagtctacttttggtacttttggtccctatgaagttgcccactctggacatttcatataaatggaattgtacaatcaatatgtggtcctttgtgattagcttctttcagttgaaatgttttcaaggttcaaccatgttgtagcatgtgtcagtatttattcccttttatggctgaataaattctattgtatggatatgccacattttgtttatgcattcatctattgggggacatttggattgtttccactatatttatacttttgttaattaagtgttttttccagtgaatatttatcttgtacacaatatgacttctattaggttttaagaggttaacatctatgtacgtttcatgttaagattatggtgactaccaaaagacaactgtggagtcaagggctactataacaggtcttgcacaaaatccaatcaaacaccatagacctctaggatctaagcatcctcaacgtagattgaggatctccagaatggaagaaatgcttatggttagcagtagagtggtgggtaggggagggggcttgcgcatggagcaatggcagatgagctacagtatcttgtaatatcctccacagtaccataccctgcctagcatgcagttggcattcagtaaatacttgttgtctgagcccattttgtgtaatgccacaccaatttaccatcttccaaggggcaaattttcgaatagtttgcaggctctcagctctcccaagactaactaatatcctgcaacttaaataagattgttatcttgataatgattatagttgcagagtactcagtagtttatgaatacttttatttggctctatttaattttctaggtaaatactgggtagaacagggagaaatctcatttgccagaaaactcaggagtcagaagtatcatttctattaaccagcaaagtcaaacttcactccaggtcctgcagctgcagaatttgtgcttttcttcaaatatcctgctacttacacacctctctacctctgcctttatcttgcttctcctctttttattaactacgaccagcatccactaagacttttgtggggacctctgagggttttagtgtgaaaacaaccttactgaaaatgtacactaaggagttccacagttgtgtcttgactgtttccttgaataaattctctgtcttacgtaccaatattaatagtgattatggcactccaagatgccacacagtggttccatcaacactcggtccctgaaacagaagtccagaactgaataaatgaaatggagtctatgattaaataattgcagtaaagcagatactgggtaaaaggagttggcaaggttatcttcattgatacttggagatgaggtcgaatgctagtgccaggcgatacaggactggactcctgaaagggcattgtgttgccctttcactcattactgagtgttcctgtgcatttcagtaaatataacatctatctataaaagcatctgttagcatgatgagaaacaggcaatgcctattccttttccacagagtttaccaacatactttctcacaataatagcaaagaattaagataatcatcactctaagtaggatgtgaaagaaatttagagaaggtgactagtgattatgcgtggagaacttgctgtattcaggaatgtacttttatctctatcttaacaggtgggcaagcaagggttaagtaattttgcccaagatcaaacgtctagaaaacagtggagccagactgtatccatgccatgaaactccagcattcttatttggcatcccagtgctcagctgccacctgcagttgaccgtaattgctaatcaccccttcttccctttgtcactgagtcctgtgactatgcttctgaagtgaaagtcatttttcttttttttctcacttcatacctctattggtggttattttattctctgaactataaaagtaatgcatatccactggagaaaaattcagaaaataacgtataacaaagaaattaaaaagtacttgaaattctgcagtgtaaatagcacagaattaaagacatatggaagcctcagctatgttggtgtttgtgaagtcgtttgatcaggtgcttttattcactttctttcacaattgctgtttctaagtgcaaaaatttcagtgatgcctccagtgatctgactagagaaatgtctgttccttagcatcatgggtctactttataaagtagaccctctctgagttgttagcaagtgtgatgttgttttgtagggtactcagatgctgtattagttcagaatatcctgtttgacccttggtgtacctgaattagaccatgaaggtttctttgtttctgtaggaaatttcactcagaatgtctgcttaagaagtcatcaccttcttctatggtctccaaaggagagcaaagtctactccatcctctgtcccatccactgccccttgccccactggctggactcgggcagtggaaacacttctctgtctaaaccattgacagtggacctcatgatgaggccaagcattgaagagattagaaattgagatggagtttggtcagggctttgacaaggatgggcaccataggaaatagtgtgtcccaggcagtggttgatggtttgactcttctccatcctgtttcttattgctgttccatcagtgctggtgacactgctgtctgtgtttgtagaatgctggtgatgaggaatgaggacagcattgaaagacgaagttgagtggggaagaaagaaacagtttaccaaagaatatcaagcattattagttgcttattaagaagtgggacatttctgtatgttagtcaattaaaaacagtcactttgtgaggtctttttatcactttggagctgaggaaatgaaaattcagaaaagtcaagtatgattttgtaaagctgcatgtataaaatgagcatgtactttaaatgtttcatttgttcatgctttgttttacgttttgtaataaattgagccttggtcaaagttgaaactcagaattttatttttaaaaggaaatgagagcatgctatgctattgggctcaatttgaattcttcagtgaaacaaagaagtagaattttattcattcattcagcaaacttctttttttgagcaactgattatttgcaggtgctatgctagatgctgcaagcaaaacatgtgctctgctatcatgcagcttgctgactgctgggtgtaaagacaattaagtaaaaacaatagagcactttaatgagtcttgtgatgattttttttgatagagaataagtttcataaacaattacatttagaattatgaaatcgtgagataaaggaatataatgtcctaggttattgtctaataaccatgatttcctccttttttgctttgaacaaactttttgtgaaaaatttcaaactcatacaaatagaatagattatgagccttccttaccccacaagtatccatcatccagctcttcaaatcattaaccactgatcaatgtggcttcattgtttttctttcatatttttttcctattttgttcctatttgtttttcttttgggagatgctggaagtcttggagcagggctttctgtgtaatagtggagccatactgaaaaattatttttcaaatttttgtatccttttttgaaacctgacttcagggttcaagggtgaatcctgctgctcttagagggaccttcttttgctgcctttagaggattgtttaccttgtagaaaagtatatgaagtgttggtttggaaaaagcaaacacacttgtcaggtgcaaaaacatagaacactcccaataatctttcatgtaagctaaacttggccaggcgcggtggctcatgcctgtaatcccagcactttgggaggccgaggcaggtggatcgcctgaggttgggagttccagaccagcctgaccaacatggagaaaccccgtctctactaaaaatacaaaattagctgggtgtggtggcacatgcatttactcaggaggctgaagcaggagaattgcttgaacccgggaggcagaggttgctgtgaggtgagatggcaccattgcactccagcctgggcaacaagagagaaactcactcactctctctctctctctctctctatctgtctctctctctctctctatatatatatattatatataatttttcatgtaagataaacctaagaaaaataactgcatggaacattcgtatttgtggtctctaaattgtgtaaaggcagcaatttcaggcttttaaggaatcaagctggctgcagaattgggtatgggaaattagcttgtctaactcattggcttgatttttgcggtgcccatgatctttgatgaggactttgtattccattgttctgtgtaatgcttccacaagtcatttctgcgaatggatgaatttttcttatgtggcaggagccgatgcgtgttttttttttggtagcgatcttaatgatgcccataggataaatgagaaattctcacaaatcctcactaataaatatggacacttaaaaagtctccaggtgtggatgctttgtgtttactgctgagagtgcccctgaaaatgctttttaaattttcttgcctgtccaggtaatgtgatgggaactacaggaagccagtttaagtgtcaatgtagcctagaatatggagaaaaggcaattgtttgcataatattctactgctaacatgtgtgaatgtgctttgcaaacttatttcagttcttgaacatctcagaagggctggggagcaggtgatgttgacccttttttactcttaagtaaatgctcttaagtgggccagtcaatagtgagctgggaccagaactcaagtcttctgttattagcatgtgttgctgtccagagtagagcctggtacattataggcacttggtaattgaatgaatgagtgaatgaatggaaatactccaagtcagctttttgcagaggatgcctttatagacccttggtattatgaagagatctttggaaacatgttttatggaaagataatttaggaaatatttgtctctggaagagtcactgaatatgtaaatatatcctgcatcaaagaaatcactgtacctttgtttagtccagtgtttaatgattatggtgccttcctatgtagcacatctattaatgtcccatagaattattgttatgtgtaagagcattttggaaacatagctccaaatgaatagctttctagaggggaatttgatattgaccagttaagactatcaaattaaaagttaaactcagattgtgaccttctgcttttgtctcatttactcctttgtttccatcctgaagttgcaactgtcatctctacgtagattatttggactttaccttttctatcttacctgtttcctgggtagttcttttatttgtgaatttaaaaaaagcaaactttattcttttaagaataatacatgttcaagttggaaaattagaaaatataacctggcaaaattaagagtataattctactcataatcccactatcagagataactgttatttatgtgctgttgtacatatcctttagaactcaagactacaggggtagtttatctgggttcaagtcccagctgtttctcctactggctgtgtaactttgggcaggatatttagcctatagcctcgatttcctcatctgtaatatggggataattatagtgcctatatgatagggccattatggggattaaatgaattaatatttataaaagattagaacaataccagacacatggaatttatatatgctaaattaaatgtgtatgtatgcaagtatgtatgtgtacagtattatattgcatgcatatatcacaaaattaagcagtaccccattgttctatattaacaatttgttttaaatttttcacagtaacaaacactctgtagtaaacattcattctccctgttttttacgtatccatcattatttccttaagtcaatttcttaatgggatctactagatcaatggatgtacatgtttttagaactttgatatagtctttctagagaacttggtaagagatcctgtcaatgctgctaatagctgtgtttgagaatgctgtctttttttcttttcatcaatatggaagataaaacatttttcccatttaaaagacattactaatgaagttaattgttgctctatggatagattttgccacttgtatttcctttttggttgttgctatttacagtttgaaaaaaaaaagacattgttttttctttttgcaagaaccctggtgatctttcgatacatacagtgaaggcacagtgatcagatcagggtaattagtatattcatcatcttaaaagtctatcatttctttttgttggaaacattcaatatcctcttttctagctatttgaaaatatatgttattgttaatcataatcattctacagtactttagaacactaggacttactcttcccatctagctattattttgcatcccttaacaaatttctccctacctcttttccccctacctatccctgcttctagtatcctctgttttactttttacttctatgagatcaccattttttagcttccaaatatgagtgagaacatgtagtgtttgactttctgttcctggcttatttcacttaacctggtatcctccaattcaatctcttttgcctagaatgacaggattttatccttttttatggcttaataatattccattgtgtatatatgccacattttctgtatcagttcatctttcattggactcctaggatgattccatatcttggttgttgtgaatagtgctagaatagacatgggggtgtaatatctctttgatacactgatttccttttctttggtaaatgcccaatagtgagattgctggatcatatggtagttctatttgtagtttctagaggaacctccatactgttctccacagtgactgtattagtttccatttccaccaacagtgtataagtgttcctgtttctctgcatcctcactagcatttttttttaatttttattttttgattatagccattctaactggggtgacatgatatctcattatggctttgatttgcatttccctcatgagtaggatgttaagcattttttcacatattttttggccatttatatgtgttcttttgaaaaatacctgttcagagcatttgctcatttttaaattggatttttttttgctattgagctctttgagttcctatttattttgaatattaatcccctgtcagattgcatgtattttctgccattctgtaggttgccttttttctctgattgtttcctttgctgtgcagaatcattttagtttgtatataatcccatttatttatgcttttgttgcttgtgcttttgaggtgttattcataaaatcctttttcaaaccaatgtcttaaagtgtttccactgtgttttcttctgttagtttcatagtttcatgtcttacattatgtaagacatttaatccattttgagttgatttttgtatagagagatgggagtctgttcttttttccttattgatacctagttttcctagcaccatttattgaagagattgttctttctttaatattctttgcacctttgtcaaacatcaattagctgtacatacataggttaattgctggtttcactattccgttccattggtctgtgtgcctgcttttatgccagtaccacgatgttttggttactatagctttgtagtatattttgaagtctggtactgtgatgcctgcagctttgttctttttgtcatagggaaatttttaaatttttaaatgaagtttgcctagagaggaaaaatgtttttaatttccttttttatcctaaagtagaagtgataaggtttcagtttttaaaagtaacatctcattcacatttcatgcttttgtgatattgacctgtattctttccatcattgactagcctctctttcaactcatttacaaaatgagttatatagaatgtaatatatatacataatattaaatgattgtcatgtgtggacttactgagctagatagttgaatctttctgtccaactgtttagtttaaaataggattttttttttctgagtaaatctattatggatgaacttggggattttgtttgtcaacccattggacaagaatggagtggagaaatttctttcagggactgatctttaagcacatttcctggatacggaccttaagacctgtattttaaaataatggaagtaaaatatctgatgcatggaatcttctcatgcatataacctcgttttctactccatttatttgataattgtttcatcatttcagattcaatttgtaatagcaatgaacactctttaatatttttctaataaggattagttggagaggttaatatggtcagaaatttaaagaagcccagagtcatcttaatgagtgtcaggtaattaacctacatgaatagattaaagaaatcaagcaggcacgctgatgggttttcctttcaagttcaaatttagaacatcatctttgcagtggttaggtcttacatgttagatggtgattgctatattgttttttaatatataaaaagcttaattgtgaaaccttattagaattcctcatcaaatttgcttaattgaagaatgattatggtatgtgatatgaattttgaatttttatatgcaaatgatatttttaaaataaataggcttcccaaaatgattttcttcatgaatcaagaaccagtgctttaatatgtagatctcttgttacaagaaaaacaatcaatgtagagcttaagcagttcgtgaactgctgaatttaggcgtaggaaacttggtgaaagtgattgtcactgttatcccaggaatgctgttcaaatctaaatgaaaatttatgccagtggtcactgtaagactaaaaggcaagttctggaagtaatcttgagtagttcaaaggcaagatttcatctacattattcaaataggtagtttctcttcttaaggaattctaggcatttatagaaatttctcctttgtttaattacaatgaagttgatataagctgtttgtgtttctggcccctctgaaggtggtgtgcaggtagttgctatcctttcttttataattatggcgactttagacatggaagaggctaaaaccagagatcattgactttgatcctgtcattacagggagttatttctcatctagggtagatagccccatcttgaagaatgagacaaaatacaaatttggacctcagctctgtcacttgccatttactccttgagcctaaatattctgttttgcacaatggagccaaaagtctcatcaaatggacagaataaatgacatattgcttgtgcaaacactttgttgatctgctcaacaatacaagtatcagatgtttcattgttgctttccaaggaacttctctcctctcactcctaggtgtgtctcgtccaagatgtgctcattttatttgaccgtcttttaattttcagtctcttaattgagttctgttttccccaaccctgcccaaggactttcttaaacaatagtacaaagacacagtttaaaaaaaataaaaacagtttaaaaaaaaataaaaacaaaactgttgagttcaagaggaggcaaaatgttattatttctacacataccattcctaatctgtggttagtaaaatgtcagtttaggtcagagccttgtactttaatctgcattatggcccgttacctttttccattgtcacagactgtatccccaactctcattaatgagggtccctatttaaaagagagatcaaatcaacccttattgtgtaaagggctctgtgttgattgttggtgggggtgggtgagatacaaatataacgtacagaccatccttatacctcttatcatggttagaagatggcatattgtgtaagccagttgttgatactctaagtgtctcccgaccactcatttggtcgtttggattttataaaatgtattctatttctccagctgtgtttgtgatggataaggagctatctttatgccactctatattgccatattgaccaacacaattgtttccttagcagatactcaatgaatgctttgaatcaagctgtagaatcagaataattgaaataaaccccttgttacttttagaaaaacaattcacaagactgatattactgatgctaggtgataatatcctatgaaactctaaagagggtccataaaagagccttcctgctcagcacaggaatgaggaagggtagatagatggaacgttctttaagtctgaaaagttaaaggtactgaatccttatcacataacctgaggcatctaatttaattttcttttatgccttttttactcctattttattaaatttgcagtctgtcaacctctttgagaattttcttaatttttctggatctgacttcctaataacacgttttgtattagaaagactttattttagctgcagttgaagtaatttgtaggtcatgattaattcaccagtattatttcaggaatcctcatacaaactgtttcagtggttattgtttgttcatttctctactggggcaagttaagtactgagaagtaaagtaatccacaaagtcagtggaaattgtttggatctctgaggactatcaggaacagataatgaaaacattgaaaacattctactttaatactacttttttttttaaagatcataacataggacatttttgtcgtccttataatcatttgttacaaaaacataagaccttaatgtctgttaactacaccttgatttaaaaactccactttacagaccacacttgatcactccagcacaattgtatttggcaaaggggactcacagggggcacaaaaagaatatgaaactaggcttgtaaacccaacagaaccattggaagaatgcttcaaagttggaggagtgcttcatgtttgtgtgaaagatctgtgtttattttctggctaaattcccactttaggagacaactttacacctttccaggataatcccgcctgggcacaaactgaagtgatattatctggttcatccagctttctctttctaaatccttgggtaattttgttttatcagattcataactccctggcacatagtaggtcctacctgctgggtgagtaataaatatttgttgaagggttttggtcatttctgttcacacttgaataatatgtgatgaggctgagaagacaactgtggaggcgattacatttgtcattagtgacctcgtttctagtccctgaatgttaactgttttcagagggaatacttctcttataggaaataaaacagtctactctcctgtgcctttgacatcctgagtgcttttcctcaccactgagaattggacagtgaccatgctttgttagagaaggaagggtgaggggttattcatgttctgtacattccattctggaattcttggtatcagaaaaaaggttttattattagctcagtaagaaaatacaatctgcagtctgtgtggtggtaagtgtcctggcataaaagctaagcttttaaaaatttatgtttcccctttaaatgctgttttaacatccagtctttccaatggacatttttagagcacagatatctgctcctgaaagtcatatgttttaaactgtttcctgaaacacgctgagattaaaaaaatttatgtaggttttgaacttctaaaatgactgagtatttaaactttaatgtaagaagcacctgcatggtaggatttgctgaaaatgctggtcttgagccatatgcacagattctaattccttcagggtgagtggaggggctgaggatcctgagtgattttgatatagtagattgatatttagagttcctttaataaacagtgcattccagccttctactccagcatagcaaactatcttaaaatgtattgccttaacatatttattttatgatatctcttgggcttgtgggtcaggaatttggatggggtattcttctgttccacacagtgtcaactggagtcacttagtgatattcatctggtgccttgtctggagggtctacagtggcttaactcacatgcctggccccttggtagggatgactggaaggctgggcccagctgggaccctctttgtgtagtgctgggaatttttgacaaagcctcttagcaaggtatttgtactactttacaaggtaactctgggctcttaggatatggccagacagagtgcttcaagagagccaagcagagctgcaaggcttcttgtgacctggtgtcagaaatgccagtccatcgtttctgccacaatctgttgatcaagtaagtccgaaagaaggccccaattcaaggagaggggaattagactttccatgccaatgagaggagtagcaaagaactcacagccatctttaaactctcacacactaataggcagaaggcacattgctatgaccatgtcataaatttctgaattattgattcatagtcattagttactatcttaatataagggctcattgtctttcacctgattagtttcagtgatttctaaaaggtatatccttctacataccagtctctttttactttgatccgttttatatatggcacaagtaatctttttgaggtgtgaatgctgatcatggaagtctttttcctaaaactgtacatgtgtctcatctcctattatggaagactgtttagacggtctaaggttctgtgatggaagtatagtgtagaggttaatatcatgaactctagagtgagactctctgggttcgtgtcttggttttgcgtgaccttgggcagtgcactctatctgcaccttgcttttgtcatccgtaaaaaagagaattataatgatatccacctcagtgggtgattataagagttaatgaagaggatatacaatgtcattagaatgtgctgggacagtaatggttgttttattattattgctgctaacattttatggcatagcattcaagacctgtcctgttctgttgtaccttgtattttcagtctcatttcctatggctattcttgtaatccatgctgcctcacccagttgtcttctgtgctgtctgcctgttttctgtctttccctttactcgtgctattgcttctcagtgaaaagggatcttctctccctctctccattgggacatgatattaccaagaagtgctttagagggttttcagtagatggaaactggaattttatatctcatttcactgtgacatgtggtcaggttttgtctctccaactccgatatatgcttcttgaggtcaatacctggatcagatttttgtctttgagtttgccacacatgtggcatagtgcagcgccttatgtattggtgtttaaaatcagttgtgttgagggtcaggaagggctagattatgctgcagtaagaatctggaaacctcagtggctttagtactttttagtactaagaggactacttttttagtactttagtttctcagtcatgcttttgtccatggtgagtcaataaggggatctgttgactgtatcagtcagggtccctggctgatgaaggctccatcttaaacatttttccatgatccagaagcatagaaaagagaagtagaaataaatgcactgacttttaaagcttctgcacagagagacccatgttacttctgctcacatttcgttggccacttacatggtcacactgaagttcttgtaggtggaaaagtgtgattctattatgtgctcagaataggagaatcagccatttatgaagaagctccaatggctaccacagatgacgcactggtctcattacctattccggtaagattcttctaggttaatatgcccaaactgttttaaaggtttgacctgcatgcacctcattaagttaatggaattcaattcagttaagactactgagagtcctttatatctcgtttggaggctgctctgtccagggagagtaaaacaaaatcttaaagtagcagttttgtttgtgtgtgtggtttttctgggaaatattaaagccttgaacaatcccgtatctttttcatatatttacctttaaagaaagacattgttttcttgcacctgtcctccactttgattcttgctttaaagtacatactggttagcaagacttgagattgatacttatttctggcagcataccagaattaccactgagggactgcaaaatagaatccttggcatagtcactagggttctgagttctaccaagttaagcgtgtttaataatttaatgatcttagcaaaatggaaagatatcccataaatatatgataatattcagtgcctcaaagtttaagatggtatcccaaaggaaattataggggcagattatcatatagacgaatgattacatttacttaacaaaaaattgggaggatttctgttttataccgtaatccttatgaaggatcagtatagaactttgctttaaggagttctaagtagtttatacatctaggaaagtgcagtagacatgggctactatgggaatagctattagagaaggcaaatagaggatggcaagtaaaggaccttcgatcataattcactgaatatgttagctgagtaaggcttctgttaaacttgttaagttgccaacattacatggtttgactgggccttgtaaggactagaaagcagtgcacgtgtatctacttttcattttgagaattgtgtcaacaaatatgtagaggttaagaaaaggaagaaaattattttaaaaaaaaggattatacagtgggaacaaaggatttgggaatcaaggaaatgaaggatatgagggggatggctacactaaagatcagctgttctgagtgcccagagaactggagttaagggtgtagcctcacactccttcagggacctgtactaacagacttcgcgagagagggattcactgtaaataggttgcttagagttctgttccttgggagttttacagctgatctagatgactggaagaatagacctgttcatgtaaattgtaatcctgttaaagctatggcatttattaaggacttggacccctttgacaatttggacatttaggaaccctcagtctagaatgatgcccatgtgcacaccctgttgtgtttaaagtgttcaatgggacccttagtttagaatcctggcagcacaggcaaggagaagtttgcaagatggtttgcagccccagcagttagctactgcataaatatctgtgatgataaagagtggatgtattggtggcttcagacaggcaataggggggaatttgtttttaattttaggcattttaaacagcacaggcttgtggatttaaaaaaatatttgcattaacacaacactaaatattgtaaggggcaaggaaagtttacagcaaagcacatttgcttggggagaaggtttctatggctctccactagctgttacatgtttatatcctccaaaactttcactctggcttttttcccgggaaagaaatatctgccctttcccattcttctacccttagtgtgtgtgggtggctgtgcatctccatggggaggacacggaataaagctgtgcagcatgctcctttgctcccagaatctcaagccaaaaggaattgttctgaattggctgggtcttattttctcagtgctatgcctggaaggagacaggatcagggtgtgatgtgtcctgaaagcataaactctttattagcacagataaatcagttggttggctcagtagatttttgggagtgttggtgacattcatttcacagggatctcaaattatccaggaattacccagacagtagattatgatgccctgactctggcaatatctgctgttactccccctcctccctgctcctgcatatgcatacaagacttctatgcttttgcagtgtgatgatattggggaagctgcaagggttttagtctttaagtttctcagagcaaaagaagaatggatacaatttactgtgttgtgggcgagagagaactgtgaaacctgatttaaaacaaaagtgtgggcctgtgtcttcaataatctgactttgtctccctgtagcataaataattccagttgtataattatggctattcaggtaataccctgttatattgctctggagttatactgcttttaagatttgctagttaaaagttgtcactttattcagacttttgtttttaaagttaaattaaaatgttcttaaggtagtttattctccaggaggcaggattagcctttctcagtagatatttggatctatttggaaagttttgatttttaaaattaagtctttgagtgtatcaagttaaagcataatgtattctaacatcaacttattttttatgaatcccaaaatattttgctacatattctgcaattggaaaatggcatctcggaaggattaaagttccatatgctaaaggagacaccaaactctgtaaaatatttcaaaaggcttattctgagccaatatgagtgaccatggcctggggaacagtctcaagaggtcctgggaaggtgtgcccaaggtggtcaggttatagtttggttttatacattttagggagacagaaagtgtaagtaaaataataaattaatatatggaagatgtacattggtttagcctaaagaactgggatatcttgaagtagtcgggagtgggggttacaggtcatgggaggattcaaagcttttctagttgaaaattggttgaaagagttatgctttttctaaatgaagtcagtagtaagaaatgtttgagttaagataaggggagttatatagtccagtgttcttgctgtgtagatgaagcctccaggtagcatccttcagagagaatagatgataaatgtctctttttgaaccttaaaggtgtcagactctcatttaatctcttctagatgcaggaaagacctagaaagggtctttcctttaaataagagattaaatgagagacctggctgtattagcagacattctctacatatgcaaatttcccttaaaagagaaggctttatagggtcatttcaagatatgaaaaaatatatgtcaaataaatatatgttgaagtaagatattttgatttccttcagggtctacatgtgactctataccagagtcaggttggaacttggtgtcttattgccacaaagcgtctgttttttcagtcttatgatgccaatttcaatgttaatgctggccagttatgcctaaactcccagagagaagaggtttaaggaggtttgtcccacctcccttcccatcgtggctggaaattcagtttttcaggtttctctggagtccccttggccatgagggacatccattcagacagttggggggcttaggatttcatttttggtttacaagtagtactaaacaattattaaatctgtttttcttaatgtaatatggcaaatatttacaatgatttgttaagtagtctatcggcattattctgacttattgttcccttgtcctttttatggagtctccctctgttgcctaggctggagggcagtggcacggtcttggcttactgcaacctcgacctcccatgttaaagcgattctcctgcgtcagcctcccgagtggctgggattacagatgcacaccaccatgcccagctaatttttgtatttttagtagagactgggctttgccatcttggccagacatcttggtctcaaactcctgacctcaggtgatccacccgcattggcctcccaaagtgctgggattacaggcaggagccaccgtgcctgccccttgtccttcatagaaccactttgatatgttaatctacttcaggacaggtgcctcttctctctctagatagaaggagaaacatcatctccccacctctgagcaccctaagaacaaatacatggccagtggttccaatccatgttacagctgtccaacaattggaagtatttattatttacataacagtatttctagtatataaaattcagttgatatatgcttgatacaatttactcagatttttgaagattccaaagacattttacaatgtacactgaaaatgattgttcccaaactgcatttcctgcttttcgaaatcatttctctcataccatccctccagcagcggtcagagaattgagtagcacttttttttggcagaataattctatatccaggtcagtgagagttttcttgttcatactttgatgttttgtaaatacaaaacaaaattcttattctgatctcagtcctgttaggggagtggttagctcagcatgagtcctaatgtatcagagatgaagggaaattggttgggagactactcctgggaccaggtgagaagcagctagtgtcattccgaatgtgctacagaggaagaaatccttgtagccctctatggtacttacttagaaacatcctattaaaatttgctacatagttaaaactgacattttgacccctgtctaagaaagtggggaaacccttgtcatgaataatgctatgtacagcagcagattaggacttctaccttttatctcgctttcgactctaaggtagcattccattctctgtcactttggttaaaatgttactttggaaggcagaggtcatttggagattgtctcgtggtatgtaaataaaactaatataaaaagtctgttttaaagttatacgacctctcctgttcttcctcatctcctttataaggtttataacttgcagacttttagcatcagtaagattataatatgtaagatatatataaacaacgaaaggaagaaaatgggaaagcagtcccatattcttaatgttcttactatatacatgtatggactaattcggacaaagtctccaattattttaaaatatactgatccacttttaaaaatccatttgcgtacatcccatatctaaaagttgtgtagggtataggaacaacaacaactatataaatctatatctatatctatatatgtgcaagcttgcaggatatcgcaaaaatgaattgagtggatctttgatggttaaggttgagtctgttcaaagcctattgacttttaaaccaggagtctcagactcagatcatttcaggagttagacaagtaactggtgaaatatgcatctgttgcattttagacagtgagaatttccttcatttctacacagatgtcatattgattattcttgaaatatgagatcttcttgatctgtcttctgtttcttatttataggagtatgtgcagagaaatacacactatttggtgtgagatgtgagatactaaatgttgtagacactgggatgtcccagctcagcagcagctggttgttgcctcgatgtagaatgcaggccaccagtggcccgacttttgcttttaccagatgagatggcagcctggttcttttgcagtttggcctgatttttaagcaacaggaacaacaacaaaccatatagcccaaggagtatagacctgtaggtggactgcatcagcctgcgggtgcccagtttgtgatctctggtgaaacgttagataggagactgtcttttcttcccagttatgtttagtttagaacaaaaattggatgggaaattctcaaaatttacaaatacatttctttgatcttcttagcttttcatagattggtttgctttgtcaacaaaaatttacaacttccaattttctttgcaattgtctgtgcatgtatatatctgtattttgttaatatgtatttataaagttaagtgtgtattcctcttattgatattttaaatattttaaatttattttaaactcactgaagtaagacatgtaaaactgcatgtattacaaggtttttaacaaatatcagcaatgccatgccccacccacccctccctactctttggaagcaaccactttcaacttgtgtttcttctcatttatcagcaatatgcttgagtgaatatttcttgatttttaatattaagaccttttcaggtgatctatgataaataatagtttagttcttttttattttttcttcccagttcccatccctcattctctcttcctatgcatcctgcttcattaattaaaaatgttggtgagatcagtattcagtttttgtattagtatgatgataaaatattgttgaaagctgagtcacacaggatacttgtacatgtattttttttctctttccctggttttataatggtttcattttgtttgtttagtgatatttctttaaatatatttcagacatgtctggtcaatttctgggaaaggattctcaggagatatattttttttgacatttatgtctgaaaatgtctattctttactcatgctttattacaaaggtttgaaattctaggttgaagtcattctctttcagaattttgaaggcagtatgctattattttcagttttcagtattattgttgagaaggccaccttttacctgccttgtacctccaagcctctgcattttccgcctccagttctttgaaatttcatgatgtctgtgggtttttaaaccatttattgtcctgtgcactttgagcatttattagagcctttcaatctgtagattttcagttttgggaaacattatttctttatccttcgcctattctcaagacacacagtttttcagttgttctctttctggttctgttattgcgttttggaccttctggagcactcttctaattttcttttttttggccacctattttccctttctttgtctttttgttgtattctctgtaacattttctaaggtttatcttaactttctattgactttaaattttgccatcaaaagttttatttttaagagctctttgttgctttatgaacttttttttattccttttaagcatagctattgtatgggtgcaatatttgttcatttctctgagggtataaaagtctttttgaagttttcttctgctgtttgccttattgatctttccttagggttatttattttttctttttatttatgttagtctcctctggcttttatggtacaggattcccacaaatgctgggtgaaccttacattgttcatatttgagtgagtctctagtctgtccttcgtgattggtggtggttttccctgtgaggtaattctgtgtcttgttgggccccttaaatgtctagatttataggtttggattttttttttaactgattcgtgtctctatagagcagcagttccttaaccattagtctcatgacctttttacacacttaaaaattgaggactttatagactagtactgtccaatagaaatataatgcaaatcaaaaatacaagctacatatgcaatttaaaagtttctagtagctacagtaagtttaaaaacgtaaagctgatatttcccaataaatccaaaatatttttaacatgtaactaatataaaaatcgagcaatattacatttttttatactgtctttaaaatccaatatatattttatacttagagtatatctcaattcagactaatcatatttcaagggttcaggggccacatgtgactagtcaccaccatgtggacagcccagctatggagcttctgtttatgtgagttatatctactaatatttactgtattggaaactaaaactgagatattacaaaaatagtcacttcattttaaaataatgccaaaactcacttcatgttaacacagtgatatggtctaggtctgtgtccccacccaaattttatgttgaattgtaatccccattgttggaggtggggcctgttgggggatatttaaatcatgggggcagtttctcatgagtggtttagtaccatcctcttggtgctgtcctggtgatagttctcacaagatctggttgtttaaaagtgtgtggtacctcctcattctctctctcttgctcctgctcctcctcccgcttcaccttctgccatgattggaagcttcctgaggttttcccagaagcagatgcttgtgttatgcttcctctatatcctgcagaaccatgagccaattaaaactctttctttataaattatgcaatctcaggtatttctttatagcaatgcaagaacggcctaatacacgcaaattactcacttttatgtgaggtaaatgtttttccaagacagaatttattaagagtggtgttttacatttttgcagatcttaatgtttgtcttaatgtagaagatagttagatcttcatatctgctttagcgttcaatctttttttaatatgttatttttcttttaagtatagaaagaaattctggccctcacaaacaggtagttggaaaagggatgaatattttcatagtcttttcagataattctggatgttctcctttgatactacaccaaaactcagcaattggtggtttcttaaaggttagttgcaatgcggaatctaaaatcatatcaatgcttttcctattctgtcacattaaaatccatttgtctatcttgtcctttgaatgcctcttttatacatgaatgagtttgtaacttgttataacacacattggtcatttgaaaaacattggttgactgacttatgctaatcttccaaacgctgacacatctcattgtacagtattaaaatatcatatttgcttatcaccatcagtctcatcagaaaaatcagaaaaattgggaaattgtcaagctcagtgtggtgtatagtttatccaaaccccaacttctgcttgaaagtttgaattttacgttggcaatgagcactgtcagttgttatccttgaagcgacaggcttactgtgtttactttttagacagcgtctgccaaatacccaaatctgaataaccgtggtttctctgtcagtcagtttttgaagtgaaaatgctgttccatgaaaaaactactggttcagtttgacaatgaaaatagtgcatgcattttttttcctgaaggtaactctcatactttggaatgcagcagaagtgctttataggtacacttcattttatcacacagaatattgaaaagacatgtaatcaaaagttgagatttaataaagtaagttttactgcctcatcaagttcttgaagtcagctttttaaactacaggtattgacaaagcctaaaatggatagacctacatgtaccatgcacaactgtaaaactcttaggacataggagaaaacctagatgaccttgagtatggcaatgactttttaggtacaacaccaaaggcacagtacattaaagaaataattgattacctggattttcataaaactaagaacttctgttttgtgaaacacacggtggagagaatgagatgataagccaaagactggaagaacatatttgcaaaaggcacctgataaaaacgtgttatctaaaatatgcaaagaatatttttaactttccaataagaaaatgaaaaacccaattaagaaatgggccaaagacctgaacagacacctcaacaaagaggtacagatggtaaataagcacatgaaaagatgatccacatcatatgtcatcagggaaacgcaaattaaaacaacagtgagttactactgcacatctattagagtggccaagacccaggacactgacaacaccaaatgctattgagaacgtggagcaacaggaactcgttcattactggtgggaacgcaaaatgaaacagccactttggaagacagtttggcagtttttaaagaagctaaacataccctgactgtatgatccagcaattgtgctccctgatatttactcaaaggagttgaaaacttatgttcacacaaaaatctgcacatgtatatttatagcagctttactcataatggccaaaacttggaagcaaccaaggtgttcctcagtaggcgagagactgaataaatgatggtacatccagacaatggaatattattcagtgaatgggaagtcctgcgtgtagtggtgtgtgtctctttggactgagttgtgagggctgaactgaaagtggcaggaacatgccattttagcataatgctaacattacattagatttggccaatatgtcagtgtgcagtatgtgttaagttctttcgtcccttaaacttcattatctctgtccaaactatttttatttggactttatatacttctttccaaaccttttataaaatttctcctttaaaaacccatgccaaagttttttctctccacggccttccagatttctcaaatgttccaaatgttccatctcccttcccagggttcctcttttggaaagctgttgtgatattattcttccttctggaaagcttgcagagttaggggttacattaagtctggggtaactttatacaggtaaatggtacaacctcaagccttctgtggaaaccagctggcctctcctgatgatactttaatctcatcttgattctttcaagcctcctttagcctgtgactgtagatgaacttaaatcacagaagtgactatgaccctttactttgcctaacaattcttctttcttctagacatagttgaaatgccatcttttttctgttgctttcccaggtaaaaatcagtcttgcagggcagactaggtctttttggggagatggacagacccaatttgcatatccacataagccaagccaaggcaactagcataaatgtacaagcatgtggaatgctttccaacatttttttttctttttttaaactttccaacttttagtttaggttcaaggggtacatgtgcaggtttgttacatgggtaaattgtgtgttgcaggggtttggtgtacagacaattttgtcacccaagtaaccagtgtaacactcaagaggtaactcccactctccaccctcaaggaggccctgatgtctgctgttcccttctttgtgtccatgtgtactcaatgttcagcttccacttacaagtgacagtatgcagtatttggttttctgttcctgtgttaagttgcttaggataatggcctccagctccattcacgttgttgcaaaggacatgatctcattctttttctggctgcacagtattctgtgatgtatatgtaccacatttcctttagccagtccactgttgataggcatctaggttgattccatgtctttgtgattgtgaatagtgctatgatgaacatacacgtgcatgagtctttatggcagagcaatttctatttccaacatttttaaccatgtaattgtgctttctccaaagttatttcttccaatgcccatggacagtggagagaacgttttcttgtttattgtctctttttgcaaaaacatttcttatctgaactgctgctcttcttactgggccatgtttatgtcctagaattttcacccgggatcacaaactagcatatagagggaacagtgtgccctgaatagtgctgtggcatggagtgtgtgcagtggaaagggcacagacccttggatcacaaagacctggattggaaacccatatctgccatgtaccactggagggacctctgactagtaatttgagtctcagcttctacatgtataaaattatattttattgggttatagtgatgatttaggtcaatgagttaatatggataaagtgctattcagagtggttggaacactgtgatcacactcttagtggacatgtccacaactgcaacagtgacagtgtcacctgaaagtttgggttgggaactcttaactcctagaaacatttctttgcattatgaagtcatttataagcaacttcttttacaataataatgcttaggagtaaaatattaagcttctaatttcctaatgtgacttatttattagtgtatttcttgcaattaaggcagccagagttgctagactcttttgacatgagaaaggacttatgaaataagtagcagagaagaaaggaaaagtaggactgaacccctctagttttatctaggaatatcttgtttgacagtcttcatatttgtatgtttaattcctacacttggcttaatggacttgggagtctatttttccttctttattttccttatgatttttctatcttattttgttcatttggtagttacataataaatattttcctgaataaatgattctttttgttttctcttcttccatctgtctttacattagcgtattggtttcttttgctcagtatattgttactgagttagtctctaccctaaatcacttgattttctgtctgactgtgctctttttgctttgagagaaaccttcatcttcacctctttttagtccgttgtgctagagggctggatattgggtttgtggctgttcagcaaggttgcaatgctgagaatgaagaaggtcagcttctggacatcacttcacattctaaatgtgtgccatccagcagcctcactgcatgaccactgctgagctcatgtcttcaagctctctgaaagctgagggatggtttcaggagaattaattggcaggcatttcatcatgggctactagtgacagcacacagagctgttctttcccagttcactcatttcttcttttgcaaaagtaaaaatgtcttgagcatatttcaagtatgttgctagttgtcactagtatcaaacagttttatatatataatatgcttcacagcagcgtgagtgacatgacaaaaataagagcaaaagagcaggttttttttaaggaaccaaggtactctaagttgactcactggtaaggaagaataagccacaattcttgattgcagaggtgttgctttattgccgcattaactgcaagctcccatcagaatatgacttctgggtgtccatttctaagaccacgtgaaccgatcttgttaccacaccaggcgtgccctacacaagcaagagttagaagacaaagatacaacttcagacttgtagcagaaagaagaatgccaacagagtgtaattgtttagaaataagagaagggacggtatcagggtagtccaacttactttctgataataatggcttaacacaggcaggtgtacttcttgagcacactgggtactccgtgtgagtgggaagggtgctctacttattgtaggcactcaggctgacaaagctccatctccacatagcctttccaaaccctgaggcagggagaatacttactgactcatgcacctctctctctctttttttgagatggaatctcgctctgtcacccaggcgggagtgcaatggtgtgatctcagctcactgcatcctctgcctcctgggttcaagcaattctcctgccacagcctcccaagtagctgggattacaggtgtgtgccaccatgcccggctaatttttttatttttagtagagatgggggtttcaccatgttgcccagactggtcttgaactcctgacctcagatgatccaccagcttgggccacccaaagtgctggagttacaggcgtgagacacctcacccggctcatgcacctttcttgggttacaggtgttagccacctcacccggcccatgaacctttcttgggttacaggtgtgagccaccttacccggtccatgcacctttcttaaaggctacagcccagaagtggcatacttcatctctgttatgattcactggccaaagtaagtcgcagcactgtactttaacatcagaggggacagggaagtgtgatgctgtcatgtcctgggaggaagaagaactggactacctatgaacagggccgttatctaccataggtggtatgctgaaataatgcctgctgctgaggaagaaatgagaaggtgttagagtcaagtctgaactcacagccacttgtgtaggttaacaataaaaagcatgtatagagggcactaactgtatacgtagtcctgtactgtaggttagctgtgtaggcaagttggagcccagaatgcttgatgggaagtatgtactttcagcaatagtggtggctacctgtgccaagaaatctctgttttgatgatctgagagtgctaggggaatggggcaaggaacagaggagtttgaagaagttgcgtccgttattctgagtgccctttccctatgctgagagactttgatctacacttatagcaagttacagatacagaacagttttaattatttagaaatgtgagtacctgtgtttcactgtaatgtaaagaatacgctagtgtcctggacatcaaaataagaggaatgccaagcttatatgtacctctgtggggtttttcttgagggcttgaaaggaattctaacttcagtagcacacactaggtattcaataaacatcttagtagatggattacaaaagattaaaagaatgttaccatctcatggataattcaaacagtagctaaaaaaactgaaagctgtaggaaggtattaactgtcaaaaggttggggttaggacgacaaaacttctaacgcaatgcaggacatctgtggatgtgtattttttttttcccctttgcactaaactggacactgtgagtagtttattgtttcatttgtgtatttgctcctacctaccctttaaaacctcttgaacgctatgctttaataagttctataaacttagtttagacataatatttctactaaataatgctatcccaagtagccagtttataatatccttgaattaattttgactgtgcttaacatagcttgggaatggagaagttgagtaaaatattctaatatatcagtctgacttttctccattttaaatctataatattgatttgttttggaaatttcttataaataaagcggtatatttaactttgtagctttattctgaacttgacaaaacatttctagaaaccttttatctagtttttcctaaatagctttctgtggtctctgcccattatcttaaacaaagtctgtctttgagtcagggagaaaagagaaaattattcaacagtctatctaaattagccattatttaatttatctgggtctatacaacttgtaaacagtgataaggaagatcttgtggtgttaaggtgtgtctcatattcacctggtggctatcaattactttcctgtttgaaagtatcagtttgtacaatcatggttctaatctcacttagttcatctcttgctactttatcagggagaactggttatttcaactctgacataggtctagtatttctttcaagggggtgaggggcagagggtaaagagtacactatggcttcacatgtacagtgacagtttgtaagagaaatggaaatagtgacagcccagactcggactctgagcaggaacccttcagtttaggttctacctttctaattagatagacaggacaacttgagcatgcctctcattgtgctgtctttccaggatgatgtgcgtgatactcactaactcaaaacacgcaaccagcatttctgttggtggaaatcctgtacctccttggagggagactcaagacctgcttcttccacaaagcccaacatcattctgttgtgcaaaagtgagccctcttctcccaactcccacgataccctcattgtccgtgtatggcatttgctgttgaggatatatagctcattcagtatacaattacatacaactcatttcctcgatgaatcagaaactctttgagattaaaaagagctcacgtgtttgagcctttgtatgttactggcttttaggttaaacatgtcacattaactctattaatcattggagtattagactataatattaattcattttataatctttatttatagaattatatttatatactactattatatagcagtatttatgatgcatattatatttattacattgctattattatttttatggatgataaaacagtcataagagggtaagtaacatgtctaaggtggtatagtaatgacaaggccagctataaattcagatcttccaactctttaaccttttacaccactctaggcttcatccttatattcaacaaattctgttgaatatagtgtattatcagtaaacatttgagctagtgctagaacttctttaatgtataatgagttggtagaaaatctgtagcttcagattaaaatatgcataagttctgttaaagtaagtgaatatagatatttctaagtatgtttgatatgttcccattatgatatatgcctctttcatttgcttaggcagtgctttgtcagagatggcagactataaattggatcttgaattctgaattactagaataaagattagtgagcattctttttgtgtaatagtagtttttggctgtatccttagccagcaatttttattttttaaaactctttgttttgaaataattatagattcacaggaaatttcaaagataccacagggaggtcccacatactattcacccagtttctttcactggttgagtgttaaatagctataggacaatatcaaaaccagcataaaaatcagaatattggcatctgtataaaatgtgagtatagctcgatgttgttacctgtatagattaatgtcaccattacaatcaagataaggaactattctaccatattctaccatcacaaaaacctccctcgtgccacccctttatagtcatacccacacccagcaccctccaccatccctttttccttgcaatcaacaatcttttctatatctctataattttgtcaattagagtgtgttgtgtaactgaaattatgcagtccatgaccttttgagaatgactttttttttctacttggcataatgtcattgagatatatccaagttgttgcatgtatcaataattcattccctttttctttattgtggtaagaacacttaacatgagatctgtcctcttaacacttttgaacacattttaagtatataatacagcagtattaactattggcataatgctccacagcaggtctctagaactgaattatgttgcataaatgaagaatttatacccattgaatagcaactgcttatttctccctgtccccaactaacagccaccattatactctgtgcttctatgtgtttgagtactttatgtaccttgtgtaagtagaatcttgcagcatttgtcctcttgtaactggcttattttgcataccataatgtctacagttctgtccatgtcattggcaggactttctttttagaggctgcataatattccatggtatgtatatactacatttctttattcattcatctgttggtggacatttagagtgaaatgtccatcatttagagtgaaaaggcagcctggggaatgggataatgggttatatccaaaatatgtaagcaaattctataactcaattgaaaagaaaagaaatcccaagcaatctggtttaaaaagttgtcaaaggacttgaatagatatttctccaaagaaggacctatgaatatggccaacaggtatatgaaaagatgttcaaaataaaaatctcaatgaaatataatctcacaccaagaaaacaaaagataggtgttggcagggatgtggaaaaattggaacttttgtacacttgttggttggaatgtaaaatggtacaggctaccgtgcaaaacagtgaaaactactcaaaaaatgaaaaaatagaaatatgtaatgcagcaaatcatacttctgggtacctatacaaaagaatttaaatcagaatcttgaaaaggtatttgcatttccatattcattgcagcatttttcacaatagtcaaaatgtggaaacaaactcttctaattgttgagtagtgttccatggtgtggatatactctagtttgtttaaccattcacctatcgtggacattctgcttgtttccagtttttggttatcataaataaagctgttatgaacaatcacagataggttttgtgtggacaaaggacagaattttcatttctctgagataaaggcccagggatgtgatctctgggccatatgttaagtgtatctttagttatttggtaaactgtcaaacgattttccagagtagctgtactgctttctactgtcaccagtaatgtataagagatccagtgtttctctatcctcaccagcatttgatattgtcactatttaattcttcggtcattctagtaattgtgtagtgatatctcattgtgggtttagtttacatttccctaatggctagtgatgttgaacctttttttgtgtactgatttgccttcagctaaatctttcttaatgtctttaacccattttcaattggcttttgttttctacggttgcattttgagaggtatttttatattctagatgagtcctttgtaagatatacggtttggaaatatttttttctctgtagcttgtcttttcatcctcatttttatttatttaaggtagagatgaatcttttacccaggacaattgttgtggattcaaaaataaaaatattgaatggtgccatgcctgcatgccctctgctctgttagagattcatgggcagaggaaagagtgccatctactgaagcttgggcatcggttctccatgacagcaactgacaagggagggcaaggaacatgctcctttaagatgcggctgagagggccatccaccattcatgtagaaagcatcactcttgcaatttagtggaaaaccacaactgatccctgccaggataagggattgttgttgactttgtacactaagtctcttgaagcattgacaatgaagaaattaaataaaatacatgacattggtacccagctgatttcagatctctctcctgcctcagctttcttcgttccaattaattaaattcttctctctaattaaagcaatacattgctattagctctaggtatatttataacacatgccttgaaatgacatttccaaggaagactgatctaacctttgttttcgaacaagttatttaggttatttatagatttttagctttttaaaatctatgaaacgctcatttcataatattccacatataatgaaaattccttcctttttggaagaaataggtgatgatttactgatgtatcacagctgtattaccatccttttctatacttttttagtgttgcagagactaaatatgcttaaaattacaaaatttgagattggttcacttagatgtatagggtatattattttgaattaccatggagtaggaaatcctagttttctgtatgtgagataagtggtagctttaatatttctggcataaagactcatcagtcattttttggaaaatttaaagtattaattttttgactttagttttataggagtacttaaaatttggtaggtgaacaattagaagtagtaatccccatggactgacaatttgggtgagtttggatacatgtctgggtggcagatttttgaaatgccctaataaataactaaagagaaagccaacaccacattacatgtttggcaaatcagttttctgtgtggtactcttttcccctcaaagtatggcagggaatctgatttcaaaaattaaacatactcagctatgaattccttgcctttttccttactttttttcttttcaagagcctattttactgagaagcagtgtagctgctttcacattcatctgctactactgtggcaaatgtttccaccaaaaatgcttgatattgctatttggagtacccatgaatttaaaggaagtagacataattatacattatttgaatacagatagacgataaatatgatttcaagtttttttttttacatatttaaaaaaagtctgggtaaaaacaaacctgttagaaatatgaagctctgaaacaaaattctaaaaatctgtagtaaatgtattttttccctctgtatttttggattcttaaaatcctcttctttcaaacttttgataaatacaattgaacttttcaataatatcagttttgtgatgtgtttgttttattatctagctttcccccactcccagttttgaaagatttattttcccccaacattttctatgatttttttttcaaaagtaaagcaaagttaaaagaatttcacaggaacacccaaatgcccaacacctatgatatggtttggttctgtgtctgcacccaaatctcatcttgaattgtaatccccacatgttgagggagggacctgtaatccccacctgtcaagggagggaggtgattggatcacagcgatggtttcctccatgctgttctcatgatagtgagttctcatgagatgtggtggttttgtaagtgttgacaattcctccttcactggtcgtcttctctctttcctgccaccttgtgaaaaaggcatttggtgcttctttgccttccgccatgattgtaggtttcctgaggcttcccaaggcatgcagaactgtcagtcaattaaacctctttcctttataaattacctagtcttgggtactatctttatggcagtgtgaaaactgactaatacaacctagattctctctgttaatccatcttatattttgattcattctaaagtaaattgcaaatgtttggcatacaagtcagttacagttcaacattatttatattttatttaaaattttcataacaatagaatgtacatatcttatgtgtacattagctaagatttgaaaaaactgtacaacttagtaacccaaactgttatcaagttatagaacattagcatcactctagaaaattcccttataaccccttcagaatcagtttccttctcccaaaaacaagttagcttgttctagaatttcatataaaaagaattatacagcacacactattttgtgcctggcttatttcactaagcttaatgtttttgagatctattcatgttgtcatatttattgatagtttttttccctttttgttcgtaagcattatctcctggtatgaatatactatgtttgtgctaatgatgggaacctggaattcaaggcttttaatcccagaaaaagactttaagattgtgaaatagcatttcattaaaaactactctttcatcatttgtatacagttatctcttaactgcaattttgaaaactctgacatttgtatgtaaattttataatctagatcaagcttgtccaacctgcagccccaggttgcctttgaatgtggcctaacacaaattagtaaacttttttaaaacactatgagtttttttgcgtttttttttttttagctgattagtgatcattagtagttagtgtatattacatgtggcccaagacaattcttctgcttccagtgttttccagggaagccaaaagattggacacccctgatttagatctttgtgtatatgtttaacttggttttcttgagcaaaatttttggactctaattattaaccacccttttgaagactacaggagtttctccctatcccgctttgcttttaggaagatcatcttagaaaatgccactgcaaagtctgtgtgttaattctaaattcccgtttttttttttttaattaactttagaaaaataaagtcagtgttctatggaacaggttctgtaagggaagtttgtgataatatgcatgggcaagtaggattgacaaatatttttgctaaagctgcttaaacaccacaggttgatgtgtaaatgcataaatttaaagagaggggagagaacaggaaaatagctcttttcaatgattttgaaatttttctgcttattttcttttcctgcaacaacatagtgatttaatcagcattgttaagtgatcagttagcaatgacacataagcaattatattcaaaacctatcagtaacttcattttctgaccatctgacactcaaggttagggaaagttgaacatacataaaaacaatgtattagaaaacacagtgacattatgactaactaaaaccttgccagtatacatttttaggctactaagatcattatgtgggagattgcctttgaacattgttctttaaaagtttgtgcattggtaatgttatctgtagatgggaaatgaatgaagcacaatgtcttaacatcctctcagacaaatttatgtggagaaggaagaaattttgtgatttaaaaatcatgtttctttagtttaataggatgaagaaagcaaacattctatagagtatggcagttgtagaatatatatggtaaaggttgtttggcatttgtttcactgtagtgtcagttaatacatgttatttggaagagcttggaggagataaccagtaaatatccatatacagttccaacaggatgtgcatcccattgcctaaactcacttcaaaaagacctcatgaagttggacactgtccaaagctttcacaggggaacaaaagagatgatcaaatttatagctgctcaaggagaagcaagaagaaaagaatacaatgattttgaaatcctatagaaactttaagtggaaagatgacatcctttgaaaatctgcaaataagagcaataaaattagctttccaagaattagagatttgccccttccctactttctgttttacatttttacataccgtgctcctgcagtgatttgcttttctgtatttgtgtgaactttcacgttttctgtcctttgcttgtgttcttgcctctgattggatgcatctcatgaattcagtcatcttcaaaaccgtgttcaggcatcggttgcacaatcacgccacaatgattactgcttccatttcttcagaattatctatcagtagatttattaagttctctacctcctttctgtatctgctgcacatacttttgttctcacgaatcactgatttttccagtagtattacagctatagtaaccatagtagcagcagcaacaacacttgtataatgccacactgggccagacgtagtgctaagatttttacctgaagtatcttattaaatctcaccatatctttataatttcagtgctattattatgcatagtagtatgtttcattgccccagtggcagtgattctgaattatattctattaatatcttattgaaatgtgtctctaaaaaggacaaattattttatccaatatttcttataaaattacataccaaatactatagacttttttctgatctggtcaagaaatatttaacaaatataccgaaaagttattgatgtgtatatgcagcattacataaagtaagatatctccaaacctgagaataaagtcataaatctagagtatatgtgctcctatactctctgtacctgaaattaggaattctgccactgtttactttctatgccttgaaacaagatcttaaattcttgagcttatgatttgtatagatgatataaactatacaaactaggcctcatctagtaccctctattctttatattgatagtgttatactcaatctgatccaaactggtttttattaccatgggtactgttagcaggtgtgcttgtaaagaaatgcaagggtcagggcaagggtagtggggtttgtgtgtagggtaaccacggtatagggattttatagggtgtgaagcattgttgaaaaaatgttttgaagtgtctgcttagggaactttgaaaaattttggaagcacatgagtgatttgggatggtacagtttcatgaaaaataaggtaatatttgtaaatatttgtggatatttatgtttttgaacatctctatccatctcatcttgcatctagatacttggttttgctgaacaattggatgttattttataatgatttattcttgatattgtagattttctcaaaatttttgtgtatttggatgtatatatctttagcgtatagttgcaatttttgtcttttagtggtaaaatggattctatttaatttttggagcacgataaagagttgtgatgggaagtgtcctattaatgctcacatttacattaatatcttaatgtgttagactttcttttcaagttcagattttatagtttatgtgtatagagataatataatattctctgatggttggttgtatttctgtggggtcagtgataatatcctacttatcatttctgattgtgtttatttgaatcttcttttcttctttattagtctagatagtggtctattttattaattttttcaaaaaaccagctcctagatatgttgatttttttgaagggttttttatgtctctgtcttcttcagtttagctctgatcttggttatttctgctagctttggggtttgtttgctcttggttctctggttcttttagttgtgatgttagcttgtcaactggagatctttgtagttttttgatgttgacattttagtgctagaaatttccctcttaacactgctttagctgaatcccggagattctggtacagctatctttttctcattagtttcaaaaaatttcttgattcctgccttaatttcattatataccccaaagtcattgtaccgatgggtcttagttctttctttctttttttttttttgttttttagacagagtctcgctctgtcaccaggctgcagtgcagtggcacgatctcagctcactgcaacctctgcctctcgggttcaagcaattctcctgcctcagcctcccaagtagctgagactacaggcatgcaccaccatgcccagctaatttttgtatttttagtagagatggggtttcaccatgttggccaggatagtctcgatctcttgacctcgtgatctgcgtgcttcagcctcccaaagtgcgggattacaggcatgagccactgtgcccagctgggtcttggttcttaatccagcttgccattctgtgtcttttaattgaggcgtttagcccatttacatttaaggttagtattgttatcctatcatcatggtgctagctgctggttattttgcagactttttaatgtggttgcttcatagtgtcattggtctgtgtacttcagtgtttttttgtagtggctggtaacagtttttcctttccatatttaatgcttccttcaggaatcatgtaaggcagatctggtggtaacaaattccctcagcatttgcttttctgaaaaggatcttatttctcctatgtttatgaagtttagtttggctggatatgaaattatgggttgcaatttttttaagaatgttgaattttaagtttttcattttggagatgaaatgataacattttagacagccctcagtgaaagaagtcttatttatttctactaagtttggaggataaattagaaatttatagtagccagagcaatttgttggaggtggagcctgtggggaggtgactggatcatgggggcagatttcccattaaagagcaccatcccctcgttactatcctcgcaatcatgagatgtcatgaaatctagtcattttaaagtgtgtggcacctccctgttcactctctcttgctcctgctcccaccatgtcagacgccttgctccccttttgccttctgccatgattgtaagtttcctaaggcctcctcagccatgtggaattgtcagtcaattaaacctctttcctttataaattacccagtctcaggcagttctttacagcagcatgagaacagactaatacaggggcactctggctttttgagttttcagtgttcttgcgctgattctttcttatctttgtgggcttatctacctctgatctttgaggttgctgacctttggatggggtatttgtggttttttaaattgttgttgtttgcttttttttcttttagtggtctgcccactcttctgtagggctgctgtggtttgccagagggtctgctccataccctaggtgcctgggttttgccagtacctgcagtctccacacagctctatgtgttgtgcccaaggccctggtggccagggctcacgagacgatctcctgttcctacggttgcagagatccatgggagaagcctggcttcccagggttgcacattcactcactgcttctgttggctgggtgtgggggttcccttggctctgtgtcattcctgggtgggccatcaccccaccctgcttttcattctccgtgggtcaaggtgtttctctaatcagtgtcaatgcaagttcctggatatttcagtattcactcgcaccttttgttcccctcggtgagtgccacgtacagcagctgcttctaatctgccatcttggcctcctcccatattttctttatccatgcatgtgctgatggagtcttagactgattctgtactttggctattgtgaataatgctgcagtgaacatgagagtttggatagttctccaaaatactcatgtcattttctttggatatatacctagcagtgagattgccagatcataaggtagttctattttgaatttttttaggaagctttatactacttagcttggggaatttttaataaagagggtgtattttataattatggtaaatttcaaacatacagaaaaacagagaagaggaaaacatatctatgtaccctatatactactacaaaaatatcaattcctgaccttgcttgttttatgaatatgaaatctgtaccccccaacatccctagattattttgaagcaaacctcagatgtcacatttcattcataaatatttctgtatgtatcgctaaaagatgaggattcttctagaaatagcatcatattttcacatctaaaaacagttaatttaatatcatccattggtaggataaggttcaaatttcaccgattgcctctttttttactttttaaaaatttagctgggcacggtggctcacacctgtaatcccagcattttgggaggccgaggcaggtggatcacctgaggtgaggagtttgaccagtctggccaacatgatgaaaccctgtttctactaaaaatacaaaatttagccaggcatggtggtgcacacctgtagccccagctacttgggagtctgaggcaggagaatcacttgaacccaggaggcagaggttgcagtgagctgagatcatgccactcccctccagcccgggcaacagagcgagactgtgtctcaaaaaaacatatatttttaaacttaatttttaaaaggtttgtgggtacatggtaggtatgtatatttatggggtacatgagatgttttgatacaggcaaatgtgtaatgtgaaacaagcacatgatgaagaatggggtatgcatcccttcaggcacttatccattgagctgtaaacaatacaattacactctttaagttatttttaaatgtacagctattattgactataattaccctatttgctatcaaatagtaggccttattcattctttctaactatttttttgtacctattagccattcccacctccctcctgccctagctccccattatccttccaagcctctagtaaccatccttctattctgtatatccctgagttcaattgttttgatttttagatcccacaaataagtgagaacatgcgatgttggtcttcctgtggctggcctatttcacttaacataatgatctccagttccattcatgttgttgcaaataacaggatctcatatttttatggctgaatagtaccccattgtgtatatataccacattttctttatccattcatctgtttatggatacttaaagttgcttccaaatcttagctattgtaaacatcatttttaaaagaatattcagttttcttgaatcaggatttaaacaaggaccatgcattgcaggtgagtcatgtctcttaattctcatttatatatgagtcttccttcccctcctttttgatcttgcaatttatttgttgaagaaacaggatcatttgtcctctcattctccagagtctgtattttgctggttgtattctatggtgttaacattttttttctgttctacatatttattttaattgatatttagatctagaaacttaaatgtatttttgaggtaatatttcacagctgtttttatgtacctccatcaagaattgcataatatagtttttttcccctgcgatattagtggccatagatgatcatcgcttaggtctattatttcattgggggctcacaaaatagtcatattcttccattctttcttcattcattagctagaatagttttataaagagagaaattttcatcaatgattttcctatcctgcgagataggttgtagagcaaaggcaaatttaatacttcatcctttcccttttttactggtttccagaaaaatataggttgatttcccagaatcctcagaggtgactattgagcacctttaaaacattattcacaacacatgaatataccatattttgggggcttatcaattattccctttgctcatgtttccaagttttttagccagtggaagcctcttcaagttgacaggatctcaacagtctttgatggcttctttgcttactgctatgacaaaatctttcaggctcattttgtacttttcctcccccggaccaggatcagctgtttctccttggagctttggtttcttagagtgggaaatggtattttgaggaccatgatctaggtagaaggagtaatcattgttactgggttggtcagtgtgtctaggtcttttcaatgaaacacagctaaataaagattacatatgtatgtcttgaattgatatttccagacaaaatttaggattatttggttttacttgattttctatttgcagactcttctctaatgtatcttcgttcctcaggaattaacatggtgcttttggaaatgttatctgttctttcttaagagaggtagagcactgtttcacaagttttgaggctacatatgttgacaggaagcttcaaattaactctcaatgatggacagacacctgggcagtgctccatgtatcatatcactgtatggaggtgttaaagacacatcctgggatatgtggttcgggcctggctctgccaactaatgagtcacttatttccttgtcatgtaaaatggggataataataatctacctctcaagctttgtatggaagataatatatgtgaaaatgctttgtaaattattaatgtatcataatagaaatcatttccccatcttattaaaaaataatgtgatagtctttgaaccactatacttttgattagctttttcctcaagatttgtttactcttgtaaggcatatttgtcttttttgttaagttgccaggatagccttcctaattaccttctttaatgggtcttcctctctgtagttaaatgtatatgtttgtaagcctctcttgaggtgaatgctctttggcttaaatatttgtttggcttaaatattaattaaatattttaatttaaattaatttatgatgttataggtatagaaaggagaatcaaagtaggggtgtgttttgttttttgtccatcaaagcataaaccttgtttttgatgatgctttatttctgtttccagtgtcatggtgtactgtagacccagagctgtacctctggggagatatataactaatctttcctttgatgggacctaatttcagagcgctgtcttcataacctggaatcaaatgaaaagtccaggtcaggttatccagctagatacaagtgtattgtgtgcttggtgttcctaggctctttattatccttatttggctcacaggcctttctgagctaagactttagaggtcaggtgagtgtgtgtgtgtgtgtgtgtgtgtgtgtgtgtgtgcagttattctttttaaattctaggagaacagggtccttttctatcttgatgccatgtttatctacctgaaatctcacaaagcagcagccagcatgtacttcctaactttactggtgtttccttggtcctgccttcaggagaactgttttagttaccctcctgccatcttgtgctcttatggccctgaatttagccttttctttggtttcacagccttagattattccagcctagctttttttatacttaggcttctttctaacttttcttcccatgtgtcaatgatactttccttaaactcaccctgtactgttttacaactgcattctaccccttccagcaattttagccaaactttgcagttgacagtggcctccttcctgcagcctaggcttctgaaacccctttacagtatcttcatatatagacttatggcgctcattttcattcaccaacaattctgtccctgtaaggagttaaaatcattgttattcttaggtatttctagtatgaaataatagaaccatattctaaaactttggaaaataaacacttaatccctttattctttcatactgttttaatgtgtttttttcccttttgtcttatccccaataatttttgtacaattaatctggagtacatttttggttttttaccctcatatcctcagaaactgaagaggctaccaggagcattttgcatgtcctttcataggatttatcattaatactgaaagacaaaatttaatattttatactctgtaaaagtactaatgtaattaataattaatacatggtacaaatactaatagttttccaagaaagatacattggtcaggcttttttgaagtcttcagttattgtcctactgtcctattgttaacagttaatttccttccaggtttaatatacctccagtttcagtatacctgtagatttaatatacacattcatttaaataatacataatgtctgagatagatgtataacatgtttagctgttcctgtatcagaagtgtactaaattctcatatttttactattgtaaatacttatggtgaaaatttttgtgtacacatatttgttcatattttagattatttctttaaaatcccagaagataactaggttaaagtaacagtatttttagtatttttattactcctgatttacatttctggatagccttctataaaggctataatagtttatgatacctttagcaaattggttacagcttttttttttttccctctgtcccccttgacctcaatgttcatttctttcttgggggttttagcgtgtccttttagcttcacaacagtatctcttttggaaggcactttggcttgtggagagaagaatgcacagtgtactgcagtggggcataggagagagatgcggaagaggtgtggggcagtggaagaccctgacagaaaggtggtggttgtgaggatggcaaagtcgttctgagatggattttctactttcttacggcattatccctggtaagaaactatctctaagctgcaagaattccagtgtccaatgttaaggaatcaacctgtgactaggttttaaaaacaatgatattggactctcagcaatcaaactatgcgttttcttatacaaaaatggaaaaagcaacaagaaatggtctccagatttataaagaatgggttatgacttgtgtactttactgaagatgttgtaacctggtttcatagttaggaacctactgagtattagccacatatgaaagtagaagtttacaattccccagaaattcattaaagagcctgaattgcttagcaacctcacaaatttattaaagcgatttcatagatatcatcttctactttatgtaacagttactaggtatgtcagtgtttgaaagaatatggtcatgtgcagttaaagaactggagaattgtgatctagcactgcaatgtgctgaattgattttcacacattgtgtattactgatcgctatatatttaaacttgctttagccaagtgtaattttgttatttagagtaaactggacttcggaatggtattgctttcagtcattcgagactatagtaggaacattttatagagtactaataaaaagagacatcttgaatgtaacattaaaccatttcattattttatagactatgccatctgtaagcatgccaagattttggggggaggagggggacttcaaatgactatgcattaattgtacctcatgtttagcatgtattgttttaaatgctttatcataggatatcctataacctgatggaaatgatggcatatagttcgtaacagagtgttttgcagaactttagacccctttgaagctgaaagcattatcctttaattctaggacctattctgcctttgtttcttaggcctttagattcctccatggccaagtatccagccctggcatgggtgcttattaactatgtgtccttgggcaattttttttaactctgctgaggctggctttatgatcagtgagttgtaaatctctgtagatcccagcctgctctcactgacaagttggtacctacagtaccctgggaactgcagctagagtggccagggaatattcagggaaaaagctataggacacagggattggggaaaatgaacagcaaaaatcttttatcttgggagtagaagttgaaggacaacattccaaatataatcttataatccaagtctaattcatataagcatttatagtgaaagatggggcagaacataagatcagattttctaggtattcttattagttaaagaccagaatttctggaacaaaatttctaggaaagtatgatttttgtgaggatgaaaataactattactatcattattaataacttttgttcaggtactaaatatgtaccaggagctagtaaatacttctatataaacaggtgaccctcagtatccatgggttccatatctgtggattcaacgaaatgcagatcgaaaatacttggggaataaatggatggttgtgtctgtactgaacagtgcagacttttttcttgtcattattccctaagcaatagagtataacaactgtttacacagaatttaattgtattttgtattataagtaatctagagatgatttaaaactataggggaagatgtgtgtgggttatatgtaaataccgtgtcactttttatcagggacttgagtatctgtggattttagtgtactagtgggatgcccaatctcctgcagatatttagggacaactatataattaattctgtcaatgactttttaaaagatacatcctattattatcttcatttatcagataaagaaaccattactagaaaggcttggtgatgtattccctgagtggtgcatgtgacataggaacacaggctatctgaatccagggcctgcagttgaactcacaccaagttgtgtatcttctacttgcccttataaatatactcgttgctgggcatggtggctcatgcctataatgttaacactttgggaggccgaggtgggtagattgcttgagcccaggagttcgagaccagcctgggcaacatagggagacctcatctctacaaataattaaaaaattagctggatgtggtggtgcatgcctgtcatcccacatacttgggaggctgatataggagaatcacctctgtgtctgggaggttgagggtgcagtgagcagtgatcgcaccactgcattgcaacctgtgcaacagagtgagaccctgtctcaaaaaaacaaaacagatagactccttgctcttctcttcaccacctatgtccaggagcagtggtgacccttcaggaggcatcagcaggttcccttgccccaaattcctgtcctgttcagctcatgagagatgtcatggcaggagaacataggacaatgggggagagcagtcagagtagtcattgtcctggtgccctccctgtggggttggctgccatgtctttacccagggtcacatctgtcaggaaccctcttcagcattctggtaactgttccctttccttgtcccttcaaaccaagggcagagggagtgctaagttcttgtggtgactagacctgagatactgcactgtccctttttgattttgtcagccttgcctacacttgctgtgaataggtccttcattaacttgccttcagtaacccagatggagtgtgccatctcttcttgcccaggtccctgactgatagaccagctctctcatttagagaaatgtgagtgttttcttacttttttgcagtcagtaaatatttattaagtatccagaaagcatgaggcactgttcttggtgtactagggtcactaatggagcaagagccatgagccctgcctgtgggcagaggggaggaaatttataagtatctatattttatatatatatttactatatataatgtatatttactatgtataatatatttactgtatatataatatatatttactatacacacatatttactgtacatatatatgaaagtatgtatatatttactatattatatgttataatagtatattatatagtattatatattgtatattactatattatatgtacatttatatatatttattctgtcaatgacttttttaaagatacttcctgttattatctttatcagatagagaaaccagtacccgaaaggtctggtgatatatggctggagtaaatatatgtaaatgtatatataataagtatatatatattaaacataaatacatatgtggatgagcaggcatttggttggaacttctaaggactcatacaatttagtgaaaatgtaaaaacaactttgtaaaatgtgttttggggataatgaatagaagtgtctagatggggctaagggctcccgtgaaggactagtgggattagatgagataatgtacttatgttgaaaagtacttggtcttttttttttaatcctgctttttgcaaaacttttgcacctaaattagtgttatatttatagttgttcatgcttgttgtaaataaaaactggaatgaagtagtaataatgcctagagtagtcctttcttgaggggaagctgagtttctttggatatctgtttactctgtatgtcaggcctgcagttgtgtttggacacaccatggttgtaattcatactcttggttttagcaacactttcatatgtagttgtcactacgttgtaattacagcaataaaatccattctttgggaactattccagtgtttagaatgctgaaaataagtgtgcttagtaccagttgtcacaatgatttttccaatgctagaatttctaagaaatcagtgtctattgtacttcaaaacaaaactgatgtctaataaaattctccttttagagatggcagctctttgtagaacctgaaaaaggaaactttaaatcaaaaggaatattaaaaaagccttatgttattctatttagaaatattgaaagggaagaaggaataatcaagtatctcaggaaaaaaaatagcctggaggcttcaggatatactttgccttatttagaaattaagttggttctaacataaacctgagggaggagtagtttgtatgtgtgggattggggtcagcccatttgaccctctgattctttctgttttatataggaaaagctatatggaattctacctaagcctgtttctgtttaattatctatgggtgcactggtctctgctacagagtccacttaggctcaggcataatagcacagactgaagccattgggccaaatctggagagaagctgtgtcactagagtatcagcagagcaggcgacactgtgcttgggtaggcttttaccatgctgttcttcacactggaaattggtcagagtgttgctgtttattagctatacctaggaatttaatgatgtatcctttttctagtgatttaaatggacataattgcaggaaaggttggtaattcagcaagaagattacttagaaaacttttagaattggtttcatgatgctagggacatttctgatttctgtccatggtggcataggacatccatatgaagttgtagctatcacaacatgcatcttttaatctggagactgagaaaatattctgcctggtgtgacaaaatggctatcccaatatagccattttgatatgtgatatggtttggcactgtgttcccactcaagtttcatgtcgaattgtaatttccagtgttggaggaggggcctggtgggaggtgattgaatcatggagcagacttcccccttgctgttcttgtattctcacaagacctggttgttggaaagtgtttggcacctctcggccgggcgcggtggctcacacctgtaatcccagcactttgggaggccgaggcgggtggatcacaaggtcaggagaccaagaccaccctggctaacacagtgaaatcccgtctctactaaaaatacaaaaaaattagccaggcgtggtggcaggtgcctgtagtcccagctactcgggaggctgaggcaggagaatcatttgaacccggggggcgcagattgcagtgagccgagatcgcaccaccgcactccagcctgggcgacagagggagactctgtctcacaaaaaaaaaaaaaaaaaaaaatgtttggcacctcccactttgctgtctctctcctgctccaccatgtaaagattgtgcctgcttccccttcaccttctgccatgattgtaagtttcctgaggcctccctagccgtgcctcctgtacagtccgtggatctgtgagtcaaacctcttttttccataaattacccagtctgtaatacagcataattacatcctaactccccattgccttccagggagtctgtcctggacttcatccctcctctccaaactcttgataaacattattttttgaatatcttcataccatctcaaacacatgtctacagtagaactgagtgtctttctacgaatttgactccttagcttgaaggtttaaagcaaacttgtccaacctgtgactcatggggccacatgcaacgcaggacggctttgaatgaggcccaacacagattcgtaaactgtcttaaaacattatgagatttttttgtgatttttttaagctcatcagctattgttagtgttagtatattttatgtgtggctacactgggccacactggaagaagacaattcttcttcttccagtgtggtgcagggaagccaaaagattggacacccctcttataaaggatactagcaattgcctatttattcagattaagaactgcaaattcttctggacatattctccagaaaaagttcatatatgcagtgctttgcataaaattcaggcttgatgactagtccctcctgaagctaacctgagtatacaacatttaaaaagtagaagcctgactgcgaggatgacatcaaaggcccactgtccagtatttcatgtctgtacactggtggatcactacccttaactagtcttccccttctcaagcctcttgtaagaattctttcctttagcaacagcaatttatttattcgttctctgaaggaggcttgttttcctttctccactccattggtaacacatctcatcccatcccatttagaattcttgctgtagttctttttgcccagtgaccttttccaccctttaaaacccagccatgttacacctcctctaaagttgaaattatgcttcctgttatgttttcatggggacacatttctctacatagggactgaaagttccttaaggacaaggacagtcatttattttactactcaaagtgcatggtatacatatcaagcaaatacttttggttgattttgtatgggtgtgtgggtgtctatctttgtgtgtgggtgtgtttgtacctcaaccctgccgaggtgcccattttgctttcatgtgtggtcttggaagtcttttttatgtaccaatatagactcttttattaacatattattactatgttagttgaaagtgaaaaataattccactgaatattttaacaataaaagcaaaatatgtggtctctttcaaaattagaatattttccctagttagagagttagaataatttaaattttaaaatattttaattggatattaatgtatactaatttattaataaaagaaaatgtgtgtggggtcccacaggattattcctaggataaatagacagtttttttccttaagaatatgccacttaaaaatattagaatacactgaatcccaaatgaggtttatggtacatgatatcatgatttatgggaagagttggatctgaatatatttactgtatattcttatgatacttttataaaaaaattcctccccagagagctagagaataaacataaatggcaagtatgaaaaaccttttaaatattgggaaccagtaaatttttttttttgttttagttgctgctttcctaagagagatactcgatgaaagttgttgaccaaagtacatttttaaatcttgggtggtttaggcaggatttatgcagaagtgattttgtctttagattcttaaaagggttctggagagattttatttgatattaaagctgtgagattgtaaatggagaaaagtcattctgtgtgtatttgacagtcacccatatcctgtcactgacgctgagatggaagcaaactgagtattactcacttcattggctctatggtatttacttaactatattaaacaaacactggggaaacctcaggccctctgatataaaatatgcaaatccttaagcatgacaatttattagaaaaagagaaaaataaagtgtgtccattgacagttctgtgcagaatttaggcaatgactcatacatattttgctgattgtttttgtaataaaaattattcaagagaaaaattaatacatttttattttcataagcagttcattaattatgtgaagaaaaaaattttgtttcatgggtttcttaggcaacaatctgtactttggcttaatgtgacatattagttaaggcattttcctgcatattccaactttaggcctcttaaacctttgctcataaatgttactgttcatcagcctgtcagttagctgtcaagttgtggtgtcagctctcttagactcatcatagtagcccattcttgtattagtactttctacctaagtatttcttaaatgatgactgaattattttaatacacaaatatgaagtgaccatataacttcttttggttcactagagccaaatgcatctcactaaacttttaaaagaaggcaatttccaattccaaaagcatcttctgtcatgtcttcctttgcttttttgacatggaagtataatatttttaagataaggtatctggataatcaatgtattttcatggcttactcaatgaattttgtcactagatgtgactgctataacgtgtctctcttccttcttgtctaaggatgctttctacttctagctataatgtgtctctcttccttcttgtctaaggatgctttctggttctagccaaagaacattctggatttattgttttatttggttttgacatatgttctttcaattaaacacatttaaaaataggagatatacagacatgcataaagcatatatactttaaataaaagctataaattataaaatacatacctctgcacttgtattaccacttccctggtgaagaaatggaatgttgcttgcaccccagaagttctcacgtgccactgctgaaacacttttcccttactgcagaggaaagcactatcctgaatgttgtgattattattcctttcttttctttcctacctaatgtaggactctaaacattcagtttagtttttcgtgttttttgaactgtatatgaatgtactcatacagtgttgtgtctgaatgctttcattcagtgtttgtgagattcatccatgtcattgcgtgaagctgtaggttgttagttttcagttataatcattccctcatattaatatattaaacgtgaattatccactctcttgatgaccatttgtgttgtttctaacctggggctattgtgaacagggttgtgatgaatattctgagacataccagtgtgtacatacattatcttccttaatttatagatgagtggatcatagggttatattcattttccacttcccagataatgagaatagttttgcaagttagttgtgccagttcatatttctattatcagagttctggttcttccacatcctagagtatgtttagtattacagctgctcctttataatggggtcacatcctgataaaccaatggtaagttgaaaatatagtaagtaaacaatgcatttaatacacctaacctacagaacatcatagcttagcctaccttaaacactctatgaacacttacattatcctacagttggacgaaattatctattacaaattctattttataataaagtgttgaatatctaacttaagagtattgaaacacataagaccaacctgggaaaagacaaaaattcaagatacaatttctactgaatgcttattgcttttacaccatcgtaaagtcgaagagttttaagttaaaccactgtaagttggagatcatctgtattagttactgcttttgctatttcaatgggtgttcagtggtatctcattgtagttttaattagcattttctggataaccaataaggttgagttcctttctagatgtttattggtcgtttattcttttctgtaaagtattttgtttgtctttttctattgggttgtctgttgttcatttttgttttttgaggcattccttatattctgcatatctgtcctttgttggatacagttttgttatacatgtattttttttaattttgtgccttgctgcattttatgattggaagtttagtctaaatttctcaatttttttgtatgtggtttataccttttgtcttatttgcatatttttttgacatttcattatttctaattcactgaaaaaatgttggattcaggttaagttgtatgtaataagactggaagaaaaatggccatattgcactgtctctaaagtaccctggagtggtacactgtgatcatatgcaatatccaatagtaatttgaagacatattttagaagtataatttaaatgtttttaagggctgcagttctgagagttttctttaagaagaacagggatagaatatgcaatgggtaattaaattccatatatacatgtgctaaattaagttttttggaggagataagagtgccacaatatgatttaaaagctgcaaaacattaaaaagtacaaataatgtaacagaaaggcagaacatctgttacttaaaggagatattaaactttgagtgctaacacaaatgctatgacataattctagagtctacacattattttgccttattttgagtattatatattatgaatattataaatattatgagtataattatactttttaaaggttaatttttgtgtatatttggagaaggtgactacgcaatagtaagactgatcttattaaatgtgtagaaaattatatatctgtagcttcaaaggagttatttttgaggttatgcaagtatttagaaagtactgctgcttctcaaattttgaatgcagttttggaattacattcatgaccatataaataggtacttaatacattggtttatcatgagaatttaatctcatttctttgtgaccataatctatattttaaaaataaaacttattgaggtataatttacacataataaaatgcataaattttaataccttttgagctttaaaatatgtatatactttcatatccaccattagatgcccactggtggtattccattgttggatatatcacatttcagttgtttccagtttttttgccggtatgaataaaggtgttatgaacattcatggacaagtgtatttttagacatgttttgtttctcttgggtaaatacttagtaattcattatgagttgtgggcaagcatatatttagctttaatatataaagctttaaaatatataaatataaatatatattatatattatattatatataatatatttatatttatatatactataatttatatataatatatattatatatataatatatttataatatatatcatataaataatatatatttataatagatatcatataaataatatatatttataatagatatcatataaataatatatatttataatagatatcatataaataatatatatttataatagatatcatataaataatatatatttataatatatatcatataaataatatatatttataatatatatcatataaataatatatatttataatagatatcatataaataatatatatttataatagatatcatataaataatatatatttataatagatatcatataaataatatatatttataatagatatcatataaataatatatatttataatatatatcatataaataatatatatttataatatatatcatataaataatatataaagctttaaaataagacaattttaaatcattgtctacagttcttgcaccatttcatattcccaccagcaatgtatgggcattctggttggtccacatccttgccaacacttgtgttgtcaagtgatgttgaacatgttatttaaagtgtgtgcttgtatcttttgtccattgtgttttttggtttatttgtcatattattgagttttaagagtctattttttatgtattttgagtactaaccttttgtcacactgttttccaaggagaaattgaaaattgttttaatgatagtgtcattggatgtgtgtgtctactttcttccctgttttgtatgcatgagttctaaaccacccatccccacaaaggagtttccttacatttttactctgtatgtgggtgtgtttggaaagatgagaaagaaacatcattattatgcatggtactggtaaacaacaccaccaccaccacccagacacacaaaaaaatggaacagaatagagagcccagaaatagggctgcacacctacaattatgtgatctttgacaaagctgacaaaaacaagcaatggggaaaaaactccctattcaataaatgctgcttggataactggctagccatatgcagaaaattgaaattggacaccttccttaaaccatatacaaaaattaactcaagatggattaaagacttaaatgtaaaatccaaaactataaaaagctggaagacaacctaggcaatactgctctggacttaggaatgggcaaagagttcatcttggagatgccggaggcaattccgattaaagcaaaaattgacaagtgagatctaattaaacttaaaagcttctgcacagcaaaagaaactatcaacagagtaaacagataacctactgaataggagaaaatatttgaaaactatgcatctgacaaagggctaatatccagtatatataaggaacttaaatttacaagaaaaaaaacccattaaaaagtggacaaaggacatgaacagacacttttcaaaagaagatatacatgcagcaaacaagcatattaaagctcaatatcactgatcaatagaaaaatgcagaacaaaaccacaatgagataccacctcaaacccatccaaatggctattattaaaaagccaaaaataagatgctagtgaggttgtggaaaaaagggaacacttacacattattggtgggactgtaaactggttcaaccattgtggaagacagtgtggcaattcctcaaagagttaaaaacagaatgaccattcaacccagcaatctcattactgggtgtacacctaaaggaatataaatcattctgccataaagacccatgcatgcaaatgttcattgcagcactattcacaacagcaaagacatggaatcaacctaaatgcccatcaataatagactggataaagaaaatgtggtacatatacatcatggaatattatgcagccataaaaagaaatgagatcatgttctttttaggaacatggatggagtaggaggccattttccttagcaaactaacacaggaacagaaaaccaaatactgcatgttctcacttgtaagtgggagctaaatgatgacaactgtatcagtacattttcacattgctatgaagaactacctgagattgggtaattgatgaagaaaagaggtttagttgactcactgttctgcattcttaacaggaagcatgcctgggaggcctcaggactcttatgatcatggtggaaaatgaagggaaggcaagcatatcttaccatgggggagtgagagagagagagagagagaaggaggaagtgccacacactttcagacaaccagatctcaggataactcacacactatcatgagaacagcaagtgggaagtccacctctatgattcagtcacctcccaccaggtctctcccctgacatgggattacaatttgagatgagatttgggtgaggacccagagccaaaccatattattctgccgctgacccctgccaaatctcatgtccttctcacatttcaaaacacaatcctgccttcccaataggcccccaaagtcttaactcattctagcattaacccaaaagcccaagtccaaagtctcatcagagacaagacaagtcccttccatctataagcctgtaaaatcaaaagcaagttaagttagttacttccaatacaatgggggtacaggcattgggtagatgctcccattccaaatgggagaaattgacccaaagaaaggggctattggccccatgcaagtccaaaacccagcagggcactcattatatcttaaagctccaaaataatctccgttaactctgtgtctcacatccagggcacactggtgcaagaggtgagttcccatggccttgggcagctctgcccctgtggctctgcaggatacagccccttttgctgctttcatgggcttgtgttgagtgtctgtgactttcctagacacatggtataagctgtcagtggatctgtcattctggggtgtggaggatggtggcccttttctcatagctccactatgcagtgccccagtggggactgtgtatgggggctccaatcctacatttcttccccacactaccccagtagagattctccatgaggtttctgtccctgcagcagacttctgccttaacatccaggcatttccatacattatctgaaatctaggcagaggctcccaaagctcaccttttgccctctgcacacccacaggccaaacaccatgtggaagctgttaaggcttggggcttgcaccctctgaagctatggcccaagctgtaccttggcctcgcagccatggctggaactggagtggctgggatgtggggcaccatgtcccaaggcagcacagaacatctaggccctggacctggcccatgaaatcatctttccctcctaggcctcaggacctgtgatgggaggggctgctgtgaagatctctgaaatgctctggagacattttccccattgtcttggctattaacattaggctcttctttacttatgcaaatttctgcagctttgaatcacccccacccccgaaaatcagtttttcttttctcccacatggccaggcgcaaattttccgaacttcttgctctgcttcctttttaaacataagttacagtttcaggccatctctttgtgaatgcacacgactgtatgcattaggagcagccaggtcacattgtaaatgctttgctgcttagaaatttcttccaccagatatcctcaatcatctctctcaagttcaaagtttctagggcaggggcaaaacatcaccaatctcttcactaaagcatagcaagggtgaccattaccccagttcagaccacctcagcctggacttcattgtccatatcactagcagcattttggtcaaaaccattcaacaagtatctaggaagttccagactttcccacatcttcctgtctctttctgagccctccaaactgttccaacctctgcctgttaccaagttccaaagttgctttcacattgttaggtatttttgtagcagtgctccactaataccaattttctatattagtccatttttacactgctataaagaactacctgagactgggtaatttatgagcaaaagaggtttaattgactcacagttctgcaggcttaacaaggaagcatgaatgggaggactcagggaacttacaaccatggtggaaggtgacagggatgcaagcacatattaccattgtggatcatgagagagtacaagtgaaaggggaagtgctacacagtttcgaacaaccagatctcctgagaactcactcactatcatgacaatagcaggggaagtctgcccccattattcaatcacctcccaccaggcccctctcccgacacatggggattacaattcaagatgagatttggatggggacacagagccaaaccatatcaaaaactcatggacacaaaaaactcatggacacaacagacactgggatcttcttgaaggtggaggttgggaggaaggagaggatcagaaagaataactattgagtactaggattagtacctgggtgatgaaataatctgtaaatgaaaccccaatgacaccaatttacctacataacaaatgtacacctgtacccctgaacctaaaataaaagttaaaattaaaaaaaaaaacctagctattatggaaaaaagaaagtcattgtaaccccttctgttagatatacttttaaaacgttaaagtaacttttcacttgtaaatacaatgtgtttttgataaacacctgtcagagcactgtgttgctatatgtggcatccagactcttagcataacctctcatgatctatggcagctttaggtcagtcttaaaaaaaatgttgaaagggccaggcacagtggctcatgcctgtaatcccagcactttgggaggccgaggtgggtggatcacctgaggtcaggagtttgagaccagcctgaccaacaaggtgaaaccccatctctactaaaaatacaaaaattagccaggcatggtagcgggcgcctgtagtcccagctactagggaggctgagacaggagaattgcttgaacccaggaggcggaggttgcagtgagccaagatcatgccactccagtctgggtgatggagcaagactctgtctcaaaaaaaaaaaaaaaaaaaagaagttgaaatattcattcagcattcaaggggacctgatgtctgagattagtttaacctaatgaagcactggtccttaaatttgggaggaaagtttgagagtctgatgacaacgtacactatttccccagatacaaatgtacatttatgaacatgcatatacataaataattttgcatgcaatcatatgagagtcttcagtttaaaaacttctgcaataaaaattcctcttgtgtgtcttcattggctactgcatcttcacgtcttattgtgtggtactctttatctgtgtctcagcaaggaggtgatgtgaggataatcttgcaaaatgtagagtcttagaaaggtgagcttttgcctgagaccccacttcttggttaacttatggtgagtgtgcctgtgttcatctaatacctttcatataaggaaggcaagatgatttatccaggctgaggggggaaacgaagaaaggatcgtgacaacctaatgcaggttcttgaataaaaggggttagtttctaattttgatgtggaaccataaacatgaggatttattcctagtatcatgggtgaatagttgcttctattcccgtgtattcctcactgagctttcttgagtatcatcacagataactctgttacctggtaatgaagaactctgctggggaagtaaatggaatgtggtgatgttgggtttttctgccattttagctgatttgaggagatagtctttctacagataggaagttctcatgccatgagtgatagggcagtgttttttatatccatatagtggattttagtttttcactggaacatggataatgagaaactgtctctaaaaagtatctctgaagttgagatttttggagggacttcttgagggaagtgttttaccaggaactggaacttcattattggtgataagctcttttcctttggagtttttattttgaagcataatactcacttgaataggaataaattctttattttttgtttatttctgggcacagtgcccaggtttttgttggggcaagtttatcctctaaagaaactttcttaaacagtagatgtttcatagtctctggtggaccgagcagactatccagtacattgagagcaggactctttgagacctcctaaaacaagaggatcttgaaatctactgctgtggaacagcagctccaagggagcaacacttgtctcccccagaaatacttagatttgttgctttaagtcttggttgcacacactgggtgatatctgagagtagaagagaaagctcatgactttagagacatgtcatcatttcattggctgcaagtacacatctcttcctgttgattctccccttagttctatagctaaattccttgtccagttaccaataagtatctctttttggaaaactctgtccatttttaagcaacactcctgcattcaaggctacagattgctcagtgcttcagtcagctgatactgctccctaaagttatgcaatatcccaatatccctgcttgaatttccacatagtagctacattcctttctcttcctcagaatcttgcttctctctgatttactctgcttgtctgttctatataagatgcccccatttgttgcctgcattcctggatgcgttttcctcactgctgttacgcaagtgccaaagtcattctaccttgcaaaagttttaagtgcccttccctaatttagaatgttttctgaaattatacttcattcattactattcaacatgtattaagcatgtttatagtgtattaggaattggggaagtggtcctggaggagatcatgacccaggacatactatgtttagttgtcctatgatgtgataagcgctagctgtgtgaacatgtacaatggagacatagaaatgtgtttaaatctgttgtggaggattaaaggaggtcagcatatatatctgaataacaaccacaaacccagtagcttaagtgataatcatttattgttgcctgcaagtccgtgggtcagctgtgctattcttccagttttgactgtgtttactcatttgtccacggttagccacaggctggaaatttgtctcagctgatcttgtctgggccctttcaggtattttggggtgagaaggttgtaggctggtttagaatagatgcagctaagtagacttatctttggtggcttcttctccagcaggctagtctgggccttttctcatagcaaaggaaatgttctaagaagcaagcagaagtgctcaaggctttttgagatctaggctcagaactggcacactattatttctgcagcattctattggccactgcaaatcacaaagccagccaacattcagagggaatggaaatagacttcaccttttgatgagaagtgctgcagagttgcatggcaaaggctgtagatacatggtgggaaataacttggaccattttttataatcgatctacgattgcacctttaattgataatcagacttcctgaagtagaaaagtcagtagaaggcattgaatacagatatatggaaggtttacatgatagaaaacaaacaaacaaacaaacaaacaaacatgtatgggcagtatgagcaacttaattccaaagttattcctggtatgataacttgttttagtgtcattttccaatctacttcactgtttacagtcttaaagtttaggggtaaggagactattttaggccaattccttataaattaagaaacacctagaaatgttgagagccacccagtccttaaatcacattcttgacagaagtggaactattactatgaactcagatctcctcttttcatggtactcttcataagcactgtccatgtttccagttttacatttttgaaaggtaggcatgtttcatgtgttatttcttaatgtgacctaccttctacattctaaatattttttcacagtatctgtcactgtgggctcatcagaaagacttgtgcaaatagtgagagcaaatgcctaaaccctcatgtaccaccttgtcctcatgttgagattttaataagctttaaatgatttggaatagaagcagctcctgtgttatttcacttttgtctgtgcctttgtgttctaggcacagttgtaatgttctgaagtcacaatctgagccattaagagtaagatcatgatgtctctggatacccagagtgagtgccttggtcttatttgtaattttagaactgctgcttcttggggacctgggtcaagtgattgtattagactttgaagagttctaggccatactgtttgatgcacagattccatcccactgtcgtatcactttcttctcttcacaggaacatagcaagatctggaggagaaagagaggaaactactccagctgtgttctttatcatctcacacttgttcatacttaaccatacattaagaattgtgagctgggcacagtgactcactcctgtaatcccagcactttgggaagccaaggcaggaggatttttgagctcaacctaggtaacatagtgaaacctcatctctaccaaaagaaaacatagctgggtgtggtgttgtgtacctgtggtcccagctacttgggagactgaggtcaaaggattacttgagcccaagatgttgaggctgcagtgagctatgattgcatcattgcactccagcatggatgacagaggtgagaccctgtctaaaaaaaaaattttttttttgattcatatcttaattcctgctagagaaaccaaggcaagatgaagagaactgggactgaattcttagctttatgaaggctgtgtgcttaattattcttaaagcttggcttatacaagccatacgttttcaggtaatcctataaaacaaatgaaagcacaatcatccacatacctatgaatatttgaatattatatttagaacaaatagcaaaatgaattgaaatacttctttacttaattttaaatagtatgtatgatcataatttttctccattacattattttaatgatgtactttagtaaaccatggttgcatgcaagtgaaacttgagattttcaaaatactccttaattcttaaaaaaagtaagaacttttttagtaatatgtatacacatttgatcttcatatattctatagtttattggtgttcaagtatttactgacactcttagctgcaaagccctgtgctagaagctgtaaatgagatgattgtgacttagacatgatctaagcctatcaggtcaagaaagacaaatgtgcagctattataaaggctctactatggcagataatttttctaattgctagatgacattaattttccattttgcatttgggatatgctagaattttatattttgacctttattcaaagacactttgaagactaaaagttaaaaaaaaaatctatcttattagatccttcaagtcaaactattgcccaagggaacaggtggagtgagttgctttacatagtaagttaggattgagtactaggcatggagttggtttatacattttcttctgtgttcttatagatataaacttttcaccttattggattcttcagcttaaaaaaatacaaaaggattattaactattgcccttaagtgttaaaaacgtctcttggtcttagtaaataagtagcctgaactaaagatcctaggaaagattgtcttcattgtttgcagccatcatgcaagacatatgcctcttgcaaaaattggtgaccattcactttgtcagttacctcaaagctgaggaatgaccgaaggcaaaaagtgtataacctctagaacaggcattcaacaaattattttttttttcttttccaaaccttgtaggacttaacacaggttatttaccatatagatgttgttttcattgctagatttctagaaaatatgtgaaaagctcaaataacttcatttctattgtgtcagcttctaatattaataaaaattttactctagatccaacaaaagtcctaacttttatttccagggtacaatctgctattaccaatgtgtctgagtatttttactctttcataataacctatgccaataaatagtcaagtgtccaatcaatccccatcatcgttgcagacatttaaaagctcatgtagatattaaaatgcattatctcggttccatttctttggaggtctatacagcaaatatctttgtccttgaaaatgtaagtagccaggccagctatcacattgttccaggtgttttagcattccctagctatagtagcagtctagataggctgatctcagaaaatgctaactcctcaatttgcattcttagatgtgttactgctgtactgaatgttatcagatactcttgacctaaagagtaatcaatagcagagattttagttttctaggttggaagaaccttggtaattttgacataattgaacaattgtgttgttttccctaacgttcatctttggcttccagtgatagccccaaagaagtaatttctttctgtattctgaacctgtattttaggtatctggccccattgagagatgcgccaagatattcttgtgtgacacagctagataggctaggggtttctaactcaaccatcaatggagctggacagggaaatcaaattccctgaatgaggtgggctgaatgaaggcaagaaggaatggtgataggtggccaagtggagggtacacaagtgtgtgagttgtgtatatagcatcgtggctcagatccagttgattaccattacactggaatgcaggcccacttttgaaagattacatgtttcccccacatcatcccaagaggagctagtcagattttgatgcagaatttcccacctttaacatactgtgcaactaaagaaaacacttctgtatgtcaggatgtggttggcactgtgatccaggcttccctatccatgaatggtgacatctgagaccattttatcatcatcttaagtactttcatacattatttaacagcagcattgaaataacattaatctgtctttataaacaatggatgctatttacaaaaattatgatacaactacctaggtcaaagccaaggttccttttgatgctaaacataaagttgcaactattactatttacagtaattctagcattaatgccattctctaagattggaagactttgagccaaacttattttcagtctacatggggacctcagaggaaaacacccctacagataattcacctcaacctcagatgtccaggcaagacgaacagaggtgtgaagtgctggttgatagctctcagtgaggcctccagataatgtatttctttttcatctgcttcccttggggaagaagctattccacaaatgtttattgagtatagaaccttctgaattataaattttcatcccttctgttgtgtcccttgctctgaagtttttctccttcaatcaatagtttccatttcaaccatgtttattattgcaattaaccacctccttctaactgctttttgcaatgttttataaaagcaaccaccagatacttccaagtatcctaaagaaaattgtcctcccgactccagccccagctattaaacatttaaaacaaatgaagttatttattgagtacctatagtttgccagggaatatgctaagttgcggggtgtggtggcctatgaaaatataagacatagaaatgtatgatcttttaaaaagttgctaatatactgttctgtcaatactgtctctggaatgagttcagataatgtataataaatcattagtggaccaggccaacatctagttaagcactaatcttggttccaaaaggttacagaagtatatttctgaagtgactcccatactaaattttgatcctttaaagaagttactactcttcctatttggtgatttatcccccctctgtgaaattatttttttgtttttcatttccttttaggaacagaactcattaattgctactaatagcaattgtgtgatgtttttaattcctaaagaaaggtgctatgaaaatctagttgatcttaacatgagtttaattttaaagtattaatgtatagaacatgcagtgtggctttgtgagttatgtcaaaaatgaagccattaattcccaagttgagtttaaacccaaattttctttcattgcagtgcctggatacctgtgtattggatgagcagttgagtactgatgctttccccagggagcactgccagtgacttgccctacaagtcaggcctccttttaagtcaggcctagtagtgagcagtgattcttcctagtaacaactgatagattgagggacatttttgaagcactcaattcctcagtttcttttccattatacttttttgttaaattaggaacaggtagtaacccttcctctttccccatctcaaacccaaaagaatgtccccaggaagattacccagtgacattcacagtaaaggtgaataaatgttagtgtgaatccacaaggctggtgttaacggtttttcccttcccctttgcttgtgtttcccacctgctgaataagaatacctgaagaagtgtcaagaagatgctgctgttgaaggccttggagtccccgagatgcaacttactttcccctttaaaatatctaaacaagacatttaatattgaaaccaagtacctcatgaccaaaggcagaatgagccacaatattcaggaaccatttcctcatctccatctggaatacagtactctgctataggggttttcaaacttttgttcacaggacctctttgctgtcttaactccttgagaacccaaatgagcttaagtatatgtggcttatatttatcaatattttggattagatattataactaagggattctaaattatttaacaaatttatttaaaaataaacccattacatgttgatgaaataatatatttttatgagaaaataactatcttctaagaacaaaaatctttactgaaaaaagtattgttttacattttcacagatttctttagtgtctgatttaagggaagacagctggattcttatatctccttctgcattcaatctgttgtgcctattttggtttatgtagaaactgggcctcatacaaatatgtacctggaaaagaaaggatcattttaatactcttttcaggtaattttgggtattcttctctaatactgtactaaaacttgacaaatggtagtttcttaaggatttcttacaagggagaaaatgaaacaatatcaatgaactttctgtactgtaaaatacactggtctatcttgcattttgaatggaactgttatccacacgtgattttgtaacatcatacatttgtcccttggaaaatattcatagattgagttatgcagatcttccaaatagtgacagattttattatttgttatcaaaatcattgcatttattaatattatcactgatcttatcagaaaggttcttcagtactgggaagctgtcaagctcatggtggcaaatacaagttggcaaaaattctaattttcctttgaaagctggaattttattattggcaacagatacagtgagttttcattgaagtaatgggcttactttatatattttcaagaaaatctttgccaaataaccagtctggaaaaccatcatctgcctttcagtcattcattcaaataaaaaaatggtgttccatgaaaacagcaggtggttcagcttgcaacataatcacacaagttctttttctttgcagaaccatcatacatcagaagtgcttcatgtgtacttcctattttgtcacatagaatattaaagatacgtaagttcaagggttgaggtttaataacatttataattgttattgcttggttacagaccttgagtgaaactgcctgttgtttatgttttgaactggtactgggtagtggtaaaaaacaaaatgactattcatatagttgggtgcctctgccattattcatgctaagacaccagcagtttgacccgccatcagtccaaatggcaacacagtaaataaggccaataacatgatagaattattatggaaatagctttgaccttttggacttgagacccccaagagtctgtggaccaactttaaaaactgctgttctattacatattttccaaatgcctggtttgcattatcagatttactctcatactgtaaccccattatacttcatcaagaagtggggctatgctacctttcctcccttatccaaacaccaaaactaaccatataggtatctttacatttgccacattttagtaattccttatcccagttcgccatgacgaacatgtagacatgagcttaatccaagctgtaaccatggttactgttttccccaggctggccctacttgttgggccacagctggctcgtacctgctgtcttgcccattgctgcccaccctgccattctcatgtgagctagcctcggcttcctgaggttccctatgaggtatcctgagctctgcatggacacatccttctactgaattttagtgccatgtcagtgagaatatcacccgcatcccttagttgcagtgtcagtgcttaaaggtatttgctgaacttacaatcatattgggaaatgtgagtattaaagtcaaaacacttctggaacctaaactcatacctattgtactgatttttaccagataaaggaaatgatgacacttattagttggcttggattttaaaatataaagatcgtattgaaggtagatggataggaggtgaagtatttgaaatgcggcattggacctgggcttacaaactccaggtgtgattcctcctcttaccagctctttcaccttctgtgaggtgagctacctctttgagccttatttttcttgtctgtaggagagtgttaatatttacccgtaagtgttgtagggaagattaatctcgttttgtagatagcagctaccatactgtgtggacatagtagataactattttaaaaatcataatttataaatttggtaattagacatttacagatctgatttcagctgtcatatacggttgcattattatagtgtgaattcatgcccccatgattttaaaaagtggtgtttttggcatgtgtgcattcgctgaagttgtaaaacacattttttaagtgtacaagtaatggacagcagatgagaaacagattgcaaaaactcttttcagtatccaaacatgacagtaaactcatattgttcaaagaatagggcccttaattgggtgggatttttatttgatttatgacctgaggctaatactgtggcttggatatgttctaaccccatgactgtctaatagcttacatatatgttgggtagtaatgccagtggataggttttattctgagaaccttcattcttaactcaaatctcaaaaatagatgacaaggcagaaaatatttggggtgataagattgaatatggaatagaacatcaattgcttgctctcagatactagtcttttttgtttttcaagtaatggagaaaccatatattattttcatctgggagtgtctgttgtgtttgcatgcaccagatgagctggagaagttgtggcctgcaagtaacataaagcaaataaaatttttgccagacggggcataactaaatgcttaccaccctccctgaaagttagttacgttttgatcattggtctgctatattgaatgctgatttttttttccagtttgacatgatagtaagtgacattgcattgtataaaaaggatatttttatttacacacacttaaaaatggatcctgggttttaaggaaatttccttttaagcacattttggctctggtaaaatctattctgaagaacttataggcaaatagcttttgagaatttggactcattagcagggcttatttctttggctatatttcctgataatagttttctgtaagctatgtgaatgtcagagagcagaaatagtcagaatttttcttctgagctcattagtgaatgcatacaggatgaggtagcctgaaacagtttgaggtataatcagtgtcttctcactctctccttttctttcatctcattctttaccatgtttgttgggcattagtttaaaagcctagcatttaataggaactttggcatatgtaaatattttctaggttcagttttagcaaatccgttgctctcatgaagactgtagagaaaatgtttgtactgatttaggaatgttaagaatgtggtggggagtggctcttcagaatactgcagtgtggtaatcatgtttgtggctatgattttcttgtttttgtttttttttttgtctttgttctttcatctcagcttttcaaaatctttagaaaatataagatattcccattttagggtttagaaaatgactcaaatatatgcatatagttgtgaaaggtgttgagatagcctcaaataataagctatatcttttgaccatattataggtggggtctctgcctgggaatgacccaccctcaagctgtttggctcctgttaaaaggactagaagggctctgccagaggaacaaggatgctcttcctggtgtggctcttctgtggcatctggttcagggctgtggtcccactcccaatggcagattttcttattttagagggagtgagtcacattcctcaaccagtggatgaaaaattccagccattccaattatccacgcctatgatcccttctgttttacacagatcattgagtcccaactcactagaccaagactcagggaaatcatgctatgatcttggctgtgccattggccaattttgtgacctcagggagtgtgtaaaatctgggtctcaatttcctcatctgtaaaatgaagtaattagaagaaagaccctttttgatgacacagtctgtgacctctaactggtaatttttataagtattctcacaagaaagctgtggttgcaagaaactagaaattagtgggataaatgagatctaacataggcatcgattagcgtacttcttaccaagttttagagggctccaaggaatatcttgggctgtatatgtgatatagcaaactttaaagagtttgtgactgtgacattgtcctctcacagagtataaagctgttcagtaactatttatggaatgatgaatgagtttgcctgatgcctactggtatgaattttccttcttgaacttactctggtactaaccattctttgtctgaatatgatgatcttttccatgcagcagtcaccagtagtaatggacttgactgcctgtggagcccaggctatctttataatgatggattgggctctcaagtgggggagtaaagcattttaagttgatgaagacattgcccctgctcttgagaaagaaacaaataagcaactaatcatagaggcaaaatgaaataatagatgtaatcaaaatgtgaacaaggtaatggtgggtgcgatggaataataaattaattctaattggagaactgaggaaggattcatatgtgagatgaagagtcatgaaggttggacctagagagatactctctaatattaaactagagagggaaaaataaaaggtaatttcagcaaaggagaagggctttttggattaaagcagtagtaggactccaaatatgtcactataggaagggcatggaatatttggagaaaagtgagtcgatgtagagaaaccaataggtggctattgctgtagtgagagcaagagatgatggttaacttggcccagagagtagttgtaagagtgaagggaagtgaacagcttgagatagatttagaagataaagtcaatagaatttgtcgatggatatcataaggggggttatagagaggggtatagatgaatcctagaattttggctcacacaagtgggaaactatcaccatttgctatgaaaaaaaaacacctaaggtgtagaatgccatgcactcagttttgggcatgtaggtttaggcatctatgttgagatgtaaggttggagccctcagtaataagtcatggtagaaatgtgtttgggagccatccaggttaaagtcctagcggtagatgagcttactggagagaaaacagagatatggaaaagtagagtcatgtatctaggactgagtgaacattgagggatttggatgtaaaggctgagcagaagatgctgattgacaaaggaaactgagaactggacatatgcattgaatggtgtgaatataagggagacagcttatgtccggatacccatctgggagagaggatgaggaaatgctgagtaggccatggtaaggcaagagaatggcagaaagacttaatcatgggtgttataaaaattacttaggagtggtcttaaaattactggggatatttctctttgattagagttcactaggctggaatcttcataaaagcaggggctgtgttcccttgttcattactgtaactgcagcaagctcagtgcctctgcatagaaatcacccaatacatgatgttggcaaatgctcaaatatttgttttttttaaactcaatttttttaccttaaatatttttttttacctcaaattcctcagatatcatgtgttttccttgactctgaatattacctccatgcatataacttaccaatgtgtatgtcctaggtctgacctctcttctgagttccagtcccagatttttagctgcctgttagacttctttacctggatcacttggaggcatctcacattcaattaaggcaaatactgaacttgactcacattttccaccttcccattctgtcactcatgctttcttctttgttacagatcttataatggactctcttctagtctaattttttgtgtgcatgtgaatgtgtgtgcttgtgtgtgtgagagcctctgccttccatgggggagtcacaaatagtgaaaaaggcagtcacacatagtgagaaaaggcagcgctttcatagaatctttatattcccactatgccttatgctgtgcctttcatgtagtcacactaaataacagtttggtttaaatcagggtttgttaacaagccatataaatttttggactctgccttttagcatgtgaaagacttgtgaagatttcaaagacaaataagaaaaagtatgcctaacgaggtgtatatataaagagagttaaaacattggtgattcttgtatggacagaagaaagcaggggatcatttgataataaacctacatttctgttgtggaaggaggtgtaaataaatgaaaagccttctttcaagtctatgaagtcttatttactgtggaggcattctaatcatttccccaatctgaaaggactgaataagcaggagagagaggagagagttggtctggaaatattttccccatggtgagcatagctctaaaggtcaatggatggactgatgcagtcagctggtgacacttgaatggccttacccagctggcatctgttctgattgattagcgcttctgtgctttagattagaagttattattgaaatatgtgtttggctcactttgaattcttattgactcagttagtttacgtttcatttcaattctagattttccatctctgtttcatacctctgttgtctcatggactgtttaaaaactaatgctttccttgagtaagattctccagaatgtcaggcccagaagttgaatttgactcaacgtttcctgaagattggacttctaaattaacactaaaagtttccgaagatatgttttttagttacgtcatcagcttaatttgtaacccttttcattccaaatacatctctgaggtaagtcttctagcacactgacttttatttacatttaattcggaatattcttagtgctgttaagacacctttttcataaaaaagacaatacattccgtccttatggttggcagagtaacaccatctgaaagatgtctacttcctagtccctagaacatttgtatatgtgatgttacatgacaaatgagaattaaggtaacatatgaaattaagattggtcagtttactttaagctagagagattaacctggtgggctcagtgtaatcacaggggtctttatttgtggaagagggaagcaggagagaaggtcagacttgactggccatttatggttttgaagttggaagggaccaaagagctaaagaatgtgggcaacctcttcagaaggtagaaaaagcaagttaatgaatcctcccttggagcctccagaaaggaattcaggtccactcacatcttgatgttcacctagtaagatccacgcctgacttcaggcctgcagaattagaagataataaatcagtgttattgcagtccactaagttggtaggtaatttgtaaccggagaaataggaaaccagtagaacccttctttatttcagtttggtgatatgaatgtgttgcttcttacattctagataccaggcatttataatttttcctagaagagttagcctatttttactttataggatcaagggcaaccatgtttactttcataaggagtaattttttttacctatacaaaattggataatttgttttgctattgaatgtgattatatccacttttatcaatatataattattatctaagtacattttggcataactcactatatattttatataaagtcacctcttataacttgcataacagtaacccaacatgcttttgagctgtaaaaaggagaatatgttcgaacattcttgtttgaatggtttagtagttacgacattggcattgttaggaatgacaaatagtcatttcctatttggtttatcagggaacactatttccttggttgcaataaatgtccatactgtctattggttttcaacttttggaatcaaattatagagaaagtatggttatcattacagaaaagaatgtaaatatttgcaacttcagtagcataaaagtaaaggtagagccgacagaaatgggaagggaaggggtggaaggtgaggaaaagagtaagggctgccaagtcctcttttactccgaggaatgaagagatgctgttttagatgacagaataaacatagtcatttattaaagataaaggtaaccactaaagggaataaaaatatttgaataactctattaatggaaaggatggaaaagttgggggactctaaattcactaagttcccatgaatgatttcagaaagtcaaaagatgattctgaagttgaacggttgggacagtcagaaatgcttattatttagagaaaaggtgttaaaattcaaaaagactaaaagatctaaaagagttgcctctggagaatacagaactgggccactcttctgtaccatttaattttttaaaatcaaagtaatgcttacacatggtttaaagaagggttggcaaagttatctgtaaagatctagaaagtaaatattttagcctttgcaagccacatgacctctgttgcagctgctcaactctgagtttggctgtgttcccttttatctttatttacaaaagcagtgataggtaggatttggcccatgggtcacagtttgccaattcgtttatagggtcaaatagtgctaaaaggcccatgacaaaaacagtggtccaatggccccctgccgcccaaaccacttctaagaagcagtcactccaaacccttcactctaaaccccacaggttttttctatttttctccataattctaataatgtatgaatcaagggataccagtgtgcttttatgtctaaatatgaatttactgctattccttggttcatcaattttagacattttctgtttacatctgattaaggtagttgaaaatactagctattttatagctataactcaagctatacgtttttttctccttgtttcctaaaattattgttaggctatttggttaaatgcatattcagtgtttttactgttatgagaatgcagctattgttacttttgagcccataactatggttgccttttgtctcgtgcaaacttttggttttactggagttaatgactttatttgcttagttttcattgaatctcatgctttttttccgttctttttaatagttatgtaaaatgtctcttactgcaatcttccactgagttaaaaccatcaaaaatctattgattttggactttttcctaggaacattgctcctggagcccttcttcattgtcctgatcacatcaggattggtttttctctaagccttgcatggttatgttaattgctgtcaccgtttatctgagaattcccttcccatctcttgtgtgttgggtcctctgttccctgggtccctcattttggtggagcacattcgtctaatcacctgtcaggagtgactgggaggagggttgagtgtaagcctggtttttactttgctggggttggatagagtagcaaggttggcatgtgacccccagtctttagtctgtagccttttacattcagcccttctctgtgcctgatgtcttagagtctggatcttgctctttttcagtttctccagagataatatctcttgcctctcgatgagtgagatggtggggggcacctacctaggagtgttatccttccttaaagaatttgtcaggcagattttgttcaccattttcagcccccaccttcgtctacttttcatgatacctggggtctccagaccctgtcgaagtagataggcttgtgtttcatgctagctctcttcattggcaggaacttggatttgaccttcttcccctctgagaagtcattacttccttgtctttcctttttctgtctgcatgttgtgatttgagttacagatatctgctacttccatgaagatagagtttatggttttgtttgttaatttccttgtttggggatgattttcagagaaggaatgagattgtcgtaatgactgtaactgtggatgtgtgttagctgataatttttaaaattaaaatatttctgtatctgcagttttcaaaacaataaagatgaaacttattttctttcaccagctaaaataaagacccacagtcatctcagctttggggttatattaatatgtatgcatgaatgaatatattcaaatatatatgtgcatgtatgcaactgatagtgtaatataatcgtcggaaaacttttcctcaacattttgattatttttctataatttttagcatctttctttataaggtgaatttttagcttaatattgtgttgttgtttacttcttacacaattggcattcctgcttggggcttccctcccactgtatttataacttagtagtgtaataatggtataatgatacatcattgtaggcaatactacattgtttttcatgtcttcatctaccttctcattcgcattcctgaagtagataaggtgttacacccaagggaagctgttagcttttattagcaggctattttctgaaaagttttagctaattgtttttggagtttggcttgccttttcccatgtaaagaatatttaaatgaaaatttgtattgtctgcacaggcttttcatatgtcaacattttgattaatgtcaatgaatgtgtcagttaattatgaatcttagctaaggcactggacatgaagggcagatggccagtgtatccagaaattctcaaactgtttgtgatagaggaccagattgttttgtttgttcatctatggcaaacagatacttttataaaatacaaaatcatgtgcatgaatatagcaataaaaattgctataaattttaaaaaatgcttactcccaatttttgtatttttgttgcaaatgaaaaacaaacagtttcatggaatgcattagcctacagactacattttgatccaggcataggaaaaaaattgggaagagcgtttcttcccaaatttttgacgtgtgaaaaacttgcctaccattctggtgcttctctttctgggccttttgctcacttcctgctgattttattctttcccaagcccagagggtctctttgccctcctaactgctcattagcttctagttttgaagaattatgcagagtagtaataatcacaggcgctgtttattgcacatctattgtaagaagagtgcagtgtcagatgctgggattacagtggcatacacatcagaaatggcgctgcctttggaatgtaagagtctgttgtcaagaaagaaaatatatgtatgtatatgtatgcctgtgtatgtgaatgtatgtgaatatgtaatgaatttctcacaatccagtgagggtagaggatattgttcccatttatgagtggtaaattttgaatttcagcctagtcttactttaaagctcatactttttccacgaagcattttggggagtatgctgaattatcctatttatgtggcacatgcccagccaatcctgctgtgctgtacatcagcagtttggaaaaaccatctgagatgcaaataacatgtaagtcccttcttcttcctttctagaagtattttcttttaaaagaaaaggtacctttaaacatatttaatgctgatgtaaaaagtagtagaattttatttcattttgtagagtggaataaaaaatttactcagtgtggtgcaagatactcttggcaagggtagagaggtggttactaccacttggtgtttttgcatctccaccaagtttattcaacctgacaagcgaactagttttcccactctcatataagggttgcttttctgagctttgacttattttacaaatgactgcaatgagacttgccctggggcacagccatttgttagaagacctggctccccacctccagtctgccactgacttgcctcaagtctgtgctcaaatgccactttttcatggaggccgggcctgaccccttatttaaaaatacaaactgcctgtactccccatcctcctcatcctactgtattttatctctcaaattgcttatcacttactaacatatcattaattcacgtatgtattttgtttgttaattattgtcttctcccttcactaaaatttaagctttattccttccaagagctggatttttattctcttttttcttagatgttgcaagaactcaacacatgttgcagaaaggactgccattgacctgcagtctacagtgtttctgcttctcccatgctgcccttgtctatatcaaaagatctaagtctcaagatttgagcttttactcagtatcaataaaatggctttctctgttataccctgagcccgtccccctactttcttactcctttctgtttctcattgtcttcatttgtatgacaaatgcataatgaatgtcagaagtagtgctggggatatggaagtgagtaagataaatgaggtttctgaatcatggtgcttatgttctagttggggcagactaagccataaaattaacaaataattgaataaaataaggataacatgatattgataatttatgatacttccagggaatcagcgttagttaggtcgagaaatttctctctgagtaggggatacttgaggttagctcttcctgctttcttctctgcattctctgtattctttttagctatacctgtgatccatctgcagcattctggaggaatgaagttgttagagaaacgcagctaacagtagcaggtagtattatccccaatcctttttgaagatcagaggcaaataatcccttactattcctattactgctacactgaaaagaagttttataaacagtgtgggaggggggtgggtgttggcgggaggtaggtggttgcagtaaagtggatgaggtctttatgtttgtcttagagttagtttattaaagttaacttattttataaacacggccgccagtacctcttctgcaataaattaaaattctcctttctgtgtcttaatctcttctttgattgatccataaaactgtgttcaagtgaagagctaagggccattattgttacctgtaaaatgctttaaaccttactcagtcattcatatacacaaagatacacacaactggtagacactatctgtcgaaagtattctttggagttagcatacaaagatgccaacgttatagcaccaagaaagtttgaattggagatattaagtaaactgtgagttgtacaaatttgcattctcaaatttattcttattaaaattcattttgtagcagaatgttttttagggctttataatggaagaattattctaaaaattaatagcttgctcttctctttggagagatggctccttccactttttaggtgtaggctttgaattcctctggaccacacaagtttctaaaaccttggcatccagggctttggactataaaatttcattggaaacaaataatggaaaacaggatttttaaaaaatcagctgttttctttaaaattactttgagtcattgtttttcaatattattaaattagtaatggttcagtgttttacgtctttcatactgagaattgtttttaaatggattaaatccatttaatctgcttaagtatatttgcatcaattatgcattaaatatctttaattttttttaatttcagacttttaacgtttaattttcctgatataacttcagttttgtgattatactgtatataaacctgaagagttacataaggcctatactttcatgcatttaagagtgagcctttaactcactcctagagctgtaggaaaatgaaatttctatattcttataaagtcagtgtcttgagatgatgtagacagtacatttggaaataattaaaatttgttctttattaaaaaaaagctctatctagatctggaccttttcttctcaaataaatttagattaatcctaaaatgaaaaatgaacctctaaagccctttatataaagaaaaccgctgagattatagttacttcacaaagctgaatgaaagtgacatgggttaattaacattcctttaaatatttagctgatatatgaactaggaagtgaaatatatgtctcaatacttaaatatttttctatttgaaaaagggaataagtaatattattaaaacttagattatgagatactgtagaaacaaattccctggaattgttggtgcttttatattgcaattattttgtttagaattatacatcagaagaaaacaactattaataccttttctatggcttaacctttgttaagccatactggtttatacataatggtttatactggttccctgtctttaaaataagaggcctattctcggtggtctctgagccaatgaattccttccagtctttgaacttataaatttactagtcaaggcttgaaaattccaagtattttttttggggcggggggtggtaatgaggggaaggtgggaggagaactattttagagtgagaaaacagcctattcaaaaataatgttcaaatcaatataaaattctcaggcttttttttcccccctaccaagagtatttcttttaccttggagatgaaagacctttttcttaaatttgttcataaattaatgaattttcaggctacatggcaagacattggaataacgggtagattggggaattcaaaatatgatgttttgttgaatagactttctgcttggggatgcacagtaacaggggaatcctgcagaattgccgaatctattattcctaccctacagcagagatttcctctttcaagagctcaaagccctaaggatctttgaggttctaggtgctgtaggtctgagagttggaagggatcttcaggatcacagaagttccacgtcttatcctgtagcatccttgagatacggctatctagcctttgcttcactcttgaaagatgtagagagctcatgtttttaccatacatcccattctactctatgattgttttttttttttttttttggagacagagtcttgctctgtcacccaggctggagtgcagtggtgcaatctcggctcactgcaacctccacctcctggattcaagcaattctcctgcctcagcctcctgagtagctgggattacaggcacgtgccaccacgcccagctaatttttatatttttagtagagacagggtttcaccatgttggtcagggtggtctcaaactcctgacgtcgtgatccacccacctcggcctcccaaagtgctgggattacaggcgtgagccaccgcacccggccaagattgttctttttgaaggatctttcttacgctgagtttctacctctctatcgtctatgtatcatttctagaacagcacagaaaaagccaaatctctcttttatgtggaaggcttttagttggattggagatctcctatggtcatttaactctctgctgttacctctgttgtctcagttctcatgtacttatttacggaggtctaagtgtttaaggtaaaacttttacataaaatatagtctccagtgtaatccagatacttcctctggtgctcaactgaaaagacaatgaatactccaagtctagattaaaaacaggtagcattggccttattcagaggacgtatgttcacttccattgtggtgtctccctaagggatttttaggactaattttaataagtaatttttaccttacctgataactttaagagctcagtgccctgtaaactgtagttctgtctttgaaatagcaaagtgttttcctttttgttctccaatttagacaagcctcaattaattcagctcactcatcataagatgtatttccatctccttaacctttgtggttactgtcacatgggtcatctccagttagttaatgatggtctcttcaaatctgacaaaatactctaaatgtagtgggaccactttggcacagagtgaaacgattccttgttctgttctcacacagtccttgtattatcatagcctaagatggtaataataatatttttagcagactcatcactgttgacttgttaaagcctgtggtcaactaagcatctcctgggcttcttagaaatgttgaataactggtagtcagttagctacatgttctattggtaggataacctggccttcccatcttctgggacttctacactccttttgttttaggatttgtccttattcttctgaggaaactagacttactctgaacagctttttggtggtcttcatttgtttagctgtagagatggcatgtgcaaaaggaacaattaggtatttcagtttgaaaaagtcacatttttggaagcaaagatattattttcatttttatgtaaataccttggaagtatatcacacgtgcagaaaagtacacaagttaagtatagctggtgagacaggagagtccctgactccctcgcaggacttgcgatgaggggtggctcctttgcagccgagctcaaaccgcttgtgggagggggagcacgcaggtgagcaggtgcaggacctggggcaagtgcctttaggtgctggcaggaccaaacccagtaaccgggcccgtggtagcaatcagtggttgcccgcaacttctggagccccagaggttgtgtattacaaacaatgcccttttggttgttgccttcaacagagagctaagccttaaccagctcagtggagagtcagggtgacatataccctgccctcttggtacccgggttcttgtctggcatccaggaagaatcaggtcacacggacttgaaggatgttgaatgcagaggttttattgactgatggaggtggctgtcagtggaaaaggagctagagcggggatggtgcgggaagaaagtagtctttccttgaagcctggctgactccagccgggtcgtctccgaagtcgtgtggtctgacattaagccgcgtctagccttagtctctgatgcgcagttgcttctagtctctgatgcgcagttgcttctcctctcgatgttcagccgcttgtctctctgccagctgagctctgaggtttataggagcacgagatacggaggctgggtgggccaaaaagtagcatttgagctggaaaacggataactgttttcatttagggctgcagattccaggctcgagggtgggttctttgccagggagctgccctcttctatccagtatttccctgcctcctgtcggtatcgctaacatacagatcaagaaatagaacattgccctagaagccgcttcatgcctctttctactcaccacccttccccctcacaaggagtaaccagtctcgtgacttctacattgtgaattaattatgcctctttttgaacttgttatgcatgtaatcatacaaaaggtgcttgttttgtatttggctctttttatgcaatttcatgttgcgagatttactcatgttgtcgcataaacttgtagttttgttcattcttgctgtatagtattccattgcatggacatactgtagtttatacattctactggttacgaatatttgagctatttccagatttttaggtattaaaaataatcctgctatgaatattctgtgtgtcgtttggttaggtatatattcatagcaggatttgatatatacccagatttctgttagatgtatacccagaagtggaattgctgagttatgtgtgatgttcattcagctttatggcatgtttatgttcagttactgccagttttccaaagtgattgtatacatttacacttttacccttagtgtactagaattctagttgctttgtattctcacaatccttaccctaaccccagtcaatttggacaagatcaatatcttcacaatagtgagcttttcaatctatgatagtcttctttaatttttcctaatattttataattttaaatcataaatgttttgcatattttcattagactcattcataagtatttgattttatgctattgtaaatgttacaatttttttttaattttttttaatctttaactggttttctttgtttagttattggtttgccttatttactaagatacttctatactgtgatttggtggtgcctattctcaaatgctttttctgcatccattgtggtgatcatttgatctttatcattttttctatattaatttatgaataacttaggttgatttttgacttttaaataactcttgcatgactgtaataatttccacttggttatcatgtattattccttatagacatcactgaatttgatttacaaatgtttaagatttttacctacatatgtagatttttacctacatatccatgagaaagagagagactgggatattattttcttgtaatatccttgtaaggatattggtatcaaatttatgctatcttttttaaaaaaagctgagagaatttttctctttttctagtctctagaagtatttatataaaagattggcattatttgttccttaaatattaggaagattttacctgtgatgtcatctgagcttggaattttccttttgaagaaacatttggaaggttttgaaacaataaattcaatttaattcttgttgtttttgtattaatcatattttgtatttttactgtccattttgttgtatttttcgaagaattcgttcattttataaaaattgttaaatttataggtccaaggtttttagaatattctcttcagtatctgtaggatctataatggttttgcttgcctttgttccttcctgatattggaaatttattttatttttcttgattggttctgctatgaatttactagttttgtcaagcttttcataaaaccaactttgatttttatttgttgtttttttatttcattgttctttgctctttattttcttcactgtgtctttggatttcattagctgttttttttctagctttttgatcaattttttttacttgttaatatgtgcattaaagaccataactgacacatttggcactgatttacctgcattccacacatttttgctattttaattactagaagtattttctcattgcctttatttttcatctatggatttttcagtactgtatttcctaatttccaaacagctgggcatttttgagatatttttctgtggttgattctactgtgataagagaacatattttaaatgatttcagacctttgaaatttggtacacgttccatgtacacttataaagtatgttctaatcttttcggttacactatttgtgtgtgtgtgtgcaaatataatacaaataagttaggctacatttgttacttgtgtcagtcagatgatttatatcttcttcaattttttgtttcctatcaagtctcccaattcatgtttttaaaatattttttaaagatctgttcattttgacagtatatgtattaaagttatattattgggtacgtacacatttaacattgttatctttctgttagattgagccttttatcatgattgaatatcccactttatctttattaatacttctttccttgaagtctcctttatctgatattaggattagtatggccataccaactttcttttgatagaatcatagatttttagatctggaagtaaatatatgtatggactaattctccctcattttatatgtaattaaaggtttataattctattggacttgctaggtgttactttcaacccagcataaaaactccgggtcccattctagttctgctgaattctttggaaacatactgtagttaattcaaacagcctcagcccatgttcttctactaggcttttctcctgaagtttacacttggttgatctattttaggaaggtgaaggcgtgttctgaagccagttagggctggttcataataaactgtatattcatcactgccttttctggcttgattctttcctttcacgtgtcagtgctgctctgctaggctttgtttgggtgtcattttccaaaactcttgtttttccctgcactgctctgtggctggctactcagaggctcctgttctctgtctgccccaaacagtctgcagacatgctctgtcaccttctccttcctgggtgcattgtggggcatctgattctcatttggtcttgggtagaggggagaatgcccccaggagattattataaaagtaattaagtgttatgtgcaagtacatttttgtaattctctatctaatttctggtgcttcaaactccctctctattcttggcagtaagatctttttccactgtttccaaaacccttaagtctatgattatgaagattatattttgaaggtttccccacttaattctcatttgtgaagcatgggacagacccacttaagcaaagaatttggggccttccattgtcaccccccatgtctctgcattttgacctctatgaggtgcatcatacaaaaggccatccagtctccaggctcactaatgatgatgcacccgaggcccagaataatggcaacttgcctgggtacgtatgcttatgtagggatagaaatggacctgattccctgcctgattccttggtaattgtgctttgtattaagttatttaataacaaaatattttctgtgtttaaaaaaaaatcccaccttggctttgctgcttattcagtgtctgaacttcggaaagttaattcacctaccttggttttctcatctgtaagatggattaactgttttatgaggcattttgaggataaatgagttaatcatacaaaacacatagtacctatagtacctgacctataggtaaaatctcattttgtggatatgtgccaccaaattcatgaagttaaattctataaagaaaattccgttttgtttttaccttccatttgaccattgctgttgtgttccagtaggtaagattcttctagtaaaaacattaagccaccaggaaaccagttgcatggctgagaactgtaattcatgtagcccctctccaaaaatcggcttttcctttgcagcactctccccactttgggacctcgctgccattgcaggctgttttttcttcttggactacaggcatcttgcttgggcccctccaagttttccctttcttgtgtttattggcataatcccagttcatggtagtcacagcattatagtatgtgggttgccagtctactcctttaggtattacaagtggaaaattattgtacttcaaacatggttaatgtaaattttctaatgcataaggtaaaatttcatgtcatctacccatagtgaaggtcttttggtgctattagtattaaagcctatttggaaccatttttacatttgatcattaaaaataactcttcttcctgtaatgcctgtgtttttgttttgctttccttttgcaattcattctcataggctagttttagttttaaaattttagtagcatttaaattaactcttttattttaaaaacagatacaataatgtcaaaagtggagaaaacataattataacattatttttcaataatgatcctaggagtataagtaataagacattgcatagcaaaatgaacacatatattagagatattttcaaaataatttaaaagctatgtgtaccacagttacttgtgcaatataaaggcaagttaagtgtcataatcataaaaatatagtaattttttcccagtgacagtatgaaccagaacacatatgtgaacaccttttcatatctgatcagttttattcctgatggcaataaaaccatgtaaatgaaatgcaaaatgttgactgcaatgtaatggttgaaatttttacatgcattaaagagtcaggataaatttatggtcttacgatggctgtaggttgcatattttgtatgtacatttttgagtgatcaatagcaccatggccaaaataccatggggacaaaaatcacagttggtatgtactgtggtttattgacattttgccccctctcagatgtgtaaaatattaaccctgagactgatttcctatggcttgtctgtttttgttcagggttaggtgtagatatatgcccatcattagcctactcttttcttctttggaatgtataaaatggcaatatcaatgtggaatagggagttcaaattgtagtctttccatattctgacaccatgtttttcacttaaaatttttgggtcaaatacatgtttccaaaatgtatcaagatacttttttacttcatttagttctgagctcttttgaatcaaattagagaacagtgtcttagtttcaactccgtgtcttattttccacaatgtcttggatcccagtgtgcgtgagggaggaatggatgtgatgcggcaaccccatcttgctgccatttgtttgatattccctttgccactgatcaaatcctatctttggctattttttgagttactttattttaaattaggactctttggttttcttctctctgtgtttccacctctaggcaggaaggtgtactttaacttactgcagttgtgaaggatgattatttacctccatcgtaggtgataaaatctgcttttacaaactgaacttgagaaaaaagcagataactgatagatgcctgcttttaagtacaaatatactataaagaaaactctttagaatacattactttttataaacatggttaaaatcaacagatttcatctacagagctaggtaatatatcaaaaaactcaatggaagtttatagaaattaattaaattgaactctttttataagcagactttttacaaggaataaataatacttaatatttccgtcagaagtcctgggtagatttgaagaaatatgttgcttgcggcatggccataacaaaaaagatttaattcccaaatattgctgggggagagctgtattgtccagtggccattacatagttttctctatgctaggatcctccctttttgaaatctggcctattatacttagctcatcttttacagcacaattacttcgggttggcaaagacctctggttaaagaaactgaataatgagagttgtgtgtctttcttacctgattatactcccactgcttatatctttgagatctctatctgtgccacagagtcaggcatttaaagtttcctagtaaatcattggtgtttgcacctataaactcagtattagaagtaaacaaaactccttttattttacttgaaattcaatactgtatggagaacttaattttgaaatgtctaaagcctaactaaggagaattcctttagatttttaaagcctatcactttaccaagttgtattactggaaagctatgtacttgggtcacattttagtagctctccaaatagatgccttaaaaaagtattgtttaatagtatgcccttactgtttattgggggtcagctaaaaagaagactgtatgacaaccatttctattagcttttatgaaattgaaattgaattccgtgggttatattagttcttatccctaataaagatttgtatgggaaaggcttagagctgtatcctagaagaatttccatctttcttttttaacaaactggtatctgttcgtttattggataccaagtgtattatagctcaaaagtttcccactttgaggggctttctaagactcacagaaccaaattgattatagcttggggattatggtaaaaccttactcatgtttttcttcacttcattcattggttcatgttcttgtcccatcgctataatggttcactttcatagctatcctggaaataggcagtacgtaagtaactgaatgagctagattatttaattctaaattctagaatcagagtaagcggtttttaaaagtaagcagttttttaaaaagcgatagttgaacatctctttaattactaccccaactcagtgaattccccattcaactctgaacacagtttgagttgctgccatgctgcaggaaatggcaagcgaggctggagctcctgctctgtgcatcattgcatatctcagagtgaggctgcatgctgaacatggagatttaaacaggtgaagatgttggtggctacccattccatttatatattttgtagtgatagctattaccatcacagattctgcctttagggttttttccctacagctttggaatctgtttggacttttattcctagtttcagaaagtaccctcaagaagatctttcttttccagagtattcttggaattacctgagttgtaggttataaaaattccctgagtatgtttttcaaacagtttatttttgcattgcaatttaccttccaggaaaattgatgaaatatgtataccttgattctccgatttaagttaaacaggataaaaatgccaagtatttttttccaaataaatagataacatttgttttcagtgtttaaaaatttgattactagaacatatttttaacaagttaacttatgtctcttaacattaaaatgtgtttaactttttaacatagattaggtcattaaacttgtgtttgttctactatagggtcctggttactgggtgaagattcatcacttagaatatacagatggaggaatcctggatccagatgatgtcttggcagatgttgttgaagataaagacaaggtagataactctaaaaatgtgcctctttgttttcctctacagagctgcatgttttcaagagactgaaatccttaacaaactcatgtgtcaattattattaaaagataccatctgttcaggtttcacctggacagcccataaatcaaagttcttcatcagatgtttggaaaaactgtgttaaggtttgggaatctgtttgtgttggcctaattagcagacacttcattcccaagagtttctgatatgtcttaataaattagtttcatatgtgaggctgttggaatcatcattgtcgttgctggctctgtagtttattcctggcccttgctaactattcaactaaatgcctgaggcgtgaatgtgtttcaaagtagagaatacaatggggcagcaagttttatgaagaattacagtgaagatttttctgaaagtagctggcaaacaactatcttgagtgatagtcttattttcactgctacagtaaaaggcactaaattgaatactccaaaaagtttgagcgtgttctgccacttatttgggaataatctcgttgcaaatatcttgttttaatgagatttttcttctgagactatacagaggaaggtgtgaaagtatactatttcattgcaatacacacgattattgctgttgagacaggtttaatactacaggtttggctcctgtcatcaatggctaatgtgttttccaaaaccgaactctgtcagagagatctagctttcaaagtttcttctattatacatctttagtgctgtttgtacaaggctaatttatatttggaaacatgtttctctatattttttccctgtaatctcaggggtgtgtatgtgtacatttttgtgttttacctaactggactggaatataaataagtgatttattaaactcaggtgaagtttatatttttctttttccataagatctcttcagactgttcaaacttacattaatctttgcagacatcttatacatttacttttcatattttattttgtaattaaaacctgttttgctttatgttgttattagcgattttatagtctatttagggagataactaactaagttttatagtctatctagggaaataactagctatctagataaacctagttatctccctaaatagattgtaagctcctagtggacatggacttgggagatttttatttgtgtgtttttgttagtagtatctggtataatatcttacacaaacttgattcccaaaaatacttactgaattaatgagtgaaaaagacagctttactttctacacttgactcttgctgtatgtaattttgatatatacttcctgtttatttagttggtctcagggtaaataaaagggtaactaatgtattattaaccttcagaaccctgaagaagggtttttagttctttcaccctgtttcactttctgcttcttccctagggatcatcttcttcctttgaaataatccagatattttaattgtttattaatgtagaaggcagttcctgtcttaaatttcactgatgtccagaacattaaaatgaagggccaaaaaatggcaagtttaggaaggacgagaagaaaatgtcttaccccagcttcatccaatacctcattactagaaggataagtccatgaacagtgcccagggagataatttgtcccatagagctctcacatttagagcattcttttaaactatctcagcaatgcagtttataaccataatccacttactacacacagaaacagctttattatatgtaatctctgttttaatgggactctaccaccattactaaataaggtaaaaaagtgagataatcagttaaaatcctagctgaggattagtactgcttgggttcggctttaacaattctgttaatgtacttcaatatttctacatgatgcctaattggtattgttctgcagagtttatgacaatttatacttttgatgttgctagaaaaaattgtgttgccatttcttcttcttaaaaaatacgtaagtggcacggtggctcatgcctgtaatcctagcactttgggaggctaaggtgggtggatcacgaggtcaggagatcaggatcatcctggctaacacagtgaaaccccatctctactaaaaatacaaaaaaattacacaggagtggtggcatgcacctgtaatcccagctactcaggaggctgaggcacgagaatcaattcaacccaggaggcagaggttgcagtgagccaagatcacaccagtgcaggccagcctgggtgacagagcaagactccatctaaaaaaaaaaaaaaaaaaaggtgaaaaaaagaatttcttatttttctgacaaccttggtaatcttaagatttctttatagtccatatgtctattgtggaaagaaggccctgccaaatttcattttaccttactttttggcagtttagattaagaagtaactataagtgatgctttgtggatgcttaatgacatatcagtctcactcaggatcctttgaggcggtattgagcttagacaaaataacagttcacctgtttgcaaattggctacctaataatctttggcatttaaaatgtggatagagaacaagtccaaagaggcacggatagatgcacataatcattgtgctaaccccaaaatatctcacctcctaggaaagactctcactccaggtgagaagtggcattaaggaactgttggtctattgcagcatatcaggcaggaaaaacagaaacttagaaagcaggggaggctgggccatttagtgtatggtaacaccatcccatacacttcagtaaaggtagaaactagaggttaaatgatattgtacttcaaattagagaaggctctaacaaagttcagccagtgttcttaagaaatgacttttaaaacttgtgcctaaagtggtttgtctgtggtcttacttctattattcctttggccaacatagtgcttggcgcatacatggtatctgcttgggagctttggttttttaaacttgctttcctagtacagcttccacggggaccaagtctccactgtgttacactacttctagcctatatgtgtcaaaatattattggaacagctttggaatattgcatcttatgataactatttgtataaaatgttgtgctgaaacttaataattatctggttgtgacagttattctcaagattcttcagtttgtctatcagtctgatgattcgagttctttgggataaatatctaagaattgtaattttacactcatgtctcctctctggttgctaaaggctaccaacttagttcacccaatagtaacaacctaatcattgatgactagcaatggcccagaatgtctttggcccttatttattctacgttattttaaagcaatcctgaagacaagagctagtgttatccctatttttaatttccagaataatcacagaaattgtaagtaacttgcccaagatcacacaggtagtaaatggcacaatcagactctggaacctagaatttaaatttctgtaatcttatttcttttcttctctgatgtgtcaagcagtttggcgcttgtatctataatttctattacgaaaattcatcagtcataaattaacatgaattttgcttttacgtagtcaccaccattgctaagaaaaggttggtaatagaccaaactgttgagtataacaaaacagttgagtatacaatttatttataaattaattcagaattaatatgccatacatatttaatatatttcaaccctgtttgcctatagcctgcatctagtttattgtaaaggcttgtcagctctacctctgttgctttcttttgcatcctcttttctctaggacccagattatttgatttagatacagtttaatttcagttggacgctttagactgcacttgaagtctaaccaccatatgcaattacaaagaaaaacaagtttgtattacagtaactacttttttgcaccaactatagactgtgctgttttcagtaggcagagtaatggcgcctcaaaaatgtctactccctaatctctacaacctgtgaatatgaatgttacatgacacagcgtctttgcagatgtgcttaaggatcttaaaatggagagattattctggattatttggatggacccaatgtagtcacaagcatccttataaatgaaagaagaaggcaggagagtattagagagataaatgtgagaaagacacacccagccaatgccagctgtgaagatggagaaggtgccaccagcgaagaatgtagctggcctctgacattggaatcagtaagggaatggattctcccctaaagcctccagagagaacacagtcctgctgataccttgattttagcccagtgagacttgtttcagatttcttaactgtcagataataaatttgtgatgttttaagccattgcatttgtggtgacttgctacagcagcaataggacactaatacatacactgcctcttttcccattttaacttttaaagtgatgttagtcttctcaaatttcatattgactgggcattgagatcctgcaggatgagataaatgctttgtacttcagatgggttccttgttctttgccttcctcccaaagtccatcacaaatgatcctcagtttattgggtgagccttcactctttgagacttgatctttaaatatctaattatgctgttatcgtctatagtgtagaaattatttcaaagtcacagacaaacagccttgttcacttatcagtttctcgctgcagtatgtaaaggccctaagaagtctgaagactgatgcttagtaaaccactgcaaagcttaatgcttccttccttttaagtgagcatgagagcttctgagtattaagctttttaaaatgattattttctttggtaattgccattattaatttttggctgggttgaagaagacaactgcaatataacatgaaaacatggcagtctatcacatctattatataaagtgaattactgccatggtttcattaactgtacaaaagtaatactgtattatgtagtaaagtaacatggaaagatgcctctgttcttgactaaattttgcctatcctagggggctagtttggagagatgccagtggttttcagggcttccaagtgaattgcccactggatcacatgtgatatctggtattcaaatgttataatttcagttcagttttatctcctattagttatcagtccttgggcaagcttcttcatctctctggtcttggtttccccatttgtaaaatgaatataatgttcttacagggttggtgtaggaaaactaggtaggtaaactatataaaattttaagtatagtatagcatatactgagaactcaaatgctgttatattaatgatactatggtagtgctattacagtatttttaatgtaggtgttttgatgttaccattagatgtttttaggtatttaaacatcaaataaactattttactgtatattttaactgctttttaaacaaaactgatatgaatgaagttattaaattggtaaaatagttttataagaagatattgaatatgacagaacatttggattaatatattgttattatttgcgaaatgaaaatgccagtatgattaaactggaaatgagaatccttttatcagaacatattatttggtaacataaggagcatttggagatgtaacatgattttaaaatggagactggtttgcgcaatgctgcatgaactagtgacctaaagccaggctctttattcttaagccaaattgctttctgaacactctgttgccctctagtgggtccacagttacctagaaaccagctcacaggagctacttcctgaacaggatgaagtattttgttctactttatttgaaaataatttttgctatgttttttgttacaactcacagactcaggcatggagaataaagccagagtttgcatatatttccctgtgcttttgtgcatcttctagtaagggctaaaggaaattccttgcatttataaaaactcctcttttaaatttatttttaaatttagacttcttcccgcctacctgtttgctggctgaaagattaatggctggtggtgatgaagtgtgtaacttattcagtctgtagttggacaatctatgaagtatattgtgttttctggagaaggagaatgctaaattaagttaaacagctttttttttttaaaggtcctgatttatttcatttcttagccctcattttatcagtaagatttccatcgcaagctaaagtacctattttaaagccacaattaaaagaaaaacaaatcaggatatgatgtgtttttgtttttccttcaaaaagtcttactttggttcatgggagttgatgttataaaagcacaaaagcacatagaagaagtttggagaaggtttcagaaataaatgcagaagctcctgaagaacaaatgaattaccttggtcatgaaattttagctcagaattttcaagattactctccgcttatagaattacaaaattgtagaatcatggatccaaacaagacctcaacagtcatgtggattaaactcatcatctttcaaaagaggaaatatcctacccaggaagaggttatagaacacgatgtctgtagctgatttagttcctgagtccatttctgcatttcctccctaggatgctgataacatctcatgcagatcaaaactactcagtttgaagttggcttcctccattgacatccttgtttttgttggttagtttcaagttggcttcttccattgacatccttgtttttgttggttaggagcaccttctcctagtctcccagacttgaacttgcagttattttaaaaatttagttatttaataaagccaatttattctttcctttatcctttcccatatgtttgtttttgtctttgaatttccacagctaccaaatttatatccataatatttcaggccaaggttactgtaattgacaagaaattggtcgtcttgtttttagtctcttccttacctgtcagctgtttttgtgcctcgtatgtaggcagaatggttaagatcttggattctggacaaaaaagtcagttcatttcttggccctgttatttgtctagttttgtccaagttgctaaacctctttgtgccttagtttcatcatggataagtggaactaaaaatagtactaattatgtaagttaacacgaagtgttcaggagagcacctggcctgtagtaagtcatcaattgttattgtaattaacacactattaataatgtaaattacattatttaaaaagtattgcttaaatcatattgttccttttagtgtatactgcatcaagtccaaactttgtagccatttagaggcctcacaatgcctccaaactttctctaaacccacttcaaccgcagtggtggcgaaactactgtacgatttattatgtatcatggactttctagctccaaagctttttttcttaatgttccggttgtctgctatatccttgtccctatttcctgcccatcgaagattcagtttatgttgtattttgtattattcaatattagctccatgaggagggggtctttgctttattcactgctgtattcccagtgcctgcagcagtgcctggcatttcctagctgttcaaataattacagtcaatgaatgaacgtatgctttgaggttttgaataagccattcaaccacttgtaactccagtttttccattggtaaaatgagagtgataaatgatatcgttcacatcgtattattgggaaggttgaaaaagtgtgcaggaaaatacaatggaaattacaaagcactatatacgtgtaaaaaatgtatctattcctgctgttcagttcttatgaatttttcaagatcaaggtgaaattgtattttatcccagtcaacatttgtaaatcatctcaatctaaagtaaatcctctgtgctctgaaattttatagaaacgattaagtggtctttttttctttttcaaatgttattggctagtaacatttaccacttaccatctcgaagttcttaagaattttattgtttaactttttaagtcttggtttgtctgtccaggtgtcttgtgtgctgttttaggactgggatgattgtttaaaatattttttagcccatagacttcttacctgtagttcagtgtttcataaacatgtttaattttagttagtgatagagtgggaactagaattgaagatttctaattgactacctttttcttccaccaaactacgttgtctctttgaaatattttattaggagacagtttgtgggcatgtttcaacctcagagaagaattttggaatcaatgcctttgtgaccttactatagctaaggcaaatagtgtcaagagatagtaacttaaactacagtaatcttgatgatggccatgtcagatatgtgccttccgcaatttagttggttgacaactatagtgtgtatgggtgtatgtgtgtatgtacgtatgatgagagaatctgtgcacagatgtatgtatgtggaggagtgtgtacacttgccctgaatttgtttgcttgttgtgtacaattgtgacacacaggtttcatcagaggttggaatgacatgatcaagctctatggtattattaattaagctaagcatttgagtacagtgaagagtaaaccataagaaaatgtttgatatgtgtgtaaaattttaagtttggttggagggaaaaacccaataaaatttgagatcacaataatgctttacttagagctaaaaatgtaattcaaaataagagtcaatgaacactttcatctttacagtatgcctttcaccatatgttacattactggacccagttctaccaattttctctctcacattagcttcttttgaagctatttgtataggcatatctttggcctaggggtatgggaccattatttttttttaatatacatctgtttttttacttatgtaacttacgaattacaatctcattgtaatacctaaaattataccaaatggaagactacttaagctataaaacatcttcttttaaaaatgcaaatgcctgtgagtactagtgtcagtcaccagtacctgtgtgtattgattcagatcgtgctccactaatacctagctgaaatcagcttcactaaagcagtattgtagagtgtcatgtggcagagcacagggcattgacagtttgaatgtaggtttttcttattttaagctgtctcaacctcagttctcatgtttataaagtcagcttttaggaggaggatcaaatgaaatgaaagagtgtgtggtaacattttgaactgtgatgtatcacacaaatatatcacttttattctttcctcgtgtagcagcagccctgaggtatttaagcaaacatttctgcatagcccagaaagggcttgtggtggtatgagaacactgagccaggaacagaggaatgtcagagaggtttggaagggaggaggatggttatgtcaaaaggccactcttctcttcttgccatctagtgaggtgttcaggaaagagttagtgctgagagtatagggagaagtagttttctgaaacaaaaattgcatttttctttaataagtgaatgtgggtggtaagaagggatatcagaacttccaggtacagaccatcaaggaaggtgaaaactaaagtacaaggatagttgttcagaatcttcccaagattccagaaccttgataacgtctgcataggttatcaggtatcatgtttgctgcctatttcttaatgagtaacagcgggttctataaaatgggaggtgggtgctttgaaacaatagggagtatcgggggaggtatctctatcttaggttaggaaaaatctcaagaaataaaatggaaagttgtgagaaaaacagctgaccttccgttaaatcatgacctgaggtctcatgatttaacggaagaaaaaaacggaaacaaaaaacaggtcaacaggacactgctcagtatgggcaaataaccactgaaccttaaacaagcaactatttagttacttgatagtttcaccaagagatatttgctattgagcaatttaatgggagtaaccatataccagactcttaatttactatgctggttctcctatttccaggacctaaactcactttatattattaattagccatattgtgaatccaacaagacgtttttgacttctcttggaatcaaactgatgtttgtcacacttttatgaggtacctgttccaaattctatataaaccgcttgtacttatagatacatttttagtaaataagaatattcagtttccttaagcttaggcttttaagttgtagcgtttgaaagtcctataagtatttaatatcacatttagaaagaaagtgtgttttccctgtcatgtgaatatggaaacttcacttacagaattgcggcaggattactaaacttaatgtttactcttttaactttttaagttatctttttagctttacttcgatgttatgaatcagttttgaaggatcaagtgacattttcttaacaataaagaagaaagcctccttgtgcagactttaaatcaggagtgaaatagcatagaaacatgttcagaaataatgtcttcattaatctcaaccaaaaccatgttacaattgaaatacacatgtttatacaatacttaactacaaacagaccagaaagactacaaaataatatgatttgagattattctaatagcctaacaatcttaaatatgcatatacttgtgtaaaagttgaagaatctcatagttcttaattgataacagggatagaagttgattttctagactgctggctaagtgtggccactgtataccagttcaaaatgaacccattgtggtaaaatgacgtgttctaaatagttcgccttttaaatgggaattttacagagctcttggttgacttacttggaaatggaagtacctagtgttaagactgaggaacctgggactacaattgagaagagagggttcagagggagcctgctaactgtcctcaactatttgagtgatcatagaaaaggtataaattcattccctattgctctaagaaatcgggccagtggtgtttcaagaaaatctttttcagctgaatataatgaacagcttctcaatgaagcacatgctgctttctaacacaggagctcatcttagtcactgagaccgagtatataagcaagagtggggcagacatctgccaggaattcctcttttagttttgcagtttgattagagacttctaaaggccaactgtcagcctctgaggcatgcatttcagtctggaaatacaggattggcctacatagtccgttgtgatacagtgttgtttgctgacctcacatccgttgtcccctttctccctccggttgtgttcagattctctctcccttcaacttgaagcccatatggttcagtgcatgtgactactcacctgcaagggtgaccctgggtggcccttcgtctgttactaatatttggttccctgtgacagtgattactttgggaatggtcgtgtgattcagtttgtgccaaatatgttcaaagagagatttgctgagtccttctgggaaagatcgtttcatcttgtgggagaaattttctccgaattttattttgttgttatgaagtttagatccatggctgccatctagcttccaacaagagaagaaattcaggttccggtaatctaaggaacatggcgtcagagccaatgggttgagtcaactctcaagaccctcctaacttggaacctccaattacacgggccatgtattgccttacatttacgcctgtttccattgcgtttttctgtgactcacagattacggattgtcgttggttaccctgttagagaagcttaggctctattttttgggctcctctttatttccatttgattaggacatatttgtcctaacctctttcagttctatacgtcattaattggaaagttttcagattgttgttcacatttctgccaaattatttagctcctttctttcagaagtttttgaattgtcaatgaaagaattacacatcttaaaatctggaggggtaaaaatgcatattccagttgtttggtttgcatggcttagatttactaggcaagattaacttggaatttttccatttggtgcgaattatatctttttattttaaagtctttgttatccttgattgttgattgggttttttttttctggaagaaataattaatgctatttaacacatctattaagatgtgtttgtcataaacgctcattatttctattattcattacttcaaaaattatgtattgagagccaatattctagtgactgggaaatcagaaggagttctgtctttagcctttttagatacttaaagtataagtggttacgtcaatgcgtggtcttacagagtaacatagaggccatttttccaatggatttctttaaaattgtagcgttcctcctttttattttaagaacttggaagaaacatttgacactaacctcaaaatgtcgcttcaactgggtgcaatcctatttacatcaagaaactggagactatatttaaagcaaacaaatataaaaaagaaaaaccttgggcagtttaagaagtttctcagaactcagagtgaagtataataatcttttaagttattatccaatggcatgagatcataatgtggttaatactccagcttccccttagctgtgaagaagttttgcaattatcagttttcccaaaattatctcaaaaaataatgaagcccttgacctgacatatgactcttttcttctgactctttacccaagttataaagaagtgtctaggtgcccctggtgtagcaagtaaagcctggagactcccagggagccctgggcccctaaatggggcagactggggatatttcttgttcaccgaggaagtggggttgcttacgcttggacactgaaaacacatctgtgatatattcaatgtacttcatgtccaagcaatataaagacagtggtcctttacattgtgacattgaaatcacaatcactcctttctgaagtggctacatggctgtcaaaatcagggttctttaaacaagcttcagaacatgccactcttccctaacaagacagaataatttggtatatttaggaagattggaggttaagcgagtgagattcccggaggatttgtaagaacactgtagaagtgttgggggtgggggagataaatgtgatgagttagaaaaataagtaatttgcagatttagtgtgctgatgatttaaaaagtgctgtaatgaatgttacaataagacaagcaacaaagaataatgtgatagacaatgatacaataatgtttggggaggctccatgtcaaaggcatcaacactcaaactatttacatgactctttcccaaatggaaacttatttcccaaatggaaataaggaagttaagtagttacaatgatttagcataaaaatggatgaaatattttgcatttaacagagaccaatctgagatgaatcttgtattcttatatataatgcatcaaaatatggaatgcagcttctgactggccaagttaattttaaaccttagtattttttatatgtatatacactaacagaaaatgtatcaagttggtctgttccaagaaagtctaggttgaaaacttgtgtatttcctgccacattgatacttgaaataaatattcaaataaaggtggaatattaaaaatcctgcagtactgttctttaaatctttgctgtttgttagaaatcagaagctaaaattgaaaattagatttattgagatgaatacttcaaaggctgttccctggtatcttaattcaatatattgctttcctctttttccaaaacaaatattttcctcttatttaaacaatgttttcttttattcagctatagcatctgatggcctcatgttactgaaagttaacataataatttgggacttagaaactttattttactcctagttataactttattggaaaatttaattttgtacagtgaaaataattatgtctggaatactctgagcaccatttggtcagtagcacaccttatatgaaataaatagatttttaaaaatttgatagtgtcttcatataaggagaggaatatagctctggattgaatttttgacacgcaatcttttattatgacatctagttgattaatacttcagccaaatcagtgttttatagtatctcttcactgtccattggatctggagctacaagcatgcataaaacctgaaatctgctttgtacttcccatcatttactttggggcaatgccagtgtcttgattatagtgtttgaagtctaaatgctttaagaattcatctaaggcaggacaatttttatacatgattttcttattgtatttgagtgacagtgtttaagaatttcttaaggttaaaaggtggtaggacagaatttttgaataagaggcacttttgtttgttttttcctttgttttaaaattgttaaactgttaactgttaaacccaacactactaaaaaagttagtacttgttaaatgtcaaaaaattttaaatatggtaaaataccaagatgaataccaaaatcatctgcaatcacatcaagcaggagtagtcattattaaaagttgggcatataaatttcttttgtatatgtattgaagcataaatatttacatttatactttttcatacaaaattgttttagtaacatacttttctttgacttaacacatttttctatgtatttattctttgaaagatgattttcaatatgtatttggcccatccttgtttgaatggggatttttagctttagcttccttcctttgctttttccttgaacattttgctataattctgataaatactctatttactgtaattaaaatgtaaaagcaagatgtgttttcagtgtaaaaatcctgggatattttaggaaaaggacttttaaccctataaatacagcatagaattcttgtctagagaactaagtaaatgtctatactcatgggacttattgggctggttgcttacctaggtagctgaatattctgatttctggtgtttggaagaaaaatttccatttgttttataggtgattattggtaagttattagctgtagtttgcttttaaaatgtatgtaccttgaaatacacatatgaaaggtttaaaggcaaatctaactttttttaaatctgaaactctattttaagttgagtgttgttttcttctggatttaactgattttcagcattttattaatgccgtagaattctggaagtattcaccaattgaaaagaatgaaaagaaagtatttaacgatgacttctactgaggaagcaattttattttattattttttttttctttttcaacttttagcttcagggggtacatgtacgggtttgttacccgagtatattgcataatgctgagattggagtaccagtgatcctgtcatccaggtactgagcaaggtacccaagagttagcgtttgaaccctttccctttttgctaccttccccctctagaagtccccaatgtctattgttgccatctttatgtccatgagtacgtgttgtttagctcccacttacaagtgaaaacatgccatatttggttttctgttcctgagttaattcacttaggataatggcctccagctgcattcatgttgctgcgaaggacatgattttattcttttttatggctgcgtagtaattctatgggatatatgtaccacattttctttagccaatccaccattgatggacacctgggttgattccatgtctttgctactgtgaatagtgctgctgtgaacatgtgagtttatgtgtctttttggtagaggatttgttttcttttggctatgtacccaatagtgggattgctgggttgaatgttagttctatttgtagttctttgagaaatttccagagtgctttccaaggtggctgaactaatttgcatttccacctacagtgtttaagtgtgctcttttctttgcagcctcaccagcatctgttgctttttgactttttaagccattctgactggtataagatggtatttcattgtggttttaatttgcggttctccagtgattaataatgatgagcattttaaaagtatatttgttggccacttgtatgccttcatttgaaaagtgttcgtgtcttttgcctatttttattttatttttttctttttttgaaggagtattgctctgtcacccaggctggaatacagtggcaggatctcggctcattgcaacctctacctcctgggttcaaatgtttctcctgcctcagcctcacaagtagctgggattacaggcactggccaccatacttggctaattttttgtatttttagtagagatggggttttgccatgttggccaggctggtttcaaactcatgacctcaggtgatctgcctgccttggcctcccaatgtgttaggattacaggcgtgagccaccatgcctggccaatagagttatttgttttttttcttgttcaattgtttaagtgaagaagcacttttaaatgtgaaaactgttattgttgaattataagattgtaattggaatattcttcatgattccaattagaatttactttattgatactttattaattttaggcatagtgctaaaaacattgcttatattatctcatcgattatttaaaattacccagtgagatagacctattatccccattttacaaattggtaaactaaggctcagagaacaggattaagtggtttgcacacttctaaagagccagtacctgattaagccaggactcaaactcagatctgtcagtctccaaagccagagttcttaaccaccatgcttagacacaaaatttggttttccattttcatggtatttttctggaactctactgtccctgcacttgctcatttatgagatgtttgtcccatgaggctgtatccattatgaagtttatgtaaagataaataagatgcttcttgttaaagagatgggaatgggagaggttggatggggcagtcaaaggaagtgacagctagtttatttctgttactttatgctcttgtaaaaatacagaaaagattgtgaatttctttacttttatgaaatgttttaatttctgtagagttgccatgcattattcaagattataaaatgatttgaatttcaggagcagacagattttctgatgaggatttcaagctgtgtaattatgaaacccatataggttaaaagttcagaactcgttagcttaatcattaaaaaataaccaattcataagcatggcatttcattttagaggggtacagttacaatatcatttactaaatgacccttggattctgcttcatgtcccaccacacactgagaatgtacaccacatagtttattctatgttattgtataatttataaagaaaattcatattttatggtagtaaattagatgccacaatgtagggcacatttctataatttttttttaaagttttcttggcaccttaaaaattcaaggaagttaatgagtgccaaatatcaaaaaggttaattagaacctgttacatagtgttgaagtatacatttaggaaatgatttgtcaaatttttccagatatggcataaatgtttcagaataaaatataagaaaatgagtgctcaggtatgaaggaaaatttgtattgtgctaaagtacacctaaaatgtaccatcttcatcatttctaagtatgcagttctgtggcattaagtgcattcacattgttgtataaccagcaccactattcatctccagaacttttcatcataacagtattttttattttgaataaaatcatgcagatattattgagaatatgtttggattcatacagatgcttggaatctttaaaggttttaatgtatcagtatatgtaaagatgaacgttgaaactgtagctcttgttacttcaggtaagacacatgacatccattgatgcaactgaaatctttaccagcttttgaaatactgtcagagtcatgcatattttcttcaggatgaaaggatattgagaggaaaactatattcaaatataaacaatcttcataaagaaccatctgaggtgattaaagataccatgatcatcaaacagttaaaggtggaaaataaaatatggtatttatgagaattttgactggcatgaagattttaatgcatattatcttgctttgctaatcaaggtgattgagatgcacttgcctgttaaatagaacttgctcgtggcttttagttatcagagattttacatttatcttttcttcatttgaatgctacataaaccctcccctttgaatctgagggggccactaatttttttcctagagtgctactcttatatattgagaatattttttcccctaatgcttggagaatgataacaaaaaagaattttttattggttcatttcatgcttggtaagattccaactgtcaaaacattataaaattttgaacctagaggcacatttcatcaccagagtactaattgctgcagagaactggagcgaggcattatgtagtagtatttattagagctgcccaattttaatgttttttggaccagagacacttaaataaaaggttaagctgtttgggcacaaaagaaggaagaaaaactgctcagtgcttgcaacacatcaaatatagtacaggaagggtagaattaattgaaaactgtgcacctactttcactgacactcagcatcttattttcagtgatgagcatggcagatgtaattcttggtttattttcactatgtttagtattgggagccgattatgtgctagggcactggtgatatgagggaaacgtgaaagacaagggtctcccttcatgaagcccatattcttgtggggaaaggagacagtaagcaaagcatcattaataatatagcaagtaatgcttggtaatggctataaagacacacatagtggagtaaaagaacagagagtgagtggttggaggcaaaggcattttaaatcaatcagttaaaggaggctcttctaaggaagtgacatttgagaatagcagtgaatgagggccattcaaaaaattagtcatgtaagaatttaagcatacaaatatctctcacataatttccatagcatgaagtactagaaaataacaaaaataaggacaaaatgaaataaaatgctctattaaacaaatatattaacttctatttaatagatgtctgttaaatatcatctgtcaagccactgactgactagatagtaagctggggaggagaaaagataaaaatgtgtctctgtacttgggaaaactacagttttagtgagtcattgtggtttgcttaagagtaggtgaacaagcagtccaaagcagtgaagtgtgtggaggcagcagcaggtacttaagtttgaccgaacgctagccaagtgcattataaggtgattgttgatgaattgttccttaatctccatccttcttccatctgcaactgatactatgcagtcctttagtgctgatcatatttctgttctaaatacttggtgcacaataggtactcagtaacagttctttgattgggtgaatggatgagtgaatgaagacagaagacaggctttaaacttttttaaagtatggtttagaagaaaaaggagtgtagttttgcatgtctttgcaagggtaaaatttatttcatttttacataagagtaaggagaattgggaggccgaggtgagaggatcatgaggtcaggagatcgagaccatgctggctaacacagtgaaaccctgtctctactaaaaatacaaaaaattagccgggcatggtggcaggtgcctgtagtcccagccactcgggaggctgaggcaggagaatcgcttgaacctaggaggcagaggttgcagtgagctaagatcgcaccactgcactccagcctgggcgacagagtgagactctgtctcaaaaaaaaaaaaagaaaaagaaaaagaaaagggtaaggagaaatccatccagatttgagaagaaaataagggacagtggggagaaaaaagtcaaaatgccagtgacaactgatagaagaagactccagaaatttggatggggtgtggtgaccagcctaggtaggggtttactttgaaaaatatgaaatagcgtttttcttcaaagacaggagaaaaataagtcgagttggacatgaggaaagattttaaggtatagaggagaaaagtctagggtgatgatctcggtcacattttagtggaggtaaaagaaaggccatctgaaataaagagggactggaagtccttgaaaacaaatgagtttcagaattggaaatttttttgatttttaggtaagtagtagatgcatctactacatactaagtaacactcctcatatggtctttggcagtaccctgtaatcatagacattaatatttttctagcaaaacactaatatttatatctggtgaaataatgatgataaatagtttccagtcaatatagtttgtgccaaatgtacaaaaagataagaaaacacgcttggatattggaataatggataagggattgtggacctgtgcaatttgcatggcctgtttttgtttgcaggaatgactgagatgaatgaaattgtttaagatttgaaaagtagcaggatttttttgagcaggggagccaagcagctgctgtgatgtctgatatggcagagtggtttctcagtgaactgcatcagcacattcctgtgtgtttctgtgcactctcctacacatgcatatgtgtgctctaatgcccagcaacctgaatggaaatccagaccacatgaagcccgagtgggactgcaaatttattatggtggtggtactattgtcaggaatttgttccagaggcactgagaagcttaaatggtgagattagcatatgctttaagatccaagggttaagcaagatatggagttgctgatgtttttaggacagttttttgaggaaatcactgttacaactttttggcttctattttatatggatttttttctacataagttgacatagtattgaaacttttcttggtattttatatttttatcacaaaggccaagcagtgtgcctagatatatctagtagatgatggataactaaataaattattgtaactatgaattatagcttgttataaatgatctttcatgactaaataaatgaattattgtgtgtttgtgcatacacacaaacctttgtactgtattttccacacaggattgcaataagccctttttcaatattgttgtggaaattctgtatatgttaaattatgtctgtggagatttgtgttcgttgacttcatacagtctcagtagaatatggtagaagtgctaagcaatgattccttaatattaaaattttaaaaaatagtaatgcagaaaataaaaccatcctatgagtttcatgttttaagcttttaattttaccttgaaaatattccctactgaagattgtggagctctacccagaggcggccacggggagaccctggcatgggagtctggaggggtgaggaggagaccaagagacccctttggagacttcatctcctggtcagtatctccctcatcaaaactcccgacccacagcaggatgaggatagaactcaagggtcaatgtctcagaactgggaggagcaagtagtcttctgtgactgaggaaacctgtctgactatgtataaataaaatattctaattatagagacagatttttttaattgatttgttttgttttttaatttttttgtagagacagagtctcaccatgttgcccaggctggtctcaactcctagcctccagcgatcctcctgcctcagcctgtcaaagtgcagggattacattgtgcccagctggagacatatttttaatgtgtgtacttgtgtttatgacacacatgatttgtgattatggaagaattaaatatatttcatatagaagaactaatatatgtagcatgaaagcttgcttttgacattacaaattataaacataaacattttggttattagatttcagaaacgatctcctagtattagaaagtagacatagatattcgggttttagaattctttgatcaaatcctgataatagtgaaataatgtaattatatcactttcacctgtacaaaattctcctaaatagtctcagtacttgtaagaactttatatattagtcacatcagataatttaatttccatttttgtttctagggatttacatcctaagtctcatgtaaaattcttctcatagaattgtaccagagtaattttttatgttaaaatgtatcctcaagggcatagtatgttcttttactttttcaatattgtttaaggccagaaaccacaaagtcttttcctggtggcatttttttcaaagctatgatcaagtgtcacctacatagacagtcatttgtatagaaattttaaaatgcctttcttaacagctttaaattgtccacctggactgtggaatgctaaaagatattgttctcagtattttttgggagccaagaacaaattaaaaatcttattctggtggatgggattttctaatttagcatagtacatctcaaatataaaaggctaaaactcagttgaaatataaatgatgtttgggagcaagctacttagggaatgcatgaataatgcttgttgcattccttttattatagtttattcctagattatcttacccttttgaaaaaaaaattccgtttccagaattgtaaggtaaaaatgcttgtatagtcccattaatttgatacaaagttctgatagaagagttcaagaatgtttaggtttgcctttacatcatgtcagtacccaataaaacattctccgcatgatgcagaacgtactgcagtattttatgtgagagaaaacagtaccaagagagaaaacataaatgaaattctgccagactgctgtggaatttctgtgagtttcaggtcaatgtatgtggttccagaattaaattaactcatgtggaaagaaccagccttaagaactttagtatgagcatatgtgtcttttattattctactttattattctcttctcttttatgacctctaggttacaatatcccagtacatactacctttggctctctttgaatgtcagctgctgttgaacacagtggaccatctacctagtaccttgtgaagcagatgacttctccatgatagtgtcatacgtttgatgtgttcagttggggaaatacatgtctatataggttaggccccaattttctggggttcaacactgaggcatcttaaggtaaccaaaatcaggccaacaacaatttccagaccaggaatactgtggtgttataggctacagctttaagggtcatcacactttgcatgctcagaattttaaatttgcctcaggatcaagcatttgctaatagccaaaggattattaactttaaaggactttaaatgtttaagtgattgtgaaataatggttagtgcatttttaaaagttttgtctatttttcacaggctaaagaaatcataattaaatattgtttaaccttctgaggaaaacagggccttttccaaaaacagagaaatataaaattttattagtttcattgactcgtagagttacctgtctatttaatacttctatttcttacgttaaaataagatttcagaaaaattctgtgagaaaagtgatcaggtcttcttccttcttttcttaaattgaccttaaatggttaggttaaggtagcatatatttgggaagacattgtcctgctggaaagacatttaattcaagctcttgcaggtcaagccttaggataatagaaatctgtcatctaagcccctggttgactggcacatactgcctaagaaatgccgtttccatatattctgaatggagggaaaaaaggttacgaaacagatctccagaacatgcagtgatcccttgatgtctgttaaagtacgtttaaattctttgccctgggaggaaattgttagactaatatgtatgttgagatatttgataggtttttaagagctggacttgcagtcatttgaagaaatgtgaggcatgctcatgtggtagaagtttagacaggggctcaaagtcttgggcactcattggggctgtgtccaccgattactgactggctgatttggatgggggttctctgtctccctggttctcccttttctccttcatattctctaaagagttgcacctgcttcattgattctcaattactgatttgaagagtgattccattagaagagtctaggaaacttacatagattcttgtcctatcctctgtgttggggtcctggaatctgtatggcgtcctgtgctgttttatttatttactgttatgtagtttttgtcttctctctaattgctgtcactgacacaagtgaaagctcttaagctgaaaagtaatagcagtccttcaagctctgaactgctggtctaaaaattctagcccagaggatgttgaaaccagacctaatagtgatattgatgatgaagaaggtgagtaaaggagttttgtttggaagtccctttaatcagtgcctttgtagaattaagcaaatcatttctctaaatttttaaatttaatattgatgttgtggccattattaccttgttatagcttaaccagtttaatgtattcatagttctcaagatttcctttaagactaaaaattaaattatagcatattttgtatgttctgataactggacttaaacaattacttgttttatagtattgagacagccacttaagacctttgattttcctcttctccccatatttctagaatactgacactgcttgttttacaacaaactttatgaagaaaaatgaaatgactgagagctttaaacaagactctagattgatttttattgcctttttaatagttcattgtgtatatgtaaattacatattaaatgtatgaacagataataaagtttttctaatgaaggtgatattaatatctaacagctactaataggtaggtaataggtatatgtgatctctgtgttatgtcttacaactgcatattgtctcaattatccaaaaataaaaaattaagttatatatcttttttcttttttctttttttttcagacagagtcttgctctgtcacccagactggagcacagtggcacgatcttggctcactgcaacctctgcctcccaggttcaagtgtttctcctgcctcagcctcctgagtagctgggaccacaggcatgcaccaccatgcccagctaatatttttctattttcagtagagatggggtttcgccatgttgaccaggctggtctcgaactcctgacttcaattgatctacccacctcggcctcccaaagtgctgggattacagacgtgagccattgtaccccgccaactattcttacctccattttacaagtgggaaaacaaatgtgcagaaaggtgaagtaacttccatgtttctgtagttggaaatggaagaattgggatttaatccaaggcagtctgactttggaatccaggcatgtagcactagtgttttgaaaatgtagaccaaatctctaaacttttgtttggtaggaaaatcaatactccttgatccctgatatatgatgaatttacactgtataacaaatagtctttatcatttcacagagggcatttatatcataccatttatgaagggagtttatatcatatattcccaagttatgttatgaaagaaaatgattaacaaaaatctttaatggtttgtgtactctgcgaagaaagtttgaacattatggtttaaaaattgtgttaggactttactgcttcatcagagcttaccatttccaggaacaggttagacattctgacattgttaaaattaaataggctggccgcagtggctcacacctgtaatcccagcactttaggagactgagacaggtggatcacaagattaggagtttgagaccagcctggccagtatggtgaaaccccatctctactaaaaatacaaaaattatccgggtgtggtggcaggccaggcctataatcccagctactcgggtagctgaggcaggagaatagcttgaacccgggaggcagaggttgcaatgagcggagatcacgccactgcactttagcctgggtgacagagcaagaccccatctcaaaaaaaaaaaaacaaaaaaaaaagtgaacaacaaaaaattgtttttcctttttattagcaatataatccatgtaaaagagtaactaatatgattgatagataaagcaatcaaagaaaaatcatgtatcatgtacttactacccagcttaaaaaatagagtaataccttttaaatttctatgtgctgccctccagtcatagtaatcttcctcccaccccaataagtttatcattacaccaattggtattatagaatattccatatgtatatatccctaaataatgaattgtcgagttttatatggtttaggcccctgtgtgttgtgttattgtatgcattcttctgtgatttgcttttttcagtcaatttatttttggattcatccacattcatgcacgtaagtttggcttattaatttcactgctgtagagtgtttctaatgtgactgtatttgaacttattaatcctgatttttgcttcttcctgttgaaggacattgggctgtatatgattttttctgttgctttattcttcaacacgcatgttttgccccttgcaacacatgggcaagaatgtatatctaggctagaagcataggaggctatttactggaataaatactttttgagataagtatttttataatttacaagatgatgccaacttgttttccaaatccagtgtgccagtgtgaatgttcttaatgccgcaaaaccgtatactgaaaaaatggtaaattttatggtatgtccatttcatcccaataaaaaaataggtttattgggataaaatagacgtaccataaaatttaccattttttaagtatgcagttttgtggcattaagaacattcacattgttatgtaaccgtcgccaccatttatctccagaacttttttcattttctccaactcaagctctgtgcccattaaacactagtttcctgtttcccctcttcccatcagaccctggaaaccaccattctcctttttgtgtctttgaatttggctattctaagtacctcatataagtggaattatatgatgttcacctttgtggatctggcttattttacttagtatgtcaaggtttatccatgttgtagcatgtgccaggattctccacccccctttatataaggctgaataatagtcctctctctatatatacacattttgtctacccattcatttatcagtgttgttcaagggttgccttgtgtttttttctgcccagccctggaatcaatcagttccccaagaagttcttgttcctttgattggagaatggtatttggaaaggtctagatggtagttgtgctctgaactgctggtttattattgttgataggctctgtcagtgtacagaggtaggaaatatatgtatgtttattaacacatatatgtatgcacatttatatttatttttaaacccacccttctgtatatctgttaaaatccataggtcatacctgtatctgtgattcttgtcctgtactacagggttaatcttagctttccttctctccttatttatagctctgtatttctgagaatggaaatgaggctgtcattatccacaatagatattttcccatttgtatatgtatataatacagtttcagatttgctaacctgtaaccctgcaaaataacatttactaactacagcatttgtgtacattagtactctttttcacacataacccttttccttattagaccaaaaaatccaaactctcttaaatatcatgaatttcatgttcttgtttccttgtttattttttctgtgtttttttaaatcacagatttaagatctgcccattcagagatttagttattatatatgagccaatgaatactttactttgcctacattagtttcagtttctgtcacttgtaaccagactgtcctgacacaaaagcacagtgtgactggtcagtcgtttcttcctttccacaaagaaagaaggaggaacatcttctgccttaaggaaattatttccaaagaggaaaaccagatacagcgagaatatgcacataagtactccagattatttgagaacaccttattctaatgtctacttatctctatgatatcaaatcatatgaaattaaagctctgataacttcattcctcactataatttacaaacacacccagaatgaacccatggcaagtcatcagtatctactacctaatcactttgcttgtggattcactattcactttccaatttgacaatatgttatagtgaggtgctataattttcattttaagctatacaacagaaatgatattacatttaatggctgaatggctttcatgttacaattagaggtatcctaagcaataagagttgacaaattatcctttaaaaacaaattgcaggacactcacaaagatagcttttgaaaggcttaccaataaggcatccttgaagtgaatatagagtatactttactaatctctatgaaactgtttgtattgaggttgtagttgcttttgaaaggggagtgttctttagaaacccttgtgttcagaagtcaaaggtgaagaagtatttctaagaaaataaaatgattaaaatagtagttattacccaatcacttttaaaatttaatatgggatccctgtgcctaatgaagactgtatttaatctcagtaaagtttacttccctgtgattctgacaaattttaagagcaaaattctttttaaaatgtattcttgaaaaccattcatttttgtagtgggtggattctttttcctgtagatttcaccagacaagaatttgtattttcattagaaaagtctgctcttcaggctatttcagtttattcaacttttttctaaagcagatgctgtttttctttttttttttttttctgctgctgttgactatgcaactgagtgtttctggcacttgatcagttaaaacgtaaatcgtaagccaaactactttcttttgtgaccaaacttatgtgtaaaacatatgagaaggctttagtcatattcctctgtttgaaatttgcaaggagtcttagagaagatcttctatagaagagaaaagtttgggggctgcttggctctttgcagcctaattgaggcatctgcttactgctgacctttcacatatgcttctttctccctttactgccagttatactcccgtacatcttctgtgaatctgccctggtcaacgtcccatcctttgagctgccattctacattgctttttcttaaattcaatgtgtcatctagttttttaattatctctctgctccgtgaaaccagcactcctcagtttgaactgtcactcgcctggcacacagattcataggcctcaaccctgatgtactcaaataagaccatgggtttacattattgacaaatgctgcagaaaactcttacgcatgctgttatttgaacagtactcagccaatgagtactttaaatgtaggaactaattattaattgcatttgtatctcagcagagcatttattagaagttcaataaatgcttattgaataaatatcaagatattgagctctttactatccctaagagatagtaatagtctccagtctggttgctattggtccacttacatctggtatggagttaacagtgtagtgccttgctactcagagtgtgggccacagatcagcaacatgagcatcacccagaaatgaagagtcttgggccccactctggacctaccaaatcagaatctgcattgtaacaataaccctagcgatttgtatatacatgaaaatttgaaaaacactggcttagggggccagagttatactgccatcttggaatgtagtgagggagattttaatccgttagacaaggagtgactcttcaatgagaacatggatctttgagcactaaaggatgtacttggggaagacagtggaaatggactgtatgtaaaattattgagttgatgcaaaagcagttgctgtttttgctattaaaagtaatggcaaaaacagcaactgctttttttttttttttttgagacggagtcttgctctgtcgcccaggctggagtacagtggcgcgatctcggctcactgcaagttccgcctcctgggttcacgccattctcctgcctcatcctcctgagtagctgggaccacaggcgcccgccaccacgcctggctaattttttgtatttttagtagagatggggtttcaccatgttagccaggatggtttcaatctcctgacctcgtgatctgcctgcgtcggcctcccaaattggtgggattacaggcgtgagccaccgcacccggcccagcaactgcttttgcactaacctaataacgtgctgtggaagaagcgtgtatgggtaaggttttctgatgtctttaggttgatgtagtttggagtggggtacttgggagaaatttcatccattcatatttcccttcaggatttgctgcaatggactgtgcacctcattcccttaattattgcagaatgaaccagttagtcgtgatgataggctaaataaagtgatctaagatttagaagcatgaagcataagtacctttgtgtaaaacccaaatattatttaactctttaggaaatagatttagagaaacctgagacttgggtactcagatctaagaattttggcttaatattaaaatatttttaactcttttaagtccaagaatatgcttttatgaataattaattaaaaattgttaatgaccctcataggctttttctcctaattgaatccacttgcaaatgctaggtaagaaaatgccatttgagtctttccattttcccacctttttaaaactctcatcctgtttttccccatgttatccctgtcatgtgaacaagtgacagtttttttccttttgatggtatttcagctagtttaggtgtctggtggagttggtggtggcctggagagaagattggaattgtttaggggctagagaatgagcagttggacagaaatccaaaggaatgatgaacattatagaatgagcagtgagaactgcagtgagagccacggtcatctctatgtcaaataaaggcaggtggctgggtagtcacagagccaaattgggaactagacaaagaacctgagggtgatggaagtatctggagagatggccaggatgtgacgtggaagaggtggcatctgtgccttggatgactggcacagcagtagcacagatgtggctgcttgtcagtcactgacaaccagggaagggatagcttcagctcaataggttcgttctcagtttgtatgctccatggccatagtgattgacatttgtgatgacagttctgctgaatcacctcagaccaaatttacatatattacatgtcttttaaggttatgtgaatgttccaattatggctcttttggtttcaaggaacagagtctcacacactagttttattttagagaacccgaggggagaaaggcacgtatcatgagaaatgaaagcaggaagggaaaaattgtcaggacctgaagaaattaatgtctcagcttttgtgttatctttttttttctatttctttggtcgtgggggatgggaggagtgtctatatgctttctctctctcattttgtgtctcttccctcctccccatgatgcattttttcttactgcattagtctgttctcacatggctataaataatacttgagactgggtaatttataaagaaaggaggtttaattcactcacagttctgcatggctggggaggcctcatgaatcttacaatcatggcggaaggggaagcaggtaccttcttcacaaggtggcaggagagaggagacagcaggggaaaccaccgcttacaaaaccatcagattttgtgagaactcattatcgtgagaacagcataggggaaaccacccccatgatccagtcacctcctgtcagggcccttccttgacatgtggggattacaatttgagatgaggtttgggtggggacacagagccaaaccatgtcactgactttgcatgtgacctccatcctcaacattgttatgacttattagattcaacatcaaccattgcctagcagtagtctcttgggtcttgggtcagattcgcagggagcaagagtaccagctttctttagtttatctctgtaagccaagccaaacaagcccttggctgcctttgagatatgtgtatccctgagcaatcagttgtgttgagtttgaggccagtcacatgacatgtaaccctggttccttcagaaactgaaaatgagtcaggtaataacacatatatgtatcgttgcattttaatcatgattactcctgacatatttaatcaaatttgtacagttctgcctcgtttcaggacacattggtgggatttacaaccaggaataaaatacacattgggagaagttatgatccagtggagagataacagttaattaaccaaaacagataattttctaatagttttgaaaagagtatgttcatagttgtttttcatactattgaacttcattcttaatatatggcttcattttgttaaagacggggcttctaacaaaacttttcgaaagcacatcttgtggattactttaatggaaagtattttgttataatagtcttaatggaataattatttcacagccagcaaggctaacggagactatttgtagattgaggtatgttttcaaagcctagtggattagcaaacagttgaggaattagggccaaatgccttcaaatgcttgtctcttcatttttaaaattaaagttgatatttgaatagacagaaaatttaagtaatgaaaatctttgatcatcttaatagcagatatctttaaactataaattaactgctaatttaattcactgtaatgctatgtgaagtgagtgtctttatttaaaaacttgtaattttgctgaaaatatgctgattcttaaccacatgtaaccttctggttatttcattttgccttttcacatagttcttgcatgttaccaaactttggttttccttgaaatattttaatgtattatgttacattacactataacaataactgaaaagaaacaagaagtattattactgatttaattgtctttttttataaccttgaatttcatcatgatatgtaaattaatttttaatgtgccactgaattaggtaaataatacctttcacagaagataagttaaattataggaaataaataatcatttgaaactttgaatacttaaaaacaacaggtaaatcgaactatttaaatactattctatagttgtgagtaaatctcaggaagaatgtatccattcatatcctctctccctgaattttgtgttgagtaagagttttgcttaagcttttgcctcttgaaattactcctttttttgaggtttctttgtatgtgtctgtaaagaggcacatgacattgctgtctttatggcatttttttgtgaaggtctaatgagaatatagtcaactctgttatttagcagtagattagttggtgtttggattaattatactaaaataataatagacattttactcttacagttttaaatactgcgagccagcagaaatgatccatatactgaataacatctcgtttggagttgcttggtaacggatagaagctacattaggtctgttgccacgtgagaatccttggtgcttttgccagtccatgatgtagcttttgtagtcatggccatgaactgcgtttttgtgtgtggtctgtacaaatttaaacagtaacatggtttgggtcttttaaaatgtaaatgtgataaaatagacccaacttaaaatattggaatctaagtgaaaactgcatattgcttaacattcaaagaagttatcagtcaactgggaaaagtataccattaaacaatttccattgtaatatgaaaaagaaatcagatggctcatggttgaaaaagaaaggataaattgatgtcttttgtatctcattgagatcttgaagcagaagacaaaagcaaaagggaaaagttaaacttgaaaaaaacattgtctacttttgatcagacaatgcaggtttggtactgtcagcaggtgattggtgtaagaaccttagttgccatccggtacctgttatatcaggttatgtgtccagctgctttaacagaggccaaataatagtggcttcaacaagatggaatgtttatttctttctcatgcggaagtttcagctgaaggtagtttgggggtggaaaccaagcatcttgcgctcagatgttcttttcatcactctaccatgctttagcagtaaccctgtctatatactagattaatataagaagtgtcaaatgagattcatataaggaacataaaaaaaagactcttgggtgccaccccagattaaattataatctgagaatgagtactactccagacctactgaatcagaatctgtggtcataacttagtcatgagatctcacctcgctgcaaagcagggtggggaaaggtagtctgtaagctgcaggcaagtatacagctaaaacttggttggttttattaccaaaaagaagttagaataaatattgagggagacaataagtagttttctacctgtgaattagagtttaagacactcagcagtaataattatttacggcacttggtagtgaagagaggacagtggtggaatatgaagctggttaacatacataaaatgggaactacctacaggaggcacatactcccccctgtaagagtctaggaggtgactcaggctagtgaaaaagggccagtcgtttcagaggctggaggggctcttttaaagtggcatctctagtagttgttgccatgtaggaaagtggactaaagttttatagattcagttagaaatctacatttttatgaaaatgtgagcccaatttaacatatctttaaattagatatagattaagagccatttatttctcatttttgacctgaatgttatggcacaatatttcgatggcaaagacagcatttttcgtggtgtcaaactatttttcatgcaaattcattatatttaaaaatatttttgaaaagaaacttgataaaaatggcaaaggtattttagtagtcagtatccttttggccatttctagtaaattatgtgattcctttgtattcctaagttattatatttgaattgattttacatttttgggtgatacttgtagaactctaattttgaatgaacttttaattcaataagtatgcatttcttgaccacttttaacagtgattttgtgttctttgtgaccctctatctccagtttattaagaactacctctgcatgcagaggcactttgtaaactgtaagaaactctaatgatattttagtgccttgccactgtgtctggcacaaaaacacccaatgaataagtggtgaaaaaatgatacctctgttagataatcattaatgtttacatcctatgacaaggtgtctatagatttcaattatactaaaatcagtaggataccacaaatcaaaaatattttcttcatcattcttttctccattttacaaacaaaagagattgaaataaactttgtatctattgacaaataattggatcctgtagattgagttaattacttgttagaaaattacctcttctgcttcattggtcaagatgttctatgaagtagaatttgttttgactttctaatggcataacaataaatgtctaacaatgtctttcttgtatcttgggactagtttatctcatcatatctggctgacaaatgctttggcagtgacagtgtcttggatgacagtgctgttggattagattggctaacttctacagtttaaattaaaaccaggaccctgaaatgcttctcggaataatcatgttggttaccatgcccattgctcaatttttttccttttgttgaaggcagctctattagcatcttgtctatacatttcttgactagcgagaagagatacgaggctttagggctgacgtaaactctcatcggttggacaggtatcatgctctttttcatttatcaattccaggaaatactgggtttggtccttgttaataaggaaggagaaataccaagactttcgtgagtacttaaaattcacaagttatgaagtttacaatgcgttagttctgtggagctctggtgggggcatcttctgaatatgggcaggacactgtcctgcagctccctggttatttgaaaagggatgaaggctatgctgtctggctctcacttccaccttctgactcccactctttccctctgctgaaaatggtgagtcaaggccagctggcaaaaattagcatagaatggggtattgtttcatcaaaatttggcaattggggagtaatttttataaatattgacacttttgttatctctgggaggtgattggttgatattctatgtatagccatttggccacttcttaatatagaagaaaatatttcctgagtcacctttcttaattttctcaaaataattaccttgaattgttatagatccatcttttcatgccaacacaaacttttagatgctgttgagtatgtttttaacaaagtataagtagattggttttaagttgacttagccattgttaatgattcagttgattttttaaaattaagaatgcattaaaaatgaaattgatacatttatggagaattcataaacgattcaaatcaattactttatagacataatacatatattttgtatgtttttgtaatttttgggaaaaaattagcttaattatgtttctgagtaagctaaagacattcaactgtattctttcaaatttgccaaagaacaaaaagtaagattttgtcatttggtttattggatttttcattattcactatgataacagtccaaaaacaagaatcaatttcttaatgctttattatatgttttgaagggagttcctttgttctgtgtttaccttacagaacctcagagtttaaagccacattctgtttttaagggaaagcaagtcttgtcagtttttataattgcaaataggataggaaatcatgaatggatgaaaagtgtagtgtgataagtcattcactagaaggggagttgaggcagtgaggggcaggatgatggagtgataaagttcatagtaattataggagaaagtgagtataatggcaataaattgaaaattgaccaagtaagatatttgaggaaagccagcatattgtgatcaacatgctggtgtaacctaattacttatataacctgaaagtaaattccaaatttcttctggcaagaaatagtgattttttttcctatgcaagtaataaatttgctgatttgagttcttatacaccttctgggcataacacaagaacatgaaaaatgttattcttcaaattactgaccttatggctaatgcctttccttaatgctagcctcattatattctattcttggtcagaaattccatatgcacagctttcattggaatccttagcattacttttgatattccaaagcacttttcttaatattctcttgccattcaccttaaaaaagcagtagatatagttggttttgttaagaaaagtttcattggcaatcatttatatttctcaagtattgttgctaatcaaaatcctaatatttagcctctctttagcattttagtttgcctttttcttagaagatactagcaaataatatagtgtttcaaagtcacaatgtcttcaaatcttacggttgattcagactgaaatcttttatggattttatgccccacctggagcagtactcagtaatgtattcacagcaaggatgtactctaaaattaattatttgtgtcattcatctaggtattccctcactaataaattattgctttcttattcagtataaatttgcttttcactgttttgggtgacctcggtcatcagtgggtagttaaaaattctcttccaggaattccctctgattatctacaacattttgggctgaataataggtgtgctgcataacttggagaggtgaccctttgatattcagtttattaattatttatggagtgactatggaagtggagtagtaggagataccaaatagtagaaaatactgtccttgctttcaaggagttcatgatcgtattatagagacaaggtatacttgaaagtctaattatgttgctgaaaaagtaatagaggccatatatgtcatcgaatagtggggggcgggggtgggtagggggaagacaggatggctgtgggttagcatgagaggagaagaagtgatagagaactagaactgatccagtctatttgcagttgttagaatttgactgggccgctaggcagggcaagaagtggaaaatagggaagcggcttaatgtcatgaataaaaacagagtaagagactcactggtgtgatagaaatttctactttgaattatagtggagaacaagtttaaaaatagtagaggagattgaatttgaggaaagacaaatctagattttttttccaggagattttcctcttttgtttgaattatggttatttgaataatccatttcaaaataccacttaatcagacagtagagggaactatttatatgacgtaaaaggtagtttggcagacatgattaaggagaatgttagagaataagatatcaacatggaaagagatgtgatcttttttaatctggaaaaagcaagacaaattgctttgaacatgtaggtgaaaacgtaccttaatgtttccaatttaaccagaaaatatgattaatgtaaaaactatagcaaacacagtaattttactttgtaattctgctataatttgtttcatttgccatattttatttttcttgttgtcatttgaatttatacctgggaatgccataaaacttaataccttagaactataatcaagtcagaagagcttcttttccataatggtgtcatatggtttgacatccactcgtcatcttcaggatgttaaagtctaagatatctactttacatattttatgtattcaaacaataaggttttatgcatgagtgagtttgaggctttggaatatgtgcacccactatttagtaaactgttgccttccattgttagggtatccttgtgagacttaaaaaacaaacaaacaaaaaacaaccagaaaaccaaagcaatgcccctgaggccaactctgtaaacttatgggaggtaacagtaaatgtttcaaggacaattctgatatgattcctaccaatgtcacatagctgctgacatctgggaagtgacagtagctgacagaccatgttggcacagcagaaatcagagatggactagctcagttggaagaaaaatgtcatgctgattgggaagctaagaagcagaacgccacagtggcaacctgtgcaaacagtggctattaacattaactaacagacagattgagtccagctagggctgcggaccacccatcagtggatctgccatgcctgtacatataggaagttctttgctgtcagcatagcttcgctcagtaaaagagaagtgatgtttatgttcattattatgcttatgttgggtggtgacagataaaggaatgtaccttttcttatgaagagtaatgcaattttaatgagaatttgaccttgaaggtaaagaattgctgaagcatcactaattgagtattcatttaaaatgtattcccagtttagctgctggttcatcctcactcatccctgatctcaacattttcaagatggcaccctagaagttggagtatgttttagggcaatggagtcaaggcctttggactgaaaaataaaagcatggaaatagcatttgcttttactgttttatcatctaccctttggctgcctccctcaatgttggcgtcaagggtgattctgaaacctcaaagccccagtgaagccccaaccgcatctctaaccttttacctcttagtccatgatcttcctagctgccttacagaacaaaaacaatgaccttgagatgggattcaactttctcagttccttaccttattgtatacaaaatgtattaatttctgcactggagacttgggattgcttctcctacccaaggctaattttcatacttgccttttcaattgcatttcctcccttcttgctggaaacttttctttttaacttcacatgtcccttctttctcctgtcttcagcctctctgctgcgtggactcatctgagcctgtaaacatgaaggctctgttttcttaaaaccaagttgggaaaacaaacaagctgcctttatttcctccttgcattcatttttctacaattctttaatcgttttcctttctcagacaagttgcttaaatgagttgtttaaaggagaacatgatccttcccttccccgccctgcacgttctgctgttcacatttctgacctttgattcattgaaactctttgaacagtttgagaagtttatcaaggaataacttaagaaaaatactgcatgcaatgagaaggtcattaggacagaatgagaagcttggtgtcagagctgatgggccctgacttagcctgctaggtaacacagctcttgtttgtttgtttgttttatttgtttattccttgtatatttgtgtacacatgtttcattctctttgaatagccacagatgaggattcattaagagcctagactttttaatagacttacactcctttagaaatactttaaattcaataaactaaaaatatccagaatcctgcagtcagctatataggagactacatgtcgatgtctagtttctaagcatggataggtccagtattttcagtcatggtttttctataattttaccatagcaaatatgtgaattgtctgtggaatgtttgttctgtcaactgaagaatgacaaggctcatagatttggaaggaagacttttatttctcataaagagttgtggcctgcaggtggccatcctggcaggctggaaagggtagcttcctgccagaagccagaaacaggcactccgagggagaggtaaaagaaacaggaatttatgctgggcagggtggctgaatacacgtatttaataagctgtagcaggggtcatgaatacttgtgaaaggagaaacagacccaagtgcaattgagcttcatgcttccagatgggtcatgtgttcaaaaaatggcattggcatgatcagtgggtggagattttggccctctgatgtcgaaaagtgaagcagaggccaaatccctctgtgtgcagcctctgtagactggccagaccactcagtggtcagtggtctcttaccaggaaggaatgctggtgggttgttgtgtcaaaattgcaaaagggagaggcagcagtcagggggctgggtgaaatcagcggtgcagcaagtcttctgaaagggctggtttctgtttagcccttagggaagaaagcctaaaggcacttagcgcgggaggatgcatattaaattgtcctacctcactttcactcacagccgggaactcagtttttaaaatttgcctgggttctccatcgtgaagaggcagtttgttcaatgagttcggaagacgggcagttaggatttcatttttatttctcaatccatttatttacagtttatactcagcctggttctagaaagttgttgggtaagtgactgccccacaactttactaccatagtgaacaatggtcaaggagaaggaaattcagaagatcttaaggaagacaagggcttcaggatggtgtggatcatgctcaatgacatgagatgcaggaagaagaaatcctacacaagttcatgtgtaatgggccagctgggctgtgtggagcttaagagagtaaaaggtgttgaggctgaggcagtaagtgtagacagtatgaaatgtaaaggagaaggtggagatttgttggaatgagattgatcctataatggattcattacatgatacctatttgtgtaatactctagcagttgcaaagcatgctcacttgattttttccttttaacctcctgaagattctagttaggtgggacagtaaaattgttactgtcttccctatttttcaaatgggaaaatcattttaaaacagtgagttgcataaatcacatagagagtagctgagctaggatttaacagaagtttatcttaatccactcctgtgatctttctgctttttcagttgtcttttcttctaatttaaggctattagataacaaaagcagaaagaaaggaacttctgaagatgctcagagagacattgggaaggacagactccctcagaacccaggaggagccaggctctagaacatggtggatgagagaggacattactcttaaagagaaagaaagattttcattctccattatttcagaacaagctgacaggtagaatttagggtctggaatttggaatatgttaagtaaagaaagaatcttggtgagttctcatgagatgggggtccctgggtgaagcctgatgcaaagcctttgaatattctctgttgataatgcaaaagagcacatttgattgcaagttttaattggtctcacatagtcatgcaactgtgtgtttgtgactgctgttcgccaatcttcatggattattgaaataaagaaagcaagcacttggctcctttcattgccaaatcttttctacattgatactgatgtctctttcagaactggctcttgcagaataaagactttaagagattttaaaactctcaccgtattccttgggttcttgcctacccccttaaggagaagaggccaattgtgcttttgtaggtgttaactggctcattccccagcctctgtttccataaagctaaaggtcagtctgatcaaaccatcaatgacagtccatctcacagatgcttaaaatgtgtttttcagtataatcttgaaatgtgataccgagcagacatctcgtgtctcaaagtgttaatatatcaataacatattacaactttgtttcttaaattatcctcttcagataatattaaattctaagtccccagataatgaaaggtgcattgttccatcttgtggcagagaaccatttagaaaacattttgatctcattttttaaatcattagaatacgctgttgtattttttattgttttcatagcttaagaatgacccctattttttattgtacccctgttttggacaatttaacccttttgataacccatattttaaaaaaaaattttttgtttatctattttaactctgaaaaagtgaataaattgaaaaacaaaattagtatttatatggttccgactcccaggattattgattcctccttttttgtatctttatgtaaagcattattctttctactttctagttacagatacacacacacacaaacacacacacacacacacacacacacacacacacacagtgactattccttgggttttgcatagttaatttctttctttctttcttttttgagacggacagagttttgctcttgtcacccaggctggagtgcaatggcacaatcttggctcactgcaaccttcacctcccaggttcaagcgattttcctgcatcagcctcccgagtagctgggattacagtcacccaccaccatgctaattttgtatttttagtggagatggggctttgccatgttggccaggctggtctcaaactcctgacctcagatgatctgcccatcttggcctcccaaagtgctgggattacagatgtgagccaccttgcccagccttacatagttaatttctatagcataattatactgctctgtaagcagatttcctgtgtgactgcattttgtcatatatagcaaaattagtatgtagttttgtaaggttcaaattgatgttagaactaaaggtggaagagtacttagctttgtttcttaaacttataccatcctcctaaaagcaatcttgcagacagatgcaggggtaaaaaaaaaaagaaaaaaaaaaaaagtagtgggaaggcctttgtcttttgaaagaaaaaatcacatagtgatactctgaaaagctctcatcggagaataaaggatgcaatcgctgtattaaacacagatggaatatttcagtctcagctgtcattgaagaatctccacattagtttggattgcgcacctttggggcatgtataaattgacagtgataaaactacctcgttgctgagctggagtgtacaacatccctttatctgtgccatctggtgctacagaggatggcaaattcttctctgccatgatttttctttctgggggatttctagacttccttagcatagaatgtgttggaccaaaatcactctttgcccagatttcagtgacagtagcctgaaaagagaaacagaattctaagagattgtaagtgtagcaggaggcagagaaattatttgatgcactgtaagatattttggagggtagtggttgattacaatgtgatgctttataatccctgaccatatctcactccctagtgatggcaagctgttcctagttttgtttttgccatttttactattgcttgtagcataataatattaaacaattaatgctttggttcttacccactgaagcaatgaatggttgttattctgccttagggctcttatttattgtggattcccaaacaagtttacaatgctttatcatcacttactcaatttatctaatttaagaccaataacaagatttactggctgttgagtcttgcaacaacctgtgttcctttattatctaccactgcctgtgattaaaatgaaaacaaagttggattgcattttattaacaaaaggatatttccaagaattatgaattagtgatagaaggtttataaatgattaagttttaatttttccccccaaattgtacttagcttatgtaaaacagtctagacccgtttaggagtttatttgttgtcataaaatatcaaggtgagagttgacttttctctggatttgttcagtagagaactatgctgggaaggactatggagaccttattaatagaatcacacctgaattgactgaagccaggttacaatcatgaaaaatatgaatgaaaattttaaccaaataaaaattggggctgtttgggttaaaattgaataaaactaagttaaatatacaactgtttgtggcctagaggaaagttacattggttttttttagttcttaggtagtgtagtgtggttagaaccttttctgaccagacgaggttgtattcacctctactaatttcttagctctgagcacttccagtgaattacctgaactctctaacacccgttttagctcatcaaaattgttcatatttcccttttcattagggaagggaggtttaacaagtaagttctttcagtcttaatttgcagtgaggttgtttcctgtttgtctacgaatttagccataactcaccattcctctttccatgtagaaaataattgtggttttttttttttgtataaaaaagtgaaagtgtgtccagcaaggaataacttggggaaaagccaggaaagcactatcttattagatataaagcattccagtgtcaccacaagcagttgtacaaagaagaaagattggattatgaaactggactgtaattcttagacgcagtaccactcctagaacacacttgggaaaaagtcagcaagaagattggacctggagggagtgctagaaaggcaagttggtggcaggagggcaaacagcacactttttttctagctatggttttctctggacattctcagtgccttgatattccagtgctggatgggaaaccactgatagaacattaatttcttactttgctcattagtttaagattacagtgttaattattcacaagagaagaaagtaaggatatcttttttttttttttttgagacggagtctcgctctgtcgcccaggctggagtgcagtggtgcaatctcagctcattgcaagctctgcctcccaggttcatgccattctcctgcctcagcctaaaagtaaggatttcttacttcttcttcacatctccccctttagagactgtaccagatttaagcctgagaactcattggttccttctggtctaattctagagacatgtgtaccttacttatggatacttggcaaggtaggcattagtatttggatgcttatcttcacaaacctgagtgaggttcattgtgagggtagaattttggagaaaaatgcctgatttgataaaaaagagtttttcagtaaaggaccacctaatttctgccttctggacagacttcacaattggggatacaagtggtattctaattgtgagcatcatcctggtttccattccacccctagcagagtgcctgccatgatggtgctttttttttacttgataaagggattcacacaagggagatacaaggtgagcctgatgaatcttgttccccaacctagaagatgctcagcctaatgaaatcacctcaaaaggaaacaggagccgactggatggcacttgcactggtaaaattttggaattttgagcatcaaaaaagaataacgactgtaatagattgcaatatattgaataaataaaagccattgagtaagtgatacacttagtgatatacaataataccacttagataacatcataaaacatgaaatacttagggataaatttgacaaaatatgtgaaagatctgtacattacaaactacccagcattgttgagagaagtgaaaaaagactgatgtaagtaaatgagagatacagtttttatgagtcagtttttatgtcattaaaaatgctaatcttcaaattgtttatatataaatttagtgtaatcccaacaaaccttgacaggcttttttttttttttttttggtagaaattgtctggaattgatagaatcaggtataagctgattctaactttatttggaaatgtaaagaacctagaatagtaaaaacatttctggaacaagaaaacctgaaatgaagagaacttacagtactgaatttccagacttcctataaagctacttaagtcaaaattgtggtattgacgttaggttagaagatagatcaataacttgaatagaatccccaaatagaccacagttatacagtcaattactttttggcaaagatgtctagataattaagtggagagaaaggacagtctgatcagcaagtggtattactaaacacacccatctccattcaatacaaaattcacttgaaatggatcatagaaccataaaatttctggagaaaaagaattggagaatttttttgttattgcaattgtagcttaggcaaatatttcttacatacagcatacctgaactgcagaagaaaatgataaattgtcaagccaaagactgggagaaaatatttgcaaagcgtatgcttaataaaggactagtgtctaacatacacagataactcttataatttaatattaagaaggtaccctgattaaaactggggtccaatatttaaatagacatatttccagaaaagatagacacataaatatatgaaaaagtacacaatgtttctagtcatcagagaaaagcaaatcaaaattacagtgataacattatatacactgaaatcactaaaattaaaaggactgaaaatagcaagtattggctggcaaagggcaaagcagcttgaactctcatacattgctgggcaattcagaatttagaatagtctaatcattttgaaaaagtttgacattttcataagttaaacctgtgcttagccattgtgttcttaagtatctacttaaaagaaatgaaacttatggtcccacaaatagcagtaagtgaatgttcacagcaactttgttcataataacctcaaactgcaaccaacccaaatatccgtcacctggtaagcagatgagcaaattgtgctatatctatacagtggaattctactcaatacagtggaacaactacttttacatgcaaaaacatggatgagtctcaaaagtgtttcacaaagtgaaagaagccagacaccagagactgtatactataatatgattccattaaatgaaattcttaaagagcaaaactgtaatgatacaaattagatcagtggttcctaggggtgaagtgaggaaattaactgcaaagagcaggagggaaattttgggtagtggaagtgtttctgtatcttcatcgtggtgatggtcacacaactctatgcatctatcaaaactcaaactttaccactgaaatgggtgcattttactgtactcaaattagtcctcagtataattgtttaaaaataggaccatagtggtatttgaggggaaaagaggtaggggtgatgggtgttaaaataatgaaaaaaggaaaaaaggaaaaccttcagcagtctgcctgctaataaatgtaggagaaattatagaattggcaagatttcatttttaaaatcgttacagtagcaattgatccagtcaagtggttgtcagtgacaaccacttgagaaagttgttgaataacaagatagtcacaaatactgcgctacaaattactgactaccttaattggataaagtgcacctttctaatacccatcatttccatcaaaactcacattgctagcaatgaacaacctgacaccactctgaaaatacccatccttgtcatcaaaattcacattctagcagtggaccacctgatatcacgtgtttgttaatgtgcacccccatgaaatgttcttgttcatattgtttaatttgaatctaaaccaaactaaaaccctaattttcaatgtacaggaaatacaagggatagagaaatgagtttaacaatgtcataagtaaatgattggccaaatcctgaatgtagaacattctacaaggcaattgactggactcttcaaaaagttatgtcaaaaacaaacaataagaaaacaggaaagaaaggggaacttttccagatttagagttgaaaaagtcacagccaaacgtaatatatgcagcttgattggattcttgtaggtggaaaaagttgtaaaagacactttagagcaagtggaaaaattttaaaatatggatgggccgttagacatagtggaatttggttaattgttttggtgtgataatggcattttggttttgacgagactgtttttattcataggggaagcatggtgtgttgcatcatgttgttggcaccttgctttgatgcggaaataaaagaaaggaataattcacatccgcataaggcaacaataacagaatataaattattaaatctgggtgaagggtgtatgagcatttatttactcattaacttttctacgtgcttaaaatgttatgacaaaaagctgaaatataaatatacccttctctgggaaagatagctctgaagagtagtttacccccggaaactctttgagacttttgattcttaagtgatgtgaccatttaagaaggcacatccctcttactccctcttttctatcaagtcctcagttctactaaaaaattatgtttctatacaggaggagaaatctatgagtactattttttttttttggtcagaaactaaagattaactgatttttaaatttagattaattcagaaagaaaatgcattagttaaaacaaagatgtaaaacgtttttattttttaaattcatattttcatttccatagcatttggggtacagtgcttttttttgttacatagatgaatcctatagtgatgaattttgagattttagtgtacccatcaaactgtgtgtacattgcacctaatgcgtagtttttatcgctagccccccctttcatcctcctcctcctgagtctctaatgtctattatatcactctgcatgcctttgcgtactcatagcttaacttccactagtgaggacatacagtttttggttttaggttttctactcctgtgttactttttttagaatactgtcctctagctccatccaagttgctgcaaaacatattatcttgttctttttaatagctgagtagtattccatagtgtatatgtaccacattttctttatccacttggaagttgatggcatttagattggttctacatctttgcaaatgtgaattgtgctgctgtaaacatacgtgtgcaagtgtcttttcatagaatgacttcttttcctttgggtagatactcaatagtaggattgccggattaaatggtagatctacttttatctctttaaggattctccatactgtttttcatagaggttgtactaatttacattcccaccagcagtgtataaccattcccttttccccacatccacaccattatctattgttttttgactatttatttattgagatggagttttgcccttgttgcccaggctggagtgcaatggcccaatctcagctcactggacctctgcctcttgggtttaagtgattctcctgcttcagcctccctagtagctggaattacagctatggaattacagctggaattacagcacatgccaccatgcccagctaatttttgtatttttagtagtgatggggtttctccatgttggtcaggctggtctcgacctcaggtgatccgcctgcctgggcctcccaaagtgctgggattacaggcatgagccactgcgtcccactgactttttaatcgtggccattcttgcaggagtagggtgataactcattgtggttttaatttgcatttccctgatggttagtgatgttgagcattttttcatgcctttgaccattcgtatgtcttcttttgagaaatgtctatgtcttttgccccctttttaatgagattatttgttttgctgatttgtttgtgttccttgtaaattctggatactagtccttagtcagatgtgaactttgcaaatattttctcccattctgggtgttgtctgtttactctgcttattgtttcttttgctgtgtggaagctttttagcttaatttggttccatttatttgtttttgttgcatttgcttttgggatcttagtcatgaattctttgcctaggccagtgtctagaagagtttttccaacattgtctgctagaatttttatagtttcagatcttatatttaagtctttggtctatcttgagttgatttttgtatgaagtgagatataggtatccagtttattcttttatatgtggtttgccggttttcccatttaatacataggatgtccattccccaattcatgtttttgtatgctttgttgaaaatcagttggctgtacatatttggctttatttctgggttctctgttcttttccatagatctatgtgcctacttttataccagtaccatgctgttttggtaactatagtcttgtagtataattcaaagtccagtcatgtgatacctccagatttgttcaaaaacttttgcttaggatagctttggctattcgggctcttttttgattccatattaattttaggatttttttttctaattctgtgaaaaatgatgttggtattttgatggaaattgcattgaatctgtagatttctttaggcagtatggtcattttcacaatattgatccttctaatccatgagcatgggatgcatttccatttgtgtcatctgtgatttcttttagcagtgttttgtagttctccttgtggagatcttttacctcccgcattacatatgttcttaggtattttattttttttcctgatgttgtaaaagggattgagatcttgatttgattctcagctaggtcactgttggtatataacagtgctacatttttgtgtatattgtaaatctaactttctaatgtggaactaatgagattggaatctgaggctagagtattagctttatatttttgcgtaataaattaccacatagcttcttaaaacaagtctagtttattaggtaggagttctgaaggccagaaatctggacagactgagctgagttctctaattagggtctcacaaggccaaaatcgtggtatcagccaggctgggctcttttatggaggctttgggatgctctgttgcagagtttgacctcctagacaggcaggtctgaggtccccacatcctttctggctgttcattatggtcactccctgctcctagagggtgccccaattctctcttgcatttccctttcatcggcaaatgagcaacatctgattttttttcttccctaacttccccttctgctaacatcaggagaaaactgtttttaaatggctgatgtaattagatgagacctactaaatagtctctctggtttaaggccaactgtatcatataacataaaataattccagggatgatgtctcatcatatgcacaggttctagctatactcagtgggaggattatgcaagggtgagtatcactgggaattcttaggattctgcctaagagtttctactttggtttttgggagacaattttttaaatctactttttaatctacttactggcatgtgtatgttagttctctgtgctttatcacctgcctatttattgaattgtatgtgttacttcactgtacctcagcatctgtcaacttatttaaatgtgtgtgttggttttctgtgccttgggatctactcattcattagaatgtgtgttttggttgattgtgccccagtatctatgtattgaaatgtgtgtgttggttcactcagcctttccatttatctatgtattgaaatgtgtgtgttggttcattgtgccatggcatctgtctatttattgaaatgagtatgttggttttctggacctgggtatctgtctatttattgaaatgtgtgtgggggtttcatcatctctattattatattattattattttgagagacagtattttgctctgttgcctaggctggagcgcagtggtacaatcatagctcactacagcctcaaactcctgggctcatgcaaacctccagcctcagcctcctgagtagctaggactacaggtgtgtgccaccacacctggctaatgtttttgttttattttattgtaatggatataaggtcttggaatgttacccaggctggtctcaaatccctggcctcaagtgatgctcccaaactgcagggattacaggtgtgagccaaccatgcctggcctcattatgtctattttatctgtgtattttctcaatgtaagataaacagttatttttatcggaaaaaaatttttggttttaatattatttaagagggcaggcatttcctttttaagaataaagcttctcagctttattttgtaatcataacacagtaatgacatttttaaaagaaatatacaatgccccttttttttttgtattagtttcaaagatattccctaaactttaattctgttttctttctttctttttcttttgttttttcttttttgtgatggagtctcagtcactctctcatcacccaggctggagtgcagtgatgccatctcggctcactgcaacctctacctcccaggttcgagtgattctactgcctcaacatcccaggtaactgggattacaggtgtgctatcatgcctggctaatctttttttttttttagtttttagtagagacagggtttttgccatgttggccaggctgatcgcgatctcctgacctccagtgatctgcctgccttggcctcccaaagggctggaattacaagtgtgagccactatgcccggccaactttaattctttacatcttcggcacatttattttctgattgctctgtatgaaatcaaatccagccataactttattgctagcatgcttcagttatctatttctgtaaacaagccagcttagccgcagtagtataaaacaaaaactgttttattatgcttctggattctgcagtttaggaatttaggcagggtatggcagggatgcctggtctctgcatcatgatgtctggggcctcagctagaatggccaaggcttcaatagccagggagactcaaaagattgaaatctaaaatcctctgaaggcttctttactcttatgtctgtatctgggctgagatgactaaaaggctgagctcagctggggctgtccaccagagtgcctacatgtagcctcctcatgtatcttgggcttcctcagagcatggtgacaccagggtgcacagatttcatacatgacagctctaggctcccagtgcaactgaaaagttaatctaaaaatcttatatcacatttgaaatagaacatgtcccaatattgtttctcatatttgatagtggatgtttttgtgtatcttaaagtgtgttcatgtgttttaagttatggttttatctctagagaaaaagcaatgatgacttctaaatcataaaattgagactcttagatggatggaaaaataatatattacctatatattattcatagataagtagcatttttatttcatttcaaaataattggcatcaatttgaataacgcatagtttaagaagcttgtagcataattaaaaatggcaggttttgctttgttcctgtatcactaatgaactgttagaattttgtagagagctaacaacttttggaaataggaaggcagaaaacattactgatatagtgatataaaagaaaggagaaaaagatacaattagtatttataaaatgaaattatatttgccttgttcctggctttctcaaaggaaagaaataactttttcttgtgttacttaaaatgagatctgatgctgctgagttctttgtttttttctataataggcctgaggaaattaggacttcatttccccaaatcttcatgggtcttgaaccaacagaaatgtgttatagtagccacctgcgacactaactctcctcacagaacccatcatgatatggtcttagttcataattcagtatttccttagatttatagtgttgtgtttaatcttagagccctccatgttattttccaagtagtctttagtttattaagactatgtttattcttactagtttgagaagaaaatcttgaaaagtcctggcttcaccttccttttctaccacctttatagaaaatacacctcttatacctgtaatttagcaaattatacccgtaatttggcactttgtagacataaggtaaagtcattttagggggctgtcccagtggggacacaagccatctggcccagggatattatgtgcttctcaactgtgacagttcttcctactcattatataatgggcttttctaaaagcaattttttttttcttaaaggattcagcaaacccctgagctgtaacaataggattaagtgatgctgacattcaaagtccagaggttctcagtgtggtccctgggccaatagtatcagtattacctgggaacttactatgaatgcatgttcttacacttcacccaggatctacttactcagaagctctggggctgggatccagcagtcttttaataagctatgcaggggatactgatgcaggctaagttttagaaccactgtctaaggatttgcaattgttcttagtatttaacatgcattgtaccttcttatccttctgaataagtatttcttattatttatgtaaggtagctttatatgtataaaatagtcatacattttaacattatacgtatatgtatatgtacatagtcacatatatttttcttgatttttacattaatttaaaaatggggaatgcactgtctctgccattgtcctctccagattttgagatagaaatgaagaaaaccatgtaaaaatgaagataagtagaccagggtgggactctgtggagctggagatcgatgggcaagagatgtgaagaaggtgaggagaaagggatagagtaagggggcaggaccttggcctgtaacttgtgctgggagctcagctgagagcatcactggggcagctgagtgagaatagagcaaaagctgttgctctgtctatatggttttaaccagggttgttttattccagggataatgggaaggttggatcaacacccttttctcagttgattcttctcattgatacctttgcctttagcactgtgtaaactcattcctgcagtaaaatgactttttaaatgattgctcacttgtcactaacttgatctgcattgtcacagacttaattataaaacttttaattctacttagtactgtaacataggatagtgttttaataggtagaataggattgttttgctatgttagattaaatatggagggggtgttcatatacaaagaaccatcagttgctttttccaggaacattatatcattgttttaacaagtaaaagagatttcatttacattgtttccatttacaaagctttttctcagagtttgtcttttggaagtccacactctttgttttgtaataggttgggaagcaacatggctctaagcaagttaaccctgttttaaatttattcctttattaattttttggaatagtaatttagttatgattcacaatttcaatgttatctttaatgtgttaacttctagttttagtgtatgtacccagagtagatacttactaaatgttggttaaatgaatgaagattggctttgttaagatttttggagagagctccttctgtgttgtaaaggtgctcagaagggtgattttttttctgctgctctggtttgatttttgcattatatttttgtagttaaatattaatctctcttttgaaatccttaattgcatatagatttttaaagttgatctttattttatggttctttgctttaaatgttccacttaattttaaatgggaaggatttaaaacaagctctaaactagtatagaggacatgtacatatcttgaaaaatgacctgttataagcctgtacactgtggcatttactggtaaggtttctcatcatgtgcatgtgaagagaaaagaaacaaacttattttattgctttaatggcgttgtaaaaaatggcaagaacttcagcaggggtttatatcagccagctcatttgggtttctaacttccttcttattgcttttccttcccatagcttcctgagtggcctttcaagtttttttttccacttacatatactcatatttttcttttccatgtaactctgacacatagttactctcacaggtctgtcactactcagatatcctctctatggtgatctcagaccgtagccaagtttcatccccctaatgctactcagccagtggatgctgacatttcagaagggaagtgtggatgggccacaaagtaaggacttctcatttctttcactgagaagtattttggctctttggttggttctaataacaactaggactaccttggagtaggaaaacctgatttcagagtctaacaaaacccaaaggtaggcattcagaaacctggacctcacaaagggaaatgaaaagtgatcaagaagctagatctggccccttttttctatctgtattagatatctgctctgttcttttctcaactctcaattgatttggtaaagatggttaaatgagaacaactgaattgtaaaattatctacatttcatgattaagcctgactgaattaagatctttgtaccagagagtcattcagattggtccaacttggaccatatattctcctgtatccgacagactgtggacaaaagatggggttcacagtaaaacagaatgtggaccctcaggaaccttgtcccatggcaaggtcagatctattctgattcaaacgaggccaaagcaaacaaaacccaaaatttggggttttaattgatataaaaacattttgaattttgtagcacatttttctaattcttaggtgccaatttggagctgacagttcttatttttcaagatggaacagacaaatgtttttaatctgtgtggaatgagaaactggggaggatgcagctgaatgtatgttttaaaagagagagagggtttaatggctgaaacaagatctaagaggagtcagaaagagatccagggccagtcagatgaaactggtggccttgggcagaagaaaaattgttctctaagacaagggatatcaatgtgcctgtgtatcaggatttggagagttgaacttaattcctgagtgggagtcaaggctgtcagctaagattgatagggttgagtagggaccaggcggaaaacagtgaagtttgtggaataggaccatgaggaaattaaagaatttctgacggtgagactaaagtttaaaatttaaaatctagaccaagaggtaccactctaacccattcccctccagtaaaagcaagtgattgattaattgagtggggctgtccagtcagatgcaacagaaggactgagggaaaagaaattgaaaaaagatagttgacaagtgagagagtagaagtgcttcattgtggggtcctatctgagtagggaaggaaataaagacaggaagagacacagttgttgaagaagaggaatgctttaaagttgaggtctcaatgttctaggctcacacttagtgatagaaagatggaggatagaagatggaattccagaatcgatgatgttggaggaaatcctgttctggtgatgccagggtctgtgctatggccactggcttttcccgtggtagcatttccttggagaaggtcaaggaacttgtgttttgcggctcttcaatcggcctcccatatggacattgataataatagctaactttctaggactacctattctctgccaaacagtgtaacagatttttgcatacgttacttccaaccattataataatcctttgtaaggtaaatactaccttttttttttttgttacggagttttgctctgtcacctgggctggagtgcaactgtgcgatcttggctcactgcaacctctacctcccggattcaagtgattctcctgcctcagcctcctgagtagctgggattacaggcacctaccaccacacctggctaatctttgtatttttagtagagatgaggtttcaccatattggccaggctggtctcaaactcctggcttcaagtggtctgcctgtcttagcctcccaaagtgcttggattacaggcatgagccaccatgcctggccgatactaccattttcattacacccagaaggttgagccaatctaataatctgtccaagattgtatcgctattaatagtaaattctggagatggaattgatattcaggtatgtctgtctctaaggcctagcactattcacttgctgaattccgccatggactcccaaagccccatcctcccagtttctgtttttcctcttcattcctttgtttttgccttccttaatttaaaaaaagggcgtaaaacgaacaaaaacatgtaatatagcaggattttttttctttttttttttattatactttaagttctagggtacatgtgtacaacgtgcaggtttgttacatatgtatacatgtgccatgttggtgtgctgcacccattaactcatcatttagcattaggtatatctcctaatgctatccctcccccctccccccaccccacaagaggccccagtgtgtgatgttccctttcctgtgaccaagtgttctcattgttcaattcccacctatgagtgagaacatgcagtgtttgtttttttgtgcttgcggtagtttgctgagaatgatggtttccagcttcatccatgtccctacaaaggacatgaactcatcattttttatggctgcatagtattccacggtgtatacgtgccacattttcttaatccagtctatcactgatggacatttgggttggttccaagtctttgctattgtgaatagtgccgcaataaacatacgtgtgcatgtgtctttatagcagcatgatttataatcctttgggtatatacccagtaatgggatggctgggtcaaatggtatttctagttctagatccttgaagaattgccacactgtcttccacaatggttgaactagtttacctcccaccaacggtgtaaaagtgttcctatttctccacatcctctccagcacctgttgtttcctgactttttaatgatcgccattctaactggtgtgagatggtatctcattgtggttttgatttgcatttctctgatggccagtgatgacgagcgttttttcatgtgtctgttggctgcataaatgtcttcttttgagaagtgtctgttcatatcctttgcccactttgtgatggggttgtttttttcttgtaaatttgtttgagttctttgtagattctggatattagccctttgtcagatgagtagattgcaaaagttttctctcattctgtaggttgcctgttcattctgatggtagtttcttttgctgtgcagaagctctttagtttaattagatcccatttgtcaattttggcttttgttgccattgcttttggtgttttagacatgaagtccttgcccctgcctatgtcctgaatggtattgcctaggttttcttctagggtttttatggttttaggtctaacgtttaagtctttaatccatctttaattgatttttgtataaagtgtaaggaagggatccagtttcagctttctccacatggctggccagttttcccagcaccatttattaaatagggaatcctttccccatttcttgtttttgtcaggtttgtcaaagatcagatggttgtagatgtgtggtagagccaaatcatgagtgaactcccattcacaattgcttcaaagagaataaaatacctaggaatccaacttacaagggatgtgaaggacctcttcaaggggaactataaaccactgctcaacgaaataaaagaggacacaaacaaatggaagaacattccatgctcatggataggaagaatcagtatcgtgaaaatggccatactgcccaaggtaatttatagattcaatgccatccccatcaagctaccaatgactttcttcacgtaattggaaaaacccaaagttcatatggaaccaaaaaaagagcccacattgcgaaggtgatcctatgccaaaagtacaaagctggaggcatcatgctacctgacttcaaactatactacaaggctacagtaaccaaaacagcatggtactggtaccaaaacagagatatagaccattggaacagaacagagccctccaaaatgatatagcaggattttaaaaagaaatgagaaataagcattaaaaataaaaatttataagatataggatgtaatcaagggtaggttagcatacaaattcaaggtgttaattttatcgcatttactaggcttaggctgtaaaattggctttaacattttaagagcaagcatgaagaaacaaaaattacatgatactcagagttgagtaagactactcccagtactgagatgtgggagatgacaggccttgggtaatgggaaaaacatcatcattaggaagactctttataaaaatataataatatattttattgagttcttactgataatatctatcatgtaggcaaataaaattctgtgagatttaaaataatatggttgagtacggttgctcaaagacaggttggaatgcaggtagagctaggcagatgccacatttttttcttaaagattggcagattaaatgacacctaaagatgggtagaaaaatgtcaccagttcatacacgtaaaaattgttccatgtggaatgatctgagatttggaatcaattactgtaatttcttcaactaagagttcaactccttcctgagcctggattagggctcatatccagaatatactaggacagatgtcctagtgtaatgtcctgctatgacctcgtgacatttttctactcatcttcctacaaagaagtaggatatgaagtctagagggatgagaaacgattctggaattttttttctctctgtatttttatgtcttttgactagacatggggaggttgtttcatctcacaatctttagggcagtggttgtacaaagttagcatgcattttaattactcaaaagcttattaaaacacagattgctggtcctcaactctaaactatctgattcagtgggtgtggagtagggtatgagaactgcatttttaacaagttcctaactgatattgatggctgctggtcagaatgcacactttgagaaccactgctgtacaaataggaaataaaatgaaattggataataatttagaatatttaatgctaacattctaaattagggaaaatcctagattattttaatgtcttttttcctatatacccatatcctcattgaaagtagttttgacagtaaatctgatagaatttcagtttgttgagatggagaatttgttcttgcaaacttgatcatttacatacttataattttatttacttgagccaacccccttttcgttaatatcaagggtaaaattttatataacctgtctcaaattcataattaattgaaattgtaaagttttgcagggaatttttgtccccctaacacccccaaactgatctgttaattatctcaagtgcaaaagtgcaaagattctagcctctatctttagaatggtaataccaccgagggctatttgaataaaaaatggataatttcttgattagttacaatgctttaaagccatggtttctaagggtattgaagcagagaactcattttaatgactttatttcccaagtatcaaggggccttacatatcaattttttggtttaggataataattttggtgtattgtaacaacactctttttatatagtgttgatctctaaggagtgcttcactatttcttcatttttaggatatctcacaatattagtaactcaaatatttcaagttcatagagaatatgagtaggaaaatagatgactaagagttgtggtttaccagtttctcccaatttggcacccaccaatttgactcatatctaatgagagcataaaatagcctttatctttttttattctaaaaataaagtcattgaaaaacttgttgacaacaaaaaaaagattagagatctgaattatatttctccttggttctcgatacggtttaaaagctaacctgaacaactctgagaacgtcatgcatttactgggtaaaaacatgtgggctaactgggcttgcgaagattctaatataatactttctacaccagctgatagtggtaaaggaagtttcagaacatcaatattaatttgtgtccagctgatcgcctcatacggcatgctggtggctctgatttttctttttttaaaccttgttttaatgtctaataagataaatttctacatgtggaaaatattaaagtaattaaaaacatttggcttttttgcatatattttctaaaattaacttacttgttaacactcatctctcttgtctctaattgggttgaaatgtgtgaaaaaaagctttgatatggaactgattttcaaagtatggctcaactgtgatacacatggaggagccaatatatgcagctttgaaaaagtttctgatgtcagtgtttttacttaggtggcataagatttgaataagaagttgctacatctcaataactaaggtttctgttatcatttggaaatctaagcactatcactttagagctttgagttaaaaggtggtactccaaggtctgcttctgaagaaattgtttctcttttttctttaaaatattcatagtgttggcctggtgctgtgactcacgcctgtaatcccagcactttgggaggccaaggcaggcagatcaccttgagctcagcagttcaagaccagcctgggcaacacgacaaaaccccatctatactaaaaaatacagacattagctgcgctttggcaactcatgcctgtagtcccagctacttgggagggtggggctggagaatcgtttgagccctggaggtggaggttgtggtgagcccagatcgcaccactgcacttcagccttggtgaaagagtgaaacgctgtttcaaaaatacacacatacatacatacatacatacatacatacatacatacacacacacatacatacatacataaaaggaaatattcatggtgtcatctcatttcctagtaaagggggtggggctatatttagtaatttgtttttctaaaggcagataaatactatcctcctttcaagtgctctgtagctggatggctttgtttgactttctttaaaattatttttaaagtgtgagcacacataattttatataatatcttcatcagatttaaatgatgtaatttaggtaactcttgcaaaggctttacatttttttaaaaatgtaaaccatccttactctactatttcaccatagatgaacactcagtacattgacacagcttatactattttttgaaggttgaattttacataaaaacaaggttatattctatgcctgtggaaaagttaatattcatttctttcctgtcatcctgtgagctttattaaaactgctaccacctgtcagcaagaggtagaagagcgtcataatgaaaggaattgatgctgaaatatctttctgaagaaaaatagaagcagcttctttttttgacttgtgatatttggggcctcagctaatcaacgttgcagaagtttgagatgattggaaatcttaatggaggcaaatggagccatatccaggcttgatgggatctgaagcatataaaatttgggaggtttcctttaaagaaaaacaaaaacaaaaacacaaaaaaatgctttcctttagaaatttataaaacttctaatggaaggtgttggattctctcctggggccctctgggcaggagaagcccttaagcttaaacttctttaacttcaaggtacacactgccttttgggcaaagaggagaaatattagttctgcctatgggcatgaggtggtctccaaacttccctccagatctggcccaatttttcaaaccttcaatccctactgaaaataagttttatttctgctatagaatttccaccttgtcttcttcagtcctggtttccagtacatctgtcttataacttgaaatctctgaataaaacttgctgagtaggtattttttaattggtagatgatgagttgaccaaaattcagcacttggccaaaattgctgaaaattgagagaaactgtcatggatgtagttgacaattcattggctttcttcatgttttaaggtagtattaagataacacaccagcaagcaaagtatcttaatcacattatccctgaagaaatgtaatcactgacttaaaatttaatatttcatattatagaggctcaacaggagaactctgtgttggaacattatttccataatacatcttgttcataagatctgtgatgtcaagggctatgtattcatcctgctgatcccaatgtcaaatatgtcttactagatatttgcttcacaagaaagagaagtgctgtgtttaaaaatgtaggctttggaacttaaaatatctgataagcataatcattacacaccagggttacttccttatatcatcctaaaacatttaggaaatgtgctcattttatatattgagaaagtaagattatctttaaaagtgtggattttggagctaggcccagtgcctttgactgtattgcttactttctgctatggggcaatctttatgtctttatgattccattttctcatttataaattgaggtatcttaaggttatgatgatgattaaatggtataataaatgtgggctacttggtaaagtgccacataagtaagccctctgaagtgtttacctattgctgcagctgtttagccattgattcagcatcatacaagcacacatctaatgaattcgtacttttagtgaatgaataaaaaatggtatctttataaactcgaatgttgccccttgttaattttctaacaaattagaactgtgaaacccaacttattttcatttttgccttagagatcagtaagcttagaacgaaattcattattccaatggtgtaacttgttcagttcaattctaggaacaactactactttattttcttcagttgatccctattctctttgatcctttaatttctgattttatgtcatctccatccataaatcactgccaagccttttgaaaggggtataatttatattaaatggcctatctcccattccctgttaacatcttgaccatgtacaattgcgtgccgttctcatctgtgaggttttagttgtagcatggattctttttaggcttaattggaaaagccgtcaatcctgtaaaccacctacgacatcccacagtgtactatacaggttaattttccatgactattacaatttgtgacactggtttaaagagcaaaatccaaattatctgcttactaaatgtataaattcagaaaatgacatcttttcaaaattcttttaaattttgggtaagtttaggtaacgccaaaagtcctattcggtattttagagccaaaatctagacagaaggtgtaatgtaaaacacagttttgtcaaaacactcagaccattggcttatttacctgcttgtagtttatattaaaaagtaaattatcattgaatgagattttaggtctttctgaaaatgagaaatttccattgaaagatatggctagtcatgtttttgttgcttaagattttatagctggaaatactgcattttaaaaatatcttcagtttttcatccacattacagctaggtgctcctaaatgtgttgaaagatttctattaatatatggtattaaatgattcataatttgaagactcttaaagttctttgatcttatagctaaaaatactgcaggtattatagttactagaaaaaatttcccattctatactggcttgtctattatctgcagcttacttagaatttttaaaggacagtataaataaacggaaccccccaaatctggtacttgactgatttgactggaagacccatggcctagttccagctgtgtaatcagtagctatgtgattttgaccaaataagttaacatctctatgcctcaattttcttatcaataaaatgaggaaagttgggctaaactgattcctgagatcccattcagctgtggaagcctttgattctcttgtcacaaagcagcacacaatgaaatactttattcaaaatgaaatggtgagccaggcatggtgggccacagctgtaatcctagcactctgggaggctgaagaaggaggattgcttgagctcaggagtttgagatcagctgggcaacgtagtaagacctcatctctaccaaaaaattaaaataaaataatataaaataaataattggcgcagtgttattaagcattggcccctggaatatatccaaaggtcaggaaagaagttcacaattctgtatagtctgcatagctgcagccaggctggctgatgcaagtgtctgtaaagttactgtggctttctatttgcctgctgggattctagcattgaggatagcctctgaaaaacagtgccactatgagccagtttcagttccattgaaggaaaaaatgatttgagaacctcaaaatgggatccatggacttctgtattctaccagggctcagcaaatacttcacaggtgatttggttggtagggatgaaaagaacgttgagacagctttgttcacatacattcttcaatttgaaatgttaattattatgacaggcactgtagcatgtgtaatcatgaataattataagaagcaataaagctcataatgttaaagagagggaactcgaaaggcagtcttcctgggtttaaatctgagcactgtctgtcaatagctttgagagttcaagcaagttgtttaacctctttgtgcctcagttccttcatgtagaaagtaagtataataatagaacctgccttataaagttattctggaaatcaataaattattaaatgtaaaacatttagaatgtctggcatgtaaattcttcataggtgttatctattgttattacattattttcacagaaaatatttaatgtttgcaatatcaggaatagatttgggtacaaataactgaaaatcctaagataataatgacttaggcacaacaagatggctgctaaagcacttcccttttaaacacaagttttagaagtcacatttgaccatttggtttacctcttcttgaccagaacttaattatgaggccaaataagcttcaaaggaagatgtaaaatgtgcaatttaatctatggggctatgtgattagttcaaaatataatggctttattattgaagattaaagagagaatattgggaaacagcatctttccacaaatataattacattttgaaaaccgagttcctcagttttctcagttaagggacagcttctttgccaaactgttcatattatttgcatatctaaatatttaatttcagttattagtgttgtgttatttaattgccttgcacgcaaaaaatggactgatttctcaaaaatgattacatggcaaaaatagaattaaaatattaacatcagaactccagttcaggcactaaatttaaattgacataagttggtagaaaggactctgctagtgccataatttaggggaagctcctaactacggaaatgtgtgaataggaagtatggcagtgaacactagtgttcagatttgattggactgatgatctactgaccccctagtcacctgttaggaaactgtaaaaataagctacccaaatatgaaattgatgattcttttttcccgaaaggcagaagttaaaacccttcagatgtcatttagaatttcaatcctttgtgtgacacaagtcacattattactgagaagcttgtcaaccaacccaaactcttacgataaatgggtgtagaggggaagcagattaattattggcaaaacctctttgttaaatgacattttttgttcaatgacacatcacacattagtagccatcaatgtgtaagtacagtcactattttatgtactaatatttttctcccagtaaagcacaagaactggggtacagagactgaatcacagttcagaatatattaattacatgcattcattcatttatttgttcattcaacatacattttttcagggccaagagttattccaggcaatggaaatatggcagttaacaaaagaaataagctcttaccatcatagaacatataattctaatgacagagaaatgcttgatgacttttaccactatttatctcttatgaccctgtgttacatgaaaaggaagtgattgctgtgagcattcttgtgtaggctgagcaaggtgaattaggatttttagagagagtgaaacagtttttggttggggcaagagtagcattgctatgtatataagagtttacctggatacttgtctatcttctgctttacttccaagagcatttcctaatcaatagtatacgtcctggtggtgattaagagatgaaggaagtagtcaaaattgtgactaggatggaattgcagtcattgagtttctatgttagtgttctgggcaaagaaatacaatacagctttctccctactccttcccaatggcaagggggtcacacaagattacctgaaatatggaataaaaacatctttttatggacagtagattgactcttttttatattaagtggcatgatcagttggtgtttctttatgatatttagtgtcttgagtagtgtggccctatctttgtatggctgcaatattactgtatttaacattaaggataaattattggagattttgaagaagactgaatagtgatacaaatggttgttaccaagagttatattttttctccattatttgattttctttatttgaataaataaatcgaatagcttatgtacaaatcagtgcaaatgctgcagcaggatataaaagtgcatttctttacgttgaaggaaatggttagctttgctttaaatgtgacgagtttttcaactgaaagtagacataagggagaagtctctccataattcccaggtctacatttgctccaaatattcccaactctctgagagaggcacgccagacttgccgtcattcctaatgttttataatggtaaagaagggctttctaatttagatgaaatagagtaagaaaagaaactgaatggatatggaatccgattttttaaaaattttagatttagggggttcctgtgcaggtttgctgcataaactgcatgactctgaggtttgggcttctaatgatcccatcacacaagtagtgaatagtgtactcaataagtagtttttcaacccttttcctcctttcttccctcccctcctttggaatctcgtgtttattgttccatctttgtgtccatgtatatccaatgtttagctcccactgttaagtgagaacatgcagtatttggttttctgtttctgcattaatttgcttaggttaatggccttcagctgcatccatgttgctgcaaaggacatcatctcattctttttatggctgtgcagtattccatggtgtatgtgtaccacattttctttatccagtccaccgtttatgggcacctgggttgattctatgtctttgctgttgtgactagtgctgccataaatatatgaatgcaagtgtcttgttggtagaatgatttattttcctttgggtatatacccagtaatggggtttctgggttgaatagttgttctatttttagttccttgaggaatctccaaacttgtttccacagggactaacctcatttgcattcccaccaacagtgtgtaagtgttctctttcctccacaaccttgccaacattctttttgaccttcttatagtagccattctgactagcgtgagatggtatctcattgtagttttgatgtgcgtatctctgattagtgatgttgagcattttttttcatatgtttgttggctgcttgtaggtcttcttttgagaagcatctttgtcctctgcctactttttaatggggttattttggaatctgatctttggctcatgtcagataaagatacctttgtgaaagattgcaaacagcaaatctcttgctgatatgaaactagcgattttaaaacttttaatttttatttaaaattcagatgactttttttaaacaaaagattggtgactgtatgctgagtgcttttgaagtagtctacaaatcccttcagtttgagaaatactactcttggcagaagaacagaaataagatacataaaagacaatatgaggaaacaagaaaagtcagagttgggcatataaaacttcagggaatagtggtgggcccagatgttgtttaaggagtaaatgtaaagtttacaagtatttaatgttctggttatctgtgaggtaacaaaccacttcaaaacctaatggcttaagatgacaactatttatctcacaaatctttgtgttggctgtgtgctgctttgttcagttggggccacaccatatgcattcagcctagcttagcagaggcctcttggttttcctccatgtggcagtgtctcatcctccagggcctctccaagtggtatctctctagttggacttacttttaaagcatggcagctgagccccaagatgggtgttccaagaaggaaacccgaaagctcagtgcttgcttaaggtcacttggctaaaacaagtcatgtgcccaagcccagagtcagtatgagaagcacaaaggcatgaatccctaaggcatatttcactgggatctaccagtgaaacagtctaccacaagtgtggaaagaaagaagcctgtcattgcaatgtttatatttcttatcaaacctgaaggacattctatcttggaaatgggacaagttcacactgtgatggtttgaatgtctatgaatgtgataatcagaatattttaaagcagtggctctcaacttcggctgcacagaagaatcacttaggggaacactgaaaactgcaggtgctttagattgaaaaggccaattaaataacgtttctccaggtatgagtatattttaaggctctttggcagatttctaaagtgccatcaaagttgagacagcactgttgtttctgagattgacttgaaggaggacagccatatattttctttgcaccactgttagaatgcttgcttagatgtgcagtgaataaaggatcaagcgtggcattctttatgattcttgtttggctccgtggttatgatttcttccagtgagataccatctcaatcatatttctccccttagaaccctaaaatagttaagtattttctcaagtggccttacaatatttcttatggatatatctgatttgagttcctcagttgtccttctctgatgttcttgtttcttattcatatctcatatagacttgtcacccttctgtgtctgtgtcacttcaaattatttgatccttactgtccttccacatctcagtcagagcagatgccttcctaatatctaagctatcaggcactttttcctgattgtccttcttcttgtaatgttctcataataattcttcatgactgcagttactcaaatgagttctataattcaacacctttttggttcctctgaacacataaaattaaaatttaaatgcataaactttcctatctgattggccacacctttaagttttttgtagtgttaatttatttcaaaatgtagtatgtatacctggtaaagtaaaacttttcaaataagtataaattaaaaaggaaatctctttccatggcgcacccacagtttcattccatggaggaaactattagtgcttgtttgtgtattcctccagaaatgtttttatataccataatatacatatttaaaaatatagcagtgtttttaagcataatgtattgttttgaacctttaaaattatttgatatatcttggagattttgtcatatcagtggttttaaaaatgtcattatagttcactatatggccataccataatttatttaaatgttcctctgttgttaacatttgcatgcttttaagtgttatttccaacacatatctttctgtaaatgtataaattactagtggggaattgctgggtcaaatagtctgtttccttggattttgatacctattgcccaagtgccttccaaagagatgccactaattttatattcccacaactgtttatgtgattatacctgttttcttatatcctcatctgcatctgcacaggatttaaaccaaattttattttttgctttagtttaggcctttactatctcttgtctggtctaatgtaatctgttttttgtttaccctcttatagacattagcagagtctggaacatatagaagattacctatgaatgttagaatgatagattttactgaattgtaggacataaaatttctgcttttgttaatcagtaacaaatatccaatgaaatataaatactgcatggtattactctgaaaacagaacccatgctgagcattaaagtagccaaatagtctaacaggcattatatgttttttaattagtttaagtttttatatttttgagttaaaaatcccagcaaagtcctagaaataatgcttgtatgatatttttcaccttagtgggttgtaacatactcaaagaggaagaatacatgaattttcattagaaatagtgatatgaagagttgatatacatgaaattaatatttatttttgaatcgtgttaaaagcatttttgcttgtattgatttttgtggggattttctcttgtatacaaacaatggaataaatcatgacaaaaagcttaacatatgtagtataatatttcataaagtcagaagaaattatagcttatataatgaaaaactgacattgagcagtattttattatattgtgattaaaaaatcatgactttacaaattacatttcatatctggctcctgtagtttttcttttaatatattgaaactgttttattaataaggaagtttcaacttcttgggaaccctttactttgaggcaaatacagttttcctggttcattattaaacttatctctcttttaaataccttgccaatttttgagagtggtggaaggtgtggaaagctctatgttctttagagtttgaagaaatatttattgtgttaggtatattaatagaaaattatttacttttcgtaggtgaaagtactgtgctataaaatgtctctccttttcaaaatttgcattatccatcattaattcaagtgaagtagtactttcaacatggaattgtgaaactgaagttgttcactttctatttagaagttacttctgttcaaggatatttctttttacctgttgcagaagagcatcttaatagctgccacatttgttgactattttctatatgccagtatttgcactagacattttacagatattcttttatttaatctttacaatagaacctttaaagggttattattgcatttatggctgacaagagtaaaactccaacagattaagtaacttggccagtgatgacacaaacttgttaggggtggagctgggatgcaaacctaactccaatgtccacaatcattgtatggccaaggatgactttcatgggattgaattttagccaacagatcaaaattctaaagaatttattttagtgtttcatcatcttctcaaaccttcagcttcattaaggttcagtaattaaaaatgggaataaccacattttatgatccttgttagaatacagatcactaaaaggcacaccattcagtttccttgctgaaagagtagtcaccaagatagtctcctaagttgagagcagaggcagatattaataatgtcaagttgctcaatcagtccttaagctgtgtggcttttaaggaattggattcaagaatgtgaattcagttgtgtggccacttctgggttggctatattttcccatttattaaattcacccatagttgtttttttttaaataaggggagcttgcatttctacctaaaaattacaaaaaaaaaaatagatttttcatggtttctttgaaatgtaatttcttaccatgatatcttcaattatcacagtttagatgtattacaatataaaaatctttgcttagaaagcttacgtctttgaatgttcatctggattttatgttaagagaagaaattttcctttattttggctttaatgaaagaccatgtcaaacagtgatttatctgacatgtaaatagttataagccttgttttaattttatattttaaaacacaaatgtagtccgtggtatagttataatatgcattatatatgttgccctagtgtcatgatatttttatgaatcaggctttcaatttcaaaaatcagcttttgcttttttatgctcctgggttggatactgtcattgtctttaatatctaaggaaaatgtctcttcttgccattgagcccacaattttctttttaaaaaaaatcagataatgcttatatattgaatgataaagattttcttttcttttccttctttttctatttttttttttttttttttttttgagatggaatcttgctctgtcacccaagtcggagtgcagtggcacaatctcggctgactgcaacctctgcctcccaggttcaagtgattctcctgcctcagcctcctgagtaggtgggagtacaggcacgtgccaccatgcccagctaattttttgtagagatggggtttcaccatgttagtcaggatggtctcgatctcctgtccttgtgatctgtccaccaatccacccggcttggccttccaaagtaataggattacaggcatgagccacggcgcccaacccgaatggcaaagattttctaaagctagatcagataaatttctagcagctcaagaggcaggatttctatgaagttagaagtaaatttaaatttaagccttgattcatctatagacagatatttgcattgaattaggaattaggtgtacattgattttttaaaggtgtcaattaaacagtatgggaattggagttttaatttgtttcttttaatgtctcaggtcaggcaatgactttttcccatttgttattgttttgaatcttatatgttttctttagtgtgatgattagggggacttaactgccagctgttcatctttctttttctttttctttttttttttttttgagacagagtttcactcttgttgcccaggctggagtgcaatggcacgatctcggctcaccacaacctccacctcccaggttcaaacgattctcctgcctcagcctccctagtagctgggattataggcatatgccaccatgcccggctaattttgtatttgtagtagagacagtgtttctccatgttggtcaggctggtctcaaactcccgacctcaggtgatccgcccacctcggcctcccaaagtgctgggattacatgcgtgagccactgcgcccggccttgttcgtttttctttacttgacaattaggttccctctattgccctctgcctcatattgtataaccctataacatagctatatgatttcttcctaaatatgcatctcagggcttgacctaccagggacagcatggattgttaactgctttccgatgttgacagcactgctgttgttctatccacctaaatctgatttagctaaaacaaaggcagtatatctgctaccttaagttattatatatagattcagtttgctttgtgtttgttcttttaatttggttttacagattaaaggtttgactctatctgattattttgtgtaaatgcatttttcaggtctgatgcataggcaactttgcctaaataaattagcttcctggctggattagcaaaagactcaaaattcttcaaaatataggagtaatttttttccgaacagctactaaagtggtttccattaaactggggaaaaatgaatattaaaaaaaggaaaattgattcataaaagattatagcactttctgaacttattccatagaggagataaacagtgcatttttactcccaataatagaagtgactgacgcatagcctcagttttttcttaaaacatgtttcatgtgcacataatgccagacagtcctgaacaatatgtggagcactatcaaggataattctcctgtttaaacattgaatctcctgtgcctggtgtatatatgtgataaatgcactgtgccatttattcaccttcaatacatgtgtatttttattttggaaagataatgtgtatgattgttgattagaccaacttttcttccatgcttatagaatagagtgaaatttttaatctatgtaatacttagaaaatgaatatgtggtctattcttatgatatttacttttttgagaccaagtttcttttttgtggaattgtagcagtctctcattgcctgaggtataccctaaattctttgtcccatgaccaagaaaattaaggagtgtggacactaagggtgaggctgtagcaagagtttaatgagtgaaaggagaaagctctccaccacagagagagggccccaaagagggttgctgttttacagttgaatatagaggcttttatgagaaatcagtgaaagctgggcatctcatttgcataaggcatgaatttctggtagctccaccgcatccttctagtgtgcatgcaagcccttagcttgagttactccatagttactccatactgctttgtttcctttaaggtacatgtgtcaggggatggaattttccattgtgagcatgtctgggcaaatctcctgtgtagcctttcttatctatgtggcagtgggcatgtcttaagcaagttcccccgtgcaaattcccttttctgtgcctgcagcttgatttctaagctcgttttttgtttgaaagaattttaccgaggacccaccctaactgcctgcctgaccatttccttcctcctctctcagaatgatttcttcacagttttgatagaagttttactaagattgaaagaaaacaaactttgaataaatagatgcacacaccatgtaactggatgttagtactgaattttatcatgatattaatctgggcaagttggctacctgaccagcaggctgaatctggcatgcatgcgtgtgtgtgtgtgtgtgtgtgtgtgtgtgtgtgtgtgtgtagttaattttttaatttacatttgaaataggcttggacaggacaggcattctgcagctgccagttacctccatattctcttatataaacctcatatttaaattcattccttccctcctccctcctgcgctggctcttagattcatttgagtttttgacagttttgtttaaataaatctaggaaggactgatgcatttttttttgtaattctgattaatattccagtgagactttagagaagggaaggaacaaatttacaggtcatctggatcatttaactcttagagaaaatagttaaatggagatttaccagtgtattttttaaataagcaagatgggatttggttaactgagagaagaaactaccttgcaatatttagctggcttgactgcaggataaaacagaggtcagtacatttgtttcactgagcagatggtgactgcacttgttctcaaagtgtggttgccagaccagcatcagtatcacctgagaggttgtttgaaaaatatttagccccatccaagacctgctgaatcagaaagcctggggttggaggccacagtctgagttttaacaagtcttgcatggtgttcttatgctgtctaaaattggagaaccactcttctgctgaatcttcttgctgcaagaagatcagtggaagacgtggtgttccctggattgaagaaatctgagttctgatcttaacctagcctcttgtcagctgtgtgaccatgattcctctagatccatatttcctaattgcaaaacaagaaaattgtgttatttgactttcttccaaatagtctgaggcattaataatttcaaaagtcttttatagtattatttcttcaaaacagcatattttggtttctttcattcttctctcctattgctatgcaataaaaaaaaattcagcctgaaagaagtaccatttaattttcttttgtttaaggggctgtgggaaattgaagtagaacatttatcaggtgcccttaggctacaaactaataatggaggaaatggccctgaatcttcctagcacctgtgggccttgccttagaagatgcctgacaaggacagttgaaatatttagtggtacttgatgtgctagagtatgaaaccaagtgtaatttcagcaatttcgagcccatcgaacttgcctagctagtgcagttagtatagcccacaaatggttatgaaggaagcagttaatagtaatggtttcctgtattacttggcatattttgaaagcaaattaattttaaaattttacttttaatgctagcttatttgtgattgtctttcctcccaaacttgatacttgaatttgtattaggtttccacttttaaggcaattctatatattttgtttcatattattgccagtgaaagctatcttatagtattgttagaacagtgaaacagaggtgaaagttctcctgctttatctggtcaatacccaacaacacctagaaactttcttccaaatctcactgattgattttatgttaagtagtacttaatacttatgtgtttaaaatacatatcagtacttacctgttttaaaaatatttaatattctcattataaaaacagtaactacccattgtagaaaattcaaatattattggggtacataatataaaaagtaaaagtcctttggaatccactttctctacttttgcccaccacccatggtaactattgtcattagcctgaagtttgtcataagttcctttatatttttttctaaattgcactgttaaaaattttagtgtactatactcttaatgtactattgctataccttatttcatattacattcacagtcaaaattttgatttccttgacaaatctaagacagaatagctagcatattggtgaaattttgaattcatattcatcctcataacaatgaaatgcagacatcagtgctgttataaataaaaaccagaggaactaaaaaaaaatttgaggaaataatcagcaaactaactttgttatgctttgcaaagtaatttttctaaagcttatgaagttgaaatatgcccttttgtaaatcaaaaaaaaaaaacaaaagcaaacattagagattatactgaggaattgattgaggtaaaatattatccagattcggtttagaaattaatggtaatatttctgtaggaaggtctggactggagtattctgctctctgctgtttcttgtattttctttttctttttttttttttttcacattttttattttatttttttatttttttattatactctaagttttagggtacatgtgcacattgtgcaggttagttacatatgtatacatgtgccatgctggtgcgctgcacccactaatgtgtcatctagcattaggtatatctcccaatgctatccctcccccctcccccgaccccaccacagtccccagagtgtgatattccccttcctgtgtccatgtgatctcattgttcaattcccacctatgagtgagaatatgcggtgtttggttttttgttcttgcgatagtttactgagaatgatgatttccaatttcatccatgtccctacaaaggacatgaactcatcattttttatggctgcatagtattccatggtgtatatgtgccacattttcttaatccagtctatcattgttggacatttgggttggttccaagtctttgctattgtgaatagtgccgcaataaacatacgtgtgcatgtgtctttatagcagcatgatttatagtcatttgggtatatacccagtaatgggatggctgggtcaaatggtatttctagttctagatccctgaggaatcgccacactgacttccacaatggttgaactagtttacagtcccaccaacagtgtaaaagtgttcctatttctccgcatcctctccagcacctgttgtttcctgactttttaatgattgccattctaactggtgtgagatgatatctcatagtggttttgatttgcatttctctgatggccagtgatgatgagcatttcttcatgtgttttttggctgcataaatgtcttcttttgagaagtgtctgttcatgtcctttgcccactttttgatggggttgtttgtttttttcttgtaaatttgtttgagttcattgtagattctggatattagccctttgtcagatgagtaggttgcgaaaattttctcccatgttgtaggttgcctgttcactgtgatggtagtttcttttgctgtgcagaagctctttagtttaattagatcccatttgtcaattttgtcttttgttgccattgcttttggtgttttggacatgaagtccttgcccacgcctatgtcctgaatggtaatgcctaggttttcttctagggtttttatggttttaggtttaacgtttaaatctttaatccatcttgaattgatttttgtataaggtgtaaggaagggatccagtttcagctttctacatatggctagccagttttcccagcaccatttattaaatagggaatcctttccccattgcttgtttttctcaggtttgtcaaagatcagatagttgtagatatgtggcattatttctgagggctctgttctgttccattgatctatatctctgttttggtaccagtaccatgctgttttggttactgtagccttgtagtatagtttgaagtcaggtagtgtgatgcctccagctttgttcttttggcttaggattgacttggcaatgcgggctcttttttggttccatatgaactttaaagtagttttttccaattctgtgaagaaagtcattggtagcttgatggggatggcattgaatctgtaaattaccttgggcagtatggccattttcacgatattgattgttcctacccatgagcatggaatgttcttccatttgtttgtgtcctcttttatttccttgagcagtggtttgtagttctccttgaagaggtccttcacatcccttgtaagttggattcctaggtattttattctctttgaagcaattgtgaatgggagttcacccatgatttggctctctgtttgtcttttgttggtgtataagaatgcttgtgatttttgtacattgattttgtatcctgagactttgctgaagttgcttatcagcttaaggagattttgggctgagacgatggggttttctagataaacaatcatgtcatctgcaaacagggacaatttgacttcctcttttcctaattgaataccctttatttccttctcctgcctgattgccctggccagaacttccaacactgtgttgaataggagcggtgagagagggcatccctgtcttgtgccagttttcaaagggaatgcttccagtttttgcccattcagtatgatattggctgtgggtttgtcatagatagctcttattattttgaaatacgtcccatcaatacctaatttattgagagtttttagcatgaagggttgttgaattttgtcaaaggctttttctgcatctattgagataatcatgtggtttttgtctttggctctgtttatatgctggattacatttattgatttgcgtatattgaaccagccttgcatcccagggatgaagcccacttgatcatggtggataagctttttgatgtgctgctggattcggtttgccggtattttattgaggatttttgcatcaatgttcatcaaggatattggtctaaaattctcttttttggttgtgtctctgcctggctttggtatcagaatgatgctggcctcataaaatgagttagggaggattccctctttttctattgattggaatagtttcagaaggaatggtagcagttcctccttgtacctctggtagaattcggctgtgaatccatctggtcctggactctttttggttggtaaactattgattattgccacaatttcagagcctgttattggtctattcagagattcaacttcttcctggtttagtcttgggagagtgtatgtgtcgaggaatgtatccatttcttctagattttctagtttatttgcgtagaggtgtttgtagtattctctgatggtagtttgtatttctgtgggatcggtggtgatatcccctttatcattttttactgtgtctatttgattcttctctctttttttctttattagtcttgctagcggtctatcaattttgttgatcctttcaaaaaaccagctcctggattcattgattttttgaagggttttttgtgtctctatttccttcagttctgctctgattttagttattgcttgccttctgctagcttttgaatgtgtttgctcttgcttttctagttcttttaattgtgatgttagggtgtcaattttggatctttcctgctttctcttgtaggcatttagtgctataaatttccctctacacactgctttgaatgcgtcccagagattctggtatgtggtgtctttgttctcattggtttcaaagaacatctttatttctgccttcatttcgttatgtacccagtagtcattcaggagcaggttgttcagtttccatgtagttgagcggctttgagtgagattcttaatcctgagttctagtttgattgcactgtggtctgagagatagtttgttataatttctgttcttttacgtttgctgaggagagctttacttccaactatgtggtcaattttggaataggtgtggtgtggtgctgaaaaaaatgtatattctgttgatttggggtggagagttctgtagatgtctattaggtctgcttggtgcagagctgagtttcttgtattttcaaaataatgtggcaacgttctttgagagagtataccaggttaaattgctaagatgatcagtcaacaaatatttttggcagatctgcgatgcatgatgcgatattttgagaggtttgtgcaagatttttatttccctcctcctttgtaggaaaagatccactactcatacctactgacatcccctggcacttctagaaccagcttacaccccatcctctgctcacccttctcccaccttccacctgtattaacacctgacaggcacttatttccctatcaggagtctctgtagttgttttgccattgaccaagatatgtttagaacatttttaatctcttgtgcaattttggcaaacagcagcctgagctctgcttttcctaacaaataacttgcagattgtcatgtttctcttgggagaaggagaaaggttcaatcagagcagaattgaaatgatataaattaggcttattgtttagcaaatcgctggtgttaggtaagaattgtagataagaatagcctagaccctcttaaagatcagagcaggcatgtgtgcatgcatgaggaaaccaggcctttgttagtatcctttctgaaatggctattaaagtaattacagtaatttatagatttttttttcttcttccatttcaaaatgggttccattttttgccttttgtcttgagttcctcagttggagtgtgtatgtgtgtaagcatgtcttgggtagcactgccatagatagtatctatgaattatctgcacccaagctgatgaggtgtggtgaccacaggcactcacagatggatttgccagctttgctttcagggagccttggtcctttgagaataagagaattgtactgagaacactatgttttaatggttagttatagtttgtcatagcaccatttaaaattgctgtgttttatggacataaagatggcaacaatagacactaaggagtactagggcagggaaggaggggggcaagggttgaaaaactacctgtagggtactatgctcaccacctgggtgatgggatcaatagaagcccaaacatcagcatcatgcaatacccatataacaaacctgcacatataccccctgaatctaaaataaaaattaaaattaaaaagttgctgttttttatttaaagagacactttttcccatgtctttaaaaacacatccattcatacctatggattttattattatactttgttgcttttttatatcattgatgcttgtgtataagaatggcaatactttatgtgtatgacttttagagggagactttaaaaattattgaccacataagatggtatgtgcttattgtgcaagacctgtaattttaatatgctggaaagacaaaagaaattttatgcactagtctttttctgtatttgattttataaagtaacttgaatagtttcaaatcctaaggcttccttttaacaatatatgcttattttaccttgtctttgcatgaacaaaacaattagtaaaggtgactttcttcctaagaagttcattttgaatatggagattaggcaatttctaaataagccttagaattagtattgcttacaacaatagttattaatagtattatttatatataacttagttttgaatttaaccaaatgagatgtttactcacatacagacatttcacaaggcagaagacgtaacatatgttatttcccttctttaggagagtcagtcctgaaagagttaaggttttcttgttctggagatcaagcattgtaaccacagtaaccaatttactgttatttgcttagtcctagcagagaagaaaagtcagagtttggaaaaaagtctaattcatagacaagtacaactgcaattgatcccaatacattaggatcctgaactgtaattaactatttgtggttgtagggaccatggttttaatcaaatattttgcattttatttttcagatggtttgactcctcagcaacaattcaagtttaatgtaaagaaagtagaacacagtttatattttgcatttttgtaagggaacagttgacaagcacattttcaaggaagcagtaacagataggatttaggataaataatagaaaaattaaatgtacattacagaaacttcagttcctccataaaattacagtaatgttgagttttgtaaaagatgtgaatggtaaatttatgacttcccattgaaatgcaacaaatggaaaatgattgtattttgtatggtttatataaaacaacacgtgttacagctatctctaagaaatgttggaataagtaaatgagtgtatgctaactagagtggttagggcagttttgaagaaatataattttaaaattaatctgttccaagccccagctcctattctttataaattttctccctcaccttggatgctttatgaagaagttgattttattgttttgagtttacatatatatcaatgttaagataatttccctcttatatctgggagaattttgtgtaattgatatgggtagatttatgaataatatatttaacaataatcatttgaagtatttaacaaactggtaaaagataattttctttttaaaaagggcttattgagtattttgctttacttttaaatatatcagtgctggcttctatataaaatgcaccattttcctctctaccattcaatgaaatacagtttagagtctcttacggagtaaactggattagtcatctgcatactagaccttactttgcttagaattttacagtttacaaaacatttttgcaaaaacaatgcaaatatattgtttttgcaatatatatttgcaaatatttgcatatatatatattttttttcttagagatagctgtaacacatgttgttttatataaatcatacaaaatacaatcattttccatttgttgcatttcaatgggaatagtcataaatttaccattcacatcttttacaaaactcaacgttactgtaattttatggaggaactgaagtttctgtaacgtacatttaatttttctattatttatcctaaatcctatctgttactgcttccttgaaaatgtgcttgtcaactgttcccttacaaaaatgcaaaatataaattgcaatatatattcttataatctctactattgccttggacagtaattgaagccaacattatcgttttggaccagtgcagtagcctcctaacctctctgatctcctttcaccctgacttcctcttctcttccacgtaccccgctctcatcccagttagaatgaccctttagaatgtataaatcagattatgctacattttgctcagaaccatttaatgattttcgatctcacttagagtagaattcagagtgcttgtcatgggtgtcgaccctgcctgttcctggcctcatttttcattccttttctctaccttccttgactctggccatattagcttcagtgctgtgctttcaacttgtagtttccctaataggagtttttgtccctgtcttcctctgcatgccaatctctcactgatattccaagtctgcctggactcctcttgatttctgcttggatgccatgttgtcagagaagccttccctcaatgaccctgtctcaaatagcacctttcttcttctgtatctattatgctgttttgtttttctttattagcacttaatacttcctaacattatgtatttctttactgtcttccttccatgagaatccacgctctgtgaggatgggaactttgtactttgtcctcagaattctcaggacctaatttttgcatataatagtccatgtaattgtttaaaaaatgaaaattcaaagaactaaggctgaacaggcgtagaaatcacattttcaaatagatgaccaggagcaggtttgggatatagtgtggggaggcagtttggactcagcaaatgctggttattttgaattattttagacccttctgattgctcatgtattgtatgacactttttaaaatctgtatttatggataacattagggacaaacacctacctgtctctagtgtcttctctcccacttgtgctactagcctactttttgattgctcttctcatcagatatgattggaatcatcttttaggaaaatacactttgatttataactcagaacatagtaagaatacctttgcataagccctactatgaaaatgttatgattttattgtggtctgtatttctaagaagttacccatagccggaatttgctcagtatgctttctgtcttcttgggtgtatttcagtattactcttcagttattcacacttgggagtaagggcaaaaaagtgtgccgaatccttccagtaagaaattgtggcatttctcagtgctttcacagatcagcaactctttccgcttatgacagtattttgggaagaaatatttcactgaatgttctctatatgtctaaaaatgccaatgtacatcctcagaatgggtaatttcctttctaacacaaatagctattacccaaatgtctggatttccacaagcctgaggttctcaaatcttcctgattttgtttatggaggatgattttgttgggtaacttaaaaatccaggggttaaagtaactttgttcgtaaatacggataaaaaaagtgtcgtataatacgtgagcaatcaggaaattaagtgtactgcataaaagtatgttttagttatcagaaatttaatcactaatcttggacagttttataaaatttcctcttttcaatgaagtctgttatattaaatattgatcatggatctagctaataataatgatagtggtaataattgaatggtcaggtgacagaaaccatcctaagacttaacaaaatgttatctcttttaatccccaaaacattttataaagtgaatcctcttaatcctattttgagttgaggaaaatgagatttaagcttctttatgtaaatggagctggaggagccaggattggaatccaggaactcctaattctcaaacccaggatctctacacaaggaaacctccatgacttggctgaggttcttaatgatgatcccattttctctgtcataatacagtgctgccttctgagtctactaaagcatgtaatcctctttgtttacctccccattttaaagtcccagatatcaagtaattctgcttacttggctgtctcttctagttatttcttagggcttcagtttctggcaggtgccctcaatgtgtagactctgttagctccctgtcatctgaggagaggaatcaaataaacaccatggttaaattagggaggctaattttttctatttaaaaatctttctggcttgcaggtttctccacttctcttgggaaaagttttatgacagcatgtttcccagaagcctgcatgctggagcaagaagcagcattgtcatatttaactcttctaagagaaatttacttttttcccacttgtttgttcagcagaaattctggaatttatgtggctttgctagctagaaaaaactcttccagtaactaaatatgtggtctgataatctcctgacatacagttttcttcttatttgaccttttctttaaggaatattattgaatgacacaatctcttgagaaattttgctgaaatgctgagataggattctatagatagcaattacagctgttgatatgttttctagctttgggactaatgtgagtgagttacaaggggagttgaaagccttgagagtttacacgtgtggtttgatgggatgacaagcattaattaagatttttaatatggaggtgatttattgaaaatagattctggatgaactctttggcctcagaggtgaggtaatagaataatttcctctttaagttacctgtataagcacagaatagattattagtgatggaacatcttcatcattctgtggtagtctggctgccagatgtgatattttattatattagttagttcttaagtaggcaagtggccatttctcaaaagcagaattgtgtggatatttatgactccctttccaagcatattccttttttccccgagacatggcataattgtaaaactttgccttttgtataataaaacttgcctaccgttctgtggttagggttagggaagtgggcagtttgctaactatttgcctggggtctggtaggaatttaagttgaaccagaggaattcggatatttgggggtttgccttcaagaaaaatgatgcctcttctcttacctccacctaagggaataaattctaagcccaggagaggagggttatgttaaatatgcctgggccatggcccagagaccgcaaggagaggatggcatacataatgggggtgggtaaaacaggagtgtgtatgtgatatggaaaagagaagtgagtagatagcaatgcctctgtgagaacaagaaggaagccaaaggattacatctgaacattgcatgatgtatccttggcagcagctttgctcagtgaagatgataaataaacctaatggtatgttcattcctgttgtagataaagttcactttcagattggtgaagtctaagaattaaagtccagaaaaacaactttgaataagttgcacagaacattatcagtttacccagtagagaccaaataactttgatggttagaaatcatttgaaataggagtagacagatcattttttttcccctggagctagaactcatttaaatatactgaacatttaaaagtattgtgccatctggctagcacccagtcctcctgatttcaggccaataatctttctgctacactactttaatgtgtatgttggggctgtgggggtcaaggagtcagagagagagtaatgaaaggaaacataaggtttatatgaatttaaaagaaggtgactaagaacatgtgttattctctactcttagatcatcatccttccaggcatagtggcccatgcctgtaatcccagtactttgggaggctggggcaggaggatcacttgaatccagacttagagactggcctcagcaacatagtgagaccctgtctctacaaaaaattaaaaaaattagccaggaattgtggtgcatgcttgtggtcccagctacttgggcagctgaagtcggaggatcacttgagcctgggaggtcaaggctgcagtgagccatgattgcaccactgaactccagcctggtgtcaaagtgagccactgtgatatgctttggctctgtatccctacccaaatctcatcttgaattgtaatcctcatatgtcgagggagggaactgtaatccccacatgtcgagagagggaggtgattggatcaagagggtggtttccccattctgttctcatgatagtgagtttcatgagctctgatggttttataagtgtttgacagtttctccttcacacactctcctgctgccttgtgaagaggctgtctacttccccttcagccatgattgtaagtttcctgaggcctccctagccatgtggaactgagagtcagttaaacttcctttgtttataaattatccaatcttgggtagtatctttatagcaatgtgagaatgggctaacacaccctctatcaaaaaaaaaaaaaaaaaagatcgtcatcttgttcctctatattctgcttccttgtggtcttattgaaattcagagttttgcaaaacatttcttgccaacttggatgttatcatgtggtcatttagtctgctgataattgagagccatttaatattttgaagcagtgaaataacttagtcacttttatgttttaggaaaaaaaaagacactggctgaaaggcagagattaaattggaattgagagagtttgtagaaatgaacaacatttaggacaagtgcaagtcaagaccctaaccaaggcagtgacacgaaaaatgcagagaggtggtaaatgtacctgaaaaataatttcaggtagagtgtgtagattttgccaggtggttgtacatggatgatagtgtaaagtgcagtattggatggatctgaaatttctaatgtggttaaggaagtaagtgacttcataaaactagaactagccctgccatattcccctctctcatcacccaccagtagctcactgccaagtcctgttgatggtcgttataaaatatatagtgaatcctccttacttacttaactgccatcatgctagtccaagctgccatctcctgcctggacttctgcaatgtcctcttaattgatgtcctggcacctgctattcccccttcccatgcattctcctatgactgtgccagtcatcctatgcgtacgtccgatcatgttactctcctacttagtattctgtcatgagttcttattgctcttaagatgaagatcaaaatctttaccatggcctacaaagctttatactttgggcactgcctgccgcctcagcctcatctcaaaccactttattatgtgtacatggggctctagcagttatattcatccttctaggtgcccagatcttttcagacttgcaacatctgcacttctattacctgctggagatgctttaacctgtcctcttcatggggtcaacttctcctccccctcaggtttctgataaattatttttttcctcagagatgccatcatcccctggaccagtcttgcccattttcttccatactttaccttctctatataattatttttttagcgagttagctccatgcgaacagggattatgttctatattttaaaaattgccaagtcctcagtgcagtgtctaatacatagcagctggttgataaatttatttggggcagatgaatagtggctttaacagaactgatatgcattggtcataggggtcattaagaatatttagtgagctgtctactcactagccatcacgtatgtgtcttaacagatgacataatggcaagtcgtgttttacttggctgtttttgtgaggaccagaataatatagtgaaacatggaacattctgatgatctgatagaaaagtaaagttcagaaactctagaaaactgaagacgtgtctggtaataacatggctggtaatctttgccttttgttatttcctaccaaccactgtattaaataaccagggcttcatcattacaatcaaatgcctccttaaggaagcccagggttgtgaggctagtaagtggtagagtggatggtattcgaggccaggtcccactccaacacctgggctcagacacttgcctattgaaactagaaatcataaagtgtttttgcaaaaatgttttgtaaactgtaaaattctaagcaaagtaaggtcttgcatgcagatgactaatccagcttactctgtaagacactctaaactctatttcattgagtggtagagaggaaaatggtgcattttatataaaaggccccattgaatgaattgggttgagctgttttgtgaaggcttgattgtgattgcatggctgttatttggcaagcagagaattcctaatttcctctgctgtgagactcccaaggagacatttatattagtaaaactgaatttgcaaacctgcattttaaaatttagctttatttgtattccatgtctctctgggaggtgttcagtacattatgaaattctgtgcttttacctcctgctaaggatttgagttcttagcctaattaatcattaagtgttgtcagtctatcatgatgtggttaattatcagagagagtgtatgtgtttcagacagtcatgaccctttcctgggtaactatagaaaccttaacagtactagttattatctaaaattatagaatttggttttaaagcagtttggcctttgatagttatgggcaaataatcggttatcatctagaaagaaaggaaagcctgcatgaaacagattttttaaataatttatacataatagaagtgtgttctaaataatttataaataacagaaatgtgttctatagaatatttctgattatatcttaaaaggctttcccccacactagttctgtttatttgttatgaagctttctcacaaacaatctctttttcccccaagaatgtttagaacgattttaatccaagactagggtaattcttaagactgccatttggtacagtgatcttatagtgcatagaagctacgtatctgagtggaaaaacagacgcatttgggggcatatacatatctgtgcagttacagagaccagtattgacaatgtgaagtatcattggtggattcttgaagccgtagctctttaaagatgggagcaaaagaagaacatgtccttttccttttttcaattctgagaagttccatctgagccagaaagaaaaaaaaaaagatatgtcattgcacctttaaatgtgaagctcggcaaggattgctgtctgaatgggggtgaccatcaatatggaaaatggaaatctgtcatattttgtacaatgctttgcatatcacatcattcagagaacaggtaaagtcccctttggagaaggcagtgcttgaagagggttttccactctcattggtagggtggattttagtggtatgtaatgataatgatttgcttccatgttacaacatgtgaacagcttatttatagatcatgagctgcatccctctttcctctttttgtgcatgtttgctttcaaggagaatatagtgacaaaaattttaatctgccttttagctcaatgctaggttcttggtaatttgttgagcaaattaatgactttcatgtacatttacagataatataagcaaagtatcataatattggcacaaaaaaacattaaggttcaacttaattctgtttttcaaaatatattttaataaaactatacatgtaaacatctgtacttgattttaatcattttgtctttatactgcataagcttaattcataaagctagtctgtttccacaattgactgtatcacagaataaaactagctttaatgttgatgtttacttttcatatcaaaatgcaaattaaagattttggcaataaggattcagctgtcaacttatttgatgtacaagaatggcaataattgctttccattgttgagcttttactaaaaacactgaagtataatttgtttttgatagaaatattagtagctacagatattaatgatttattggtttgaaaaagatgctttttaaaaggtttctaacctgtagtaaccaagtccagtaggtatgcataatggacatacctagccagaacatcatacatgctctttgcatcttaatatatatatttttagtatgattttgctttgttgaaacaaagtgcttaaccggctgtttatttgttgttattgtggcattataaattgtgccatttcagatctcttattatgtgctaatagtttttccagcttttattatcagattctgctcttaatatttatcttgttcttttttactctacaagttttcaagctaataatgatgttagaagtttacttgatgagaaacaatgaaaattaaatctcttatttaaaacaacaaaagtcacaaattctgtgagctgagagcgtgttaggctctggaatggagagtgtaatatcactggtttccttatgccagaatgctgatcagcctaattatccaagaatcttctggttctctggcatgctacagctgtgactttctctttgtctctgaaataactgtctgccacactgcatatgcatgagagaatgttttttatatcagtaattcacttatgagtttcattccttgttaaaatgatggtgtttgcttaatttaaatattgtgtatgtgttgtatatgttatataatatataccatcacatatgtattacatgttatatattcatgtcacatatatgtattgtgtgtaatatagacacattacacataagtattatatatgtaatatacacattacatatattatgtaatatatagtatattcatgttatatagtatgtatgtaatcggtatattattacatatatgtaatatatataaaatgtataaatagctatatacgtagatacatctgtgtattaagacactccttgttgtttatctgcttgagtagagtatgccatccatccatttgtaggacattaaaaaccagccatataaaaatgaaattcagtgcaagtaaagctatttcttatatttttgtaaaaatgtatattttcactatatctttttcaaataggcaatgtattatttatctcttacagttttcttactttacttggttaagtatggctgtttctaatgcagtgttttaattttttatttccatactgttggttattaatgataattggagccacacaaaatgctgttcagttcaaatttctgacaagaaagtgggttttctgacaaggagagtgggtcttccagatctattattctttatcactttcaaaagagtgcttattccttgaaaatttctgttctatctacctgttgtattttcaacaggaatttgaattcaacaggaagttatctgtgccataaactctacttttcctgctaagctgctttgtcactggaagaatttcaactgactaggcaacttgatttgtctttcaatgatttcatatctgagctcttcatgcaatggagacaatgcagtttagaacatggttgtgacgttatagaatgatcaaactgacccaaatggagggaacctggtgtaatcataatcagtgtatattagtcaggaatagttgttggtaatgcttctttttctgacttgtagacagcagtcatcttgctgtgtccttatgtggcctgttctctgtgtgggtatggaaagagagagagatctttaaagtcggttcttttcttctaaggggaccaatcttacaggatttgggccccacccatattacttcatttaaccttaattacctccctcaagggcctatctccagatatagattagggcttcaacactgaattttgaggaacagaattcagtccaaaacacagtacaaatacctacagagcactttctatagattggtgcaaaagtaattgtggtttttgccattgaaaataatggtaaaaagaacattacttttgcatcagcctaatatgtgccgaacactcatttagggacaacctactttacaaaggaggaaactgaaatcccaagaggttaaatgtctcactcaaaggcacagtagtaagggacagagttgagattcaaacctaagcagcctggcttcagggtccatatccttacctattagctattctgcctctaaaattgtggagacatatttagagcttttccttgctaaatttacttagggtatcatcttcgatgagatttcttttggctttttggaatacagtataaaaactagtttccagcgtttttttttctttgtaattcattctttacctattgtaacagttaagagagcagactctagagactgagttcctgggttcagaagtgtatttttctggaaaaaagagagaatagaatcaacgacctagttgggatgttgtgatactaaaatgaaagaacacatagaaagggcttagatgtgggctgtctgcacacttgataagcgagtgattgttaaagcaggagtagtaaataaagtgtgatctacctacctgcattagggaaggcttaccttttgctttgttgtaaatcctacatgcctactctaactagtggcaacacaggccttcttcacagagttcttatgctctggcaaacctgtcagttagatctttactaaatggatttttttttcaacttttttgtccttaaatgactttgaagatgcgagggctatatttttgttcgtttttggcttgtagattattggattcctgttaaaccagatgatccttttaagttgcatgcttaaaggacaaactatacccttctggtatacaaatagtatacagaatagtacttgcccaatgtggggacatggcatgtaagcattcatgtggtgtgttaaatgccacggatggaggaactaattttactttggggtattggaaaccaacagtaagaagagaaatcatttgtgttacgtactgaaggttgatgttgggtaccaagtttaatgttgttggaaccaaactaccaaggctaacattgcttctgggggcaattgtttctgtttaaggccacttatttacaaatgtgactttggtacctagcccatttataagttgatacgattatttttataactacttatttgttacccacctttccttgacaaagatgagattgctggtcaagttaacaatgagatttttcatcaatgatttaacatttgatttatactgttctatcagcattctttctcaaggtctactttgacaaaagccgtgtatttttacgtcttgtgttaagagttcagtctatgaccatgaaagaaattaaagctatggagcttccatgaaaatcaaactcctaactttggtctaacaattaaaaaattaactacagtaaccataaaactctaataatcaatagtagtatagagaataaattatgaaacagataaactgaaagaatatatacccaaactctaaaagtgtgattgttttactcactgaacatatgaaaagaaattatttttctaaatgcttaatcagtttttaactaatgaattttcattagtctttgatggttccttcttgtaatgctcctttcatcattgaaacttctctaacctacctgtttccctaggaattatataaatgcatctgttccccgtgtaatctggcacctctctatctctctaacatacttttcccccagcccctcctttaaactgtagatttccatcagctgaattatgtgccagcccctgctcttacctctgctcttggctgtctcaccttcgccattccaaacatgacagctcttcccctttctggactcagcttagaagtcaagtctccgtgtccatccttccttaatatgacactttaaggttggatagatactcctgccataacctaccaaacccataaaaatacttgctgttctcagaacccttatgagagttatgtgtattggtctctagtccccttatctaggccactggactgcttttcatccattattttatcccagtcacttgggcccagtgcccgacatgcaggaagcactcaagaaatagatatgtgttgaataacttagtaagttttatttatttttacctttttcccccatattgttttaattattgaactgatagccagggtcttcactgggtaccattcaaatatcaaaatgggttgggtgtggtggctcacgcctataatctcagcactttgggaggccaaggcaggagaatcatgaggtcaggagtttgaggccagcctggccaacatggtgaaacccccatctctacgaaaaatacaaaaaaatagctgggcgtaggggtgggtgcctgtaatcccagccactcaggaggctgtggcaggagaatcacttgaacccgggaggtggaggttgcagtgagccaagattgcaccagtgcacaccagcccaggtgacagagtgagactccatctcaaaaaaaaaaaaaaaaaaagtagatgtttgaaaccaacgaatcgctattctctttattttgggcatcacataaatcatatgaggacgaggttatgcaggtgacaatagaaactggtagatggtataggataacaggcacagtttgattctatgggattttacattcaggaaattcatggtgtcttttatgtagacttaatttcctactcctggagtttctttattttgaattctgttggaatctgtaaaatgagttcctgtcaaacaaaggatggctttcttgtgcaaggtgccttgagcatgtcttctgtttgcttgcttttggtcctatgaattactgcagcccggagctccagtgacttgcatacacttcagagtccacacagtggcctgaattgactgccatctcatcggatggcaataagcttaacaatctgaaaaattcctgcactgcaggattaccaggggaggtcactggaacttcatctggctaataagttttttgtcctgtttccccttgtcagtgttcctctgagctccttaggttggatttccttttttaacttaaataaaaatcattaacactgattttctttagtgagcgaataacaaaacaccgtatctaaaacaagagtcatttcagagatggtgtatgacattaccaccaatgcaatgagaaaccgtattcatcatgatacagatgccctggggatcaaatactgtgaaaatcacaagcatttcgctctcattctcaatgtaataaagatgaaaaatatcaataaaactaaaaagcatttgccagtcgtacactctggaataatcgtgacttaaagacctgcttagttctctggacgtatgggatgtcaatgttttgtttctttagagtctagatcaacaacacgtactttttttgttgttaacatagctttttatatggctttattaaagttgaaagcagaaatcatttttattgcagcctaggagttactcagcacatctttttgaatccccttcatgtgctatttaggaagactacacaactcagagtgctgccattcctcagccttggagtaagagatcacttcacctggggcatgtttgacttgctgccccagggctaccttggcactcatccgtgaaagtacctgatattctgtttcatggtttatcctacccctcacctgttagagacccctcaacttctgtcagccttttgtgtgttagggagaaaatctgcttgctacatatcatcaggtgtgaaggtaggaatgtgaggaggaggtgtatctccagcccagttgagaaattatgttgtgaaatatatagtctcagcaccattgccactggaggtggcaattctggaaggcagtctataactcagagttttatctagtcatacttgatctcacctcttagaaaacaggatttctggagagtcgacatgatactagcaaaggtaggccttgtttcccatgaccatgtaagtgaaagagttctattttcacattttagtgtagccaattcatgttcaggtatcagaaatttagaccatcagtatatttctaataggtggaatgtaactctcctctaccactgttcaaggataaaatatactgtaaatttatcagctgtctttaaaggaaaatgactttaagctggactcttaacaccaactttttgggcagggttgaatatatggacagtagtattctattttctcgctcctgtagaccttgggtgggttgtcccattttccagttttctgtcatggcagagtgtggctattgaactggatttgtccattgatcctaccagacggagctcctgggggcctcctgatcatcatctctgcacttccgtacagtatctggtctgtattagatgtttaatccatgttttgtgaataaacttcctttcataataactcctgaatgatgtgtgtgtccagttggctagaaattatgttttgtaatggttatgctcatgagaatcccatgtgtctagctgaatatccacttgtattttactggatgtactgggacagtagaatacatatagtttaatggactctgttggaaaggcaaacacccttaacagggaaagtggctgagatacgctgatacttttcaaagaagatagccactgccttccagcctgacattctgtttcaacagaatctatggaacatattcttcctcaacagccctacactgttatctcatagggattgtctagttcctttgcaaaagacagaggcatagacctcacattgtacaaaaatgacaagctgcctgttactctgtggataattttgtcattcacgtagcagagttcttaatcagacctaaattattttgaagatattataagccacccaggtgcagatgatcttttcttatgttttatcaaatattttagttcaaataactttaacagtctttggatgtcccatcatttctgatggtaagatttctttaagatagaaaaatgtgtgaactcacagcaaggaatccagaatcgtagctccagatcttctactaattattacatggtccagcacaaatcacttaaaggtactgggcactggatttgtcaccttaaaatattgaggtgagatgattgcaaattaggaaggaaaagacaagatatgtaaattatgatgcaagttagaataatagcaaaataattatggatatatttttcaaatatgaagatcatagtatatttgacagcattttgcatagtatttttatacaacattatgtatattatattgtataatgtgatgtagagcatttcctctactgctgtatctcatgaattaaaatatagatttttagaactttagacgaatttgtcatacattcacttacatttttatcacttgttcctgttaggcagttgtcatgttctattattaaatggaatataattttattactattgctattattattttatagtcagggcctctctctgtcatccaggctggagtgaagtggtgcaatcatagctcactgcagcctctaagtcctgggctcaagcagtcttcttgcctcagcctccagagtagctgggaccataggtgtgcaccaccatgactggctaatttttatgtttttaatttttcatagagatggggtctcatttggtctcgaaatcctggtttcaggtgattctctctccttagcctcccaaagctctgggttaacaggcatgagccaccacaccgagtctggaatatgttttttgagtaggtgaaatgatttttattttgtgacaaagtattaatgtttgaaatcagcttttaagatactgtaacaattatgtcaaccacaatgtagcaaaaattggaagatgttttatatttatttaaaatccatcagaagtagtaaaatccttaaaactcacatacataaaacaactgtataatttaggaaagtgatgtcatgaaggtttgattttaattctgcaatgaagcaagaactactgggaaagccatcagcctgaattctgcaatttttttaagatgaaaattaaatgtttaaactttagataaaatacctttctaaatctagtctatttgttctcggaaatttttagtctgttacattattcttgtcaatattagttttagtgctccatatcattacacatgttatttcattaaccttgtctacataccaagaacctgtgacctcctcaagtcctttacataaattctctaacttggtgaaggtgaatttttagttttcttcttttttttttttttttaagacagagtcttgctctgtcacccaggctggagtgcagtggcgcgatctcggctcactgcaagctccacctcccgggttcacgccattctcctgcctcagcctcctgagtagctgggactacaggtgcctgccaccgcacctggctaattttttgtatttttagtagagacagggtttcaccgtgttagccaggatggtctcgatctcctgatctcgtgatccacctgccttggcctcccagagtgctgggattacaggcataagccaccatgcccagcctctgatgtttttataaaatagttcatggaacaatttagacctcttgagttgcatttttctaccagctctttatctctggttgtttgttttgcagttaaaaacaagatagtcagggtcctgtttgaaaacttgctttctagtcttgagtacctggaattctgcctaactgtttcatgaagaggggttttttatagtctcttcaattgaagttagttaactcacagctctgtttttgataaaccagcaaaatctttgaatcattaaataacttcaagcgttgggaattatttcatttgcagttgaagttcagggaagagattaagacgtggtgtgttataagaagtgttctgggtgctgatgtttacattctggtaccagtgactgactgaatgaattttataatgtggagttgacaccacctgttcccaaaagcaccatctaagagtctgccaatttagtagacccgtatggatgaggcatcctctgaaatagccaattactataacagagaatgagtttttcctaaaatcctggcctctaggttgttgtttttattttttacttcgtatttcgtctttgtcagcatcctgtagagtctagaaaatgaaaacactgtccgcttattatttgagtttatagtataaaagaaaatgggctgggtgtggtggctcacgcctgtaataccagccctttgggaggctgaggcaggcagatcacctgaagtcaggacttcgagaccagccgggccaacatggtgaaaccctgtctctactaataatacaaaaattagctggacacagtggtgcatgcctgtaattccagctactcgggaggctgaggcaggagaatcacttgaacccgggaagcagaggttgctgtgagccaagatgacgccaccgccctccagccaaggtagcagatctagactctgtctcaaaaaaataaaaaaaggataaaaaaaaaaatgcctcttcatgttagaatcagagcaagcccaaaggctttcctttagtcatttggtggttgtgacattgtggacactggggtactgcaacaatcaaacttttaagttgacccttgaccacagtgaaaatcatagcaattacttttgatctacatttaggtctcattctccatagaattgtttcataatatcactttatgtagtattgtttcctattgatatcttcttagccatattatatcattcccctcatagttataaaatgagttgctattcatgataataatcctggtgcagtagtaaggaaacattggtggtttacagaatgaatttctaacatagttctcattgttttactctacttcccaaaataaaagtttcaaagaatcagaagattttaggtattggatgaatctcagaaaccattttggagaatgaggcttactttgctgttgaagaaaggactctttttcagtggcttacctgaacttagtgagttcttgacagtaataactattgattccagttttctgattacttttaattaaattgttctttttgaattgcctcacccttttaaaataaggattgtgcccataatcagattttgcaagggccagagccattatttcattaaccttgtctacatacctattattacatcccgattattgtagtagtagaaactggaattgcctagttatgatctcaacttgattttcactatttctatttgcctatgtatttattaatccacatcgcttatgcactttagaacagagagtgaggagctttgtatgtggatgtgtttaaaagttcctaatgttgataatcgttggtggtaccttatactgtctaaaatttatttttatcacatttactaaaatgcatacagggatatggcttcagaaagaatgctagactcttttacatttaacaaaaagttctctggagctcatgcccttgggaaacttgataatgaaagtcagaagagtgttacaaatctaatttagaaagattttaccaatttggtaaatagaaaaattctgaatagtgaatctggtagcaaatatacatttattagacttttgattggttatggatatgtgctgaactttatgggtaaaagcacaaatatcagaacatattgtatttcacctatcatattttttcttaaagtgcttaaaatattatccctttgaacctgcttcactgtttttgcttgttaaagaatatagcaataatggctttaaacttgaaatcttaaaataaatcactgggaccagaacttttgtatttcttctcaagttttatattgaccaaagaacaataatatgtatgctttattttcatagtgctgtataataaagaaaaccagacaaattcctgagtttccctttcaagtaagaccatttttttttaatagctagagaaactgaagaagaaaacatttggaatttaggacttcccagcattctatctccaccactgtccattcttcagatttcaacactaccaccaacacccccacaccaaatacatgtacttcaaatattgtacctaaaataaaaactcagtcctatgatgaagtcctgggctttcttaagtagtcaattagaaaggtcagtggtttctaatgcagagagtttatgacctggtgtgtttcagctaatttcgattctttcagatgtcttctgcgcaaattgcttgattacctcctacatctctcttaatctgggttactgaacataataataaggctttacctatttttttttttttatagacccgttcatcacctgaatcttttagcacttcaccaacagctggtaacaagcagaatcactgacattcttttagatttctttaggctgctttttaatcctccctgattgtcatgagcaggaataaggaagggagaaggaagaccaattttttgtttaatccaaggtgatcaaaagaagtccccagtaatagtacagactgactttgacagtgatttgtatttgcaaaatatatgaggcttgctgtattccactttttctcttttttttcctctttgacaaaaacaaagttttcgtttcatccagaatatttcatttatattttagaggactatttcccagtccctttatcatgggaatggcttgtctattctctgctacttcatttgacttttaaagagtctcagcctttcttgaaaattaacagattatttaattagttatacatgttttgttttgttttgtttttcagtcgtaatataaatatatatgcttgtaggattgtaaatctggaaggtagccctttaagtgagggtattcccagtcgaatctgttatctttttaatattctcacttatcattgaccttttttatttttatttttttggtgagaaagcgtctcacactgtcacccaggctggagtgcaatggcgtgacctcggatcactgcaacttctgcctcccaggttcaagtgattctcctgcctcagcctctggagtagctgggattacaggtgcccaccaccaagcctggccaattttttgtatttttagttgagatggggtttcactgtgttggccaggctggtcttgaactcctgacttcatgatccacccacttcggcctcccaaagtgctgggattacaggtgtgagccaccacgcccggccatcattgacctttttcagtataaatgccctcttatttcctttttatcattacacatgtcaaaataaatttctgagactgcagtttttactatcactgaatagtctcatagagaggcatgtttgcaagtagtattacaaatcataactttttttctggcactttattatagggccttggagattaccttggatttgtgtaatctcaatatggatgtgttcaaagctaaaggaatttatttgatgcgaggggagattgaaataggctttactacagttacaggtagttagtagacttggataaaagaaatgagggtactttggggtttcataaatgttggtaatgttcaaagcaacattgctttacttttctgaaggtcagaacattcctatacaaaatttaagtcagttttgatagagatttagagagacttaaatctctataaatttcatgtaatgaaaatacgttgttacctcaaggaaaaatgaattatattattacaagattgtttttaagtttgatatttataatacattaatgaaagtaacgtgaacccttgatgtcatgatgcactagcgtatggtgctccattgttttgactgtgtctgcatgagtgggctggtagtggtttatcaaatggctttcagggccaggatgaggtggagtggaactggcttgtagtatttgctgattaccgtggtggaaacactttgacgtggacaattccagcctaccaatgtggtgcaccccagggcactattatatggtcttcccagtgtataattgtagatataaatgaccttgagcacagataacagtaacatgtagtcaaataatcaggtagtgatgagttctgagtctttattacatttgttttttaacaatttaattgtaatataaaatgtttaataatgaatatggtttaatgactggctcacaaaatacatgaaagtttaagtttcctctcctgagttggtacaagccagcttcagcacaccgctgaaaatatattgcgacactgagttctattatacatgtggtttctttccttgattatggcccttgcctttgaaaatgctgctgtttcctctctctagataatttattattcttatcatcattaatataaattctaataagctgtttatgtttgagaatattcttgtttctgcataaagttagttaaagattggtgtcattgtccctcagaaccttagaactcagtatagatagagaaagtagatagaaatattcaaaatgtaaacattaaacaatgatcgggttaaatgcttatattttgtcttgctggttaggaattgaaaagtttaagctagagcttaagcttaggttaggaaaataggttctcttccattctgattagtccagtaatacttctggtggattaaagtaagattttgttaagccctgtcccctttctccctcaatttttgggcaaacagattgatagtgattgagtcattttgatagtgattggagacattccttcaccactgcaaacaggaagggtctgtgagtcattttgttatatatggagttgcttccaaaagcaagagacactaccatggtttgccaagggtggacttctgagatgactggtcacgtttgaggatttggggcttatttggaacaatcaaaggaagcaggagttgcctttatactgaggagaaatgttcaacagaagggtcaaggctgacagtaagatatcagtctggccacttgtcaccatagtttatgaatttatttctgttacagagtacttggtatcagctggaactttctccaaagatggacattctaaagaaatttccaaactttcatcaggttagatcattggagaacttattaactgagcctgccaagcaacacatttctgaactccattttaatatttaagctcgtattgagacaattataggcaccagttgaataaagaaagaaaacatttcctactttacatttgatattttcttctattataatcaatgtgaaaatcatttttagtttactaacaggaagtaatttctttcccttaaaattcccttattttaaaagaaagattgtgtataacatatgaatcctgtcatttttgtcttgttggtcaggaatcgaaaataaaatttaacaggttttaacaagtgtgattgagatttgtttcctaatcactctacatgttttttctcttttgcatatatgtcattatttataagcaacttcaaatagaacagaaggtagggcataaattatcaacaactttagtccaaaaagatgttaatgaaaaaagtaacaatatttgtgatataatatatgccgtgctggtgagtattgttggttgtcttataatcccaattgctgtgtgtagttactgttccctctcctttcctctaccagggtggtcttgcaatatgatcaaatggttatgttcagaagtacagttagcctggtatttcacagggagcaatatgacactgcataagcagggaaaatatcatagatgggaagatatattatctggcaaaagagtgatagtccttcttgggaaaagaacattgatctcacttggaaaatgccacagtcagaaagctcgcagtcctccaatacatggaccagagaaagaaatttcttcatcccctgggccaagaggcaaagaagttgtttcaaagcctaacaagctcagtggccactttgtccttctgaacatctcaacgtagaccatgaatgtgaaactagggtgcccagcacaaagtgagctgttgtgattcttcattctcattgccaaaattcagacatgcagaatgagcatcaccagagaaggagcaccctaacaaaattaagattcattgcattacatgtcacacaagttcttgtgaagcctagaggttcattagcttttctactgtccagtttctggatgactttttgtggtcagcatacttacgtcgttggttttcagtttctgctcttgtgtattcgaatccaggtactatgttttgagtaaccatatgcctctggctatgctaaatttagacctatttgcatttttctttgactgtacattaaactattcattagattaagaagtttattcatgcctgtaatcttagcactttgggaggtggaagtgggtggatcatttcaggtctggagttcgagaccagcctggccaatatggtgaaacctcgcctctactaaaaatacaaaaattagctgggcatggtggtgggtgcctgtagtcccagctactcgggaggctgaggcaggagaatcgcttgaaccgaggaggtggaggttatagtgagcagagatcatgccactgcactccagcctgagagacagagcgagactctgtctcaaaaaaaaaaaaaaaaaaaaagtttatgctatagaattgtaagctttcatagaaaaataaatggattagtatatcattaataattaacaacttagaattataacatatgaaataactttttcaattaaaatttggttatgggactcgaggtataacattttattgtattttatgtttaaatggattacaaaagtacatgctcacactttactgatgaacaagtttattacctcaaagaaaatgtaatcagttcaaaaacattttgtatcatgaggagctaaacatgtcttattttctttggttgtattgttattgtattatgctgttctcataaaggaaaattattaaagtgcatattgcaccaggaaactagacctgtacataacactgacttactagaaaattgcattaaaaattgtttgggcaatgatattaaaaattattataaacagataccactattttactgttcttcaaagcttccttcatttgtaaaatacatatattttatataaacatattgaacatcatacatttctgaatttaaattaaaattttttaaatgacgtttattgccaaattagtgcttctacaacagaagactttttttggaagaatgtcattgaaccaatgagataggagaaattctctctataatttgaaaccccattactttagttgacttaaaacgcaatttgaaatcacattactttaggtgagttaaaatgctaaggatgccatttttaaatttatataattatcttgggatatatagtcacatgaaaggatactgatactgactatattgggagcaagattgtggaatagaatccttcagcaattgtcctccctgtaggaacaacagatagaacaactatccactcaagaaagtaccttcataagaatcaaaaatcaggcgagcaatcccactatttggttttaatatcacagaaaaggaagaggcactggagagggtaggaaggacagtcttgaattgcccacaccactactccctcatcccccagcagccgctgcttggcaccaggagagaatctgtatgcttgagggagagagaacgcggttcctttgggacttggcgttggaactcagtgctgcctgtcacagcagaaagcaacaaggggcagaattcaggtggcactcatggagggagcatttagaccagccctggctggtggagaatggtccatcccctgagcttctgccagcccccccacagcaggctaaagcactccggggttctaaataaacttgaaaggcagtctaggccacaaggactgcaattcctggggaagtcccagtgatgtgctgggttcagagtcagtggaattggaggcgcaggccacctacggaggcaccagaggaacagcgaagggagcgcttgccatcactcctgcccttagccccaggcagcacaactcacagctctaggggagaatccatcctgcttgaggaggttgggggagagtaaagaggactttctattacaacttggataccagctcagccacagtatgatagggcactgggcagtcttgaggcctccattcccggccctagttcccaggtgacatttctaaacacaccttgggccagaagggaacccgatgccttgaagggaaggatccagtcctggcaagatgcatcattaaggagccgttggtccttgaataaatgtcagctgtagccagttagtacttgccatgggccttggttgagactcagaggcatgctagcttcaggtgtagcccagcgcattcccgcctttcttggccacagggaaagactccttatgcttgaggaaaggagaaggaagagtaaaggggacttttcctttactcaccagctcagccacagcgaagtggagcagcaaatggggaccctgagtccaggctttggctcctggacattatttttggacctgctatgggccagacgggagcccactaccctgaagggagagacccagacctggaagcattcaccacaagctgcctgaaaagcccatgggcctcgagggaacatctgcagtagccaggcagtacttgccctgggcctgggtcgctggtggctgcagggaaactccctctgcatgaagaaaggacagggaagagtggggaggactttgtcatgtggcttgaatgccagcacagctgcagtagaatagagcaccaggtagattcctaaggtttctgactccaggtgctggcttctggacagcattcctggaggtaccctggatcaaggaagacctcattaccctgacggggacacaagcctctctgggtttcccatctgctcactgaagagcccttgggccgtgagtgaacattcacagccagacagtggtcactgtgggtctttggagagacccagtgctatgctggcttcaggtgtgacacaatgcagactcagtggtggtggccacaggtgtgctcatgttatccctctccagctccaggcagctcagcacagagaaagactgactctttttgggggcaaagtgagggaagagaacaagagtctctgcctggtaatccagggacttctcccagatcttatccaagaccaccaagatggtacctgtacaagtctgcaaaagccatagtattattggactgagggttccccaaatgcagatatggctgcagtgactaaagatttatatcacagcatcagttcccttggaatacttggtaagccttcctaagaagggtgggtacaaacaagccaagactgtgaaggctacaataaatacctaactctacaatgccctgacactgatgaacatccacaagcatcaaggccatctacaaaaacgtgatctcaccaaacaaataaagtaccagtgactaatcctggagtgacagagatgtgtaatttttcagacacagaattcaaaatagctgttccgaggaagatcagtgaaattgaggatagcacagagaaggaattcagaatcctatcagataaatttcactaagagattgaaataattataaaaactgaagcagaaattctagaggtggaaaatgcagttggcatactgaagcatgcattggagtctctcaaaagcaaaactgattaagcagaagatagaattagtaggcttaaagacaggatatttaaaaatacaaagttggaagagacaaagaaaaaaatcaaagcacacctataagatctagaaagtcgcctcaaaagggcaaatttaagttagtggcctcaaaaagtcagtagagagagagagagacagagatctaggtaaaaagtttattcaaatggataataacagaactttcctaaactagaaaaatatatcagggtttaagtacaagagtgttatataacaccaagcagatttagtccaaaaacgacctcaaggcatttaataatcaaactcccaaaggtcaagaatagagccctttgtcagacagatagattgcaaaagttttctcccattctgtaggttgcctgttcactctgatgatagtttcttttgctgtgcagaagctctttagtttaattagatcccatttgtcaattttggcttttgttgccattgcttttggtgttttagtcatgaagtctttgcccatgcctatgtcctgaatggtattacctaggatttcttctaggatttttatggttttaggtcttacatttaagtctttaatccatcttgagttaatttttgtataaggtataaggaaggggtccagtttcagttttcctcgtatggctagccagttttcccaacagtatttattaaatagggaatcctttccccatttcttgtttttatcaggtttgtcaaagatcagatggttgtagatgtgtggggtcacttctgaggcctctgttctgtttcattggtctacatatctgttttggtaccagtaccatgctgtttgtttttgttactgtagccttgtattatagtttaagtcaggtagagtgatacctccagctttgctctttttgcttaggattgtcttggctatatgggctcttttttggttccatatgaaatttaaattagtttttcctattctgtgaagaaagtcagtcgtagcttgatggggacagcattgaatctataaattactttgggcagtatggccattttcacagtattggttcttcctattcatgagcatggaatgtttttccatttacttgtgtcctctcttatttccttgagcagtgatttgtagttttccttgaagaggtccttcacatcccttgtaagttgtatacctaggtattttattctctttttagcaattgtgaatgggagttcactcatgatttggctttctattattggtgtataggaatgcttgattcttgcacattgatttttgtatcctgatactttgctgaaggtgcttatcaacttgaggagatttggggctgagacaatggggttttctaaatatacaatcatgtcatctggaaacagagacaatttgacttcctctcttcctatttgaataccctttatttctttctcttgcctgaatgctgcggccagaacttccaatactatgttgaataggagtggtgagagagggcatccttgtcttgtgctggttttcaaagggaatgcttccagccttttcccatttagtatgatattggctgtgggtttgtcataaatagctcttattattttgagatacattccatcagtacatagttaattgaaagtttttagcatgaagcagtgttgaattttatcaaaggccttttttgcatctattgagataatcatgtggttttgtcattggttttgtttatgtgatggattatgtttattgatttgcatatgttgaacaagcgttgcatcccagggatgaagccaacttgattgtagtggataagatttttgatgtactgctggattcgttttgcctgtattttataatctacgaggaacttaaacagatttacaagaagaaaacaaccgcatcaaaaagtgggcaaaggatatgaacaggcacttctcaatagaagacatttatgtggccaataaacatatgaacaaaagctcatcatcaatggtcattacagaaatgcgaatcaaaaccacaatgagataccatgtcatgccagattgaatgacgatcattaaaaagtcaggaaacaacagatgctggagaggatgtggagaaataggaacgcttttacactgttggtgggagtctaaattagctcaaccattgtggaagacagtgtggcgattcctcaaggatctagaaccagaaataccatttgacccagcaatctcattactgggtatatacccaaaggattataaatcattctactctaaagatacatgcacatgtatgtctattgcaacactattcacaatagcaaagacttggaactaacccaaatgcccatcaatgatagactggataaagaaaatgtggcacatatacaccatagactactatgcagctgtaaaaaaggatgagttcatgtcctttgcagggacatggatgaagctggaaaccatcattctcagcattctaacacaggaacagaaaaccaaacaccgcatattctcactcataagtggcagttgaacaatgagaacatatggacacagggaggggaatatcacaccagggcctgttgtggggtgagagcataggggagggatagcattaggagaaatacctaatgtagatgatgggttgatgggtgcagcaaaccaccatggcacgtttttacctatgtaacaaacctgcacgttctgcacatgcatcccagaaactaaagtataataataataataataataaagaatagagaaatgttctgaaggaagtgaaagaaatgaaagaaaatgcagttgtgctccagtacatctggcagcagacttttcagtggaaacttgacaggccaggagagagggacataatgtatttaaagtgctgaaggaaaaaaaaaaaaaaaaaaaatatatatatatatatataatcctagatagtatatccagcaaaagtatccttcaaacatgaaggagaaataaaatccaagggatttcatcaacaccagaccggttctataagaagtgctgaagagagtttttcaatatgaaattaaaagacattaataaacaataggaaatcatctgaagatacaaacctcactggtaatcgtaagtataaagacaaacacaaagtattatgacattgtaattatgatgcatgaactcatatcttgagtagaaagtctaaaagatgaacctattaaaataactacaacaacttttcaagaaatagacagtatgtaatatatgtatagaaacagccaagagttaaaaagcaggggacatggagttaaaaagcatgggacacgaagttaaagcctacagtttttattagtttcttctttgcttgttagtctgtttatgcaaccagtgttgtcgtcagtttaaaataatgggctgtaagatactattttcaagcctcatggtaacctcaaatcaaaaaacctacaacagatacacaaaaagaggcatgaaattaaaatatacttccagagaaaaccacattcactaaaacgaagacaggaaggaaagaaggaaggaggagaccacaaaaccaccagaaaacaaataacaaaatggcaggctgtaagtccttacttaccaataataacattgaatgtaaatagactaaactctgcaatcaaaagacagatttgctaggtgggttgaaaagcaggagttgtggccagcgagatagctaatgcctgtaatccctgtactttgggaggtgggcagatcacttcagccaggagtttgagactagtctgggcaacatggcaaaaccctgtctaccagaaaaaacaacaacaacaaaaaaataaattagccaggtgtgttggcatgtgcctgtagtaccagctactcaggaggctgaggttaggaggatggctgaagcccatgaggtggaggttgcagtgagccaaaatcacaccattatactccagcctaggcgacagagtaagaccctgtctcaaaaaaacaactcttgcctacaagaaacacagtttacctataaagatacacatagactgaaaataggggatagaaagagatattccatgcaaattgaaagcaaaaaagaacaggaatagctatatttttataagacaaactagatttcaagacaaaaactataaaaagatacaaagtcattatataatgataaagggatcaattcagcaagaggatatcacagttgtaaatatacatgcacccaacagtggagcacccggatatataaagcaaatattactgtagtgaaagatagagaccccaatatgttaatagctggagacttcactctgcttctagcattggacagatcatccagagtatcaacaaagaaacactgggcttaatctgcactatagaacaaatgtacttaatagatatttacagaacatttcatccagtggctgtagaatacactttttcctcagcatatggatcattctcaaggatagaccgtatgttaggtcacaaaacacgtcttaaaactttcaaaaacaatgaaataatatcaagcatgttctctgacaacaatggaataaaactagaaatcaataataagaggaactgtagaaactatacaaacacatggaaattaaacaatatgctcctaaatggctattgagtcaatgaataaggaaattaaaaaattccttgaaacaaaatgtaaacagaacataccaaaacttatgggacacagagaaagcagtattaagagaaaagtctacagccatcttcaaataaacaacttaataatgcatgtgaaaaagtagaaaagcaaaaatgaaagcataaattagatgaaaagaaataataaagatgagagctgaagtaaataaaatggaaacaaaaaaattacaaaagaccaaggtaacaaaaagttggttttttgaaaagataaaattgacaaatcttttgcctaaaagagaagacctaaacaaataaagtcagagatgaaaaaagagacattacaactgatactgcagaaattcaaaggatcattagtgactactatgagcaactctataccagtaaattggaaaactagaagaaatggataaattcctagacacatagaacctacaaagattgaaccatgaagaaatccagaacttgaacagaccaataacaactaatgaaattgaagccctaataaaacaaaatctcttagcaaagaaaagcctgggacctggtggcttctgtactgaatttcaccaaacatttaaggaagaataccagccctacccaaactattctaaaaaataaaggaggagggaatacttccaaactcattatttgaggccaatattgccctgataccaaaagcagacaaatacaaatcaaaaaagaaagctacaggccaatatccctgatgaacattgatgaaaaagtcctcaaaaatcccagcaaactgaattgaacagcacattaaaagatcattcattatgaccaagtgggatttataccaatgatgcaaggcaagggtggttcaccacatacaaaccaatcaaagtgatacattatactaggagaatgaaggacaagccatgtggtcatttcaattgatgctgaaaaagcatttaataaaattcaacatcccttcatgataaaaacactaaaaataactgagtgtagaaggaacatacctcaacacaataaaagccacatatggcagacccacagctactatcatattatgaaacattgatgtgagaaattgaagaggacacaaaaaatgaaagctactccatgttcatggattggaagaatcaatattgctaaaatgtacgttctgcccaaagcaaaccgcagatgcaatacaacccctgtgaaagtgctcatgacattcttcaaaaaaatagggaaaaaaaaaatcctaaaattcatgtggaaccacaaacgacccagaatagtcaaagacatctggaacaaaaagaacaaaactggaggaatcatactacctgacttcaaattattctacagagctgtggtaaccaaaaaagcatggtactggcataaaaacagacacatagaccaatggaacagaatagggaacctagaaagaaatccacaaatctacagtgaactaacttttgacaaaggtaccaagaacatacattggggaaaagatagtcttcaataaatagtgctgagaaaactggatatttatatgtagaagaatgaaactagacccctctctcttgccatatattaaaatcaaatcaaaatggattaaagacttaaatgtaagacctgaagctatgaaactatttgagactaaaagaaaacattgaggaagctcttcagaacgttgttctgggcaaagatttattgagtaatacttcacaagcacaggcaaccaaagcaaaaatagacaaatggattacatcaagtttaaaagctgcacaacaatggaaatactcaacaaagtgaagagagaacccacaaaatggtagaaaatatttgcaaactatttgtcagacaggattaagaaccagaatgtataaggagctcaaacaattttatgggaataaaatctaataatctgattttttaaatgggcaaaagatttgaatagtcatttctaaaaagacatacaaatggtaaacagctatgtaaaaatgtgctcaacatcattgcattagcctattttcatactgctatgaagaaatacccaagactgggtaatttataaagaaaaagaggttcaatgaactcacagttctatatgtctggggaggcttcacaattattgcagaaggcgaaggaggagcaaaggcatgtcttacatggtggcaggcaagagtgtgtgtgcaggggaactgccctttataaaaccatcagatcttgtgagacttattcgctctcatgagaacagcatgggaaaaacccacccccgtgattcaattacctctaccagatccctcctgtgacatgtggggattatgggagctacaattcaagatgagatttgcatggggacatatcaattattgatcattggtgagatgcaaattgacattacaatgagatgtttcacctcagtaaaaatggcttttcttcaaaggacaggcaataacaaatgctgttgaggatgtggagaaaggggaacgtttatacactgttggtcggaatgtaaattagtacaaccactacggagaacactaggaggttcctcaaaagaaacaaaaatagaactaccatatgatgtagcagtctcactactgggtatttatccaaagaaaatgaaatcagaatgttgaagaaatgtctgcactctcatgtttattgcagcagtattaacaatagccaagattcggaagctacccaaggattcatcaacggatggataaagaaaatgtagtgcatatacacagtgcattattcagccataaaaaagaacgaaagcctatcatttgcaacatggatagaactggaggacattgtgttaagtgaaataagccaggcatacaaagttaaacttcacatcttctctctcattcatgagagctaaaaattaaaacaatttaacttatggagattgagagtacaatgatggctaccagtggttgggaagggttgtgggggttgggggtagtggggatagaatgagtaagatctagtatttgagatcacaacacgataactacagtcaaccataatttattgtacacttaaaaataactaaaagagtataactggcatgtctgtaacacaaagaaatgataattgcttcaggtgatgcataccccatttactctaatgtgattattacacattgtatgcctgtatcaaagtagctcatgtaccctataaatatatatatctactatatattcataaaaatttaaaaattaaagatagagattatattcgatatttctacaagaaatttgtaagttttaattcataaaaattcttgtgttgcatttctattctttttttactagttttatttttaagtttcatcttcattttagtacctaagagtgaaatcacttatttgtacacatttttcagagttgtgtgtcccttgcatatatctatttgtacttctcatttgttttgttttgtttttaacttttcttttagattcaggagtacacatacaggtttattacataggtgaagttgtgtgaagggagtttgttgtacagattattttatcacctgtgtactaaacctagtacccaatagctgtttttttctgatcctctccctcctcccacctgcctctgtcaagtaggccctagtgtctcctctttgtgtccatgtgagctcatcatttagctcccaattataagcaagaacatgcagtatttggttttctgttcctgcttaagtttgctaaggatgatggcctctagctccatccacattcccacaaaggacatgatcttgttctttttgatggctgaatagtattccatgatatacatgtaccacattttctgtatccagtctgtgatgataggcatttaggttgattccatttctttgctattgtgaatagtgttgcaaagaacacatacatgaatgtgtctttatggtagaatgatttatattcctatgagtatatacccagtaatgggattgctgggttcaatggcagttgtgtttttagatttttgaggaatcaccacactgcttttcattttctccacaacctcaccagcacctattatttttgactttttattgccattctgactggtgtgagatggtaccccattgtggttttgatttgcatttctctaatgatgagtgatgatgagctttttttcatgtgtgtgttggcctcatgtgtgttttcttttgaacagtgcttatttcctttgcccacttttaatgggtttgtctgtttttttttcttgtaaatttgtttaagttcctcatagatactggatattagacctttgtcatgtgcatagtttgaaaaaattttctcccattctgcaggttgtctgtttactctgttgaaagtttcttttgctgttagaagcacttaagtttaattacatcccatgtgtcaatttttgcttttgttacaattgcttttggcatctttgtcatgaaacctttgccagtttctatgttcagaatgatattacctaggttgtcttccagggtttttatagcttttggttttacttttaagtctttaatccatcttgagttgatttttgtatatgatataaggaaatggtccagcttgaatcttctgcatagagttagccagttatctcagcaccgtttattgaacattgtcaaagaacaggtggtcatagatgtgtggccttatttctggggtctctgttctgttccattggtctatgtgcctgtttttgtaccagtaccatgctgttttggttattgtagccccatagtatagtttgaagtcaggtaatgtgatgcctccagctttgttctttttgcttagaattgccttggctatttggccccttttttagttccatttgagttttaaaattgttgttttctagttctgtgaagaatgtcattggtagtttgataggaatagcattgaatctgtaagttgctttgggcactatggccattttaatgatattgattctttctatccatgagcatggaatatttttccatttgtgtcatctctgatttctttgagcagtgtttcataagtcttattgtagagatctttcacctccctggttagctgtatttctaggtattgtattcttttggtggcaattgtgaatgcaattgctttactgatttggctcgtggcttggcagttgtgaatgtataggaatgctagtgattttttaacattgatttttttttttaatcctgaaattttggtgaatttgtttatcagctgaaggagcttttgggctgagactgtagagttttctagctacagaatcatgtcttctgcaaacagagatagtttgacttcctctcttcctatttaggtatgcgttatttctttctcttgcctgatagctgtggccagaacttcccatactatgttgaataggcatgataagatagggcattcttgtcttgtgcctcttttcaaggggaatgtttccagtttttccccattcagtatgatgttggctgtgggtttgtcatacatggctcttaccattttgaggtatgtccctacaatacctagtttattgatagttttttaacatgttttttaacatggaaggatgttgaattttatcaaaagccttttctgcatctattgtgcatcattgtgcatctattgtgataatcatgtagttttctgcatctattttctgcatctgtaatcatgtagtttttgtctttagttctgatgaattacatttattgatttgtgtatgttgaaccaaccttgcatatcagagataaggcctacttgatcttggtggattagctttttgatgtgttgctgggttcagtttgccagcattttgctgaggatttttacatcaatgcttatcaaggatattggcctgaagtgttttttttgttgttgtgtctctgtcaggttttgatatcaggatgatgctggcctcataaatttgatggggaggagtccctcctcttcaattttttggaatagtttcggtaggaatggtaccagctctttgtccatctggtagaatttgctgtgaatccatctggtcctgggcttttttgttgttgttgttggtaggatatttattactggttcatttcagagctcattattggtctgtccagggaatcaatttcttctttgttcagtcttggaagagtgtgtgtgtccaggaatttatccatctcttctaggttttctagttcatgtgcatggagttgtttctggtggtctctgatagctgtttttatttttgtggggtcagtggtaacataccctttgttgttcctgatagtgtttatttgtgtcctatttcttctttattaatctagctagtggcctatcttattaattttttcatggagttctacctgtgtctctcaatgtttcttggagttaaattggaacttttgtatctgttgccgtaatagaaggtcttgaagtacttagtataaactgcccattttatttcttatgtatatactttatcaaactctactggtttgtgtatactacatgatgtttgaaatgtttatttcatctcccatggtacctggcacagagtttggggcaagtgaaagacatagaagttgacatgacttgtagatttctgagtatatctggatccattagggctgtggaatttgatgctgggtgagatggattcttagcagctttctaggttcctgatgaggaagcattggagtgactactgaaatggaagaatggggtgggacaacatcagattctggactctggaatgtaattgtctgcataagactttagcagctaaagcagctctctttatccaccaatttcaaaatatgcagttgttaactcctatatcctctttctcttactgtcaatctctaaagctttagcaggttggggaaatttttctccggcctcagtctgctatcatctacattaaaaaacaaaaaacaaaaaactaatgtttgcataaaccttttctccttcatactattttgatcacggtccttattggcttttttagaaacatttggcctggcaatgtttgttttatttaagtactttttttaacatatgtatatacccataaaagttcaccggaattaaagtaatgatcatgtccatttttctgaatgtttctgtgagatttttaataatttttctcccatgcacccttccaatccattctaaacttttttctatcactgtatattagtttgcacatcctacatttttacatatacatagcatgcattcttttatatctggcttacttcactcactaaaattattttgagatttaatgatattgcagtgagcataaagttttttgtatgtttctaatccatatttattgtatggatataccacggtttgattgtccatatgttagcaacggtgaatccacatgggtctgcagcagcttgattcttgcctccccagaggaaagaattcatcacaggggcataaggcagagtgacagagtgaggcaggttttagaatgggagtgaaagtttattaaaaagttttagaggaggaatgaaaggaagtacacttggtagacggccaagtgggctacttgagagatccaagtgcaccatttattctttgtcttggagtttttatacattggcatagttctggggtctgcatttcttctcccctgattcttcccttggagcgggctgtctgcatgctcagtggcctgccagcacttgggaggggccgcatgctcactgtgttgaccgaagttgtatacatgatcatttgagtgtttttgccttaccagttgaatgttcctaaaagaaggtcatataccagttaaacttagcctcctagtgcacgtgctacagcccacttgcccaactcctgaaatcctactaggaagctgctgatatcagcttcaggtgttttctatctgctgggagactgcctttccctggcagtggctcttaccaattattattctagggagacacttaaacaactacctgaccatcccgtgatggtcacctagcatttctaggggtagggggtctcctgccatgctcatgtttgcttaactacttattctaacacattcacctattgatagacatttgggctttctccagtttttgattattacataattaaggctgccataattatttgtgtataaatcttttttatgaacctatacttttatttctctttgtaaatatctagagaggaatggctggatcatatgatcagtgtatatttaaactaagaaattgtttccaaaagtggttgtacaatttttacactcacaccaatattggagttccagttactatacttcctcaccaaggtttagtatagttaatctttttaattttagtcattttaatagttgtgggttatgatttgcatttccctaataataacgttgagcctctttttatgtacttctttgccatttgtatattttctttggtaaagagtttgtttaaaattttgcatatttattttattggattaattgctttattactgagttttcatagttctttatacactttgagtacaggcctttatttgatatatgatttgatagtactttcttcaggctgtggattatcttcttattttcttaaaaatgttacacaaatagtggaagcttttattttcatgatgttcaatttattcttcatggaccatgcttttagtgtcatgtctaagaaacttttgcctaatctcagtttgcaaaggttttctactaaattttcttttagaagttttatcattttaagttttcaaattaggtcaatgatctattaattaatttttctataaagagtgagacatgagttcaagtttattttttttacatggatattcagctgcttgagaaccattttcaaaagagactattctttctacgctgtattgccatttgcaccttgcttgaaaattctgatgtccatatacttttggatatttcttggctcatgactatcttgattactatctctttataatattgtaagttttgaaatgaagtcatattggccctttaactttgtttcttttttcataattgtcttggctattctaggttctttgcattttcatagaatcagcatgtcaatttctgcagcagtgcctgctgggaatttgaagggattatgttcaagatatagtccaatttagggagaacttgcatcttaataatgttgagttttctaacttatgaagaaggtataacatatctctccatttatttaatgctttagtctccctgagaaatctcatgtttttagtgtatagatctttgttacttatttgatttatacttacagttttcataatttttaattctattgtacatatattgctttttaattccaattttcagtttttccttactgacataaagagatacaattgatttttttcgtattgaccttgtatcctgaaactttactaaatcactcattagttttataagttatatatcatgtacaattatatataaaatatagatgatatataacacaaaaactcttataatctataacataaactgtaggatatatattaaaatgtatatatcatgtatgtaaatattttttctattggattttctatatagattccctggtcctctaggagtaaagagttatattttttcctttctaatctcaaatgagtttcatttttttaacttaccttatttcattggctaggatgtccagcacaatgtggaagagaagtggtgagagtgaaatccttgtttagtttctgatgttagggtgaaaacattcaatatttcaccgttgagtaaaatattagctataggcttttcatggatccctttttccagtttccttctgtttctagtatgctgagggttgttctcttctgtcttgttatttttaagagcaggatgaatattggagatatcaaaagctattttctgctcttagtgagatggttatatggtttttcttttttgttaatatggtgagttacatcaattaatttttgaatgttaaatcatccttcagtacaagtaaaattgtaataagttccacttagtcacattatattttctatgtattattggatttgacttgctaaaattttgttcaggatttttcatctattctcataattttctgtttctgtaatgtttctgtatgattgtcagggtaatttaatgctggcctcatagaatgagtcttgacttattttctcatatacttttctggaatagttgatgtagaattaatatctattccttaattatttaggcctggtgtttgggttataaaaatgctttaaaaaacaaattcaattactttaatatatatgggattattcaggttaatgagctcacttgatgaatgagcattggtagtttttatctttcaataaatatttgcacttaacctaagttgttgaatttattggcataaagttgttcaaagtattcccttatccttgtattatgtatagactctgtcataatattatctgtcattcctgttattggtaatttttgtccgaatttgtgtcttctcttttgtattcatgatcaatctgcctagaggtttattcttttaaaaaaattctcaactagcttttgttttaatttattttctgtattatttctgctttctagttcattgatttccactctgttctttaccatttccattttgctgctaactttgccattcaatttcctcttctttgtgaagaggtcattgattttgagacctttcctcttatctaatataggcatttattctgtgctattagtttccttctaagtgctgctttagcagcatcccactgactttgatatgctttgttttaattttcactctgtacaaagtactttctaattttccttttgatttcttcattgaccctgaattattcagaagtgtatttttcccagacatttaaatttttctggagatgttttgttactgatttctaatttaattctgttctggtcagggaacatgcttgtgtgacatgaatgctttcagtctgttgagacgtacatattctgctatcgttggacacattgtttgatagataccaattcggttacattggttgataatgtttttcaggtgtgctatcttgagtagattactttttttgatgattttttgtttgttgaatcaaatattgtgataagggttttactatgttagtggttgctgtaagatttatactctcatctgtagcttatgaaaatctacctttaagtgatattaaagcactttacatacagtataagaaccttgtaatagcatgtttcagtttctgtccttctgatcattgtgctattgttgtcgtacgtattacttttagcatgttataaacgtcaaacaacattactattatttatgtttaaataatgaattatcttttaaatatatttaagtaatttaaaagtatttgcctatgtcttaccaaatccgatgctcttcttctttgtgtagatacgtttttctatctggtttcatttttcttctgcctgaagaactttaacatttcttttaatgctggtcttctggtgatacatttttgcagcttctatatgttttgtaatgtctttatttcatctttgtctttgaaaaacttttgggttggatatagaattacaggttaacaattatttttcttttattactttaaagatattactacagtattttctcacttgtgctattactaaagagaaatgtgctgccattcttacctttgttcctctgcaaaaaaatgtctgtttttcctggctccttttaagattattttttttttaccactgattttaaatgatttgattatgttgtatccccatatagttttatgggtcttatacttggagtacattgagcttcctggatctgtgattttatagttttaataaaatttaaaacattttttcattacttttagaatatttttctcttccccctctcttttagagaacaattacatgtgtattcagctcctttaagctgccccacagcctacagattgtattttcaatttttaaaattgtttattccctctttttgtttcatatgatttctattgctatgtctaggctcactcatcttttccttctacaatgtctaacctgctgttcattccacccagtgcatttttcatccaacacattgtagtttttatctctagaagtttgttgggctctttttatatattacatatctatatttgagtttttgaacttacagattatttgtaataactgttttaatgtccttgtctactaattctcacatttttgtgagttctgcgtcagttttgattgattcctttatctctttattatgaatcatgttttacagattcttggcacatctaggaattttttttttttggttgccagactattaccttattgggcactggatattatttttattcctataaaggtcctagatcatatttctgagacacagctagatttattagaaacagtttaatccttttagaccttaatttaaatgttgttaggtgggaccagagcaatgatcagtctacatgtaactacccactactgagccaatacccttctgtgtactctgcccagttctctgtgaatcttgagcatttcagtgttccttttgggaagaagcactcctcggtcttgtgtgcatgttaacactattatgtttaatccattcaagtagttttctaataggtatgtgttgaataatactcagctgcaggggaccctctgcagatctctggagttatttctttgtgcagccctctcatccttcctatgaaatgtagctgctttggactcttcaaactctcagcttcatcacttgaatataggaagtctgctagtttttcacaatggctttttcttcctaatctacagacaggaaactttgtaggcagtaagctgaagcagttaatagagctcaccgtgtttgtttcttctgtctcaaggatcattatccttttttgcttgataggtatcttgaaaacttgtatattctgttttttggtggaaaaaactttttttcaggcaagcagattaaatatctggtctcttctccttcctctaggccagaaggaaagtttacttggagtatttcttaagggagaaatttatttataaaggcatacgcccaaactgtccctctttatttatcagtgctggtatatcctaatgacatactctctactggtgagaatagttccaccagacagacagacatctgctttagcattcagcagattcttggatagtttatggaatgacttctttcaagtgattatgaatccaaaaagtagaattacaagaattaactagtaatatttaagaaatgcatgatcttgagagtcttatgtgttgttcacctataatcctcagttctcacaggagtaagtagaaatgttagtttaatcaggttatgagaacaaatgaaagtagatattaattattcacactgattttacattttgaagatataaggtgtttattaatgtaaactatttgcttctttctaaaataggggttgtagaatcattgagcttgatagagatctagaataaagtactatttttatattgatcttaaatatgttagtgtagtttcagtaattcctgtgggatcgtcatacagtaattacaattttaaggagtttatgtgtctcaaaatgttatcattgcatatattaatgctattataaatgcagtcataaaaagaaatgtgaggaaaattattaaataattatcagaatgaagttgagttaataggtgtgccatccaattataacttgccctaagagaaatatcagtggaggttgaacatttcagcctcagctaagacatatacttgtgctaacttagactaggaagtatcataaagaaaaaggaactttttattagtatctcctattgacaatatcttgttatagtttagaacgtatgtattataggtgtggattgaactattaaatggaagatcaaacacttttttcagatgttgccattttcatgggagagtatgttgaagtgcgttttggaacatgttaagtaagctagagtgagaaggtatagacaagcatatggggagactaagatgatccatgtggtggtggattagagctagagacatcagcatgaactcatgtttagcttaatatagatacagttggagatacacacacatacacatatatacatacatatctataagtatttacgtatacatacagaaattcttcattttattgtgccttgcattactgcacattgtagatattgtgtttttttgcaaattgaaggtttgcggcaaccctgtctcaagcaagcctgtcagtgccatttgtccaacagcatgtgcttgcttcacatgtcactctgtgtaacattttggttattcttgccatgtttcaaaccttttcattatcatatttgttacggtgatctgtgatcagttatctttggtgttactactgtaattcttttaggcattacaaacagtgcctttataaggcagcaaacttaataagtgcatgtgttctgactactccaccagtcaactgttctcctgtcttctctctccttaggcctctctcttccttgagacacaatgataatatacttaggccaattgatgactctacaagaatgtctatgtgttcaaatgaaaggaagagtcatacatctctcactttaaatcaaaagctaaaaatgattaagcttagtgaggaagacaggttgaaagctaagataggcccaaaagctaaacctgttgcaccaaacagccaagatatgcatagataaagttctcgaaggaaattaaaaagactcttacagtaaacacatgaatgaaaggcaagcaaaacagcctcattggtgatatggagaaggttgagtagtctagatagaaaataaaaccagtcacaacatactcttaagtcaaatccagagcaaggccctgactctcttcagtttaacgaaggctgagaagaggtgaggaagctgcagaagaaaagttggaagctagcagagggttggttcatagagtttaaggaaagaggccatctccataacatcacagtccagggtgaaacagcaagtactgttgcagaagctgcagcaagttgtctgcaagatctacctaaaataatagatgaaggtggctacattaaacaatagacttttttttttttttttttttttgagacggagtgtcactcttattgcccaggctgcggtgcaatggtgcaatctcagcttactgcaacctctacctcccgggttcaagtgattctcctgcctcagcctcccaagcagctgggataacaggcgtacaccaccatgcccaattaattttatatgtttttagtagagactggatttcaccatgtttgtcaggctggtcttgaactcccgaccttaagtgatccaccccccttggcctcccaaagtgctgggattacaggcgtgagccaccatgcccatcctaaacaacagatttttatgtagacaaaacagctctctattggaggaagatgtcacctaggactctgatagccagagagaagtcaatccctggtttcgaaggacaggctgactctcttgttagggattaatgcagcaggtgactttaagaggaagctggttgggcatgggggcttacacctgtaatcccagcactttggggggctgaggcaggcagatcacttgaggtcaggagttcaagaccagcctggccaacatggtgaaacctcatctctactaaaaatacaaaaattagccagatgtggtggtgggtgcctataatccaagctacttgggaggctgaggcaggagaatcacttaaaactcaggaggcaggggtttcactgagccaagatggtgccactgcactccagcctgggtgatagagtgagactcttgtctcaaaaacaaaaacaaaaacaaacaaacaaaaagccactgctcatttaccgtttctaaaatcctaggactcttaagaattatactaaatttaccatatctgtgttctgtaaataaaatagcaaagcctggatgctaacacccctgtttacagcatggtttactgattattttcagcttactgttgagacctactgctcagaaaccagattcctttcaaaatattactattcattgacaatgcactttgtcgtccagaagttctaatggagatatacattaggagagtaatgttgttttcatgtatggtaactgatatgttttggctctgtgtcccaaatctcatcttgtaggtcccataattcccacatgttgtgggagggacctggtgggaaacaactgactcatgggggcaggtctttcccatgctgttctctttgatagtgaataagtcccaggagatctgatagttttaaaaatgggaaccaacccaaatgtccaacaatgatagactggattaagaaaatgtggcaaacatacaccatggaatactatgcagccataaaaaatgatgagttcatgtcctttgtagggacatggatgaaattggaaatcatcattctcagtaaactatagcaagaacaaaaaaccaaacaccgcatattctcactcataggtgggaattgaacaatgagaacgcatggacacaggaaggggaacatcacactctcgggactgttgtggggtggggggagggatagctttaggagatacacctaatgctaaatgacaagttaatgggagcagcacactagcatggcacatgtatacatatgtaactaacctgcacattgtacacatgtaccctaaaacttaaagtataataataataaaataaaaaaaattaaaaaaaaataaaaaaaatagaaatgggcatttccctgcacaagctctctgtctttgcctgccaccatccatgtgagacgtgactagcttcttcttgccttccaccatgattgtgaggccaccccagccatgtggaactgtaagtccattaaacctctttttcttcccagtctcaggtttgtctttatcagcagcgtgaaaacaaactaatgcactaacataacatctattctgcagtccatggatcagcagtaattttgactttcaagtcttattatttgggaaatacatttcataaggccaaagctgccatagatagtgattccttaacttggcaatgtaaattgaaaccttctggaaaggattcaccattctagatgccgttaagaacatccatgattcacagcaagaagtcaaaataccaacattaacaggagtttggaagaagttgattctaaccctcctgggtgactttgagaggttcaagacttcagtggaggaagtaactgcagatgtggtagaaatagcaagagaactagaattagaaatggagtttgaagatgtgactgaattgctgcaatcttatgatgaaactatagtggatgaggaattgcttcttctggatgagaaaagaaagtggtttcttcaggtgagatctaggcctggtgaagatgctatgaacattgttgaaatgacaacgcaggatttagaatatttcataaactgagtttagctttattttggcagttatcagtttatgttgaaacaaaatacaagcactacataaaaggactttaaggttcaaataaaaaatagatttaattcattttgtatctatttgtataataaacatctttcttaaattgttgtgtaatttctcttaggtacctgtgcagcacaggtaatttggaatgaatgccacaccacccatctttccctgttaatgatactgagtaaatactgagagcaaagaaatggggaaaacagctcattaaaaggtgtcccatgctgtgaaatgtggaacatatttttcctacttacttctttgattgaagacaaaatatttaggcacttagatggcctttgagagaatctttgtgtcacagtggagctgcttatttgaaataattttttgaaaatattaactttccccatttttaaggtaaaagtattgattagctacatattgttaaactcttctctttagcttcatctgctctctttcttgcttttgggatcctcatcttcttcctaaggaatggcactaatcaggtttgaaagtttgggggacacttcaagttgctcatcatttcccacagccagctttccctctggaaatacaaggtagtcttgtatttacctgtgttcctgtgctgcagaatgacgggtcttgcagatttgttataggacagttggttatcttgtgctcttactttaactgattgattgtcaacataaagatttctggggttagtgaaagaacaaagaaaaagggtgtgtgttatggtgaaatatttaggaactgttatggactgccacttattattttattgaaaaaataagtgtcatttatatattacatgtactattattttattgaaaacatgagtgccatttatatattacattattttcaataaaataatgctctcattttcaataaaataatatatattattttattaaaaaatgagtgtcatttatgtattacatgtactatggtaaatatggagatgaaaggtaacaattctgccttcatggtttttataggctactggctacatacataagtataattcatacagggtaagaaatagtatgaggccctaggtactgcttattgagatgcttgtggatgcatactggggagctgtattctgcttattggcactgatacttatttccttattaatatcagaaaaatatagaactacattgggggtggctgggcacagttgctcaagcctgtaatcccagcactttggaaggccaaggcggttagatcacctgaggtcaggagttcaagaccagctggaccagtatggtgaaaccgtttctctactaataatacaaaaattattcaggcatggtggcacatgcctataatcccagctacttgggaggctgaggcaggagaatcgcttgagtccaggaggcagaggttgcagtgagccgagatcacacctctgcactccagcctaggcaccaaagtgagactcagtctcaaaaaaaaaaaaaatacattgagggtagcaagagttaaaagggagaaataataaaaatgaaacagctataagaggaggaaggaagttaggggtgggagttctgaagataaagcacttctctaataatctgagctccagatgaaagcacagtgagcaagaacagtgcaaggtttcaaggcatcaagttgtcagatatctttcctttcccctccaaaccagctgtctgtcactctctgctctcatctgtacacccagggactgatatgttatcctctggcttccaattgcatttggccaatggagaatcctacaagtacactggagaggagaggagagtgaaaatatattatttttatcttggagcctctgcacagctgcaataaataggctggctgtatccttctaccaaagatcacagctcaaactaaggtagccctttctccatctctctgcttgctagttctgggaacacttgcatcttcttgcttctttaggaatagctcagtggctcctagctctggtgtactgcttattaccttgttggcatagtccctatattaagccctccttgaactatctctatttgagtacatcatatgcttccggactggcacattgagaaaatagagctgccagaacttctccatcacatagtcttcttcccacttcattttatgagtgatgaaaaggaggccagggagagagtagcttttcccaaatatttaagtaaagactagtgtggaatctagacatgccatttcctagtcctcccagttctaatttcccacttattttgaaattttgtaaatatatttctatttagtttcccacttccaaggcttctaatgctgaggctgtgaacattcctacaatcaggttttgagcttatagaaataaatgaagacgctggcccacctaaggggaacagaggctttttattcagagctggctgtagcaaaggagtgagccaccatcacatgctctgggcggcgtatgtgttctcattggtggttgctgcatggtgaagctggagcaggctaactagaagtgaggcatctaatttgattggtttagggagcatatgttttttttcctggttggtcctgagttggaacctggggcaaaaaattagagaagcaaacagtcattgtccaagtcctgactgttctgagctgattattgcagagcatatgggtcagagttctactgtcatatatgatctagctgttatctgttcgtgtagtcagtgcgtcaagcatgaaagcagttgatttgcattccagctttcttactcatcatctgaaggaacctgggccattgaatagcacactaattataatgtccccagggagagttcaggatctctagaaggagaaagtgtggctctctagaggaagtgatggtagaattgggaagcacacagtgggaggcaaatgttgcacagcttggagcagttcttttgacagtctcctagatgaaggcaaatagggacagtgcttgcaggatttgaggtcattcatatgtatttgtgccttggggatataggtttgccacagccgactttcttcataggagctttgtcagtcattagcatgactaggctacaacttctttgcgagctctttcattgcacatagcagcaatattttcagtgaagactaaacagaaaactttattcttacctgaggatctggcattggagagtggccaccacatgagtcaagcaccaagttaggtgaaattctaaattcgattctcctatatatagtttcccagtaattatccactgaagttacagtgagcttcaatggagcgagttcttgaaaaaggccctgtcttcatctcatcctaatccagctgaggatgcagaaatgcagctgttgtgtatagagtaattggtttcttcaattcttgtgaagtcttggctcctactctacctagattttcgttgttttggttgttgaatcacttccctttttcacagtatcttatataccttagcctgagattggctgtgtgatgatcctaaaggctcaacctccttcgtagactcactcccactgcacgggagtctccaaagtgactccacttccacttttattgctttttctgaggaaattccaggcatgataagtcaaatgagaaatttaatttgagaggaaaagagggaggagaggagcctctgaaattacctttacagtcttataataaccttgaaaagtattatatagtttgggggcaaaaggagctgacccttatctcttatcatacttgattaggtctctgtctgaggtttccaggagttgtacctccatagctagtgctgcgtgctcttataatggagcagaggtactgttgtttgggacttaatactcagagtgaactattgactcaggataggaccaattgccgccattgttcttctccagcacttggtagagacagggattctaagctgtcaaattgggataagttggattttaattctattcagtagggcacaattcattgccctgtgatttcctaggggcaaaaaatgagtctgtttttatgtatctatggactaccacaataatttacataaagatattcagatatttattgttacttttctaaccaacatgttaaaaagttacttatgatagctatccaaaaaattgctgattgatagatagtatcttttctctggaaataggttgaatttttaaaaatatttttatttccacatatatatgtgaaaacaaaaagtagtatcacatctttcattttgtttttgtttacttgaaagttgcattctcggctgggcatggtggctcatgcttgtaatccaagcactttgggaggctgaggtgggaggatggcttgaggccaagagtgggagaccagcctgggcaacatagcaagactctttctctacaaaaattaaaaatattagccagtcatggtggtatgtgcctatagtcctagctactctggaggctgaggcaggaggatcacttaagcccaggagttgaaggctgtagtgagctatgatcatgccactgcactttagcctgggtgacagagcaagactctgtctcttccaaaaaaaatctatattctcataggttttcgttcttgttctacaatgtgaagctcattgagttttctagtggttgatcttatgtgtttatatttgctcagaaaataaaaactagaaaatgtgactgtcattatttgtgtaaaatttgaataaagcaacaatccatattaacagttattgaaatattgtgtattgaaccagtgttagcaatccagcattggcaacatcctactttatttatttataagtttttgcaaatcagtatagtgatagaaatgcatgaaattacaatacttggagaactttttataatagggaaagaagctagtgacagaggtgaggatttgttcatgtattacatgaaaatattaatttaattggtttcctttaaaacttttgtataaatggcagtgatagttacagaactaggaaagatagttcatgcttaaagagatctggccttctcttttgttaatgaatgactttaaagttgaaatttgcattaagaatattaatgtgataattttcaaagtacccattagtctaacacttttaggataacaaaactaaattctaatgaagttgacatgtggaagaacagtggtaggtattaggaaaaagtaatctgatcacaataaaaatatgcttttgctcgaaaatctgtcaagataaattccaagcacttcaaaaaatgcatgttaaatgtgctttactacagttttgaaatagattaaaattatatgcaaattaatgcaaatcatgtggcttcaagattaagttttgaagtgctatcttcgttccctggagtaaatggctgctgaatgaatagatgcataaatatctgactggatgactggctgaatgaatgaatcagtttttcacttggaaagctgtttcattctcttctctgccagaagcccagttttatgatcttattcaaaatagaatctgggaggtgggcggttgtaactcaaagattagcctaatcaatccagttcaacccaggggacaccatctgccccggtccagtgtagagcgtaaaatgtagtgcatctgaactacaaaggaagaatgtcatttcctcagcactcatttgttgaataggtatctactgagcacgtattgggagccatgccttatttctgatgcatcacagttaacctctaagcagcaattgctattgtttttgatgttcattctttcttgaaatttcctcttctcttgaattctgccatatttcattttcttccctttccttctacttctgtaaaatttgcttcctttcaatctccttttctgaccttgttctgggagttccctgaggctcagtttttgccctgtgttctttctctgctccagtgattctcaaccctggctatgatcacagcctctgaggtgaggccccaagcatagtcaaatattaaaagctccgtaagtaattcttattcgcagctagacttgagagccttttttataccatagtccggggaattgtttgtgtctcaaaactttacttacgtctctgctgattagtgtcataccactatctcctttcacttaagtgcctgctctgtgcccctgcctaaccaagaagatatttccatttagaaataccattcccctggtttatctccaaaatatctttatatcctgatttttaatttattctttagttctaatctgaggaagattaatctttgatctttctttatttcttgattcaatctcttttgcatagtatgaccaaattaatactagcctcatcaaagagttagctactcttttgccccaaatccttttggctctccattgtctgcagggtcaaattgaaaatccttatcatggaatatgaaacttaaaattctagacccacagatcagcttccttacagaacatctctttgagacttttgtaaaatataagggcctgtgcattccagccttctgcatgaagtctttcctgacttcaaggtccatggtcacctgttccctccaagtcttatggatagtgctgtaaactgtgttatatcatgtaactgtttcattgaagtttggtaaccacctgtaagacaaaatcctgactgatcttgttctgaaacataactgtgaatatgtacttatattgagaagtgagctatatgttatagcagcaatgtaaggaatactaaaagtgcacatagcctattgtaaattctataagttcatagttaaccaacatttactgaatgactattatgtgctaggaacttgcttattcttactgtcttattttgtcttcatgtaaagtggcattatcccaattttaaatgagaagactgagtcctagcaactttaatcagctttcttcaatagaaagttatgactgggatcccagtttgatcttcagagttcaaatcttgtactttgtctccctaattcagtaagctcttaggagagagggcattttcttttcatcaaactcaatgacataggaggtagccattaatatgttagtaaataaagtgagagaaggatcctaggatgatacggtttggcttggtgtccccacccaaatctcatgttgaattgtaatccccagtgttggcagagggacctggtaggaggtgattagatcagaggggtggatttctcccttgctgttctagtgatagtgagtgagttctcgcaagatgtggttgtttaaaaatgtgtagcactggccgggcgcggtggctcacgcctgtaatcccagcactttgggaggccgaggtgggcggatcacgaggtcaggagatcaagaccatcctggctaacacggtgaaaccccgtctctactaaaaatacaaaaaattagctgggcgtggtagtgggcgcctgtagtcccagctacttgggaggctgaggcaggagaatggcgtgaacccgggaggcggagcttgcagtgagccgagatcgcgccactgcactccagcctgggcgacagagcgagactccgtctcaaaaaaaaaaaaaaaaaaaaaaaaaatgtgtagcacttctcccttagtgtgctctctctcctgccaccatgtgaagaagtgcttccttcctctttgcctttctaccatgattgtaagtttcctgacttcccagccatgcctgctgtgtagcctgtggaaccgtaagtcagttaaaccttttttctttataaattacccagtctcagtagttctttatagcaatgtgagaatgcactaatacataggataactggatttaccagatccctctccaaaagtctttctagatttggtcccaagtagaaggcctgccgttggccaaaaatcagctttcagtggtggattgctgttagagttgtttaagtaataccttgctcatagggctgatgctgaaaatattctaaaattatttgtgctatttagctatattaagataccttcaggaattcatttgatgtgatcttacaattgtaggagaggagaattgaggaaaattagcataatgtttatatagtgaagaagattaatgtatggacacctggcatgtatattttctaagaaactattttaatgaactggaatttgaaccctgccattgttacttaaagattcagactaagaaatgctataagaccaagcagaccaagtttgtttccttcaaagggaaagaagattagggaactctctattctctcctatcactgtctctgacgtgggaatgagaccagttcctatgataacagctgtccagcttggaggaactttctgttccaatctttagggaatagaagaccatgggtactctgtagttagagagaagggaatttagcccaagggaggagaacacttattcagaagatcattgtcccattaggtctctgatatatgtgtaaagtacattttctgatttagatttggtaagcaaatgtgctttagaataaagaatttaatcccaactatcattgctggcatgtacctattatactataaaatgatatctccttttattatctaaataactgagtaaattgaatgcttatatttttattaattgaataaataataggcttcacctataaaagtaactaaattctgttgtctgaactcttctttattgctaaaatttagcttaatagctttgttttcttagatactatgttatttaaattttttgcttgaacttttctatgaatagaaaaattaggagtaggaagcagaacttcaaagggaaatgtaattttactcttttagctgcattgctgagatcaaaagcatttgagaagtgacctaggtggccattacacgtaattggaaaagaagtacaatttcttattactgcatctaaaaatgaggacaacattctttaaatatcacgcttatataaaaacttgcagaaactcaatccacatgtcttaattagaagccaccataaagaaagacatttcattgttttaataacttatgttcagaaataaaactgctcttacttaagcactgcttagcagaaacgttaaaatcaagtctagagaaaaagtagaagatggtaatgttcctaagatacatgagaactgagtttggttacagttagagagaaacagaattttttccactcccaaaccagatctattgaatttacttggtttatttttgtatatatttggcatctaaagaatgaattgccttttagacaaaacccttctcgtagttgtttcttttgtattaatagttcctactttgcactaataggatattcctatttgaaaggggactattgcaaacaacaggaatgtatgagttttatgagaaaagcttccagatttttttttatacaatataaatgaattactgaacagagtttgtgacaatgggtatatgaactcctgagtatatgcagatactaactgggagggccacaagtagaatgttcagttattttattcaccttaaaaaatagatatccacgcctgtaatcccagcactttgggaggccgagatgggcggatcatgaggtcaggagatcgagagcatcctggctaacacggtgaaaccccatttctactaaaaatacaaaaacaaaattagtcaggcatggtggtgggcgcctgtagtcccagctagtggggaggctgaggcaggagaatggcatgaacctgggaggcagagcttgcagtgagctgagatcacgccactgcactccagtctgggcgactgagcgagactctgtctcaaaaaacaaacaaacaaacaaaaacaaaaaaaaaagctatcatattctggaccaactggatgattttttagtgtacttcctcaagatttttgcgttcatgcttgcttttctgtttaaaatcagtgctatagtagttgattttttttctgtatggacaagaatgaaataatcattgacatatagaaaagtgaaggaacattgaatcatcgcatggtgtataccttctcggtctgtagcatgttcatgtttaagccactgaacttgacactgtgagacagtgaacatgcaacactgaaagaacagctggataaagcaaaagggtgtggcaaatcatgccatacttaggaacagctgtgcagaaggaggtgcagtggacataagagaagactggcatgggagacaaggtgagtggaatctgcaagagccagtagattcttggctgtgatgggtacgctgggcttgagtagtgaggaacctctttaggtctcagatagggctgtggctgaagcgtagttgtgttctggaagtattgtgggtttttctctccctcagtgtagtagtgcatttcctattcaacgacacctccaactgataggtattaattgtcttaaaaaatagaaaaaaacaactatagttcttacttacatagcacggtatgctgggcactataaagagaaaatgaacgcctggtccctatcattaaagaacgaatatgctttgaaactcaagaactgtacagatgtaaggtagcattattattgtaataaaagaaaaagcgttgttctaagcaggcagttaaacatacagaagaaaatttataacattgaaaataccctgaaactctagctcgttacctaacagtgatttcatttattgtgaaaaatggcgaatgcaaattgcatgccttattatggtgtcatcatcagcaatttcatcttgcaaaaatggacaccacactatagataaatcttggagtccaagtattcagcatttaaagtgtttgtcagtattcactggcatctttgaatgttatagctggggaaacgtttagataaccctttgtttttctcacaccattgaaaaaaaggtaaagagacattaaagagtagccccacatttcttgactgttaacacagcagagccagaactccctgtaaagactctgcttcccagatcaatattggtggtggtttaatttaacccagacatctcttgacttatgccccttctgattgaaacccttcgatatggtttggctgtgtccccacccaattcttatcttgaattggagctcccacaattcccatgtttcctggaagggacctggtgggaggtagttgaatcatgggtgtgggtctttcctgtgctgttctcctgatagtaaataagtctcaagagatctgatggttttataaaggggagtttccctgcacaagttctgtctcgtctgccagcatgtaagacatgccttttgccttccgccatgattgtggggcctccccagccacgtggaactgtgagtccattagatctctttttctttataaacacccagcctcaggtatgtctttgttagcagtgtgagaactgactagtataccttttcagtgtcttaccatttgcttgaaataaagtccagggccgttaacgtgacccacaagcccggagtgtcccagccccacctacctctccaaattcatccctgccattcttcccctgctcccatgccacaatcgcagaagcctgtcttcgtttcttccagcccaacaaactcccatggcaggaatgttgcaactacttcaactggtccccattcttcacctgggatgacacccttctgctctcatatgcaatattttttttttaggaactaccttggcatttcttgacctttccaactaaaccagctctctctgcacttataatttataacattgttttcctttgtggtatctctgattgtttttatgtatttatttgtgaatatttgctttatgtgtttcctcagctggtctgttctcttcatgaacaaatgtgtcaattttgttccttgctgtacacatagtgcccagcacagaatacagactcaatacataaatatatattggtgtttggatggaagaggaagtaataagaatatgattgtgataatcactggaaatagaagtaatttgtcagttttacatgattgaataattgaagcaaatgtctgccaaaacaagttagaatcctgtagaggagctacattataatggtattgagcaaaatatctttaggtgaaggtagtattatgtatttctgggcattacaaaaatataagcagaaatatattttaaaataatgagattttagagtagcatgtatatgtttattaattattatcctcactaggagatcaaaacagttgattaagaggaatacagttccacaatgggagagccattttgagaattaatagactgtagctggcaaaaggaaaataggagttagagcttagcaaagggagaggaaatttcttctacccctatcctcccatagttcagcagcagagtgtttattaaaccaaaagtgatcaaatcacttttactgtgtcagcgatgggctgaaaaaggcacctgcatttcatgaattgatgagtaattgtttttagtcctgattctaagtaccctgttgattgcaatagtgtgatgtggttgaaaaagcactaggtttagagctagaacacctggatttgagtcctagtgtcaccacttaccttgttcattagacctggtacaagtcacttaacctcactgagggtgattttgttaatgaaatggtaccctgcaggattcttgcatgtatcaaataagataattacaggaaagctcttggagaactggatgcagtgctgaaatgagctctgtggagtcatgtatatatctgtctctaagtaatgcgcttaatgcactttgtgcagataagggtgctacacccagtcctctgatctggacaagctcacgttccactgggtagatgagatgcatgctaagaaatgtgtcttgatgcagaaattatcacaatgccacatactttgggaatttatagatgtggggaagaagactccttactgagatatcactgaagcatttttggggaagaaatagcatttaacctggaccttgaaacatgagtatggtttctatctgacgttccatttcttgttccattgatccctccctgcccctccttacctctcctcccctctccttatgcctctcttctcttacctacccttcctgtctttatcccctgctccgtttgccactcccttccccaaacttgtattgggaaagcagtttgatggttggaaagggtggtttattgatctaagatatgaataccagttcaattttgaaataaaatacagatggtccccaacttaaaatggtttgacttgagattttttgacttatgctggtgtgaaagcagtacctattcagtagaaaccacacttccagatttgaattttcatcttttcccaggctaggaatatgtggcgtgatcctcacatgtgagttgttcaagacttcattataaaataggttttgtgttaaatgattgtgtccaactgcaggcttatgtaagtgttccaagcatgtttaggctaggctaggctaggctaagctatggcgtgttctgtatgttaggtatattaaatgcattttgacttacagtggattatcaagatagtaagtcaaggagcatctgtactccatttattgacaccccatttaaaaaaattgttaaaaactatcaaactatgaacatgaagtgaaggatgcatgtttcgatgtagtctgaaattagctttcaacatgaatgaagtgttaggttttagcttcgtgggcaactttgtctgattttcttccattgacataaaaatagtctcaggcttgtgtgggaaaattaagtatatagatactattgcatttatcaagggagatataacttgtggattcattctataatgttttacaggagaattttttttatctcagaaataagaattttacatctctacaagtaaatcagaaatataattagatacataaattcataaacatacaaaataggtaaaatgattatatggatttctaaaagtacctttaaattggctgggcatggtggctcaggcttgtaatcctagcactttgggaggccaaggcacgtgaattgccagagctcaggagtttgagaccaccctgggcaacatggcaaaaccccgtctctactaaaaatacaaaaattagctgggtgtggtggttcatgcctgtaatcccagctattcaggaggctgaggcagcagaatcgcttgaacccaggaggcggaagttggtgcgccaagatcgtgccactgcactccagcctaggtgacagagtgagactccatctccgaaaaaataataatgataaaataaaatacctttcgattatactatagagcaaaaaaaatcgtgtaggtgtggataagtgagtatgtatgtgagtgtgcatgtggatttgcttgtatgaagacatgaagaaaatacaaagggaaactcttatttctgagaggtaggattgtgggtgagttttttcctttatggttgtttttattttagatattttctacagtgatcatgtattttattataaaagtgttataaaaatgagtttttacatgctatatagaactaaaaacacttacaaatgcaaaaacattatgtcttttgaaatgcaaggcctctacagaaacagtatccctcctgtttttaaaatcacacttttgatacccaatgagatagttcaccttcggtaacatgaggcgtttaattaacatccagtggggtatgattggaccccctgatgtgtcatactttcacgtgaattattatcttgcaacatacattctagtaataacaatgacgttatctagtaagttttcataaatactaagactatataaaaatcttagcttttcctctttatctcttagacagtacgtagttcaaagtatactttttacaagagcccgtgtcttctaaaaatctagggacatgttagaaattaatgcatttagtttaccatttttaaataactgagttttatttcattgacataaaggatccaagattttaagtgtttggattttattctcttaaaaaataaaaattacttttttttttttttttgagacagattcttactctgttgcccaggctggagtgcagtggtgcaatcttggctcactgcaacctcctcctcccgggttcaagcaattctcctgccttggttcccaaatagctgggattacaggcacgtgtcaccatgcctggcctggtctttcttaaagagggctttccctgagtgtatacatccagctttgtaagttgatgaatttggttctcagtaagtttgtaaagagaccctgctgatgtctgatcatgaggagctcactattctgtaggaaagaccataccctagttgggcagctctaatcatttcgaattttcacctgatttccgcctctctgtaatttccagcccttggccatatgttgttttctggaattctaatggataagactatttgctctatgagataacccatcacatatttgaagaccactatttgtcctacctaacttttgtttctaaggctcaccccaacaacccacccccagtttggttcattcagcagaactatctggagcactgtgccctaagcattggggctaccaagatgacaatgataacatcaaggagctcacagtataatggggggagagacagatacatacacaggtaaaataagtgctgtagaagagtgatcaacaaagagctatgaaaccagtaagattctaaaaactgactttgtgctgagcaagaggaggcttttcagaaaaggtcaaggttgaatcaggttttgttttcgttattattattattatttttgagaaggagtctcactctgtcgcccaggctgcaatgcagtggcacgatctcggctcactgcaacctccacctcctgggttccagtgactctcctacctcagcctcccaagtagctgggattacaggcacccgccaccatacctggctaatgtgtgtgtgtgtgtgtgtgtgtgtgtgtgtgtgtgtgtgtctttagtagagacggggttttgccatgttggccaggctggtctcaaactcctgacctcagttgatccacctgcctctacctcccaaactgttgggattacagacatgaaccaccatgcctggctgcatcaggttttgagtcaaataaaatttttctttcaaagaagcagaggatggaagggtatgctgtgcagggccatttttgagctatgggtacacatatacagtgtgatagaagaaataagacctagtgtttgatagaatcagtagggtgactgcagtttacggaaatgtatatttcacatagctattagagaataattagaatctttctagcatacagaaaagagaaatatttgagatgatggatatcccaattatacttatttgatctttaaaagtatgaatgtattaaattattacatgtaaccaaaaacatgtacatctattgtgtatcaatacacaatgaaataaaaatttaaaaaaacaacaaaattgcaagacgttgaaagggcctaacctggctccctgagtaaaaattgtgtaagagggttctagggtatcctctgttcactatgtgtagatcataagttgaggaaagagattttaaccatgaagttaaagtcatatgctacaccaaagtaagctagatgttgatttgccaaatctgtagttaatttatctctgctgggctccatttaggatttgattttaagaagggagttgtttgccataatgttacaaggtcagccctgttctgggtttctattagctacagttagtgttttggagtatcagagaaacggtgcttccttatattcagctcatggcatcaggaggcacaaaatctgtgcttttacagcagcataaatttctctggtcaaggtcagttgtgttagcaaggcacatatcatcgtatcaattttacattttctaagtcattttgtagacattttgttgagtaaaagtattctcttacttctagtaaggtagtttcaggaaaacacttaagtattatatatgtaaaccaaacagacttttcccattgattaactgtattttccattttgattttagaaatgtttaccttaagcctggccacagctttgtggcgacttcttcaatgtactccctgcctcaatctgatgtggccatgcactcgaaattcttaactttctatttactcttttagagagagatgatttgtataatctttctcttctccacatcccactgttccctgtatgtccctccttttctcttgtgcctcattttgtgtgtgcatttgacaacaaatgcagggaggaaaacaaacaaactgagtataatcagcaagaaaaaacatcatcttatgaactggcaaccaaattcttcatgaagaatttggtttttgaagaacaactgtttttgttcaagataatactttgaaaaaagatttgtcatagaagtttaaaaacttgaatagacagctctcattgtctgtaaggctaggtttctgcggcttttaatgtgtaagagacttgtcccatttaacaataaatattttagtgccacttaaaagtataattaatatatctttcttaaaagtggtattccctccctctacgtatatttctctttcctcagccccaaaagcacatattcagggagggaaggtaagggatttacatcctttttccatcactacgtcaaaacttatacaatttatacaatttaatattattaaggtagttaatgtagcagttcatgtgaagttactcagtagaaatactttaaatcatataaaaatatagctgaatataaattgaagggtcagagattaagggtgaagcaagttttaaaaatcagaagcatttccaaattcaagttatttggggtagctgtagagaaataattgaatgacccttagcaatattttaggaaaacttttacctaatgaaaaattctactccaaagctgtgttttacttcataaaattaatagaaagtggggaatatctctacacttccaatatcatgctttcctttagtcctagtaaaaagggacccagaatctttgttttaccctcccaaattacccactttaatacgaatacatgaaaatagattttaaaaaagaagtgaataaaatagatgaatttgtcctttttttttttaactatggtccttagacaatagctttcaactctccatagaactggaacaacttgcacgatgttgactacagtaagataacaaaattgtatattgtatgaggcaaatacgtgtggttgtcttatctaaccacaatgataagtacggtagtgtcatccagggtttcatcttctgcagttcagttacctatggtcaaccacggtcgcaaagtaggttgagatcattacaatgagatattttgaaagaaagaacactttcacataccttttactgcagtatattgctgtaattattctttttcattattagcattgttagtctcttattctgcctaactgataagctttattgtatgtaagtataggaaaaaacatagtgtatatagggtttggtgctattaccagggtcaggcatccactaggggtctggaaacacatcccctgtgggtaagggaagactactgtacataatttgattctttctttctttttcccaaatagtggtcatatttgatcagtcacctttgctcatgaagagcacattggcaaggacaacacaaagaagcttgttctgcaactcggttttcttatgttaaatatttagttttctgcttgcttcttcttatctgtttgtacttggtaaggctccctccttcttatgtgataggttggatgctgccggagaggttactagtgcatggaagctccaaaacagagtggaatggaaaattatagcctcaagggtatccttgggaaggagccagacaaaaggtgcatgcccacattgagacaaagctaaagcaaaactaccaggtgttagaaaacccagagcacatatacaagaacaaggcaaaaaattcctgttactctaacagtatgccttacttttctttaattttacttatttgtaaagtagacaaatgcccctgttgtgtcttgttgagttacaagtgcaacaagtagcattctagagtgggatgttactgtcagtgcctgttttgggtcactttaatatactgctgtttaattgattttatatctgaagatgcaggtctttaacatggacagattttcataagatcactggaatactggctttcttttgttttgcgatgagggcaaattttctgtggtttatttttccccatttctggtgaaaataatattctcttttcctcttctacagggaagatggcagtttcctcagttaaacttaggatctttgtcccttttaaataggccattgtataaaatacaaatgatcaaaattgtatcacagtaataattagctaatttttttgcagaagttttttggtggggtttttttttggtgtcaacacaactttaaaataacaaataataagagaaaactttttaacattgtaggaatatgtgaaattgaatagcaaactcaatttagatgagttcacatgaataacatacttcaggttggtaatattccagaaggttcaactgcctcatagaaaattaaatctctgaaaaattccccgactaaaaatcatttgaaaattctaattttttctaattatttggattttcttatgttagatttcatttcatggaaggatattgagtttgtgtatattcctgtgtgtgaacatgtgcttgtgtgtgctcttaatagcggttatttttcaaagcaatagtctttcaagcctttctctaatctctccagcatctaaaatgaggtgatataaaactcccaggtgggtactaaatattagatttgttgacaccagcatgggtgcttgagtggtagtgggaaaaagaaaaatgattgtctagagtttgtatgctacagaattgaggtggtttcagctgctttcatttcctttaaagaataatattgtttttttcaaatgaggaggattaagtaagcaccttaaaaaaagaggagcaatatattgacaacatctggtatgaagagttattataaaaggtaagaggatctgtgccagaaaaagaatggagagggagattctctctaataaataaatttcttttaaatgtgcctaaaacattaagggggtttttcccatttaaatttatctttgaaaactccctagagaaggagagtggtttctgtaacagctggttagaattgctgagcaaatgtctggaaaagatgattttgaaacaatgtgttttgtaatgtttaaacattttacatttttgttgaaacctgacttctgatgaagaaaatcgctctgtacagcaggcctgcgctgtgggctgcttttctgctttctctagagctgagtcactgaggactgctaccttagctcctcaaagctgttaaatttctcgaagggaagctgagtcattaggaaatgtaccagaataggagaaagtaggtcattttgctagacttggcaaaactttcatcagcttcagattcgcaagatctgcagttctcaaactccagggttaatcagaatctcctggagggcttattcaaacatgcgtgtctgggccctcctggcagagttcctgattcagtaggtctgagctgagccccgaggatctgtatttctgacaggttcctaggtgaaggtgatgccgctaaacctcggcccatactttgagaattgttacactagtgaaagcttggagagaaaaaaaaaattagacaagccttccccaaaggtttggcagtcagcttcatagttggatggaggaggacactaccatttattaatcactagatactgtcccagtcttgacattcaatcttccatccaattctgtaacatgagtcatggtatatctatgctgcataatcatctgtacagaactcacagaactcagttagtttgtttccttcctcttctctcctctcctctcctttttcttttttttctccattgccctggctgaggtacagtggcgtgatcttggttgactgcaacctccacctgtggggttcaagtgactctcctgcctcagcctcttgagtagctgggactacaggttcacaccatcacacctggctaatttttgtattttcattagggacgaggtttcgccatgttagccaggccggtctcaaactgctgacctcctcagcttcgcaaagtgctgggattacagatgtgagccaccgcgcccagtccagaactcagtttccataatcaacctgcccagagtttaaagccagagaagcaggtgcatctgaatttctgcctttgtctgtttagatctaaaggttcaactctttctatcaaaacatacttttgtacttgttctcaacgtgtctttatttcctcttctttttcattcatacatgttattcagaggatctcaaaattctttggagttttacaaaggaaaagttcaatttccaaaatttttttgcgacctgacatcccctactatcaggtaacactaatttatttaatattgactttgcttatgagtaatggcaatgcacaaagctgatgaaagccgaaattccatcagatggatttagcaaattaacaggagagagaaactacttagtttgtgagaaactactcgtttgtaaactatgcaaaaaggatagacattgtcttacctaatcacaaataagcctttcccaaaggaagtggttaccttttaaatgtgtgcacttatgtttgtttttaatccaaatttgtgccaaggaattatgtaattattatttctgtacaaaagttacttagccattcctaaattatcattcattgatgtctgagagtaaataattttagtaccactacgattaaattgtagcaggaaaaaaaactatgaaatagactcattctgagtcattgcttatagccatttaaagttgattagcaatgttagtttaggagatgtaaaaatgcaaaattttatttttaagttataatattttaatttgtaatttcaatgagctataaaggaatgtttatatttatggaaactctatgaaatataaagaaatgctctcacagatgtcattttagatatattaagtctgctaaattcaaataaaagttttggtactaacgtgtgagcacctggatggcgggggctgggtgttatatatttttacatcgaagatgaagtcctgcatagtgacttgcatgtgaataggagtcaggaagcattgaccaaatgataaagcattgctccagctgagttacaggcctattctttttagctcaaatcaacccattaaattatttgtgagataaaatttttctcaagtgtatttttccaataagaacttgaaaaagttgtacgttttattttatttgaaaatgtattaataactttacactattgactttctcctttcatatatttttaaatatgagaaggctattatctgtttatatgtgattatattgccatttggcctcaattgctcttactctcctcccccactgggccacatttctaggtcaaattattaagggaaaaaagatgcaggattttcaagatataacctctcacagagtatatatcttaaaagaggaaaatgtatcctgcacgctgaggattacctatggctaaatgagagttgaaaatagaagcatgtgttaaactggaagtcaatttgagagaatgtaatagaggacagtctgacaggtgttaatgttaccctcaaagggaataagctggaagctataaaaagtgtatgtagccaccactcattatgatacatgatattcttgctgacttgaagtaggaagatgaaaataactagtttgtttaaagctgcatattctgataatttaggatttaactttctgctttgaacaactttttcatgtggaaaaccttaactttttataggtataatttgttatttttaataatgcttataaaagtttttttaaaaagtaagctgtattgtagaaatcatcaaataccaactagaattatattttaatattttatagattttactcatagagtaaaaattacattgttagatatgtaaggggtggtaacaccttttaaaaatcttggttgtccttgtttgttctgtagtttatgaaaaacagagattctaaagattgcacctatgcatgaaatctgatttgctcttttgtgcagtataagagtatggctgatttctttcaattctgagaaccttacataggagaccccaacctctacataggttacaagtgaatagactctgatttccgttgattttatttcatgtaaaactataaccttcacaactacacatcaatctcaaacttctttgaatggctcactacttaaaagtcatttttccctaaatgatatgtatagatataagtgatctgaaaaatattttcaagattttattgtccttcttacctatatgcagaattgacatatatgcctatataaaagtggaaaatctgtatatgatgaaacaccatacgtagttaaaatacaagagccagattgagaaagaatatctgcagattgggaatagaataattaatggtcaaaggattggtatcttgaatatgaagaaaagtttctataaatccaaatagaaaaacaaatgaagaaaaggaaaaaaaatgcaaaggttttgaataataagtttacagaggaaaggaagggcaaacattgacaagatgctcatgctcactgtctaggaattggtaattaaaagaaaatgctttcttaagattggtaaaatggataaggagtgataagatagattcagtgttggctttctacactggtgtgggaaggcagttgctcttcatattaccaatggtggggatggaaattgctaaagcctttttggtaggatagtttatgaaacaacttttagaactaaaaacaatgtgtaacttttgatcaggcattcaaatgctaggtatctgttctagagaaatacataggcgtgtacactgcagaattgtaatagctaaaattaatccctaattgtcattgctgtggacacaaagttcatacgttgaagcattaaccctcaatgtgagtgtaaggagttaattaaagtaaaataactttgtgagggtggggccctgatatgatagggttagtgtcttataagaagagttataagagaacttgtgctctttctgtttctctctctttccccagctatgtgtgtacaagtacaaacaaggtccagtgagcacacgagatagccaggaggcttcctatacctgaaagtatttcttaagccattttcttcttcgtacagatgacacattacctccttgttggatgaatgcattgccttcttgttgagaaaaaaattaattcttataccaggagattccgactgcctgtaatgtgttcagttccctgaatcacagggaatatgcccagtccaccattcctttcaaactcatcctctgactgtagatgaaaggagataattagagtcgtagacattgggattgctctcttataaaatttactctatattttaatatagtcatatttgaagtgtgttacttttatcataatctgtatatatgctggttcaagaatagagtagtcatcacacagattaaggaatagactatcgccacgtatttctatatcctgaaactatatattgtttaggtatgtttgtttcttgaggaaaatgtataacagctatttttctgtaactttctttcttttttttttttttgctaagcattgtttatgttttaactacgttgataggagtagctgctgtcctctattgctataactatagaacagtggttttcaaatggctttgactagaagccaccataagaaatatgcttaaattgcaaatcagtgtgtatacacatgcagaattgaaacaattgaaattttagagttagcttgtctagattcatgaaaaaaactggagagtttaacatggcataattaataaggtcttaaatagtaaatacagttgtccccctttatctatagcttcattttctgtggtttcagttatctgtggccctaaaatatgaactgaaaaattccagaaatacacaattcatatgtttcaagttgcattccattctgaggagtgtggtaaaatctcgcaccatctcacctggagcgtgaatcatccttttgtccagccttttcactgtctgtaggctaccatccattccacctgctagccttctaagtcatcagttcagctgtggtagtacttcagtgcttgtgttcaagtaaccctcattttacttaataacgtccctgaagcataagtgtagtgttgttggcaatttgaatatgctaaagagtcattgtcaagtgccttaagtgaaaaggtgaaagttctcaacttaataaggaaaggaaaacatcgtatgctgaggttgctaagatctgtcacaagaaggaatcttctatcaatgagattgtgaagaaggaaaaagaaatttgtgctagttttgctgttgcatctgaaactgcaaaagttacaatcattcatctcacttcatctgatcacgtaggtattctatcatttcacatcctcacaaaaatgaagagtccagtgcaataagatattttgagaccacattcacataagttttattacagtgtattgttataattgttctattttattatttttattaatctcttattctgcctaaagtttataaagtttataagttaaactttatcataggtgagtatgtataggaataaacatagtatatataggattcagtactatctgcagttttaagcatctactggcggtcttggagcatatcccctgtggataaggagggaccactgtttactgtctgtcttttaagtttattcagttctgtttttagaagttagtaagtgtagggttttaatttgacaattattatcagcacattgaaaaatattactgcactgttttctggcttccagaattgctgtcagaatatcagctgtcagcctgggcaacattgtgagaccttgtctctacaaaaataaaaataaaaaaaaatagttagctgggtgtgtggtacatgcctgtagttccagctcctctggaggctgaggcagaaggatcacttgagcccaggagattgaggatacagtgagctatgattgtgccattgcacactccagcctggatgatagagtgagactctgtctatctatctatctatctatctgtctgtctgtgtatctatctattatttatatatgtatctatatatatattttaaacatatattaaaaataaagtctgtattcttaaactaaaagctggcatatgtgcttgctaacttcctggatctcttactttgaattttaccatctatagcttatttatagtcttcatttcataacatttttcaagtaaaattttatttgactttgttttgtttctcatttagagtttcttctgtctcattagaagataaagtttctagcttatcaataacaattttaaaaatcaatctttaaggtcctttttaaagctcttgttaagattctttaagttgttttctaatttctgtcatgattgtatcattctatttctttgatttagaggttgcttggctatataaattgactttatgaaaattcttgcaacacataattttagggaagaaaaatgtcacaaattagaagaagtggctattggaaaaagacatccactgagatttaagagtcaaatttggggtctattaatcttgacagaataattagagtgctgtcatttttcaagcagatagaaaaatgaatactctgtaggacatacaggacatacagaatctcctgagaattatgattatttctaattcacaaattactgtatgcatattatttaaaaatagaaactcttttggtaaatatgtttgtaattaagacttctaacagccattcagcattgctgtttcaatatatgactaggctgaatattaaccttcttgcaaccttttacgtgagtaagtttgaggcactgaattctaactaatatgagaagaatcttggtacttagggaatagtgaagtgctgacatctttgtaatctaacttctgaaccttttcatgaaatttaaatgttattacaatgttatcatcccaaaacgctaatttgcataatctttaaaagactgcattttcatacattaggccttcatgggcatctaataaatgacagttagtgacacgttacttagcatttatcagaaagaaaatgtttttcctcagaagaaaaaaatgctttttcaaaatgctgttcttcctttctaaatttgttagtgtattcttactcatgactagagcttatgtttaaattagcatttttttttgcagctggcctaggtaatcattgaaaattgggagttaaatgagttattattttatagaaggataagtaaattgtcatttagtatttctagaagcaatggtggtttctggtaatggagaaattgagaattagtgcatagcaaatgaaataaattggtatttttctaaaagctgaagcgttaacgtattagatatgtgcacatatctatgcatatgcccatacatgtctacaagtcttttggagctggcacatgttaatccaggtctcagatggtagtcaatcctgtcaaacaacttgcatagtttgccttggcaaaattccagtatttgatgctttcagatttgctacttgaagcttagtttgtattttgcctccattttgtttcatggaaaacagtatgtgatgtgagatttggtggcatgatattcctgttttgttacttttcttcttccgatatttctactaaataaacaaatgggaaatgagtacctcataattgaattcattcttccaaaagagaagaagtaattgaaaccactgggttgccttgatattttgcagaaagtaaacctttcttggacaactgagattgtctatttattgtgattgggactcataggcttttgagaggtaaacctgggtgaactttcttaatcagtcaaaaaaaatatgtatatatatatagatatatgtatatatatatgtgtgtgattgatggggtgagagtgatgaaaacatgtaaaaggcagaggcagttactgcatttagtgctcatagctcagcaggaagttgctgatatgaactcgttgtattcatattcgcttcgtgttagtgggcagtgctggcagggttctcaaagcccctgactcctactggatggcatcactctttttctaccttagctgagcaggcactgaccaaatgctgaaacatgtgactgcctatgagtttgcatagtttgtgagctagggcagggactgtgcttaatgtatcttttatgtttttgcataatgtcttacagtgctccacacatggtatacgcctgtttttgtattggtagcttgatcattatgactgtctggcaaattacactgaatgctgtacaaggaatcatattgtttccatctggtagagtaagacaaagactgtagaagtacagtcttttgtagaaggcttgcatttggtttatagattgtacttatattttggcagaagttttcttaaagtggggagaatgcttctcaggtcaggaaaacttgaataatgtaagtattcccaaatagaatgtcgatgttcgaagccattataaaatgaagcatagtgattaccctggtttataccagaggtactccattatttcccatttattaaccttggtgaaacacacacttccctttctgcttttattcctcagtcaccaagaaaaattgctaaacaaaaatagaaaataattcaagtctgcctgcctgtgtgagtttgctatttgtaagccctggaagggtgtggtaagcagtaatcatctcctcctccccaccatcatgctaaccaaagtgactttcctcaaggcttctgatttaatagaatagcagaagaatattagaatgagtagagtactgttaaactaatcagcttgttgtcagagtgaatggtaaacattgcaccaaactaggttctgaatgtaaactttattttacagagttttattctaacattaactttaaaatgagattcagtgatagttattgttttgctgtgactatccaactgtatttgagttttccattaaatattttatacaggttaaatagattagaaatcttggacctatgtcattattaataaatgggcacattgcaataaaatatacgttatcaactggccaacagaatgatatcaacaagaagaataaaaacacatggatgtagcatttgacaatccttttttttttttctcggctcactgcaacctctgcctccaggcttcaagtgattctcctgcctcagcctcccgagtagctgggattacaggcacccaccaccatgcccggttaatttttatatttttagtagagacggggtttcaccatattggccaggctggtctcaaactgctgacctcaggtgacctgcctgcctcagcctcccaaagtgttgggattataggcatgagccgccacacccagctgacaatcttttttcaataggtggttttgattgatgaaaaagtttgggtatgaaatcactacaactcccacagagtgatataaggaaggtgttagaaagtaatgacagtagtgtgtaacaaatgactgccctttaacacattctgaatttcttttagtcttttaggtttcttgccacaagtttttttttttttcttggcaaactctgctttcttaatagtgttttaggcggttattttgcttttaaattccagtggagttcagtgctctttaattttcattattgccctgtgggaaatactgcgtatatatttatgtgtatgtatagaggcttgtatgtatatatgtatataggggagattctggttaaggactgttacaacttagggtaataaataaagttaatttcataataaagcatatgactgtgtatttcctcttggccaatagtttaaatgttcatattgtaaaaagagagctgtcctattttttcccaatgcaaatcagaataatgttataaacatgaagtaaaaaaattttgaattgatatttaaatactggaaaaaaaatctatacacagcaagcagctttaaccagtggatttctagggattagtatatttctcaagaggctgaggcgttgtgcctttggtctcagtcttaatgtgcttgagacatgcaataattctacagaaatgcaatgctccagagtgtcttgtttcttaattataaaagctgttctaattattccattttaagtgctaacttatttaagttttaaaggctgagtaactcagctaaaatttatttaattgagatggaatagggactgttgaatatttagttgtcactaataaaatatagtatataataaaggaaagcccactacaatctcatttgtcttgataataaaaagttaacatttttgaagttctttcaggtcctaagttattatatggtatttctcaattctttgtattcaaaatgtaatatggaaataatgaaatattaatgtcttaaagttcattggattgtttaattagttatcaaaatattcatgaatttgatagaaagtgtttctgttcattggcattatttttaatattctattttccttataactatttttttaatgattatcaccatgggcatcttatcattcatcaaattttatcaggtattactatattctagctccgatttgataaacatatgttccataggaactattaagttatagattgtagtaccatgtgcaatatccataataaagaaatacaaggagaattttagaattaaaatagaggacatctcactcaccttagggagtcaaggaagtcgtcttggtggatgtcccacttgggctgaattttgaataacagttttttagtgctggcttgatgaagcctgaatgtgtgaaagtgaagacagaatgatgggctgggttgtgttgtttgaggccaagagttcagcaaactgcaataatcatttggtcttcattcagttctccactttcattatacagaataagtcagacgtaagaaagctggcaatggaagtcagtactggaacttcttatatacacaagctcagcaaactaaagaatatgctgacaaccataacaaataactaaatgagtgatgaacgaactttagaaacaaagaaaaagaaacagaggatatgttcaatcattttttccccacagatattaactgagcactttgtatgcatttagcatgttgctagaagctgaggagtcatcagtgaatgcaataaatatgatccttgcccatataggcctcattctagcaggtgaagcacattttaataaataatacacattttaataagtaattgcacaaataagtgtataattacaagttgtggtaaatgctaggtagaaaaagtaaaggagttagagaggatagaggagttttatataaatagagttagggatcaagctaacatgtctgtgggaggaatgttatgctgagacataaaagaagagataaaaatagcaatggaagagcaaggagtagggcatttttggtagagagaggagcatttgcgaagatcctgagaaagaacagagcttggagagttcaaaacactgaaagaaacatcatgagaatgaaataaagcagatgagggaacaagtgatgtaagatgaagcttggaggggtaggtggaaaggaactcaggagagtcaagaaacagaagagtaaattggaataaagatgtgaggagccaactctttcaaggtctatatggaagtagtgctgttcagtaagaactcaggatttttccttcttggatgcagcaaggaagatggataggtgaggtagaagtgatgagggcattccatgctaaaagtataggttagaataaagacaaggattttcctgagaaaaatgaaggaatctagtttggaataagagggggtaagagaagcaaggcagtatggataatctgttgaaaggtaatgataacgaagcagaaagtatgaatcttttcaaagataatgataatgaagcagaaagtggtgaaatgttctagaggactcagtaatggggcatcgttttcacccaagggtgaattgatgaatattccatactgaacacaccatgctgagcacatagcagatactcaatagctttcagaatcgttgacctcctcgggacatgaggcaaaatgtctcctgaacagaggatagcccatagttctagtcaaaaagaacaaatattagcaaaatatgaatattagtctcatcataaaggtatgtacacttctgaagcagctgtgttgtctgggatatacaccctggggttcatcactgcgcgccaggaaaatttaggtcctggacacacacaaggagtttaggaacgaaggtttttaataggaagaaaagaagagaaagaaaaaatagctctttctgtagagaaaggggtctccaagcaaaaaggaccagtgggcggtggatgcgctgaattttatagtcaggtttgaggaggcagtgtctgatttacatagggctcacagattggttggattaggcatgacatttacatagcgtgcaaggaaggctggtgtcaatatattgaccctgcctgggcaatgtagtgagaacctgtctcaaaaaatgagaactactaggctcaagcagttatcctgtctcagcctcccaagtatttgggattacagccacatgccacagtgcacgactctaaaaaatgtattttacatgatcacatgtaacctgaaaatacgcatatctgccgggcgtggtggctcatgcctgttatcccagcactttgggaggccaagctgggtggatcgtgaggtcaagagattgagaccatcctggccaacatggtgaaacccgtctctactaaaaatacaaaaattagctgggtgtggtagcgtgtacctgtagtctcagctactcgagaggctgaggcaggagaatcacttgaacccaggaggcagaggttgcagtgaaccgagattttgccactgcactccagcctggtgacagagcaagactccctctaaaagaaaaaaaaatatatatatatatatatataaggaatttaaaaatatataatacattattactaactgtggtcaccatgcagtgcagtagatcattaaaacttactcctccagtctaatgaaactttgtaacctttgatcaacatttccctttcccccattctttctccccattgctccatattctggtacccacctttgtactctctgcttctgtgagattggcttctttagattcctcatgtgagtgagatcatgtggtatttgcctttctgtgcctggctcatttcactgagcaaagtactctagttccatctatgttgtcccaaaggatggaatttttctctttttaaaggctatatagtatttcagtgtaaacataccacattttctttattcattcatttgttgatgaatagttagattgctttcatatcttggctatttttgaataatgctgaaataaacatgggagtgcagatatctctttgacatgttgatttcatttcctttggaaatatatccagaagtgggattgctggatcatatgataatttttatatcttttaggaaactccatactgtttcccaaaatggttgtactgattgacattcccaccaacactctacacaaaggttgcctttcctccatatcttcaccaatatttatcacttgtcttttttgtaatagtcattctaacaggcaggaggtgatatctcattgtggttttaatttgtatttctttgatgattagagatgttgagcattattttcatatatattttggtcatttgtatttcttcttctgagaaatgcctgttcagatcctttgcccatttttaaaacagttttctttctgttgaattgtgggagttccctatatattttgaatattagccccttatcagatggacggtttgcaaatattttctcccaatctaggttgtatcttcactctgttaactgtttcctttgttgtgcagaggaaacaatttttagtttgatgcaatcctgtttttctgtttttgctttcattgcctgtgcttttggaatgctatccaataaatcatttcccagactggtgtcatggagcatttcccttgttttcttctacttatagtttcaagttttatgttagatttctttattcttttgagtaaatttttgaatatgttgtgagataaaagttcaatttcatttttctgcttgtgaatatcccattttcccaccaccatttattaaagagactgtacttatttccaattttggcacctgtgtgtcataatttactataaatacttagatttctttctgggttttctgtcctgttcattggttgacgtgtctgttttatgccatccagtaccatgctgttttgattataaaagagttttaggattttcttttttagatcagtgtgtaatgcctccaggttttttgtttgtttgtttgttttgctcaagattgctttggttgttatgggtcttttcttgttccatatttgacccccactccacttttaaatttaaaaaagaatctctcacttattatcagttattgctgaagccagtgaaattcatattattatctgttttgcatcactgtttgaatgctgcatatcaatcccctggtgaactttgagcatcttttttcaactttcttcagttaatatcattcagattcatgaaggcacatctttcttcagcagttcataaattagcagcatacattttaggggagagccttcatctaaaagtaactctttatcttaagaataaatcctgtttgtatctgtctctcaagctattggtgcctttataagttatcttatgtggaagagaatgtaggggaaggaaaatttgttttctcacccatttctaggttcatgactgaggcccctataggaaaagacagatgaatgagaaaaaatcatacaaatgtacttaatataaaagttttatgtgacataggacacttcataggaaaattaagatgcaaaaaaacagagagacctgtgtatttttatgctaagtttgattaagaagttgataattatagataaatatttttggacaaagggagtatgatctaatggaattgaactgggggacaggggtcaaacaaggccttcttgttcatattcttctctgtgtcttcagagataagaatgtttctttcctccaagcataggaagaacacttctggggagaaagtcagagagtgacatcctcgattttatagcctgcttcaggggacaagagccaagggaaggtgagaatggccttcctgcttctgaagttttctcaaatgtcaagatgacataattagagattctgaaccccattaagagctcatcccaagacaaaaggaatgagacaaacatatccttctacagatccttaatcgtctaaagggagggttagtcctgaacacttggtaatttggatttgtctttcaaacggtacttcaatggaatttatctgggttcacagttccaaactttaaattatggtataaatggatacaatagtgtatccataatattgtaaatggattcaatggattccataagtttaagtatatataaacagcatatttaaacttaaggaaactagttaattgctcattttatcaaatacgttaatactatcatattaaccttagttttcatcaagtggtaaaatatctttaaagttaaagtaccagagaggatcacctcaattgaaacatgttcattgcagcattatccacaatagccaggatacagagacaatctaggtatttatcggtaaagaaactgtggtgtgtatacacaatagaatattattcagcctttttaaaaaaggagattctgctctatgccacaacatggatggtcctggagtatattttgctaaatgaaacaagccagacacagaaaggaaaatactacatgaactcacttatatgtggaatctaaaaaaaaaaaaaaaaggaaaatgaaatatatagagaggataaaacagtggttgccagagttggggtaggggaggaaatagatttaggtcaaaggatgcaacatagggtacattaatgatagtgtattgtatttacgatttttgctaaatgaatagattatagctgttcttgccatgggaggggaaatggttaactatgtgagatgatgggtgtgttaatttgttctacaacagtaacagttttactgtatatataggtgtatatattatatatacatatataatatataaaaaatatagtaaaatacatatataatataacatgttatataccttcaatatatacaatttatttaaaaactcatttatgatttcagttagaatttttaaaaacattatgcttcagagtatttattgcttttaaccctcacaaaattatgcatcattctcatgtttccaatattcacctgggtttgtctaagtatttgaggaaaagtaaaagtttttaagaactttattattctcaaatttcagtgaaattagaatgtaaaatcttagatgtgaatacttttacatgatgtttattaaatatagtatgcttcaaggcaaaaaaatatgacattgaagaccaatatttaatagccaattttttcttttcttttttctttttcttgaagtgagcagaatatgcataatgataggtatgatgaaattttatttagtggtattcggaagtattcgactttaacaagtatgtgctgttctgttgtgaataaaaatttgggaaataaaaactagaaactttactctgcacatattaggagtataaaagtagattatgtttttagaaatggatgagaatagccatataccccaacatcaagatctatggtctacaaagctaaaagatgtaaaagaaatgtggaggttaatacaataagagcaccctcccccatttataaaggtcagacatgcctatggtgtacattgctatctgtaaagattggaaaacctcagatgttgcatcttaaaatatgtacattttctgacatttgggtagaacaatataatttcttataaatgaacttgattcctgacattcagttgaatgttaatttaattttggtgctagtatagcaaagtcttccacatgtcatcgtagttgagttatcctaggagttttgatgactgggaataaagagggcctcccttgaaggctgggcagtgatggagacgtaagataaattcatagcagtaacaaatctagaaagaaaagccctagagcataacccacagcaaatcctgaaactctcttcctttaaggaatttcctggtggccttagggaggatattaatggaactctttaggcttaaccttgttaagggactgttatgcagcccttgttgttttctactttaaagtcaagaattttaagcagattagaatgaagaatagtgcagtgcagcataaagttagtattatactgttaataacattcatctgaattattaatttctgccagcagttgcttttaatataatcaggattaactgtagaaatacggattgttttcccctttttgcttttttatctgaagaataatttattgtaattaagaatacattataaaaacaaaaaggaatcgcagctataaaaatgtgttatatcaatgactgattatattaacattctatagctgtctaatttcttaggctaaaaaaaaaatcaaaggaaattgtttcattcaaattgttgagctttttgccatctttagaaccagtcagctagaggagagtgtttgtgacgattaccaagaatggttaaaaccaaaaggtgttggtttgcttgctctctcttctggtgagacagccatttgaaatagcattcaggcagcgtggcctggacgctgaagcagagcttggcagatggtaccgcaggatggagaaactgctggcagatggcatggactatttgagcaacaaagagacttttggctaccaatgctaagagttggaaagaaagaagacgacaacttctccagtgctgccagcttgtatacagaaaacgttttggcagaatggagactggtaaaagatattcaattgttaactgcaaggaaagagaagagttgttgttattaagtttcctaagtgtgctccctctggtgtgattggaacgtagtttcatatggaagagccctttagagatcatctaaaccaactatgctgactgaatatttggacacattcagtctgtttttactactgaaaagatatctctttgaagcattatttataaaaagtttaatccatgtttgtttttgataagttaaaaaaaaatctttattgaagaccttatttcccaggcttcatatgtgcagattagcagtggttcttgtttagcattgggctaaaataatgtacagtgaagtcaggtttggctaatatgacacaaaaatgtagagttttccctgcaaatgctatacataattgaatcactgaattacttagggggttatagtcattaccacacatctccaatttgttttctggaatctctgaagccacttattacaaatagacatttagttcctaatgatttcattgggggctgctacaatttttcatttgtagctttttcacctattgctacctaatacctttctctctctctctctctctctctctctctctctctctctctctctctctcgtacctcttatttgatattgtgtttccagaattaattaatttagatgactttcacgtagtaacttttatccacaagtaatactttaagcagaaatatataacttggtttttctaaaataattaatttaacatatcaagaatggtattaagaaaaatatttggggatttttaaatgaaatttaaagtggaaatgtattacttgaggtagaaaaaccaattctatacatattcttaatagttaaatctcctagctcactgaagtttaaatttttggtatctcaattattcagaaaactgctgagattttggatgtaattgaaaatgctactgaattgagatcaaaagggataagtaagttatattcagaatagtgtcactggagatgcctctgagccaccaaaattaccatcataatgattatttaacttttgagaagtactcttggcttttggactcttaccttacataattttctgtcagtctttatgatccagtttttctcagtctgtagaagactagtagcatctgactggaattagagggctgcaagagggaagcatgcagataaaacggcacagagacaggttcagataagaaggatcccataaaaattactcaattaccaaaatgaaatgatggcttcaaggcttcagtggggaaaaactcatttcagttgattcagttaagacatttaaaagaagacatttctcaaaaaaaaaaaaaaaaaaaaaaaaaaagaaatggctgaaagttttgtcacttaaagggcaaatattaattttttagaaaattcatttatttagaaactttcactccatgtttatattaggtaaagagggtctaaatcatgtatgactgtttttaccaatgaccaattttcataagtggaaaattatgtttcaaatctttgcttagaggaatatgcctttttagtctacgtatgatatccactcccagcgatacagctctttttccttgtcctcattttggcaatgaagctggtcttgctggaagtgcagtggaaacctctgggtcacacaagccaggcagccctcactgtgacttcgtcttatgcaagtcacatcactttacctccctggaccttcgttatctcacctggaaaataagggagtggcttttaatgtccttctttcattaatggctgaagcttttcctgtgattccagggcataatttattaaaaggaggaaaaattgatattgattagcatatatgaatagatgtttgattatcaagcacttgatacccgattccacatttaccactggactcctttgccttttagtactaggttcctcctctgtaaaacgtgagggttgatttaggtagatggaatatataaggtttatactacatcaaagactgaatgggttttagttaaattcatgattctctttcttttttgttctgtccccaagaacctctcactaggacactcacatctgttcttgtcaccagagcctcactttttccaggacatcccttttcccctctactgttgcagaactttcccctcagtttagtttaaaccaggttcttgtcacacgaccaggaaagattaggcttgagacacatagaggggtgaggaacagaacttattgggcaaatagtaaaacaaaaaaataacactcagcaaagtgagagagagtcctgctagcaggtttctcaccttacagattgaatcccagttcaccacccaggaactgaagaagccacaggctcctcccaactgcaaatggcgcaaacctccggaggctccaccccgtcctcccagtgtgcaggtgggcattgttcagagaaccagtcgggaaagggcgggctccatccgggaccagcagtctgttttttcagccttcaggctgttttaggcttgaagatggaatttcgctggggacccttggctgtctcctgtctctatcaatacctcttgcctcctctcccactgtgataaagtctttgcactgtgggatgagacacatgaggccttattcattgttgcatctccaccttccagtctgatgcttgttgaatgaattaatgcagatacctcttgtatacctgactcccagtgcctcatcctccactggagcgccatccttgcatcacctttcttactctggtgaggagtcgtactctcagcccctgtggtttgagacccccacaaccacttctggtatgaagacagacagacacccctcattctcattgtcagacactaggcattaggaatcggaatttcagctcttttcccatagaagcaatatttaaaattgtcacagctttggtattttaatataaatacagtgtgagttagaacttcggttgcctggctaaggaatctaaccattatttacaacacagtgttgtttctttggaaatttctattctgggttccaagtgactgacttgcaaataaactttggtaagacagtccatttgtagtttgcgaatggcctttaggccatatagatagaaaagcatattgggataagcatggatctcaatgtgcatgaaatttgcagtgcctcaaagacagatctttagtgtatgacaaaagacagagagtattcccaaataagtctttgacttttcccacagacaccgattttcatgttaagaaaaaccttttcagaacacatctacaagagcaaggtacagttgaattttatgaaaattgaatttgaacaagggctttatgattgcaaactttgtcaatccccatggtttataattccaaaaaaaagtttaagtgtatcactttcatttaagctgtcatctgtgttttgattttccatgggggtgttcctttcatcttgatagcgcttcactggggagattgtttgattgccaatagactgtttcctattctatctttatactttcccttttctgtgtcttaaagtcaccatcgtcatttgcctggagcacgacagcatactcctaagccgttcctgtacttctgtccttgccctgccccgtgccagatttgcatatggaagtcaaagggagctttacaatgggacccatttttttccatgataaaaccatccagtcacaataaattgacttagattaagatgtaaacttcttacctgggacttgaaaagccccaaatgatctggccctactatcttctctaattcagcatgaagcacaacctccttttgactcagcatgtcccagctaaactgacttttttttattgcttgaccacccaacatcctttcttgctagaactaatgcaatggctgtttcttctgtttgtttgactctcagaatctttcttagaattaaagtgtccacgcaaagtccccctattcaaagagtgcttctctgaccaaattatctaatatagtctaatattaaacatcactttcctctttctccaatataacaatgttttgttatcctcctggcattcgttactatctgaaccaattttatttatgggcttaaggtctatctcccacttttgaatgtaaactttgagacagaggacattgtctgattttcttaccaccctatacctggtgcttagaggagtgtctggcactttacagaaactcacatgtgtaagtgagtgctttgatagattactggcctctgtgcattagataccaataacactcttctgatgtgacaataaaaagtaccacaagacatcatccctggttgagaaatatgatatacagcaagaacaaaacaatcccatcaaagagtgggctaaggacatttgaatagacagttcttaaaagaagacatacagatggccaagaaacatatggaaaaatgctcaacatcactaattatcagggaaatgcaaatcaaaaccacgatatgatatcacaccacctcactcatgcaagaacggccataataaaaaaaaatagatgttggcatagatgtggtaaaaagagaacacttttacactgttggggaaaatgtgaactagtacaaccactatggaaaactgtggaaatttcttaaagaactaaaagtagatctaccatttgatccagaaatcccactcctgggcatctacccagaggaaaagaagtcattatacaaaaaagatacttgcacacacatttatagcagcacaatttgcaatcaggaaaatatggagccagtccaaatgacttccatatgcaaatgcccatcaatcaacaaatggataaagcaaatgtggcatatatataccatggaatactactcagctataaaaaggaatgaaataatggcattcacagccatctgaatggaattggagaccattattctaagtgaagtaactcaggagtggaaaaccaaacatcgtatgttctcactcagaagtgggagctaagctgtgaggacacaaaagcctaagaatgatacaatggacttcggggactcgggggaaagggtgggaggcaggtgagggataaaagactacaccttgggtacagtgtacactgctcaggtgatgggtatactaaaatctcagaaattaccaccaaagaacttatttatgtaaccaaacaccacctgttccccaaaaacctattgaaagaaaaagaaatagtgatatagaagaagagtaaatcacagtattagtattttagagtggaaagagtaaaaatgatgcaaggaatccattttcaccatttataagctacatggacctgtgctcttgttgcttaatctttgaaccttggttatgagttattgtaaggattacatgaagaccttgctttcaggacagatcctgcctgtggccagagctagcctcccaatccacctgcttcccattcatcctcattgtgtaccttcactgagggcttgtaccagagcattgtcatgtcctgtgtaacactgggttctttgagatgctcagtatttctagaattttgctatattgttttatttcactgtttttgattggtcattactcatatccagtggagaaagaatgaatctcaagatgtggcatggtagaatgctaacagacaaataggtccagggagctcaaaatccatttccaccatttattatcaataactctgggactttttgttctggttacttattctctgtgagcttttgttgtgagttattgtgagagttaaaagatataaatgaaacactaaaatagggattggtacatagttagtacttaatatatgtgagctgtcttctctcccgtttcttaaatttctcaagccatgtttacatacacaaacaagtatatttatccatacatatctgggtaatcattcaataatttattcattaaaaaaaggtattgacctcctacttattaggtgccagccctgttctggattctggagttggaacaacaacaaaaaaatacagtcaaaagcagtcattaacagtgatgattgtagattatgttctctgatgagttgtgtatgtgattaaaagatatatatgtgtatatatacatatatatgtgtatatatatgtttatgtatgtatatgtgtgtgtgtgtatatatatatttaaatcaccctattctatgaacagtaaattcaggggcgtaatcgtttgaaataatgtattataaaatattgtcataatctcagcactttgggaggctgaggcgggtgtatcacctgaggtcaggagtttgagaccagcctggccaacatggtgaaaccccgtctctactaaaaatacaaaaattagctgagcatggtggtgggcacctgtaatcccaactactcaggaggctgaagcaggagaatctcctgaaaccaggatgcagaggttgcaatgagccaagatcacaccactgcagtccagcctgggcaatgatagtgaatgagactctgtcgcaaaaaataaataaataaaataaaataaaattgtccttatcaaaacagtgctttcctaccacttggtaaagcatttgttgattttttttttcaggaatacaaatgcaaaatattgaaagcctgaacttttgacctaattagcttttgagtttttagccctaacaaatctgagtgatttaggcataaaacaaaacaaaacaaagcagaaaacagcttttcagcttgataattctttctggtttgttatacctctcaacaccttcaattctcaaattagtgctcaaggtctgcgttggtggctacatatatttctgcattgttgtgtcttccagtctgagaatatctgggttggaatgaatttcctctcagggaaatgggtgaaaataactttttgcaaaacatgactgcatcatccccgagcaccattacaacatgcttaatgggctgtatatagtatttttattatcttataacttcagctcccttaacttgtttgaaggtctttaaaatgcacctttgagcattgttccatgtgctttgtgtcccttgaataaatattatacccctattgactttttaattttgaaatttgataacagtagtgaaagagaaatccctgaccattttatgtgttttgccacttcatttcatatagcttctttctctttccggcgatgtatttagcagacatttctctgttttgaatgggtgttatttggttgttaaaaaaataataataataactaaatcccatcgctgcctgttaatctttaactgttctttaactgttgatatgagccaaatgggaagtgtttgaaatattgaaactgactaacctacaccttctactgtaaaaagtatgggagaggaagcagtgtcttgggctggcaaggaatccttatggactagatctcagagattgatggagcagggtctgagggactgtgagtgttccctgagagaaacatcctaggtgccatcctgcttagggcattgaacattgtgaaagatatctgtatatctcacttctggggtggtgaagggtctatgtgaatgacttcatacaggtctctacaaagtaagtcatggccagtctgggctctataaatagatagggactgtgcttaactgtcagtgaatctgagatattttgatgcctgttatttgttattgaggatttattatgagccaaagatagtgtgctgtacttttaaatctttattttatttaaccttcaccacaattccactaggttaatattagtgccattatctttattttataaattaaggactgattcataaagcttatataatttacatatgttcccagtacccataagtagtggaactatagtagaaggatgttgtacataatatatgaggtttaaaaattatccacacccatgccttagttgtagaattttaaaactagaaaaattttagaaattatccagtcttcctccactatcaccagtatttcagatgaggaagaccgtgaaacccggagaatttgagtttccttttaaataccctgatcaagctctgctactgtaacaacttcatgggaggaactctacttttagtgaattacacatcaatatcactttttactgtcgttgtcataaatactttagatttagataggtcacgaatgtagtatatttaagttcaaaacttagagtttcttaatctgttgagctggggaggattgcatgaggcaggattgagtgggactagttaagttgagacgatctgtctggactctgcatttgtggtggagatcccatgcaatggcaattaggtagaaagagcatgcaactttggtgactgacaatttgtacttaaaagccaacaacagggaatcaggtgttatacttatccgtccaactacctctgaaatacatgaagttacatgtatttaaaaggtaaaatgagatattccctgtatctgacctgtgtctaatacaactttgtaggctgtttgaggttgatgtatttttttccttttaaaggtttttgttgctatcaattatctactttatacagatcagatgtgatttgtgaaagcaaggaggtattatatgtatgatttttatggggctttgtagccctattagggatgggtctttttggtcttcttggttcatttcacagtttctcaaacttatgtgtggaatccacttgaagaacatgttaaaagattcacatttagaaattctggagtggggcccaggactgttctttcgctcctccttgcctagcagcccaggggattttgatacgagtgattcataatcaaactttgacaagcatagagttacaagtaggattgtgcttctgatctttctaagatgcctctgatgatctttcatgtaaaaaagaaatatttagcttattagaccactgacaatttctgggttttgccaaatctaaaattagagcctgaagattgtatttgtttatctttaccgagattatatttaggaatacctaggaacctaaggaaacaaaatatttcaatgacttctttgatgcagtatgaggttttccttttaatgtagacagtttatttttgttggctgtgattctttttatgcagtcttgttacattgggctgagacatggaggtaatgaatatttttcttatctaggatcaaagaatactgaaaacaggaaaaaaaaatgtgggtattcagtctcatctctacccttaactttttgatattcctgccttgctctcctcaagtgttttggaattgttttaaagatatgtgtctggtgtttttaatgttttgtttataattaaatgtcagaatatccttgttttcacaatggctgcaggtgagtgatatccagtcaattaccagttttctgttacctcagccactggtcagcatagtgttttctgatagggctgtacctactgtgagaacaggttgcagaggacactgattcctcctttctaccctcttccagacctgcctatgcatactagtgaaacaggtatttgttttctctggataacaccctcttcgccctccatttctctgtctctctctttcttgcccttttccaaggcccccaatataagcattttggatggggtggtagagaaagtccccttagattgagaagccagtaaacttaagtatgctgtcaggcttcaagccaaataaagtgctgagcatgacaattaattggataactaccagaatacctcttactgtaactataattcagaatatccctagctgaagttaaaaaaatgatgttaattaatttgaaagttgctaagagtccctatcaaatgcctgtgctctgtttgcatgctaggttttggcattgtgagcaagaggagacaccgatagtgaagctctatccttctgctagggatttaatactcttgacaagccaggaaataggtggtcatgtctctatctcaaagatggaggagaatgaaatgctcggggtaagcgtttcaagccagagctgtcctggttgattaaggtcatctgatcactttgctaagtaaaataggaagatgaggacacatgttgaagagtttgcaagaagagcaaataattaaatattttcttttaagctctgtgaaattaacttggaagttttgttgcatttcagttgaataaaaataatacacaaaaatgagctggttttttaaagtgaagaaagaggtgcacataatgtttcctttgtgtcttttgaatattttatttggaaactagttaaatttgcttaaatacccatttgtttttggtttcagggattttgatgtttgttttgagatcctcagcaacaaattatatttagagaaatgtgggattgcctattattaagacattttaaattgtttgaaaatatttttaaaacataataaaagatttatgctttttaattttgtatcatcaaatccaaactgcaactccttatgttttaatatataatcatacatacatatatcatatattgggacattaaagtttagggaaatgcagtttgcagtaatgactttagatgttcttcctggctctctttaattttaggcccaaagttattttcctagctgtattcacattaattgtttagtattttactgcatatttttgtgtttttacattacagagatatttgtagactgttcatgaattgtaattctctttttaaataacccccttttggggactttgtgtgaatttccctttgatttattatagactataaacaactcaacagactctattgtttgaataaaaaatactaatcatgtcatatttctgcatcatatcctgatctatccttcaattttaactttagaagtagcttcctctttgttttcctgagctcaaggcagaattcagaacacttagaacaatgtatgagacagaataacattttcaatggggggaaaaaagttcaattctaatcccttctcacgttatgttttgtattttttaaacttgaagtgctagaaaagtaaataataatgatatgaatgatttttttccttagaaaatcaactgtcaattaactaatgaatattctttttaatcagtgttaattgacaaatttcctgcacttacaaactcactgcttgcataatagtttcattttgactcttcctgatttcccttttatgtgttggtagtcctgttgggtgtaattctgcattattttctaaattccctcatctggagctagatggagctatgagatcttttgtaaatgtatacaaggccagtggctcttcttcatctacttgtggcattaagtagattaaaacccaattttaaagctttcttgtccctttattcttaaagacagcatggaagagaaagtctggatatctaaaacacagtcattaaaatggacagtcacacagttctttaattatcatttactactgagcaactcaaaaaacaaaaacccaaactcccaaaatcaaaacaaagaaaaacacccggctacatatatacctattcttaacactattgactcaaaactacattaaatgtgttttcattaaaaatataattatttttgttttgttttccaaaagattataattctctcagaaatccacacaatacagaaaatgatgggaaaagcatatggcaattgttttaggacttatctgccaaattttatacatacacattttatagatagatacatggatagatagttatatatataacatacatgtaatatatatgtatgcatataattatataaaaatgtagaaaatatttcacaaggaaggattaaaagttttgcttaaaaggttttggataaaatgtcatcttcagtttccctgtatatagggacatttagatgatctcgtcactgtatcttatccatgcctacagagcattttgggaggaaaggtattcattttttgtgtttgtttagttttttgctcagctttttattgagctagctatgcggttttcttgacttgttattcagtgtgtttaagtcctaagagatgtgcccagactgctgtcatactgtttaatatctgttaggacagaagttgttaaaggtcatctacctactttgagaatctaattgtaataaattcttctgtgtgtttctctaattggattaactttagctctatgctgttcacatatttgggtaattatatgaataattttcatttacctaatttggcagatactacataaaccaaatacttatttgaactctacaccatcttgctttttaagttacttgtaggctttactcttgagtcttttattgtgaattgtatccttttaaactttaatgtccctctatattctgtccttatttgcttctcaaatctagagaggagtaaacagtattttaaacaatttctaaagaagtaagaggtagggaggtggttcttgatttggctttaataagcacttcacttgaagaaagggcattttactaatctagctattaggtaagtaaaaagataaagataattataatgtaatgattataaaataactagtagataattaacagatacatagatagaggtgttacatgtgaaagacctgagcagtgaagctctgcataagaaggacagacactaaagcgtatatcctttacaggtagaatcttgttcaggatctgctttttcttgctttacacacaatttgactaggcttcattctcagtcttttaccctaaagaggacgtgaatgccattcagtcctcacaacagtaatatatggcgaaagctgtttttcctatcatagcaggcaaggcaactatagctgagtccaagccccaggtctgaaagtgggagatttagactcggttgtctgattctcaagccagtgatttccccagccattcattattcatttgtcccccagacacttcatcacccatccgcaggactttcctaagcacgtattttgtgccagacactcttttaagttgctaaccatttaatggtatgtgagactgatgaggtctgtgcatccatagaatacaaatgcttttgagggtaggcaaacagtacatgagtttgaaaaacaaaacaacatgaaattacaatgtggtaataaagaaacaggatgatgtgtgagtagctagaaacagccctgggtaggttgatcagggaatgtctgtctgcagaagttacacctgagtccacgtaatgattctagctgcaaataagaaaacaaaaatatagtaggcatctggcagtgagagaagaggcaggctaatagtaaacaagaagggcagataggaataaaacaaaactaatggccatgtgtggtggctcacacctgtaatcccagcactttgggaggctgaggggagcggatcacttgaggtcaggagttcgggaccagcctggttaatatggtgaaaccccatctctactaaaaatacaaaaataagctgggcatggtggcgggtacctgtaatcccagctacttgggaggctgaggcaggagaattgcttaaacctgggaggcagaggttgcagtgagcccagattgcaccatcgtactcccgcctgagcgatgatcaaaaaactctgtctcaaaacaacaaccaccaccacaacaaaacaaaacaaaacaaaaaacaaaactaagtgtgggagctctaggtttaggaacaatgaatggccccttttagcacacatgtctctcatgacagccctgtattacatcagggtacattaattgatgcttatgatgattaaaataatttatacaaaaagatgcgtgaattctgttttaaaaagtaagcactcctgaacaattttaggaaaagtactaaatttgaaataagttttggtgcttaaaatgggtaaagaaccagtagtaaaacattcacctcaaaagacaattacaatattggggatgacagagaagagagaagggaggcctaactgtaacatttatatttcttagtttttaaaagatatccagtacatatggatatacaaggtagggtaaaattttttgttatttttttttaaaaatcgaggtataattgaccaacaaaaggcacaggttttacatgaacagcttgatgggttttaacaaatgtagtcacatgtgtcaccaccactccaacagagacgtagctgtttttcattatttcactaagttgccatgtgcctctttccaattagttcttccccacccctgaggcaaacactgctctgatttctataatatcaccctagcttggttctacaagtgcatataaaaggaatcatagttgctattttgtgggacttgggttctgtcattcaataatttttgtgaaattcatccatattgttgcaggcatcagtggtttgctccttttttattgctgaatagtattccactgcatgaatatatctcagtttattcgttctcttctttagctattcctgtggtcaagagatgataccttgtgtttttaatttatatctcccttatcattcatgatttgatctttttatgctttttaaagtttaatcaaggttttcaacaattttactaaaatataacttacataccaagaagttttcccattttaagtatacaattcagtggtttctggtatatttacagagtggtacaaccatcaccctaatcttaggacattttaatcacctcagaaacaagccttttactcattggcagtcactctccattcccaatctatataattttaacagtcttataattttgtatattctttatcaaagtcctagtaaacagctctctcggctttatatctgtacaccttaagcatagtgatggtgtgttgccttctagttttcaattcctttgtggagcatcttgtgaaaatctttagagggagtcaattagaacagtactctcaaacttgaatgtgctttcaggtctccttgataaaatgcagattctgattaggtgggtctggggtgggtctgagattctgtatttccaaccaattccgacatcatgcccacactgccagcctggagaccactttgagcagtgtggtaagagactttggttggcctgccttgaaagagaaacggtgtcacaaagactgtatgttgtaactcttttatctgacaatttatgtgcacatgaagtttttgttctcagagcagttcttaatctgttttgagtttttacaagttcgttacttctctttgtaggtatgtaaaaaggaaatggactttgagagttttaaaggtaggattaagaaggcggccctaaaaatcttacagtatgtcattggtttgttgataactcactgaagagcctgctgaagaataaataagaaacatctgtacagggtgaatctttcgggttctcactggggacctgctgactctgagtaggctttcgtcaaagcctctttgcagggtcttgcctcagtttctggatccactccttcactggcttctccgaaagcctttttaggacctggatttgaagagggaattgtactcctgtttgcagaccatggcagtggagccagttgtaagctattggcctgagtttcggaaacagagtggtgtatccatccttgtaacagtcagggagtggattatcaatggaaacggaagtaaaaaggacatactgtattcagtactcacattgaaaacattaattttggatttaatctttgcctcataaaatgcaataatccaaaagctcatttccagaaccctctttccaaatataatagcttcaactgaatcaacgcttggtaaacgtgatgtatctctagtttaaatgcaaatattttcttaaagttggctagaaaggacatttttgtagagcaaatcaaatttttccactgttcatcatgtaattggagatatgcttctatagacaaaactgtcgttggattgagttgaaggattttgattttatgcaaaaaatttagaagtgacagacaccccatgctactctaagccttagcagatgcctaggcctaacaagtaagatgcgaagaagactgtacatcttgatttttttgtttttcattcttttaacatgttggaactctgcctctactcagggagttgctccatcacgttcatatagaaccctcttttgaggccaagtaaccccaggcactcctaatccagcttccttgttttccctcatgtccaatttttattgggttttaagttgtattaaaggtatattttaccagtaggggcctctgctttatattgtctgacgtcttgactgaaaagcccttaattaggaggtataagttatgtaaatcaaagcgctccactgtagcaatttcatataaccattttatttaaactgaagtacagtggacccttaacctgtgtttgaactgtgcaggtccacgtacacatgtattcttttcaaccaaatgtggattgaaaatacagtactctagatccctgaggaatcgccacacactctagatccctgaggaatcttcctcaatggcacatatgcaccatggaatactatgcagccataaaaaatgatgagttcatgtcctttgtagggacgtggatgaagctggaaaccatcattctcagcaaactgtcgcaaggacagaaaaccgaacaccgcatgttctcactcataggtgggaactgaacaatgagaacacttggacacaggaaggaaggggaacatcacacaccagggcctgttgtggggtgggggtagaggtgagggatagcattaggagatatacctaatgtaaatgatgagttaatgggtgcagcacaccaacatggcacatgtatacatatgtaacaaacctgcacgttgtgcacatataccctagaacttaaagtataataaaaaaattaaaaaaaagaaaatacagtactcagtgagatggaaactcacatagaaggagggctgacttttcccatatgtgagttatgtgtgcctgactgccagactagcgtatgtgcagtttttgataactataaggtcctggaaccaatgcctatactgagagaagactgtatatattaataattcttactgtccctctactcttactgtccctctaccaaagaatttcaccaaagatgccaggattcacaaaggctgaatataccatgactttctgaattgaaacaggaaaacactggtaattttttcaagtactggaggggcatcaaattaagatttatttagtgatggtaatttcagtaagtttgcagacaggagaactgtgtgtttctacttcagtctagccaaatactgtgtgtcagtttggcaataccagttaggagccctacattgttgttcatttcagagagaataattctggctacagcaatttaactatggtatgtatgttcttagaactgagtaactaacttcctcagactgaacctattaaattagtttcaatttcctgccaaaatttatagacaggttgtaaatgaaaaagctgcctctgcccttcattatcactatgtatcatagtttttaaaataaaaatgttatttacttgcatctactgtcagatattaaactacagaggcatccatcagcagttttgttggcactgtaaagaaaaaagtcatgtaacagcacacctggctttagtgttatagcatagagttagtgttgcaaggtgactttgatatgtcagaaaagctaattatgtgccatcaaaggactgaagaaattgccttttttaatgaaaagtattttataggaggtgacaatgatcttaagcaaagcagtaaaaccgggtgtataattatataaattctttaaattcttattagacttagctaattgacatgttactgttcaataacacagaaaaaaattgttaaacataaaaaccagagcaatgattttgaactgtagagataaagtctaatcttaaatggattcttttgccatttttccttccaaatacagtcacaatttttccttgacattatttatggtaatgcgtgtttttattttgtattaaaaaaagagtatagcaaattttaataagaatgaactgttagtaacatatatatgccccttcaaataaaaatgcaattttcttagctaatggtgataaagtgcccgagtctattttcagttttcttgatacgtatagatgtaagtgtgtttatgtgtgtcacacatatatataaatttaatttttatttctttgaggagccatattgagggggaatgtgaagtgggtcctgctgtttggtatatcaggattaagagcagaactttttattgttagctctgacagaatgtatgtgattattagtgatgtctttttttagaaaattgtaaattataggaatgctacacaggaagaaagaaatgaagcatacagtagttatgtaggtttacaagattgacaattttttttttccttcacagaaagttcagtacttaaagcagaaagctgtaattgttggttgctgtagatgcccttagctatttggaatgtggaaagatgtatgctataaatgttttactcctataattgtcatcccttcagaatggttcaattatagctattttgtaggaaaggtgcatgaagaaacaatttctggcagcattctgtaatgaccattcaagtttttaaaaaattgcaaatgtaaaataaacaaacccatttttgttactggacagggagcacagttcccaaagcctcctgtttcacatctcagatgacaggtcaagcaggggccgtgacaggcaacccacaaagtgtagttggttttggtgcttggggtaagaacgtctcaggacatgctcaaggctatttggatttatgaaactgaaatgtcttgatttaaagtgaatctttaaggtatcaactgagccaggtcatagagctctggactgtgaggaaggagttgggttcattaatcctcatgctaacccatgtgtgttgacactaatcaactaacctcacctctctgagcatcttacaatgacatggtcagctctaagactgcttagattatatggcaatgctacactcctggaggaaaccaatgtgaaaatggataatctgtaaattttcttgggaaccaaatgcctgtatgggttgtgggggtatagtgcaagattctgaaataactcctgattgttcttaggtatatgccctttgtaaagctattaaaggttgttaattaccagccttaaaagattggggaattgaatgtttggttggaggcggtttggcctgtattcttacttttggctagccaaattgtgtacttacatctgacagcttaattctgaaattaggtttgcaaagcccggatatcagtgggcttattctttttgccagtgctggattgagtatccaacagaagtcaagtgccagagaccagtcagattgaaatagactctaactgatgattagtagagtttcagtgggaaagtcagagttctattcattttgattgttttattaagtgtgaaatagctaagcatccttttttattgatcagacataatgtaactgttctaaaggattgtttctttgatatacctggattgtgcttcctaaagggaaaaagactggatccatgattttattttccagactaccaactcctgatacatgaaaattgctctataaaataatctctttctcttagttgtttgtgatttaatatagtttagcatgttggaattaccaattgttccctatctctgtctttgactaattgccagaagtttcatttaatagtatatgatacctactattatgtgttatataggtatatcatacatatatagagagagagcatgcatatatgtacatgcagtttgaaatgcagcagagtggtcgagcgcggtggctcatgcctgtaatcccagcactttgggaggccgaggtgggcggatcacgaggtcaggagatcgagaccatcctggccaacatgttgtaaccccatctctactaaaatacaaagaattagccaggcatggtgatgtgcacctgtagtctcacctacttggaaggctgaggcggggaatggcttgaacctgggaggcagtgattgcagtgagctgagatcatgccactgcactccagcctggtgacagagcgagactccatctcaaaaaaaaaaaaaaaaaaaaaaaaatacagcagagtatgcagaagccctgttatctccaagaagtatccagctgatgtggggctgcacacaaatgacttttgcatggacaggatatctggtctaactactctaaaaaattgcataaccctatagggagccagagctaactaatgcagtaattacctaggagtagagccaacatcctgcaattatattagaacaaacgtgctacagtgtttctgtttatatatgtctcttggcatcttgaattaatattttatcatatttcattaagaaaaaatcagagatcagagaagtcatggaaacaagatcactagaattacctgttgtgtagggttagaaaatttctatgaaacttctcccatcttgacaaaatcatttaacactactgaaaacaattgatgtttacctcatagttaagtagaggcaagcatttccttgaggtctgtgcgttagaaaaccatgagcgtattagatattatctttagctactcagttttttcttttgttttcaaagtatgccaatattgttaatatgtactttttatgtggttgaccagtctgtatgtgtgtgtatctatgtctatgtaaaatgccattttcaacagtttaattatattacttaaatccctttcggtggggggtgctgaatacagagtatatcaacaaagtcaagatctacacgttgataaatcttaattgaaagctctttcttcagcagattgctgtgtattttatacattatatgttgacaacgtaacatttaaatttttgcttaataagaaaacaatgagggagagttaagctttttttttttcttttttccttttagccctgaaggactcaccagtgttattttgattgtctgggaaaattagttgttttgagttatagatctcgttctgaaaaagaagaattgctgaacttggtagatggttgccaaggggcatgctgaagccaactgagaaagggcttctttgaaaggcaaatttctgatggattccaggccaggctaatgaaggaaactctgaagctctatgtgtcttggagtagtgggaaaggagtaacagatttttcagagaaagattttgcaacccagagtcaggagtgctgctgctgtgtgttgtgcatctgctatcaaggactgcctagtcgcctctttttctatctgagagctgcacaggagtgcttttgcactgtccctgaatcgtgagtgttctgggagaggcaaagctagttccaagaatcagcattaccttgtggctttcacttttagagggtctggagatagctgacacccttgactgaagcatcactaagacacatcctggcgtcaggcagcacagtcgccttcttacacatgtatgcttccttttttcctgtagcaagggatagaacaagatctcacctgaactggagcacaaagctataaactgacttttgctacctttggaatacaatcactggagttgattttaatttctaaactggatataacaagaaaagcaattttctaaattccccatatttaaaaatctgtaccatttctctgtttcccagaagtacaaatccattgagaaacctttgttgctgggcaatatttgaggcctattgcatgcagagttattatcatttagtgttaaattctttaaatattttttctagattacatcttttggaggataataatcagataatccttctataatcctcctaaaatttagcctaatattgggtaatctacaaatgccaatagactgctttaccactgaattgatttcttttatggcaagtgtctgactgcaaaagctttatttgtatattgcctcttttatttacctcccctccttcatccttcacaatgaattgcttaatgtattggtaatcagactccttgacaaaacatgcactttgaaagctgcaggctggttctatgggctacaaacaaagagtcctactattaggatcttttcaatgtctttaccttgatttagaaccttggtactcagagtatagcatgtggacagcagggcatcacctgcaagcttattagaaatacaaaatcttgcccttcctcctcatcactgatttagatggcttttcggagaggtcaggtgattatgaatctctaataaaggttttaaactactgcaatagaacctcagagggttaacctacaataccatcaaataccattcagaatgagcttggcagtcctggtggaatttggggattattctattcctactctgcattgctttacttggaaaaaggggactggatttttctatgaaaagaatgagcttcccgtgctcctgtaaagacaccttgtagtctatgtctagaaagcattccttaattttcttcaatctgtttggaatatcatataaataaaaatttgtatgttttctttgtaactctggaaatgctagagaaaataagttttcaaatggttgttgaatcaccatggttgtcataattacttacccaataaatagtggaaatcatcatcgacaccatccttttattttccttttcctcatcgttttctcctcatcactatcctaacagttagtctctgtcattgtgttaatattttatttttcaaagtactgttgagacctaaattgttgctgattgtttcatttttgatcagttatgtgttctgtattcagatgcattaactatattttctttttttattttatgtgtatgtatatatatattatatatatataatatatatatatatataaaatatatatataatatatatatatataaaatatatatatatatatatatttttttttttttgagacagagtctcactctgtctctgaggctagagtgcagtggcccaatctcgctcgctgcaacctctgcctcccgggttcaagcaattctcctgcctcagcctcacaaatagctgggactacaggtgtccgccaccacgcccagctaatttttatttttagtagagacagggtttcaccatattggccaggctggtctcgaactcctaaccttgtgatccgcccaccttggcctcccaaagtgctgggattacacacatgagccaccgcacctggcctatatatattttttgagacggagttttgctctgtcacccaggctggagtgcagtggtgcaagctcggctcactgcaacctccacctctcggttcaagcaattctctgcctcagcctcccaagtcactgggattacaggtgcgtgccaccatgcccagctaattttttgtgtttttagtagagacggggttttactatcttggtcaggctgatcttgaactcctgacctggtgatccacccgccttggcctcccaaagtgttgggattacaggtgtgagccaccgcacctggccactctattttctttatgggaataaatacaagataatagctaaatatttcatctttttctaggattaaagtgaggcttcttcaccttagggagtagcagaaagatgatatctgagagcccacataaacctagaaaaccattgtaaatgatattgtcgccagtgagagaagagccaatggggtgaaaatattaatagattatgtctacaaatttgaaatgttaccattgaaataaatgaatcaggctcacttgactaagaaaaaaggaaaagctttataatttgaatgctttcaaatagaatagtgtgtttataatcaatagcatgttttctttttaaaatttcctatattttatttgaagtcatcatgaaatgtaaatggaatagaaaatttccttttggaaatagcagaatgttctctttttttcaacttttgagttctgaggtacgtgtacaggatgtgcaggtttgttacataggtaaatgtgtgccctgttggtttgctgcacagatcaacccatcacccagatattaggcccagcatccattggctattctctctgatgctctccctccccctggccccagcaacaggccccagtgtgtgttgttcccctctatgcatccatgtgttctcatcattcagctcccacttgtaagtgagaacatgtgatgtttggttttctgttcctgcatcaatttcttaggttgctagccacctagtttgctgaggataacggcttgtggtccatccatgtccctacagaggacattatctcattcctttttatggctgcatagtattccatggtatatatgtaccatattttctttatccagtctattgatgagcatttgagttgattccatgtctttgctattttgaatggtgctgcaataagcatacaaatgcatgtgtctttataacagaattatttataatcctttgggtatatacccagtaatgggattgctgggtcaaatgatatttctgcctctagctctttgaagaatcgccacactgtcttccacaatggttgaactaatttacactcccatcaatggcgtaaaaacattccttttgctctgcaaccttgccagcatctgttgtttcttgactttttaataatcaccattctgactggcatgagatggtatctcattgtggtttttatttgcatttctgtaatgatcagtgatgttgagcttttttcatctatttgttggcctcatgtatatcttcttttgaaaagtgtctattcatgtcctttgcccactttttaatggggttgtttttttcttgtaaatttgtttaagttcctcgtagactctggatatgagatctttgtcagatggataggttgcaaaaatgttttcccattctgtaggttgtctgttcattagcagagtgttctttataaaaataagacaaattgtatgtcattttttaagagagaactaatattaaataccatttattctaatcatggcacatgttttgcttcttcttcatgaaactcctgtgaggcagattgtgttatttatattttaaagataagaagatagactcattgataaatggaaactttattcaagatctgtgcttattatacttagatattgactgttaaaaaggacatatagattggaaacaatttgttgagcctgattagttattatacagaatatattttaatgtgtttaggtatctagttgggggcctatatgtccagtttcaaagttaaatggtgataaccctgaatatttgtgaactctagttttatatcctcagtagagcttcacatattttatagttgctcaagaaacatgtgtggaatacatgctgaatgagccacacactcctccaaccgcctgagaagggggaagagcttctcagcacaatggtcaccacaaggtgggccacttctcccacttttctttttctaagtggcatcagcatgtatttggtcacctgcagagaatagctgaattgcaaactcagtttcccatcgttattttctgttcacaattttggggcttaatgatctttcagactatttgaacatgttcaattttgtttacaaaacccacaaagcatttttcaagctgagtcaactatcaaagaagaaaagactcggtcatctagtggatcttctctgggtggattggttccatctaccgaatgggatatgaggaggcaaaccttaccctcccatttctccataaaccagagtcgaaaattaggttgtgtgtttccagtctatttttatgagttcccatcataagtcacaccatccatcatagcataagcatttgaccctcattatgagacatcaagaaagctgtcaccattgccctagcaccagtgtctccagtaaatattggaaatgttaggagatctcatttagtaaattcctgagtgttgcctgccagcgcattgggtcttagtgttttatgaattattctttagtctatgtacttttatcacacttgacagttatcataaatggtctttaggctgaatactagtttttaacaaaggaaaatactcaacattattaagaaggacctgcctggatctgctatagggatgcagaatatagaaattaaaaatatttgagatcgatgtctgtgcaacatatgaaatcatgtaaacagatacaatcaataatttctcttcagttctaacagagccccataaaaacgatttggttcagtttgggctacctgggatggctaaaaaataaaaatgttttctgtagacttagaaccaatctggagatgaggacacttaaaagttcttgtcttctgagggattgtcagacaggtggtgtgtttaacatcagggtgtcatacaaaggcattttcttagatgggctttagcctaatgaccatgactgcctaacagtcactactggtatctggcaggcaattgaggtatttttcaaaggcccacagggtatgtatcattatactgagtgttttatgcagaaaaccctttgaggcatttttttaaatcagttttttttaatcagcttttagttccatctgttcaagaataggtaaactgaatctctttggttcctttgttttttatttagggaagttatctgttcaattgagatgaatggtaatgggattatattactgtaattcatttattaaaggagtattagaatccatagtagtatgtttccatctcagaacccacaaattaccaattaaacacaatcttccaaaacaatgtgattattttcatttaagcctattttggaagctgagtcacttgccacctgcatatatctttgtttaaaaagcattagtggaatattactgaagccgaagccattacttggttgtgatttacacagggaaatggtgatagctgttcatccagactgcagcccagtcactttcgagatagcctgtctgcatgttggctagttgtagcaagttttaaaagcaaaacactcaaattataccacgttgaaaacatgaagaggtgtttttattttttaaaaagaacgaagagatggcaaactaacctataaattaaaagaagcccaaactgctgtagatgaggatgctgctttctttgatttaacagtattaacagagcactattctatatgcagcgccatttcataccctttgggtattttagcaatttgaaatcacatcccttccctcaagcagaatgcaaggtaactggagacataaaatgagcacacatgtaaaaccaaatagcgatacaaggcaaccctaccagaggcatacgaccagacagtgcatggtgcaatgccagaagttgacactgtcattgggtgctgtggatttatggcaaagggctcactatggatttgagaagccagaaaagtccttagagaggaggtgaaatttgagctgattcttgaggaatgtatgagaactgttaagaccccagcattccaactgggagggatcattggtgaagtgtcaagatgtccatggcaggggtgcaggagagaggtgagcagcaggagaataatgagggggctgagatcagaagagtggaagtagaatggcaggcaaggcacaagcaccagttttgcagggaggagagaagggtagaggtattgaaaaacctatgcttttctagaaatctatgtggaaatagctactaaacatttgtggatgtgtattgagatttatcaacaataaggctgaggataccaggcttgaagtgttcccaacagagaatattgggtggcaagtgacagtgatgcagagtaagatatgcagtagaccaagatctggcagagaagacaagagagcaaacagaggagaaagggagagagggagggaactgtgttgcacaagccaaaggaacagatgaggccttgaagttgacatcaaatgggacataaatgtgttagaaggtgtgaagagtgactcatccctataatcctggtactttgggaggccaagccaggcagatctcttgagctcaggaatttgagaccagtcttggcaacatggtgaaaccccatctgtacaaaaatacaataattagatggatgtggttgtgtgcttctgtagttccagctactcgggaggctcaggtgggaggatcatttgaacctgggaggtcaaggctgctagtaaccaagattgtgccactgtactccagcctgggcaacagaatgagaccctgtctcaaaaaaaaaaaaaaaaaaaatgtatggagggaccaagatgaggaggcctgagaaaagttcattttcatgacagtagaaatctcttgagaatccaataaaatggtaagaaaaacaaacaaaagataggataggagagactaactaggtattttatgaaacataaggctggtaaattgtatataagctaaagaattatagatgaaacttttgataatagactgtttatccctagataaccaaggccagatgaggaatattatgtgcagtgccagggtgagataagtagagagataagtagaggtgctattgctggactcccagagctcaatgccttatgcttctggtgttgttctctcattgtggggaaactgagtaagccgtgcgtctttttcattttgcctcccagttactctagattggttttctagatccattaactcttaagggtcattccagtccagctctgagcacatcaaatctattgcttctcatcctttacaccaataagcttgactccttctaaaggtcttctctgctcttcatgatctcgattcttcctgcattcctaagaatgaaagacacaaatagcttttatagagaatgccctgtgatagataaagcagttgtctctctactatatataaaagggatgctgatatttgccatcttcctcaatgagcaggaccagttacatttgcagggcccaatgcaaaatggaatgtggacccattattctcaatttattaagaatgaagccaacaacaacagaacaataaaccaaacaaagtagggggtcctctttgtgcattacccatgaagccagccctggctccagaactgttcaagtccagctagatggcagtgccattctgccattataagaagcagcatgatctaaaggaatattacagatgtttaaacaaaaaattgaatatgtgctgagtaaaattcatttatgatgttaaatgatttccaacagtcagcaggcatggctgtgtatacctctgatagtcattcacagtgtcaaactacttaggcttactttttacatccagttcaccactgaaccttcaactgattcaaggctggtgaagagaaaactgaagatgttaggactcttccagagtaacatacggaaagtttcttttccgtgaaataacaaactggttttctaatagctgtattctttccaactggaagcattctaatcagttacccagaattgctgattctaaatccatctgaattatataatgtgtttctccttctatagaaagaggtatacagtgtttttttctggaaagttaattttacttttggcatatgttctctgggactatcggttttattgcaactggatgcagaatttaccatgtctgctttgccttctccgccttctccgcatgccagcaggagcactcaccacactgcaatccatctggcccctggctggcagtctaggcacagtgtcaatgctgtggtggccctagtgtgtacaggaaggtatgctttggttcagaactgcatacatagtaggcattttataaatacttactgaatgaataaatagaagatgacaaggcatggaacagcataatggtcttgggaatgcttgtgttttcctaatatatccagaaggagaaaataattttcagcccctagtcaagaagtttcatttgcctccacattcaagggtgggagtatctcagttgatgaaatatatgcttctgaccaaaacatgtatacattgaatatatattaaatttattgggtaattatttaaaggaacagtatgttaatggattttccttgttttgggtaccatcattgatttccacctccccccaccacatccccttatagtctttgtctgaggatttcactataaatgaaattagctgaagaaaaccaggagaaaaccaggacacatgcacaacggtaagtgtcacaaagtgacaactgagctagatgtacacatggcctaaggcctgctagccacagggaggcagggatgtcccctcttgctcagcctcccatcctgtgttccctcactcatttttattaagtgatagcacgtttcactgcagctactacagcatctttgctgtctggagggtattgttttggatgcggatgttgtttaggatttaaaacaactgtgacattgatccttttcaacaggcaagagataatatctcttgccatcatccactgcctccacgaggatattctaggaatctgtatctaattacctgtgcagctaattaccacttccatgttaagcagcagcagtaatctctttttcctttcaagtccattttatggcatcaaactgtattatattctcttttcaatggctgctgacaaaattacaacagcaccacccaggacccgatatggaatctgcctgcccgtgattcaactgcacgctgtgtgttttctcttaagtccttttcttttttttttttttttaaccttgtgctattaaatacctatacatcggaatcatctccccatagctccatttgtttgattagcattacgatactgtgacaagacactatatcagtagtaatcgatctgattagcatggagatgatatgaacacagattgtattgatgtttaatagtgaaggcatccaggtgctgtaaacattatagatgtttttgtatgctgcgtgcaaggtctctgtattgaagacggcaaccgcagcagattttagagctcgatgatttattttatgccaagtgccacagtgggtcttgcatagtgtatggcattcctttgctttatcttgcacaaaatgttttaatcagtgttcaaaataatgcaaatattttcactggagagattctaatattgctttattaagagatgcttgcaatactgcagtaaaaagcttactgcagtctcattgaaaaccagccacattcttctctgaactcttgtctcttcccttactcttgtcaccattatacctggagagctaccatttgccagctaatattcagccccagatgttccccctggacaatttttctgaatttgcctatcctttggctctcagtagttaggagtattttcccctgggcagttctagagctttgtgctcctgttctggtacccctggctctgtgtttatgcatccatgcctctttactttgtaattaggatgccccgaaggtagtcattgaaaattaccatgtctttgtacatggcaaccagtggaatgcttagcattgattattcatttatttatttaacacatatgtattgagtgcttcatgacgcttatattctgctgagagggagagagacaatataacattataacacaggtaatgataagtagatagggggagccagaggggacaaggtgaaatggagaatactgtcttatttgtagagaagaggaagagcttacattgctatgaaggtgcaatcaaggtggggagagagcaatgagtgtgaaagccatagtctggagtgtgcttaggctcttccagcaggagcaaaggaacacctgtgcctggaggtgactgtggagagagttggaggtgaagcttgacaggtgcagtgggtggaggaagatcttattgtgggccacattgaggatgttgactttgacttggagtgaattgggcactcattagcttagaccagaggatttactttgaataatatgaaacagtctcaataactgatctattcagtatggtagccgctagtcatgtgtggctgttgaatacttgtgatgtggctaccttgaattgagatgtgctatatgtaaaacacacatggattttgaagatgtcgtatgaaaactaagaaaagtgaaatcatctgatatataattacagtaataggatcactagctgctgtactgagaaaagatataggggtggaagtgtcaaatggtttggatcagggtgatgtcagtggagatgaagagatgtggtcagattctgggtgtattgtgaaggcagcctcaaaaagattcattgatggattagatgtggggaaacaaaaggaagtctaagagtcttttctgtgcaactacaagaagggagtccttttcttgagatgagaaagactggttgaaagatctgggctggggaaagggagaatcagtaagttgttagtgtatgtgttaagttagagataacaattacaaatctagacaaaagatgatttgacagttataaaagactggagtttatagaaatggctcatatggagaaataaatgtgggtgtctcagcatggaagtggtttttgaatcataaaactggatgagaccacttagggagtgaatgtaggtctgtgacttagcccaggacattccagtatctatgtgtcagagaaaggttgggaaaatgcaagaactggcaagggaggagaaccagaggagggtggtgtctaagcacccaaatgaagaaagtatttcaagaagaagggaatgatcagctgtaagatgagtaagatgaggactctgaaaaatggtaatttgatttgacaagttggaggtcactgatcattcccaggagagctatttcattgaaatggggagtatgaaagtggaggcagtgagtggagccagtgcttttaaggtgttatgctttaaagtttaacaaagaaatgagaaagtgcttggaggagaatatagagtcagatgagggatttttatgagatgaccacaagtataactaaataaatggtttttttttgcatgatagattaataaataagcaaatgcatgtatttaaagattctaaagctgtgctgtccaaaagaaattgcatgttagccatatatgtaattttaaatattttagtagcctcattcaaatgtgaaaagatacagcacaaattaattttaatagcatagtttatttaactcagtatatccacaaacttgaatatataatggaaaagttatggaaataaggcatgttttgtctcatagtaagtcttgaaaacccatgtgtattttatgtatagcacatctcagtttggggtagccacatcgcaagtgttcaacagccacatgtggctagtggctaccatactgaatagctcagttcttaagactgtgccttatgaatagaaaagagctgttgttgaaagtaaagcagaataacttttattatattattaattcaaagtatatattcataaaagtttatgcaaaatgaatgagaaattaattaaggctctgtaatttgttccatttatgtgattacataagtaaatctattttatatagaaaatatgactgtgtccctttcaaagacactaagaccttatcttaaactctattttagttaaaaaaaaaaaaagttaattgccatttcaactgtgtggtttgtagtaaaatttgaaatgggtttaatgtcatttataacatttgtaaaattttgggtgatttaaagggcattaagggtttttttgatgaattatacatgttggtattcagagattaatggtgtcctttgcaaagaatgtgtgtattctacttgaatctgttgaaattgtagtaatggaattgcatttttgcaaggctgtatgttatacagacattttctttaaacaaatagtttgaggtgaggaaaaaacagaaaaaggactataaaccagggctggaatatgttaaatctcattttttaaggaatattaacaaaacatgaaagatattatagtgacaggcatttttactttttttttttcatttcctgtcatgggcaagtcaaacatccatgccccagcttcctcattattaacaggagatatattaaatgctccttaaaatacaacacttctgtgattctctgaaatggagcttattatagtaaattgcaaatttctagtaagttataactgctgaatacaaacattttgcatctaataatgaaaatatgaaataaagaaataaacactgtaaaacccaacccccaaatgcttgaagatcactcctgggctgagttgttggtgtttcagggttggacatttaaaggggatttcatgaaaattaaatttcttgggtttgttttttcaaagttttaaaatatatgtttatagatgacatggataaaatgaactaaggtaatataaatagtgcctttcaaagagcaataaaagaatgcctttggtccataaaaggagagattatcaaaaagaataaacttgattagaagaaataaaagtagatttattttaaaagggaaaatggaatttattcctttaaaatacagaagcactaacttaaaaatgtttggactatagtaatagattttttgaaaagtagagaattaaggagaaagacctaccaaaaaaaccccataattcaagtgtacatggagcaatgtgaagggaaggatgtgcaaatgtgcatttatgttgggaaaaatcaaggagcctgtttaaaaatagaacctacttagagacaaaaactagattaggaggcgttaggttatgttagaaaagtagtttattttccttctacaagctgtatatggtttttgaatcatttttaaaaggctaatttgaaatgtgttttgcaattttaaaccaaaagctttttatgcaactttaagaaaaggatacttatcctatttttataaccatgaaatatctataactttgcattacctagccctttaaaactcagaatataatttagataatttacaaaactgatgttataacccagccaaagctagtgtttttcagttatcaggtatttaaccgatatatatctatgagatttcttaaatttatattaatttattctatgaacatttatactatcacatatttttgtaataacaagctaagaaaattattattgttgcattaaattgtttactgaacatttattgttttatgcaaataaatgttttcaaacttagtgagctcccccgccaaaaaaagaaccaatactaactgtattgtgctttatctttaggatatattatcctccttattcagattccatgtacatatgattccttatccctatttacactcacttttcctgagaactttttgactataggaactgaaagagtatgtgcatgaaagcaagcagttggaaaggacttaaaaatacttaaaagaaatagtttttagagttagatgggggtctacctgaaagcagtattgactcttattttttgtaaacaatatctgaaaaggtagacaggatataaacaaaggatagtactattgatttagctgtatagtaaatactccctttcaataaaatctgagcataaataattttctgtgacttttcttcaaccgtaagcactttggttttggaatgtacaggttctctactcagactttccttaaaccaaagttttctgctgtgggacctctcacactgtattctctgtacttgttctgtgaaatgggattctgcaaatgctagctattattattcatcactctacttagaataattaacaaatgagataactagaggttaggttttataaaggaggatgaattagatgtcagcaaagtaaggggctttttgcattgaatcaataatgaaagtaaataaaggtaagaggaagttggtcttggcctccatgtcatgcttctgtttctgggtattatctagaggcgctgtgctgcatattgatgatgtgaagctcaagggctctggagttaagctacctgggcttgactggctgagctacctctgcccgtggtggcacctcggacatgtttatcccatccatctaaacttttattacatatatatgaaatggaggtaacgttttgaatctaccatactgtagagattgatttgagaggacaaattgaaaaggtgtatatgagtccctttattcagttcctggaacattgtaagagcttaataaatgttagcaattaaaatcatcatcagtattgctttttattatcagtacaagtactccttgtaagagagactaatgacaagactctacagtcttatcatttagaaagggagtggacaatatctatttagctaggtccagtacactaaataaaggctatctaatgctttaaccattgttaacttccttattctgagtctctaagaccaaggcagaatgtcattgtttggaggtcacagaataagaaagcctttgaacttttgtctaaaagtaaaaattgcctggtatgcatatgatcttgaacacataaaaatgattatattagtagtaaattgcatctgtacagcagagcggggttaaaaagattttagcaagtgaacaataataaaaggaaattaattgtgtgctattcttattgacttgtgtacaataataccatagatattcttattttaagtgtttttcccttatgttgttcatggaaatatttttcacaaattaatttataaggtcttcacaaaattatttataatttagctattaaatccctggtttctataagggcttagacatatcagaatattttgatttgtgagggactggtatacttgtgtctttattttataagcagtttctcatttagaccttagtaaaattgccctgaatcaatgttttagaggactaagagttggtaaaaagtcgcataaattgtgtgtagctcagtgtgtaggccgtaataaatatagaactattaaacctgtaggtactgttttttttttttttttttttttgagaatttaaggggattggaaaggtttactgaaaggagagaaagagcaacaatggactgtctcccaaaactctgattattttttttcttaaaccttttcatttggagataattgtagaattgcgtatggttataagtaacataggaagatcctgtgtactctttatccagttgcctctaattgtaacttataaaactgtgcaacagtgtcccaaccaggatattgacagtgatacagtcaagatacagaacagttttgtcaccacaaagattccttgttaaaattctcatgtttgatggttaagttacctcaaagggattaacttaatactgagattagttcaaagaaacaagccacaaagcaagcaagggaacattgatcattgctttctgcctcttaatcggaatgttgtggtagtcaatcaagcagcaactgtgagcagagaacaaaagactattaataaacctttaaagtaaaaaaaaaaaaaccctaaaatacctgataggccttggttgagtcaacaaacagaaggtttctgtagttaataaaggactaaatgaaaaacttcaatgaaaatcactgaccagtttggaataatgaaaagctctgaaggtggtagtaatgattggtgcacatgttataaatgtacttcacaccaatacactgtatactttaaaatggttgaaatggtaaattttatgtatattttaccataataaaaaaaaaacataaatgaacaaacaacaatgacaataaaaaccatggaccatttctttttttttatttttaatttttgtggttacataggtatatatatttatggggtacatgttatattttgatacatatgtacaaggtaaatggagtatccatcccttgtagcatttatttttttatgttacatacaatccaatagtagttattttaaaatgtataataaattattgttgattatagtcctcctgttgtgctatcaaatactagatctcattcattctatgtacttatatttttgtacctattaaccatccacacttcccccatccacctctagttttattccattgtggtcagggaagatatttaatacaatttcaattttttttgaattcttaaagacttgttttgtggcctaacatatgatctattcctgagaatgatccatgtgctgaggaaaagagtgtgtattgtgcagacattgggtgaaatgttctgtaaatatctattaggtacatttggtctgtagtgaagattaactccagtatttctttgttgatgttctctctggatgatctgtctcaagctgaaagtggggttttcaagtcagtagctattattgtaatgggggctctctttctctttgtatctaataatatttgctttatatttctgggtgctttgtgttggatgcatatatatttacaattgttatgttctcttgccgaattgacctctttatcattatataatgacctttgtctctttttatggtttttgtcttgaaatctatttcaagtctgatataagtatagctactcctgctcatttttgtcttccataggcatgaactatctttttccatccctttattttcagtttttgtgtgtctttacaggtgaagtctgcttcttgtaggcaacggaatattaggttttttttttttaatctatgtcttttgattggagaatttagcccatttacattcagtgttatcattgataaataaagacttaatcttgccattttgttatttgttttttagttgccttttggtcttctcttctcccttccctcccttccctcccttccctcccctccttccctcctctccttccctccctccctccctccctcccttccttccttccttccttcctgtcttccttcctgtcttccttccttgctgtcttcctttcagtgtaggtggttttctctgctgcgctgttttaatttcttgctttatattgttcgtgagtctgttgtatgttttctgatttgaggttgccatgaggcttgcaaataatctctaataacccattattttaaactgatgacagcttaccactgattgcgtaagcatacaagcaaggaaaaaaaactaaaaaaactctacactttaactttgtcccttcattattaatattttgttgtttctatttgtatcttactgttatgtcttgaaaagttgttgttattatttttaataggttcatcttttagtttttctacttaagatacaggtaggtcacacaacataattacagtaatataatattctgtgtttttcagtgtattaccagtgcattttataccttcagataattttttattactcatcaacatccttctctttcagcttgaagaactccctttagtgtttcatgtaggacagggtctgctgttgatgaaattcctcagtttttgtctagggaagtatttcttcttgattgaaggataattttgctggatatactatcctttgataaaagttttttttttttctttttcttcagcagttaaaacatgtcttgccactctctcccgacctatcaggtttccactgagaagtctactgccagacctattggacttcgtttgtgtattatttcctttcacttgatgcttttgggatcccctctttatccttgacctttgggagtttgattgttaaatgcctttaggtagtcttatttgggctaaatccgcctggtgtttcataaccttcttatgcttgaatattgttgtctttctttaggtttgggaaattctctgttggtttcactttgaataaattttctatccctatctctctctttacatcctctttaaggccaataactcttagatttgcccttttgagggtattttctagatcctgtaggtgtacttcattgttctttattcatttttcttttgtcttctgactgtgtattttcaaatagcctgtcttcaagctcactaattatttctctgcttgatcagttctgctcttaggagacaccgacacagtcttcagtatgtcagttgcatttttctactccacaatttctgcttaattcttttaaattatttcaatctctttgttaaatttatctgacaggtttttgaattccttctctgtgttatcttgaatttcattgagtttcctcaaaacagctattttgatatctgtctgaaaggtcataaatcttttaaaaggtctctccgggatttgtctttggtgccttacttgtttgttttgtgaggtcatattttcctggaccttctttatgctcgtggatgtttgtcattgtctgggcattgatggcttaggtatttattgtagtctttgcagtctgcttgtttgtacttgcccttcttcagaaggctttccaggtatttgaagggacttagatgttgtaatctaagtttttggtcactgcagccacatctgcattacctaaaagtaacactgtgacttttgcagacttttacaggtaccatcttggaggtcttggataagatctggaagagttctgtggattaccaggcagggactctttctcttcccttattttctcccaaacaattggagtctttctgtctctgctgagcttcctggagctgggggggaggggtgacacaaggacccttgtggccatcattactgggattactgggactgcgctgggtcttgcccaagacctgtgataaccactgcctagctagtgcctatgtttgctcaaggccctgagactgcagtcatcaggtggcagccagccaggcttgtgtccttcccttcagggcagtggtttccccttggtcccaggtggatccagagaaccagtcaggagccagggcctggagtcagaaaccttagaaatctacctggggctctattctatggcagctgcactggtactgaagccacaagacaaagtcctttcctctcttccttctctttccaaaggtaaagtcgtctctccctgaggccaccactgcctgaggcctgtactacctggctactgctggtgttcattcaagacccaagggctcttcagtcagcttatggtaaatgctaccaggcctgggactctccctttagggcagagggctcccctctggtatggagccagtccagaaatgccatccaagtgccaaggcctggaatcagggaaccctagaatctacttggtgctctaccacactgtggcagagcttgtatctaaggtgcaagacagtcccctttgctattccctctccttgtctcaagcagaaggagtctcttgctgtagccatcacagctgggaatgtgctgggtcacacctgaagccagcatgtctctgagtctcactcaagggccacagtgagaacagcctgggtactgctgctgattattcagatcccaagggctctttagtcagcaggtgatgaatccttccaggactgggtttttcccttcaaggcaggtggtttcccttctggctcagggtgtgcctggaaatgttgtttagaagctatgccctggagtgggggtctcaggagtctgcctagtgccctattctactgtggttgagctggtatcccggttgcaagacaatgtcctctctactcttcccctcctctcctcaagcagtagggaggaacctcccggagctgcactgcctggggttggtggggtggtggtgcaagtactcccttgctgcctggctgcatggaccgtttcttgtccttcaacttcaattcagaagctgtattttagataataacttttctttcaaaattatcagttaatgttttacatagaaaaggctgttttcttttaaggagctgttggaaatttaaggtttgcttcaagtggttctggaaattaattggtctttgttctctactcatgattttaggggttaaagttgagactcgagattaaaatatgggttataagcatgagtgtgatcgcttctgaatagctagacgtttttaagttgtataaagaatgagtttcagccaggcgcggtggctcaggcctgttatcccagcactttgggaggccgaagcgggcggatcacgaggtcaggagatcgagaccatcctggctaacacggtgagaccccgtctctgctaaaaatacaaaacattagccgggcgtggtggcgggcgcctgcagtcccagctgctcgggaggctgaggcaggagaatggcgtgaacccgggaggcggagcttgcagtgagccgagatcgcgccactgcactccagcctgggcgacagagcaagactctgtctcaaaaaaaaaaaaaaaaaaaaaaagaatgagtttctgtttgttcctagagttatctcctaagcatttctttaaaggaaatgtcctattttttttctttctcttttagaaactttaatgagttcatttcatcccttcctagtatatttggacaaaatgaagttatcttgccagcaatggctcctgaattctatgtcctcttcttcagtgcatctagttttatgggtacgactggtcagtgaattgctggtcactgcctaaatgtcctggaaatggtaggtggtgatgacacaaagaacatgccaagatatcctgtggctgtagcaagagtttcagagagaaaactcaaggagtgaactgtgtttgggttgttgaggtaattgagtgagaggaaaagatttacatttctatcatacaagccagagaagccattttcccatgtaggcctttatggtacttctagttttaagtgggtacttacattttaaaatgagaaaggttgccattctcttagcttaccttgtagggcagaaaacatactaggattatgagagatggaatagaattttgaatttcaaaccaattaggaacagcttgaataaaatagaactttcttatgactcagagtgaaagaccatgcaagggctaacatttgacatttcagcagcaagcttttagagacattgtgttatgtatttgaatttcttcttctctgtggggagtaaggccttaggacatgccatttaattacatgtttaatgtgttttgttttatattaccacaaattggctaaaaccattataatgtgctaaaacttatccatctcttcaaaatctaaccatgttgtttatattgataacttcttgatattatgaatcccacaagccaagaatacttacatgttgcaagagaaaccttcctaatttgttcacaaattttctgttttttaatttcctgaaaaatttcctcattctctttttatcgatctggaataaaatgaagaattaatatgattgagactatcttcatctcttcctctctaccttttcattaaaaggcaatcattgcagtgtccttttatatgtaaattttatttttgcctctaactatcatttagctttgtagaagctaaagctttaaaatggcaaatagaggaaatttacagagatgtattttcagtttctatagaaccttcttaaaattagatgaccaacctctactcaatgctgagattattcattatgctgtcaatgtataattatctgtcggtctactatttgtaatttctctgtgctgagatatcccgtttgctattgaatgctacttgaaagaaaattattgatctataccacacataagagttttgaaatcttcccatcagagtatattgcacctttagcataaaaaaggctctgatttattttactttatttttttgcaaatagctgctttatagttctttaagttcaattcaatattactctttgttaaactttaaaaaagtcttcattactttcctttgttaaaccatttctgcattcttcagataatccaggatggtttcagtaattaaaataatttagcttcatcactgttcaacataatcactgttaagcatgttaattcagatactgatccttaacatttttgactgttatgatggaggcctggccacagacgtaccttgtgcatgtttttaaaaaacctaacctgttaataatctactccaggttctaccagtaacccaggggatatttgttttcttttgtggcttcttccaaggaatcatatcaaattcctttggaaaacttgtattatttgcatccatcgtctacccttctattttataccccctaaatatttatatctactatgtagctacaaaaattaaaaatgaaaaaaattaaaatttaattttaaacatcttgtagttgagaagcaagtcgtccaatatcagattatacttatatatacattatagttatggcaatgcctttaatttcaatgcttttttttttagaaattctgaactatccatgaaagattttgttttttataattttccattaagagtgggatgttaaatatgttctctactttttattttaaaaaggacatcactacatgtcgtgatagtttatgtttcatgtgcatttatgttcttcacctttatgttattcagaatttatttttggtccacatatgtgatgttaaaatcttaagatttttaaagtttacaatatgtagaatgtaggtgtgttactgaatcactgttgtactgcatttgacagcttatgtatttctaataaaattaaagacttgggaaggaagcatagaggatcaagaagagactaggctttggaataagataaatttgggattgaatcctggcttattttctttttctgagctctgggaaaaatcacaaactctaaattgctggattgttctaagaattaacagagataacatggagagatccctaatatatagcagtacttaagtgtttcccctacctccttcaaggtcaactaagtgaaagaaaaggtaaatatcagaaagaggcatcttggagcagtgccccgggatgtgatgttatcagcaggagttaccaaactgtgtagcagaatggaccacttggtggtgtttgggacctggcatggtgggagaggagaggagaaccagagagcagggcttcagaccaccccttccctggtctccagtggtatagtgtgctgtctctcatttttctttaaatgtgttaaataaattgtggtttattctgataattctttgaaagaaaaatggctttatcatttaaagggaagatagtcaagtggccaaatataaatatactctggatcactaaatgtaaccggttttaaaactttgtgtaggatgtattaatacttaaaaaaatgatgagtttttccctcttgagtttttccctctggaatgaccttcaaaagagactcaaatctctgctgtaggtgagggactgaccaagtgggtgggcacagtggcaaaatattggtagacaaagtgaacagaggaagagtgggggttaaattagattttactaggcagctgccctctccttcctacttaatgtgctcaagaggaatgaagccaacataccacttaaaagggttagtcgggggaaaatgactcttgaggaccagtagcaaaccagttagaaaccagtggtttctaacacctgaaaacattcctagaaatgaaaagcagttaagtcagtggaaagagaaaggagagtaacacgtctaagactaagatgttcttggggttaatctaggaagttgaaaatccggatttggaaggcaaagggaacaggacaacaagggtagttgtagccattactttattttgggctagagtaatttttgctaaataatggcttattaaagggttcctgatggtagtttgtgattgatgtagtgccaactcttatttctcatctggactgggtagctggttaaataatttttctgtgacttaagtaattatttagaagtcatggtaactatttgtcaaaaagtaaaatgaacccagctctctctgtatgagattctggagtaggtgtctccttcagaatgcaacccatttagactcagacttttcttgctttgaaataccataataactctgtcatcacataaacagtgaaaattgtagttagaatgctaaagcccattttccccctttgttttctcttttcattggtgtgtgtgtgtgtatgtataaatgaatgaatatgggaagagagaattctcctcccgtgccagttatatatatgggcagtagaccttattattaactagagaacacatggtgtttggactgttattgttaatcatttcttttgctcagtgtggtatccaagctataattttgatgccttcccttatgttggtaatttagcaaccattgttctgtttgataaccacagcttgacagatatattagcagcctaactaatatttgtaaaaagagtgagttcaaaatttgtttttacatttagcctgacttccagccatggagaaaactttctttgtaatgtggtcaccaggttgtgtttttttcaggcttaattttatgttaaacattttacattggattatttcatctgcgtggttttgtacaccatttgaattgggatgcttatggtgatatcttggagaatgtatgctatttgcagataatgaagattgctgggaaattttagcatttttgtggagaattgggtgtattaaaaagtagaagcaaagatgctgatttttaagtggaaaacatgaaagcttttttttttcttttcagactgagtcttgctctgtcgcccaggctggagttcagtggcacgatctcggctcactgtaacctccacctcccgggttgtagcaattctcctgcctcagcctcccaagtagctgggattacaggtgcccaccaccacacccggctcttttttcatatttttagtaaagacggggtttcaccgtgttatccaggatggtcttgatcttctgacctcgttatccacccacctcggcctcccaaagtgctgggattaccatgaaagcttttatttagcaactgggaaagtacctgtggaggacaatgactagggctgtgacagatgatgtgaatccatagggccatgcttctaggtcttgtctttgaaagttgtaaattttagtacaccttcatttacatttctatttgaatgtaaattatattatgtgataaaattcctctggaggaaaattcccaatgcagctaatttctctggagccccctgctactaatgcagaataaattattcttttcagggaatttcactgtgtcactctgggtggtaatgcaaggcacattgggggctcagccaaagccttagtttcatggaattcggagtttgatcagtgtttggtcataaaattgtgtctctttatagatattataagactttcttgacatgttacttcatgggcttgtttctataaagagtggtttttttgtcttgttttgttttgtttttgacacagagtctcactctgtcacccaggctagagtacagtgttgcaatcttggctcactgcaacctccgcctcccagggtcaagcaattcccctgcctccaactcctgagtagctgggactacaggtgtgtggtagcacgcccagctgatttttgtattttttgtagagataagctttcattatgttggccaggctggtctcaaactcctggcctcaagtgacctgcctgcctcagcctcccaaagtgctggaattgcgggcatgagccaccgcacccagcctaaagagtgttttttaagttcccttctaactatttttaacacccattggattcactacaaattacattgttaccagcctctctatcataataatgaattttctaagccccttggtgctatcctataccaaatgggtgtaaactgatataatatcttctatctttgaacttgtaatataagagaataatgataatgaaggaaatagtaagataatccaaaaatatgaacacacgttaataattcttaataattgaatcataaaaattttcagctaaaaggaaatctaaatatacttaaatataattatcacatatcgaagatgaaattgaatcccatataaatgagttgtccaaattcatgcaaaaaggaagtggaagaaattgaacccaaataccacatttatttcttgaccattgtttttgtcatcaggcttagtgaaatgttagcaatatctttaaaactcttctaccaactgggaatatttttttaagtggtatctggagttgcacattgggggaaatcactactatacttttctttgtatgaaaacaagtgacttagcatttgcttaatgctctacaaaaaacaaaagtctatgagatacaaaagaatacacgagactgaaatggagcgtcgaaatggaaataatgttgtactggagcctagactctgttgggcttactgtcatccttgcataattttagaatcctctgtgaaccaagtgaattagtagtatctaaaaagaattgatgcccagtagtagatactaaagacccaaaaagattaaccagaataacgtttatgtaaaaagaagagatgtttactttttctgtagttctgttagattacttgaccaaggggtttccataaatatagtgaatttgacttgggtaaaatgtattaaaaataaataacaaatagctttcatgagaccttaaggcccatataaaggcataagtctcagtgataaaaacattgagtggtttcatactatcaatagtgtccttcagcagaattgctttttattgtttgtaactcagccaaaagggaagttattaccaggagtttagggatcttaagcatctgcaggagggttcagaggttatgcagtaaggaaccatgcagatcatcaaccttaaaaaaataaggccatcgtcatacacttttgtcaagatattaaatttgtacaaatatttgggaaagtaatttggctataaaattgaaaatgcacataatgttacagaaattacatggttaggtaggcatccattctgtggaaatgaaagacaaaatttaaaaacagatgcacacacacatacagatgtttattgcagcatcatttgttaatggttcaaaaaaaggcaacataaatgcccattcgtatcatgcatataaattattggtaatatatgctacatatttactattcatccttgtcaaaaaatatttgtgcattaattttggaagatggccatcataaatatagataaatataaagttcaatgttaataagtacagattctgaagctggattacttggatttgtgtgaaagttttcctacttcttagctctgtgaacctaaaagtgttctacttgtcttgaatttggtgttctcacttgtaaaatgaagataatcatagtacctaccagtaagcttatacaatcagttgttaatactgattaacagggttggcatggggtcattgatgagtggagcacagagtttcggaaggaagtctcacttagtttgtataaatggtaggaatatgggtgattgacttttgaaatcatcatttttgttgcacagtatttcagtgcatgaatctgccataattaatacaatatttcctttattgctatgcttagattttttcgaactatttttctcatggaagagaaaggaagtcattccaaatagaagattcagcataaataatgtgtagagtcagggatgatcatgagctctttcattgctggagatgatgtatgacaggattgtgtgtataagctgtttagatgattagatgatgagtaaagaagagtattggtggacctccaatattgagcttagaagatgttccgagtaaaatgtctttggaaggaagcagagaattgaaagatatgattggacaaaggaaatgtgtaatagtgatccaggatgaagagaaagcagttggcaaataagtaagaggttagaaagagaagcaagtttcctaggatttgaaaatttcataaaagaggtttagaattttgattctcttccttgtgtaatgaatgggtagctgggctaagaccttaaaaaaacctagaccttatatatttgttttaaagaacagactgttttttgtaggggaggagaattatctagagaagcaaagtttgggaagcagaaagttgaaaggtaagaaatttgtaataaccaaggtaaaagatatattttgattctgtactttcaagctaagggaaatggtggtataggtgaagcaaaagcaattaaatattggcaggtttcaaagaaaatctgaaaaaagaataaaaagtttggatgagccagaaatgaccctacaatgtttggcttctgagagacaaattaatgtcttgcctattcctgtaaataagattactgttttttttgtttgtttgttttttgttttgaggatggagtctccctctgtagcctaggctggagtgcagcggcgtgatctcggctcactgcaagctccgcctctcccgggttcacgccattctcctgcctcagcctcatgagtagctgggactacaggcgtgcaccactacgcctggctaattttttgtatttttcagtagagactgggtttcactttgttagccaggatggtctcgatctcctgaccctgtgatccacccaccttggcctcccaaagtgctgggattacaggcatgagacaccgcgcccggccaagattaatataatcttcttccccttacgctgagtatgccataaaatgggcacagaactaataatttgatattaaatgaaagtgactattttaatattattacattgctcataaattaccactttattttatgatgtttgtgttaacacccttttttcctcatgtgtctgtgaacttttctagcaccaagcacatacaaatgcccaataatccctgaataaatgaaggaaaaaattaacaagcaagtgcacaaacgagacagcatgtgagagacagctgtttccagttgtgctagagcagggagagcaagttgatgtgcaggtgattccagattaagaaggaagcttaaataattcaatacgataatgctgtgtgagtgcttagtgcttgggagcagccattatcatcatcaacgtacttggccttaagatcatcagtggtgttcacctgactaacaaattgtatagaaaacactagttgctggaaaccaggataccacttgtatttttagtttatatatcattttcagagacagaagctcatcaaacatcttcaataatatgaaaaattttctattgtaaatttccaaggagttctccatttcataaaggtagagcattaaccagaaattttcatccagacacagaaaccttcatttcagtctgcaacagtgttgttctatgatgtgcttaatggcgtttccatccttggtacttgtatcttagggcatatgtgactgtttgccagggtcaacagaaggtcacagttgagaacagggcatctgcccatagcaacaattcatttgcagatttaggtcaacaaaatagaacatttcatgtaacggtggctatgttaactggcttgaaagtggttattatttcccaatgtatgcatatatgaaaacaatgttgtatactttaaatatatacaacttttgtttgtcaaatatacttcataaagctggaaaaaatgaaactaaaaaaaacaaaaagtaatatgtgaaatatacttaaataatgtttcaattatgcaggtataaagtttaagaaatatttaaacaaactaacatgttattagctgtaatggaaaatttgcatgagtttgtaggttaaaatgtcaaagtgcaagtacagttttggatcataaaaggccattttagaagtgctccaagcttctgaatagtattcatttgggttattcatttaattttctgcctggaagggacatgtagggtattttgatatacatattttagaaacatatgataattaaagcaaatttcatagattaacatgcagcctaaactgcatgaaaatgcgtaagtgatgctaattcctgatatattttggggtaaaattactgaagacttttaatcacatgtttttatatctttggatcttccctacattgctttcaagaagtaactcaacagaataaagtacacagctgaccttaaatttgcatttgttatcatgtcatattaaatatttacagatcatttatatgtgtgtcttgattctcatagtgattttatgtgctccaagaagatatctcttttagcataaacatatactttactaacagtttcatcaaattttaaaagtgcgaagtatacagattttaaatgcatttcaagcagatttcttttaaagaaatatgctcattaagaacaattgagaattgatcttgtagcatgcccacagtgtgtttgcctgtcgatattgagtattggaaaggttatcagattgttaagcaacaaaggaaaataaattttgaaagtttcattgggaaatagctaaaaacataagactgtataaaaaaattaagaggtattagtaagaaatgtgtggattcttccttctcttaacattactgtagatcctgttttatttcagctgtttgttcccttatccttacatttatcaggattcttctgtgttcaaccggctaatctgaatactaaccataacaaatagatgtttggaagcattaaagtgatgactttcaaaggggttattatcatttatcatgaaaatgaattcagcccactgatggtaatttagcctacagataaaatgaacgtcatatgtttataaaatgaattttcaaatgtttaactttctcaaaataatatttcctaaagatgcgatattgcatttaatatgttcacaggagacactttacctcactaatccccaaattctatgtttaaccattgtagaaaggtggtagtttatagactggttcccacaaatattcaatggacagaatttcacaagcttttatggaaatattctgttgtatccctcaaatgtatagattgtctgcattatagcttgatggtgattctgggctccagaatcagattctctgggtttgaatcctggccccaccaattaagtgctgtgtgatattgcttcagtttcctcaattgatgacagtgctgaccttatatgacttttgagacgattgtgagataatgcgtgcaaaagtgcttagaaccacagttctcatggttcccaaatgagctgtagtaccgctagcactacaggaaactcagagggacactgcacaatattttaaacttctgtgaaacactacatagacttctgtctcatggtagtttggtttcagtattagattatacttcattccttttgatgtcatatctttgcaaagctgagttttcatcagttgctatgacaaaaagcaataccttgtaaaaatcatcatggaaaaagaaatgaagctgtttgtgtctagtttaagaagttttgcagtgccccaatagacacatattggtaatttgtgattatttaagaattaactaaaaatatacattttgttcaatgtatgtgtattattttctcaaatggttactaagttgttaagacagaaataattaaattgcttagacctgtctacttaacggacagaactgttaggtgttttgtttggtctaaaggcaccgtgaaaacattaccaagacactgaaggcactactggaaagtttggaaatgtctgtgctggcttagcttttgcgtgtgtgccctcagtaagggtcagttgtttctgttgatggtagtgatgagacagctaagtaaaaagggctccctaacagaacctccaactggcctgcacgctgggaggagtgcacaatggggcggagccttgggaagttcacaccatttgcagaggggaggagccgggcctctcctgatccgggatggtacctgggattcagtctgtgagatgagggtctgttaacaacaacctctcttgctttgatgagttgttttttttccttttcacccaataaattccatttttctcacccttcaatgtgtctgcaagcctaatctttcctggtcatgtgacaaggaccccgtttttagctgaactaaagagaaagtcctacaacaataatagttaggaagtcaaagccattttcttaagcttaactcaaattcctctgatcatcattttaacccttttcttcttgtctaatgacagtgagggggaaagagagaaagaatggaaggagggaagaaaataagtaaatctgctgatggaaattgggatgtgtgactggaagggcagaaatgaaagcaatctccaatgaagggagtagaggagctgtttcctgtgaaaaacaggtgagtgatgtatcatgtaggaattgttcgaaaaccagtaagaaacctcctgtggaccccagccctcaatccagcctgaagagtaggaaacatgtcctggtggtgaagaggttaggagcagctgtacagagagagggaaagaaaagaaataaagggaggtttgagggcagacagtggggcagggaatgaatttccagcaggactgtggagtggcccacgcggtggtgcctggagcaggggaccacatgtgctcaggtagagaagcctccaagctccagatccccagctgcccagatgctcgtggccctgcccacagccaaggaggtctgtgaagggagtcattgggctgggttttaatcctcagaacgcgagccagatgcttaaccagagagattcccaccttcgcaccccactttcctcacctatttaggacttcctggtggatcggcggggaggaggacagagaaaattgttccgctgttaatctgcacccttactgtacctctaagaggatggtctggggaaacacttgtcacatctggaaaacatttccttaatggaaagagagaacattgttagctattcatgtgtgaacatacagctttttacctcccttctctgagccatttttttcctccatgttaaattatagcactttcttcttgtcaaagggcctgcgctatacttaataaactatctaattaataaaatttaattttaattttagaaaagtcccctccctagagaagccttctcccaaaatgaagctgtatttcattttaaatttatgattaattttcattattcctttggtaataattctaatgctgaaatttgttatgcatcgtttaaggagatttttgaattaaagatatttgaatagtcattattttgccatataaatttagttttatgtatatatactaaaatatataacattttcagagttatatgtgacaaaatacctctaaaatttagttgttaagtatattaaaactactttcaccatggaaaaaacctacaagtaaacataaagatattttagtgagcttaactttctcagaaatcacaagttctgagtcacatatctgaaacgatgctaacaatatttagggcttccacaaaactccatcttgagagatttttgtcaagtctttggctaattaatactcgaggcaccccgttcactaggtttttctgtggtttcattgtcaccgatgcatattaatgacatcagacaaataaagtgtctttcgtaattgcttgtctcaaagcattgtaaaaatcaaatatggaataattaaaaattcatttacggtttgtggctgtgaatttgactgctggaaggttgagtcgaaggcccatgagtgtccttgataagtctgtacagttgattcccagtccagtagctgccccagtcatattatatagatggcttcagtcaagggagagtgggatgttttgaaatacagcgtgataactgtgcatgttagcacaaatagccattgaaaagaactgttagaataactgttgacaggaaagacggttggctgtttattttccaagataaaaaattagggtcaggtggtattatctatgtacttttcattattcatgcaaaaccaaacaccttcagcagtaagaatattttgtttgtgaaacagaaaacattatttcactgactgggccacttttgttaaaaatatctaatagatacatggttgttttgaactttataggtcaattttagatttaattacctattaaattcccaatcatgtatagcattttgtgttgtattaacaaaatagtagattctctgaaattgtttaatgttttaaaattgtcttggttaactcaagaatggataaagtaatataagaacagtccaatttatatggtagcatattgaattttaaattctatagagatttattaaaatttacattttttacatgagtgcaattacattttaagtgataaataatccagaagagtgtattttataaggaaaataaatgagaaaatattttcattgtctaaagatgtagtttttttttatgataaaaaagattcactgtagggaaactgtaattagaactaatttatccatttgttcatggagttcccttaatgagcaagaatgccacatactcctaattatctgtaaattttgaccatttacataaataatcctttttaaatatgagtaggacttatgatactaagccactcttgagcttttacaatatgaattaaatttcagattcttcatttgtctgacatgtgtttattgagtaccagtaaactttaaagtatttttctagatacagtggatgcatagaacaatgaatgaaatggataaaaatccctgttctcttggttttaacattttagtgaaggcagcccaccttaaaaacaaggaaatatgtaaatatgtagtgtaaatatatagcatgttgcatagggtcataagtgatataaagaaatatggagtagagagggaagttagagccagaggaggacaatttaaaataatcatcagggaagattctaagaagaccatagtcaaagcctgggagctaatgaggagttggtgggtgggtggatcagatagggccttgtaggctattctaagaaatttggctttcattctctagtagaagcagctatggaaggatctgtagctgaggaatgacaaggtcttgtggcactgggaggttgtgcagggtagaagctaggagccagtgaagaaacgttagatgtaattgagggaaaacagaatagtggcttctattttgggtattcaggatggattgatttatttcatgtgaggagtgagaggaccagaactaacaataggaccaatttttttatcctgggcaactagaggtatgagttgatttgctgagctggggaattctatgggagttgcaggtttggtgaatgctatcaggagtttcgtttgggacatcttgagaatgagtctaaaatttgaaatagagatctggactgagatgtaaatttgggagttccatttctttgtaatttaggaatagaatactaatgttttataatttttatttctaatttggatcagaagagttttaactgacagtgtagccaacgacaagtattttccttttattcagagcatttcatttgttgttcaaataaaaactaattgttttaggatctgaaaggctattggggttattgttataaattatttctggctactgattaatacaaagtattatttttctttaattgtaaactgacaatagtaatagtaaaagtgattgtatttttattttaatctgattaaatattagaatttgcagtttggaatagtgacaggttttttcttagattagttcacaaaagcttgcattattggttatagtaattaaagtttacaaaattaagaaaagctttagagtactttgtagcctgatatattcttattaagttttgatgggcattctgacatgaggagacagtttttatggaatgaagttaaaccaagaagagataaatgcttacttaaatttgcagaagaaaatgtaaaatatataccttcaaatttctcctttgaggacattcttaatgtaagatgaaagctgttggattttaaacattacaaacaggcaacttgttttttccacattataatgcttgatagtgttctttcctaagggagaaatttctttgctagacttgctttgaaacttcacattgaaaatgctttttttggccgggcgcagtggctcacgcctgtaatcccagcactttgggaggccgaggcgggcggatcacgaggtcaggagatcgagaccatcccggctaaaacggtgaaaccccgtctctactaaaaatacaaaaaattaaccgggcgtagtggcgggcgcctgtagtcccagctacttgggaggctgaggcaggagaatggcgtgaacccgggaggcggagcttgcagtgagccgagatcccgccactgcactccagcctgggcgacagagcgagactccgtctcaaaaagaaaatgctttttttacttgctttttgctgaggtgtaaaatttgcaaaggttatagaaaaataatagttttaagatactcgatgtgcagtttgttctttttgagggatttggtgatttttctgtttccagttgatgtggttatttgtcccagtctgagtaatgtttagccattgcccatgttctatctagtcccaagtacttgatagttcgtctgtgtttctggtgattttttttttttctggctctgtgatccttgtgaatcaccatccttggtcccattatacccagtcttcatttaaaactaacactcaatacatcttcaccccaccctgacttttttccacattttatgaaaaattttaaatatatagaaaagttgaaataagtatgcagtgaagacccatctacttaacacctagatttggcaaataacattgaactctatttgctttattacgtatctatttctctgtttctgtaaccatctttcaaggcgtcttatttttttatgcatttccaagtaattgcagacatccatacacttccctcctaagtactttagcatgcatatcattagcaagagtttcatattatttaaagatctttataaagtaaaatttacatatgatgaaatgcacaaatctcaagaacttttgatgagttttgacaatgtatgtatctgtgtcatgtaaactcctatcaagatatgaaacactgcaaccacttccgaaaatcaccttttcccagtcaatccctgaccctcaaacctcccaacagcaaccactgttttgattgttttctaccataaattggttttgccttgtgtagaacttcatgtaagtgaaattatatggtatgtattcatttgtataaggcttctttgttcagcatgtttttgagattcaccgtttagtatatttgtagttagctcctttctaatgctgggtgatattccattgtatggaatattccaaaagttatttatccttcctcctgataatggacatctgggatttttccagttttgatttattaatgaaatcaatatgaccttctccttttaaaatatgactcttctttcatctaataagtaatcctcttccccttcaaaacagtcttattatcacccattcttgtttaaggcaagccatacgttgtagcttatttctagaaacactgtgtatataagaggcttttctcggagacttgaaatgaaaggttttagaaacatttctgtgcatctccgagttctctttagctgtctgttccagacagtcactttttttttttctaaaagtcttccatttagacagacacatgaatttctcttgcagactctgccctttacatcttatttattcctatagtcatgttaatttggagacaatagaaaaatttttcctctttcatgcataatggatggaaatgtgtgtaaagaacaattacggtgttccaggtaattctgtatctattgcccccttcagttgagagtatggcaaaacaaaaagtcttaaggttcaacaaagccttcaccttgaggctgtggcccatcagggtatgtttgctcttttggggttagtaaatgtatacactttcgagcattgagcttgatgttacctgtggcagtcactttttgtagagagaggctctgcatgtatttgctaaccacttggtatcagaagattccaatcggatttttgtatttcccctcagagttttcaagaagcaaaccaccaagggcattatgatgtgtccttttgtctaaacaccttttggagcgaaatctgagtacacaaccatggccttatgccctggagttttacagctctacgtttgaggctaggaaagaagatctcaattgagggtagtgtaatatattctctttgaaaaaattcccttcaaatacctttgtgctcacaccaaagaattattgtatttgattaaatgtaaggccaagcattcaatttttgcattttcttttctcttgcttgtgttttcagctaatattgcagagcattttatttactcaaccagattgacaagattataactgggagctgtgtgtggaagcctctaatttttcataagtaaatgaattaatttatcatcgctgttgtgttttattgctgtctctgtgcgagactgccctgctcctttcttcccccttttgccttctaaacattggatccatgtcatcgtgtttgacaggtttctgattcccctgtcagatgcaatttggtgctaatcacatttcctttgctcagtgtcaatgatacaagccatgcataatattcctatatgtccactcactcacttgcagtgcagctggaatatcttgggcattaatctgagagaatgctgcattgaaatgcaaaaatgatgcttgagcactaagataatgtggtcaggcagatgtgcaatagataagtgaggctaaagtggtgatcttttcctaagctttgatgaattttatttcatttctgaatatctctttacaaacctgagactatgtaatcagtgctggttcattagaccttccgcatttttaatagaattcattcattgtccatgtgtgaagaaataagaattatttttcccattaaaaagaaagttataggtggttatttttaatgttgaagagtatccctgtctagatcatacactctatcaaatgcatgaaagtagctaacaatctagagaaatctgttaataataagccagtttctaatctagatgaggtcacaaacaatagaccttatgttagatcattttagacaaatataatcaaagtatagtgggaggatttggattgatttggaatgagggtgattgtttattttttgaagtctagttaagatgttttgacaattagagtagggtggaagaagcactcaaaaaagaaaggaataaaagcaaaattagagacaggagagggtggtgtttatcagtgaaatagcagttatccattttggtggtaaataggactagaaaagcatttcaggagcatgtgagagaggtccttattttatagacaagagggaatctttttctgttattgttggagcaagcctgtgtcatgattatatttgaattttagaaagaaaagtttcatggtagtgtggaaaagaattagagaagaaacagaaagagatatcaaataggggactattgcaataagtcagataagaggtgagggcccaaagtaggagggtggcagtggaagtacaaaaggtgtgacagatgcaaaagttattacaaactaaaatctgcagagttgtacaactgttgggatgttgcaggctgggggtgtggcatggtaaggagggaagaaagaaccaaaatgcttagcaagtttctgcatggaacagggtactgtggattctgatgccttttaagtgagaagaccagcagaagtatgagtggggtgagatcatgaatttagtttgcattatgctgaatttgagcttcccatgggatatctaaatggcaaagaacactggttaggatgtggggagattcaacggccattttcgtttatgcaataaataatagaaatcatgggaatggttgctgttattttcagggagagaatataaagcaaaaagagaagcaaataagcagtgaaaccttggaagtaaggctaaaatgaagggaaaagttgtaccaaagtgaactgagaaaagactgaaataagcaattgtacagaaaagggaaggattgtggaagctggtggtagaaggtagtcaacactatcacatatggtagaggaagacttaggtagtactattgaatgaataaatgtaagaaatttttttttcttggtattatttatacagtgtttaacaagttccaggcaggttcaggggagtagtagaacgaaaagtcatattgcatttggttgaggagcaaatcagtgttgtcacattggaagctgctcattgttcacaactctttgaaagaaattggtggtaagggaagtaggaagaccattgggattgtagcttaaaggaaacgtgactacaaaaaaaatacagtttttttttttccttttaaaataggacataccttctcaaaggagttgagatatcacccccaaggggaaccaaggaagttgattctttgggaacaaaaatatcttaaatattacaatgtttgtgtctctccaaatctcctcctacctgacaaaaatcgtagtatttaattgatcttgtttggtttttatttgggtatcacacaggcagcattgactgagttcataaacgatataacataccttttatgatatgagatcagtgttccaaaactatggtgcatatacagcttagttgtaggactccatttattgctagatctcagagttgaaacctgagaagtggcctatgtctgtctgcctcttagctacctctgactgctttgtgtttatgtgtgactcagattttgaaagttagattagtttatattttattaattgtaaaaattattcaacccattattaattatatcaagtgctgagacgagaaagtattgacaatatctgaatgattatccagtagccagttaagtgaaaaattactttcttgtattcatatcaaccaaaggttaaaggtaaatttactgaaaataaatttaaaaaaataatttaattgttcagttgttttgcttttgctgggaaataattttgaaggactgaaaaatttgattatattgtcattattatgtatttttgtatatttatttgtatattaaatttgatacagcacaacttatgtaaaataaattgcattaatagctttttaatttttaattagattttaacttaaaaatatattcagtcagccttaaccctatacttattctttttatgtattatataaagcctagatatatgtgcagtacatcagcaaatatacaatatattaaaatttcatatggaggtggcaattaggaaggcaatgtcttaaaaaggctctggagattgggtggaagaaaaaagattgagaaatactgggatagagcaatcttaattattgttcctatttcaattaaataattttttacctgtgagagtcactaaacaatatgacaccactgatgctaacttttagaaaaaagcaagaaggtagcctacttttgacacaggtgcctatagaggatatacttttattgataatttttatacacagaggtgattgtgattcacaaaaaattatagtcaatttcagttgcagtatgttaaattggaagtcaaattttagtgatccgaattgaatttcaacataatctagaatttgtaggacactaaggacatgttacaactgtgttatttgccttagtgatatagtatttgatgcatgatatttcaggaaatattttattaaactcagattctgtaaaagctgtaaaatgaaggactaaaaccactgatggtgaaataggatcttgagcaaatcagatcttatgagtcttgttttgaaacagttaaagggtgtaagatgtgtgctttgactgtgcaaccaaaacagtgcaatcccaataaacattaatctgcagggaattttcaaaaaggagaaaggttacccaaggataacatagaactaaaacatcatggctttcactgggagaagatactttcttcttcatgctgttagaatgttaagagaatgaaatcttcccattcatttggtaatgggacattgattataacattggtagctgcttgtagcttaattcgatctgaatctttgtaaaatttcaaactagtattaaaggggcattaattttacagattttttctttttaaataaggaaaagttacaagcatatgtacagcaataccatgtattaaaaatatatgaagatatcaattagttactactaaaattgttaaaaagtcatctgtgaatagtcttttgcaagatttggctccctctcaaatatcttctgaaaatctttgtgaaaaattattattcaacagtatcagtccctactgcttgtacaattctgtaatagaaatgctgaatattagaaaatgaaaacaaaaagcctctcccagcttttggggagctttaaatttaatgtaaaagttggaaggtacacacatctaaaactgttcacaaactgaaataagtgaaaatgcaatgcaagtgatatatgtaagtgccgaattggattcacagtaatggaatgatcagcgaggctaataaaagacaactctgcaaaaactgtatattgagcaggattttcaataaagagaacagtgtaaattgaaagagaagaagaaattctgccaactgtaacatatgtacctgagctatacacacacgcaatctgatatatatgcatatacatgtatacatatgcatatatgatatacatatatatcaggtatataaatatatgtgtatatacaggtatctatgtatataagatatatatgtgtatctctctgtccctgtctcaggcacaggtaaaagaaaacccatagctgatgcagatgtgggaagggtaatcaattatctctgagtaataggtagaaaaccctgggaagaaataagcatggaaaagtgtagttacttactgtgtctaagccttggcagctagatagcttgagactcaaggaggaattttatctttcctatgatgatggtggctatgaagagaaataaatcaatttttattgttttactgaatgcattgtttaactttgtagctgggattgagacaatgccaccctccatcaccaccaagcatcccaccctctttgatgagtagtagtcaggttttgacctcgtaattgagctccttgagtccatgtgacgaaaactgactaccctaaacaagaggaaatatattggaaaaaaacaagggcttataaaataaatagggtgatgattgagaatttaaaaatgaacaggaattacggcaatgaggaaacgagtcaaaactgtttttcagaaggaataagctagtcaggatatagttctgcaagcagacatcagacttttctcatccttgggtcatttcagtgagattcacacctccaagagacattattgactaagcttaagcctcattcttacccctactgatatggtttggctctgtgtccccacccaaatctcatctcaaattgtaatccccacatgtcaagggaggaacccagtggatggtcattagatcatgggggcattttcccctgtgctgttttttgtgataatgagtgaattctcatgagatctgatggttttataaggggctcttctacctttgctcctcactcctttctttcctgcctccatattccccttgccttctgccgtgattgtaagtttcctgaggcctccccagccatgtggaactgtgagtcaattaaacctctttcctttataaattacccagtcttgggtagcacctttataagagtgtgagaacgaactaacacacctacattttaccactccagagatatatgcgtatctagcaactttggctttggtagtgagcactaggcacctggatttgtcacccaggcaagaccacacacaaagtaatcccccagagaaaatcacagggctgttaggaatggggaatggatggtgcttggacaaataaatgttgagaaatgtccactctgttatctcttgatcttgagtggtggataggagcagtttatcttaaagtccttgacatctgtagcagctaattatcatttcttcaaattctcattatattttcaagcaacttcttttctcctaaagaagttcctaggtgaaattgttctctgaggaaaatagcacacccctcatcactaagaatagaacctgagtgttactaattaagtcccaattctaattatgttaatgaaactgcaaggggactacacagctagaagccccagcgcagtactatgccatgccatgcagctgtggatctcctcacaacatgtgagttcgatccgtgaaaacattttacccttattatttctctcggaagcaaactaggtcttcatagcagttttgaagtttcctcagttaatattctgttttctttggaccattgacctcttaaattctggtacagtataccagaacccaaggatacactctagcaatttctaaatattcaattgtatagcatactcttcaagccagttttgaaattataagaatggcaaatacaaatacatttgccattttttgatattaaatattagtcctatgttaaaatatgtaaactgtgacatctaaacatacatgacaaaagatatatatgtgtcacctaacagctaagctaacacaaatgatttttatcactggaagaggagcaagtaattccaatagtatgtttgggattataggcagaattatgatacccccccaaaaagaaatccaaagatgggattagaaaaagagtttgagtttttaattagtattttagcaaggaatgcatagccctctttaggactaaagaataatacatttttggtgatactaaaaaaatactgaagatgtaataggactaatgcaatggactgaatacttaggtctgccctccgcattgccaaattcctatgttgaaatcctaactcctaaggtgttagtattaagaggtagggcctgggggaggtgattaagtcatgagggcaaagccctcatgaataggattagtgcccttataaaaggcaccccagagagatctccttctccttccaccatgcaagggtgcagcgagaagtcaaccatctatgaaccagaaagcaggccctcaccagacaccaaacctgctggcacctttatctcagacttcccagcctttagaagtgtgagaaataaatttatgttgttcctatgctacctggtttatggtactttgttatagcagcccaaatgaactgagataacaataacataattctgttttggaaaatgtactactttggctgctttggattataattataacgttaaactcatgtagtaatggtttgaattgatacaggaatccattctattagagaggagttataggcacaagatatttcaagaaggaattttgaaaacgagtcatgactttttctgtagcccattacttgtgctccttaataagacctggtagtctattggaagctatgtggttgaagtattagcagagcatttagatagatagctacgtaggtaggtaggtaggtacgtaggtaggtaggtaggtaggtagatagatagatagagattgatagataatatatgtatactttgtaatttaagcttgtatctagaagaaaaagcatctatcaattattactacaaaaagatgctgtttaataaataattgcaaaattgagtgatttaaaacagtaagcatttttcattgcccatgagtccacatgttagctgagcagttctggttttggctgggtttactcatgtatctttgggtagttttaggtcaattaggcagctctgctgatctaggccctgtcctctcatgtgtttggaaattgataggctattgcctggtttcatatgaccttggctgggacaattggactctccttcataggatcttttatcctccagcaggctagaccttgttctcatagtagtgggagagttccaaaggagcaagtagacacatgcagggtctctagaggcctcggtttagaatggcacaatatcaattctatcacttctgttgggtaaaataagtcaaagttagcctagattcagggagtggaaaaatacactctgcttttgatgaaaggagtttcaaaattccattgcaaagggaaagactacaaggacgataattggggccattttaaacatcaatttaacacaaaagacatataaacgtatatgcctaaaactctgaaatactatcacaatgtgacttggtgcttaaacaagtggagttctaaatcatttgcagggcaataaagaaaacattgctcctggataggacagtcatcaaagacgtcttggtcaatctcatttaagtgccatagttgggtgaagatctcagtgcagaagggagaaaaaaacagaactttaccttcccttgctgtaggtgagctttgggcatgctgatttagcattctcctctgcttctttcatacttctttctgagaacatgcctttaacttttgaatctctctcctgccttaataataacaatagttggagtggaatggctgagattgtagctgaccaactgacaaaatggagcaggtgagggtcatgctagccttccacccatggacagtatcttagatgaaaatactccactttggaattgcaaattgacctgcatggtctctgccctggttgccctttttagagtggaaatatttaacttgtttttccaatatctgcaaatggttctaactcactaaaccactaccatcctggttaatagctattgcatgcagttggttttcttaaccagaatactttttttttttccatttcagcattccagaacttaaccaaaagtattttcaatatgattacatggacttcttcccaatatgcttctcaaaagaatttgctgttaataaaaggtcactatgtatatcataggtaagcatgctgtttttggatgcagctatgctagtgttcactgctagttgaataatctgccagtggacacacgcttcactgacattgaatgttaaggattctcagtaatctaaacgtcaaacccgccaatattagtaacttgaagaatggatcaagacagcttatttgttgttatttcacatttataaaacgtcttaacattactatcttatacttaaatacagtttgtaaattgataacaaaatgagttaaaaattactgggaaagtccttttaagtaccaaaatgaaataaatattcttccatgcttaaatttttatgaggaatttttatttccagcaactgtaaggctgggcagcaatgtttgaagaagtttcaataaatgtaaattgaataatttttttttttggttttatagattgtcaggtgatcaaccaagtgagaagcttttataaatgtgttggttcttctctgagacatgagtgtttgggagaaagtcctcccttaccccctgccaagaatcctggtaaaacagaaaatgaaaaaaaaaaagtgttgttttagaatttcatttaaaaaagatgctactatttagaccactccagacaatttaagtcttcctgaatccaactgtatttctattccgtaacagtttgcaggaagatactaacctttaatttagttgataatattgagaccacctttgagatgaaaatctgggtgtatttttacttgtatctatttacttgtagtctaagtaagacatgtttttcctctttgccaagcccaactattttattatttttttaataataattctgtatcttcttgattctctgggacttctgttcaaagaagtacttttttgtcttttatgttttcaattcctctctctatgtagtccattctctctgtacttgcaaacatgtttaatttttttattcttaaaaaaccctgtgttcatttacattctatgttttttttttccttttcattttctatctaacattttggagtacagtggtcccctcagtattcccaggggactgattccaggaccttctgcagataccaaaatctgtgaatgcgcaaatccctgatacaaaatgatgtagtatttgcatataacctaagcacatcatctctaggttactcataatacctaatacaatgtaaatactatgtgaagagttgtaatactctattgtttaaaatttttattatttttattatttttacttttggtctgcaattggttgaattgatgcagaatccatagatacggagggctgactatattttgtactcactaacaccaatttcgttaccatctactagttccttaagtcaataaccctaacttcagacctgttacttactggctctgtgtctggttaaatgtccttgactgccctaaaacttcatttttaacataatcagtccccatattctgcaacttgttttggggctattagagccctcaaaccatttactatattcatctttttctgaagctctgtcttccagtgcaaaactatctggtgctccttcttgcttgttcagacagttctttcttcactggctgcctgcagttgtctttattcctctcttagatcaatagcttgtcttacgtctggtttccctattactgcagaacttatctaaaaaccacgatgaacacttgagtatatggtttatctcttcaactaaattataagatctctcagggcacagatgataatacaggcttttgcctttctgtttaaacaagaaagtaagacaagttctctaggctgatgtcacagtctttgactgaaagcagttccatttattggctggatgccgatagaaggaatggcttaggtttaatatagaaaaaaaaatgaatcaaccttgaaagatcttcaaggacgtttgtggcatcaaattcagtattttgtagataaggagttagcactttggagtcaaattgccttacttcaaatcccacacccaacacctgtaagctatttgagctcagtcaaatttcttcaccattttaaggttcagtttccttgtttgtgaaatgggaataatcatagcatgtactattagtgtttattgaaattatccatgcaaagctcttagcatagtgcctggcatatgaaaagtactcaataaatgttagcatatcaactttcttatcaatttatgtgtattctttttggggtttggagaaggcccatttaatgatagtttattttaaaataatataccaacatgaggttttattaaaattagttgagtttggaaaactttgtaagatagccattgtccttgtaacatggggtataatttactttgaagtataaatgcttagaaattaacaattgttttttttttttctcctaaggaaaaaaatagtattggcaagctttccagcttttgacattcttttaagatctttaaaatactacagatctgattcagccttcagacctgttacttactggccctgtatctggttaattcacataaatcctctttgggctacaagttacttttacttaaatccaaactaagagtggggggcagggaagagaataccagtctaattgctaaagtttcaaaacagaagaatgaatttgcacctcaagcttggcatctctgagcatgtgaatcagtctcagatactcataatcattgctttgttttttaaagacctttgattatgagcagtatttaattacacagctgcaaaattcttaagacatttgatactagaaagagacaatctaatagacatatttaccatccctttgtctacatttgccgaattctagttgcatccttttaggtcaaaaggtaagctacacatttggtattatcttagagatcttttcatcattcatgctttcaatgggttacagtgtaatgtgatataatatttcagtatagaggattgacacaaaaattgttcatttaagcagtttttatgtgcctttaaaaatcatggctcaaagtattgttgaagcttgggctgcaagcttcttgccatagtctagattttaattccagttagtattctctacttctgattatgtttcatctgtaaaatgagcttaatgctcttatttcatttttttctttagtaaaagaaatagccccatgtaaattctcctttaaataatctgcctttaatggtctctgttcaatttatatcctaaaaatgtattttgcatatgaccaagttgcatttctccctaaagtaggtgaaatctaattcttacttgaaaaaatggtatcctttctccatatgattgttattcagtgtttattgaagtatatttgttgattcaaaatgcaaaaagggagttttttaaaggcagagaagaatagatatctaaataattttgtcaagaaagaatgtgtttttgattaacgtaataaacattctttggaagtaaatgtgtctaggaattggacagtagtattgtgtaatgttttatggtgaaaataagtatgtttatcaaagaaaaggtagattaaataaacagacaaaaccatcagtcttgaccccaaagaactgtggctaaacctggattctgcatttttacactagtcagtgacagctcattaaagggcttacacttgtttgtcaggttattggcactggtagtggtaaccccagggtaatgccactatccctttgcctagcttgtttggctggtgaagaattaattgtagagggttatgtattattcaattacccaaagtcttaaatcctgtatggcaaaattcaagactccccagactgtaacagcctctaagtgacctctgtctcaaacctcttaggaaaatgttggtgtgaagaactgattgctctaaggtgtctgtagggacagtacttgaaatagtttaaatgagtaactgttttcatcgttagaattaatagaatttgtagggccctgtgcacatcctgcatatctgcctggagtaaaattactttacaagctttagataaatgaaagctacccagaaactctcaaggaagagtagaatattagctgatgaaaattgtgtgtggatgtagggattcagagccacaattaatttacatttgattttaattgatgacactctgatagatcacagggactttaattaagaaataaaaatgtaggcagattagaatattggtaattggaaatagaggagttttaactaatgaagtgtggctttattaagtgttttgttcattttatagaaaatgttatgtagaacatattaacagttattttcacttaaaagaaacactgatatttagaggatttagattctttatttagaaatatgtgctgtgttagaaataatggttgtgactgtaaagccccaaattgcttgtaatgttgtgcatggacttctaaaccactgtgctttattgcaagctatcagagttcatcttttagggacttttggttcaaacatttaataaatggctgtacattgttaagttttccagggtagctacttggatctcttgcctctgttcagcatctcacttcaagttacttctctctttcattgtctctctaatttatttcctaaaatgataagtgtcaaaaatgacatagattgtaatttgcagtattacctttgccattgtggattactctcccttataattacagcttatacagaaacttgcttgatgcttccttgtaatcagaataatactaccttgtatttatgcagtctttctcttgtgacctcaaagcactcttgttaattgtcaccttattcctatgagcaaaggagacagttgaagaaagggaggcttaagtgtaaccaggttaaatgacttgcctagggtaaagccataatcagtgacatcgatgggaaggaagccaggtctcctgattctggaccagttttctctcttctgcatcactctgccttgacattttttacttgtgacatctgtttccatcactgtcatgctgttaattacttaatatcattttactgcaagatttgctaaagggaacagatacactctgagtgtttaaaaatatgtttaatgcagcatgagagaaacagtgacactttgtggggaggacatgtagattcattttattggattttggttgcttgatgaacactgctagtttcggggggaacactggaggtttcatgttttacctaaatggtgtttttggaacaatgcaaatgcatagaagtcactggtctggttttcagatatgcacctaataaagcaaaacatgatcaattcattgattactcaattacactcagtgacgtgtcccttgaattagcagatatgcctctttatgctcagttatagaatgtatagctaggcttttaaggctcatgcatatttaaaacctgcttattaaaatatagacactattacaacctattttccagaccttttttattattaaaatgttctatttccctttacacactaacatgtaaaactagatctcttgtctgaacattccacatcccgttcttctgaaaaaaggcagggtttagaaacaaagtgggaacggggtaagtatttattagtcagtttgataatttaggtatacttagtggaagggcaagagacttgaagggtatatccatcaaagttttcccatgatgtttggggctaatatatataactcattgatttaataatagaagaaaactgatttaattgttctgagcacagatttattgacaatgaagtataatttggtgactgatagatcttattatttctgccctcatgccctcatttagaacaccttatttgttatatgacgcttgattataacctgatacccagacttctgttagtcactgtcatcccacagtttgacttttttactttttgtccatatttactatttttcattcttgttttccctactttttttttttttttttacatttctctatcctgttcacataagaacacttaagtttctcatgttagagtcttctgagaatgtgttaagaatgcaaaaaataggctgtgcgcagtggctcacgcctgtaatcccagcactttgggaggccaaggtgggcggatcacaaggtcaggagatcaagaccatcctggctaacacggtgaaaccctgtctctactaaaaatacaaaaaaaaaaaaaaaattagcctggcatggtgacgggcgcctgtagtcccagctactcgggaggctgaggcaggagaatggtgtgaacccgggaggtggagcttgcagtgagccaagatggcgccactgtactccagcctgagtgacagagcaagactccgtctcaaaaacaaataaaaaagaatgtaaaatatatatatatttatatagtacatatatagtatgtattatgtgtgtatacacacacacacaccaaattttatccttctgttcttttaaaaagtattttgtcaagtatatcatgtgtaactgatacatatttgttaaaaataagctacttccccagtcacagggcttatcattgaaaccattaggctcataataatgtgaagacttattttgaatggaacttgtcccttctctgttttgaaatatcagtattttaaataagagcattcctgttagttctgataattacagggttatagatggaaaatcagagctgatggtaggctattgtgaggctttttctttttagttcccagaaagcccacctaaaaacaaatttccaattatttaatattaattgagtatacattgtgtactaggttctgggaaggccctaagtgtctataaacatgtacagaatgtaagattttgttcaaaattttctttgaagatggttatagatagtcagtttcagtggtctgtttcccagtgtgctgtaggagagcactttttggctgttcagcctgaaatcccagaacacagttttactccgcagccaggaagagaaccctgtgcttcatgccactgctccagctttctcacccagtgcacggcatgggccacgtgctgtgtggtcggggagtcatcagcggaaactttggtgacttctctgcctactggtagcaatagcatttgagtaagaaggattcttcagttttttttcatccatggtttgaaaacagtacattacttataaataaattgacaaaggtaaaatattgttgatcaatctattaacatgccggcttatcatctttctcccttctcatgcactttggactgtctccctacagcatttttttccctcttgctttttaaaaattacagttaccaacaactcataggatggcaagtactgcttattttaatcctcataataatcccattgaaaaataatattattgtcctacttttacagatgatggagcatagctgtagaggttttagaaatgttccaaattgtacaagagatcatgtagaaccaggatttgaactgaggattctctgagttcacagtcaatctcttaaccactgtcatatcctcatattcttgttttaatatgagtttagtgaatacaaatctgtctaatgttaaccatgattaactgacaagatgaggtcttatcagaaaggtacataaattaaaatagtgaatctttaaaactgccatatgggcatgaaaccgatgcagcaactggtgtaaaaacacacatagaatttgatatataagaaagatggactatgtaccagtaaaaataattttaaaatgtgtattatatacttgtaataggcattgtgataatataatactgaaatgtgaaaacagttaaaggtattgagtaatattatccccatttgatagacaaagaagtgaatagacacacagtgcttgagtaacttgtacaaggtcacatgaacaagagctctttggggggtcccaattattcttaattgtctactggaaccattgacctcggatgatgccaggaccagggtagagagaaagactgagacttgcttgcctaagtcctcattgaaggtactttaacttttgcagtttactttttttcctccctttggatgacttgcacatgcatcttcttcccaactctttttaattttatgaacaggacgttttcagcactgttgcccctctgacacccattcagcttggtctggggatccttgactggtacttgactgtagttccttggatttcttttgcagaaagactgcaaatgtgcgtttcccttctcttgtttgttagtttaacaaccatttaactcttgatcatggttgctggtgtgtgacattatgttgtgtgttgcggtactccaggatcgagtagcttcatatgctctataagctcttcagtggcattgcccaagatgttattatcaaaaaattatgtgtgcatatttcttgattcttgaaatataacatcattctcacttcctgactatgtattactgattagtatgtgtcagcgccactacagaactgctgtgggatcaacaaattgtttcttcttcgctcattatgcatatggctcctctcttgatgttagcagctgtaacagtgtatgcccttcttttatctttgcttcttcgtttgcatgatactctaggcaattttataaattttaaatcctgggtacccaagtaaatatgtaataaatgctaattctccttcataattagaaactatgaacagttttagttttaacaggattgtcttcggggaaatctgtcctactgaaaggcagtttgattggaaaactcagggttatagtcaaaatcgtaaagagcagagaacttcttggaatagagagcagtgacacgccagtggctgagtcctaggtgtgccctcaggttttataactgctgttatcactgccatctgccagagggagatgaaaaccatgcctactacttcttggagtcttgtccatttttgtctggctggatgtccagatttttaatacaatttctcattggaaatattaaagggggaaaaaagtcattgtgacaaaacagtaatgtatcaagtggctttccacttcaactaaactaaaatccacagtccttcctctaccctcctgtgggccactgagttctggcccctgcatagcttacgcactgtattacagccacaatggctttctaaatgttctttcaacaagccaaagcctttgtaagccctaaagcctcagcacatgctgttccctctgcgtggaattccacccgtagggttcttccacttttctgactcccagtcatcttttagctctcagcttaaatatcaccaattcagagaggcccttcttgactaattttcccaattcttcggtctcattgatcactcttataacttcttacacctttcctttcaacacttaaaaaattctatatttgtacatttatctcatacttttcttattcactagactagggcttctcaaccatggaagtgcattaaaatcatttagggaaattttaaaacataccattcctcaatatcaccctagacaaattgaagcacaggttggagcctcatcatcagtgtttttaaacattcttcagatgattctgttgtgcagctagggttgaggaccactgggctagatcataagccacagaaaggcagagatgatgtctgctgaccagtgtatacccgtagcccagtgtagtgccttggagaccaaagagctcagtacatatatctggatgaataagtgaactcacagagagtaaatatggatgcccttgactatctcaatgatttgtgatacccagaaaaatacaaaacatcacagctccagaactattccatatttatatggctggatggcatcaaatgtacgaaacattaatgatatctttttatactcattaggaaaatgagtattatctgacatggtactcctgaaaacatgtcagttacttgtgaaatcacaagtgcatttttttttctatttcttactcttttcttcaagttaactactgtagcaatatattaccctcattttgataaaaacttaaaatatgcaagatccataacgtattaacgctccaaccaaattagttatcacccccacctcaccataaacaattttttaaagactgtttttaatacctcacataaaagatattaagtgccagaattttttgtctattaacccaaatataataaaaaatgggttatatatttccaaggggaggtgacattgtcctttagaggaattgttgtgctatagagtagatcactagaaggcaagtggtagaatttaggacaatgtgttacagaaggctttttattcatgtctgtgcttcaataaatcaaggaataacagagaaatgaagacattatgctgtaaaaacaaatgccgtgttctattttggtatttagaaaattaactttttgtggtatgtacatttcaggaatcaatattttttaacacgatttcttttttgcttattccaaaagctgctgaaatctgaggcaaagtatatcaaattcaacaaagaggggtattataaacacagtattatccatatctataatttaagtgagttttataaacagggccttgtagctttttgcaaataactgataaaatatttctttagggaaaccctaccacctatcccaaatgtataatagtcaaaaatgtttcctatttattatcacaccattatttctcaatcagaatgcttttctcaagccattggccccaaatgtacttaaattaccattatacctgaggtttactgatatctcctgataagagcatacctgctattttactgtagaaacaaattggtaagttgaaatattgtactttgtttctgagagaagaaagataagcattgctttcacaatgatccttttggaaaaatattcataagagagcttaccggactctggagagcttactaggctctgtggatatttttaattcataccatagtgtctttagaagttaacgtaggaagattaatgctcttggagaagagttcaaagtgtttagtgccttttccaggttagtcaccatgccagttgttggacaaagaactctggctcctcttccgacatgttatttcatgttcatctaaaatacagtcccttgtttcttccctgaaaaatgtgataacatcctaggaagaggtggtgatctgagagttaaagggataaatcagaaagtagtgacaattctctgggagcgaactggagtctccagcctccagcattgacaggtaagtgactgtgcagaaggacaggttgtttcattatgttaatgaagtaacttgagagttttttttttttttctcagttgtttatctagaagttctgtgtctggggttgatttcactgttcatgtacatgaatatcattacaaaaaaaattgtagaaaggcaattctaagatatgcagggaaattagtactattattagcaggtactgcttgggagttctgggaacagttcactagctgtaaatataaagaggtgggacaatttgaaggctagctctgttgtcgcagtggttttgagtgcagcttgaaaattagagcttaggtctgagttgctaagaactgctagttgacattccaatgacaccatcatcatgtattctaggagtacccctgctctattttcaagccatggtactcaatgttgcaggagtaccactgtcaataagatagtgtccttagcctaaggagcttgttatttattaggaataaagattaaaaaaatacagtacaagaaaaaagtaagagttataaaagatgtactacaaagaaattcatcatctcaaagatagttgatggagtagcagatattcagtgttgtatgttctattcaattaacgtgggagagttaaaaaactaacatcctagtaattgataaaccttggtgtttgttatatatataaatttcatatgtgtgaatgcaaaatattttttaaaaactttgtttctattgctaaccatagattaaatcactcttcttaccagtctgtccaacatggccaaactccgtctctactaaaaatacaaaaattagcagggcgtggtggcacgtgcccatagtcccggctattcaggaggctgagggaggagaatcgctggagcccggaaggcggaggttgcagtgagccaagatcccaccactgcactccagcctgggcgacagagcgagactctgtctaaagaagaaaaaggaaagttctaacaccttaaggatggcaattaatgccctgataacataattaacaacctggctatgagtggcataaaaaagttaattcacaaatactggaattttgttttgttttctcctcttagacttcctagcaggattagatttattactgctgcacctttcccatgaaaatcaggttttctaaatgggaaagttaaactcattataaattcctcaaggtaatgttggagttctttgtgctgtagggtttccaatgtgggtcttttaacctttgcttccatttaaaggaaattttccagacagatatattcttacttcaatggcatttttagatgctgtacatgatgagcaaagacagtgcagagtgttgaagaaataatttgtgtttccttgaaaactgaatttcattggttttttttagagttctcattattgcaacattctgagtgtgtgtatatatatatatttaaattatatctttgtgcatgttctaaatgtcaaatataaccactagaatatttggtctaaaagggagaacagaacttgaacttagtcattcctaaattcatatctttaagctggttttatatcattttgattccagaaatattcacttgtttagattttttaatgttcctttcaggtaatgttcaatatgtgcaaaaatctgagtagctaatcagtaattactactttgtaaaattgaactaagttgggtttttcaacatgtaaatcagccttctttaggatatagtaatcaaagcagttctatgatgcttgttacaaaccaattgctaaaatgaataactaagactaaaggccttttttcttgttggttaaagttaaaactgactagctctggaaatgtaacttttactttccctgtttttatagtaacgcttcattaagatgtcaagtcaaaatatttttttctttctctttctgttttgatatttcatctgagaaccaatatttcaaaaatgtagtgatttagtataaattccttagttccagtcagataaataaaccttaccagattctgtgaactgatttattgataggactctgagggaccacaagcatttttgagaatgtttgaaacatttctgaattctgaattttattgaagttttatcccaagagagaagtagagtgagaggaaaacctctttccacaaatttggacatcgtaacaaagctttaactttctttttttaaaggtcatacaggtatttaaaaaaaaaaaagacaagtagttatacaaacactttggtcaccagtgaactgataataggagcaatcttttgtgtagcaaattttctatgttgtgtagtaatgcaattcaagactggtataaatatttgaaataggaaatccctaaacttattttcatacagtgattttgactttttttgcaatcaagtttatatctctttctgttaaagaaaaaaattaagaaatactttttgtgaaaaaaggaacaacagaaactggggcttacttgaggagggagaggaacagaaaaaacatctactgtgtactaggcttagcacctggatgatgaactaatctgtacaacagacccctatgacacaaatttacctccagaaccaggctgcacatgtccccctgaaaaataaaaattaaaaaagaaaagacaagaaagactttgtgtaaaaagacaagaaagactttgtgtaaatacacctctttttaaaattacccctgacttaagaaagaagtttttcacattcttaatgtgtgtatgtgtgtgtgtgtatgtgtatgcatatatatatatgtgtgtgtatatatatataatatgttaattttcatagatccaaacagtttctctctgcttttctcaaacctaattattttctctcctaaaaggacggtgactggaaagatcgcataggtcacgaggatcttcctatgacctatgatgagaaagaggttagaggtagactggctgctggaaaagagaagccaagatcccagcaatgagccctttcctctgcttctcatggagttcttactggtccccaggttaacctagggagttgatacagtgccctttcccaagcagaacatctggtttactgccccttgcccagtggttatatgtgtgccaggtttgaggatcctgcaaattgctcgtaatggaggtaaatggcttgtgccatgagaaaccaaactgtgattactagggaagatttcttaagttacccagtttggaatttattttgttttattgtattggattccatattaatagaggtgcttggaggaccagttaaggagcataagaaaggctggttttggcaagcagaggacaaatccatcctctcttccttgagggaaagttcgcctctccattgccatccctacattgcctttcctatctgccatgtgcaaattagggagactgaggcaacaaagttatatataacactagaaaactgagatttcagaggggaaacaaagttaaagcccaaagagtaaaatactaaagggaaatttaaaataaatgctagcaataagttagtaaaagtagaaaaggggactaaacattcaaaattacatcacctcagggaaactaagttaagaacaactcaaatgatttacaaaccaagatttaaaaaggaagaagaagagaaatagtgagacaagagaagataatctgaacactccagaaagaatgaaagaaactggtggcacaaattcaaaatgaagtaccacttaaacaagaaacagcagtgaaaccaactaacctttaatacattagtcttgtaaagaaatgtgcatggggaaaaggagaaagcaggacacatttttaaagtggtcctctgaaatgaggcagcttccacagctggaggctccttggagacctataaggcagagagagagagctgagctgtagagggtaggagatgactctctggggcctcctgtcaatggcttctgtcccccagctcccgctaggatacctgaaagggcaaggagatgtgccctttggtaaatagcaatccatcaagctgcaagctggtagcttcccctggctggctttccacaggcatgaaagcttctgtggccatctccatttctttgtgaaagtcctgtctgaggaaagggatcccattcagcctggtgttcttcaggcatgtggtcaaggcaaggcgcctggctaatcagcccatcagctaatcaactattttataattttatattttaatgcagctatttaatccaatgttgatattttataatcagttacttttaacttaaaaatagtgagttttctaaattttagaaaagctttattttgaaaaggtttgctattttggttgccgacggagtgattttgttctaattgtacctgacctcacctgattaagactacccacttgccctcactctttcttcctccaccatggccttctccctttctttttctctccagcttacctcacagggcctacgttagagtaacacttccattgcccacaaatttgggggagtgagagaaaaaattgcacaaagtgcatttgtcagataactcaaattccaagtgcccaaactgtattttaatcttttgttgggaatatcctgggatggggacaatgagggagatctgtacatgacataccatttttgcatagtgtgtctgtttacatcagaaaaagatttaaggtagtgttacagtaccatcgggttcatatgctcactgtgcagcaacagaccaatacactgagtcagcagagtttgcagcagagaaggagcttgataatggcaaggccatcgagcaaggagacaggaagaatcttcaaaccttaactttgttttcctgaggggctctgggttcctaaggggatcatggagggtgatggactagaaaattggggtcattgattggttcaggtccgggagatgaaatcaccaggatatagaaactgcatacttgtataagtcagatccttgctgggcccttcagaccagctagctcgggtagttttattgctatgcagaacctgaaggagaagctcctcaaagggaaagcttctcatctcacagtgtcttagatcttatctatagaacagaaaaggaacacagtcttgtgaaaagggctatgttattctggagtgataagcagcaactagctacaaggaagtgagccaaagggcaagtgggcttagtgaatgcttctgattgcgctgcaagcctagttgaatgttttcttcccttaactgattttataaaattttattggggatggcttcagtggccttcttcatagggttattaggatggaaggtctaacaaacacaagcacaaattataggtcataaaacccagtacaaatattgggaaaaatatccctgggcaagacattcaaggtcctttgctttctgtctctaacctttcagtttagccttaattcctgtatttcttttcctgttaacctccagagacctacactcaaaacacatcctgctagttggttggctttttgcaaatagtgaatttgcaatttcgtgctcccatgcgtttgtgtgtgttgtttcttctgccttgaaggacttctcaatcccattgtccagtgaaatcacactaattaggaccagcttaaatgtcatcttcccctctataccttgcttaacagcttccctgcaaatatagaatgcatctttcctcttgcttttctggcctggtattttgctccttcgactatttcatcacatgttacaatatttatattgacttgcatattcatctgcccttcctgttcctgaattgataggttcttgaaatgaggagttgtatgctcagttcttaacacagtgcttggcctgttacaagtactgaagacgtgtctcttggctgtaggaattgaagtacttcatctagtttctcatccagcattactaaacacattttaatccttcctcatttattgaggcacagtcaaggctgggatacatagttctatatctgcttttaattttgctctgtttccttttagctctgctttttctgttttaaatatatgaagtcttccctttctttccatttttttctattaaatcaactctagcctgcagattccatcattgaccatcttacaacctctatgtaattgtagggaacaccgaggagatttattttgcttctaggtcttggactttgttctaatgcttggatgttgccagttgcttgacctctgcgtaaagaggatgtactgtcagggttctccagagaaactgaaccactaggcttgtgcatgtgtacatagataaataataaggaattggctcacatgattagggaaatggagaagacctaagatctgtagccaggaaattagagacctagaagagctgacatatgattccagtcctggtcagatagcctgagtaccaggagatctgacattgtaaagtccagtgcagaagccagcaacctgaagacccaagaggagctcatgttccagtccctatccgaaggctggaaagaaaaaaacaaacaacaccaaaatgttcagctcatgcagtcaggcagcagagacagattctttcttactcagtctttttatttctagtcaggccttcagtgggttggatgaggcccacccactttgggaagggcagtctgctttactcagcctactgactcaaatgttaatctcatccagaaacaccctcctagtacacccagaaataaggtttaactgaatatctgggcaccctgtggctcagtcaaattaacgcgtaacattaaccatgacagagggagtgctctgcatatgtattttgctagtgatgccaaacagttgacttaagaagggaattatgtctatagagagtatcatttattttacaaatgataatgaatttacagtctttttgagaatttcagagtctagtctcattttgtcaatgacattttattcatggagtaagtgtagagtgaaaagaactctacatattctagttaaacatagggcaggagtccaggagtctcatattaaataattttaggagctaagaaagttagtaaataagtaaagtatgttgggtgtatgccaagccagaatagtgggaactacagtacataggacaactctagaactattttcaaggtatcccttcccttccctcccctcccctccctcccctccctctcttagcctttggctaaagtattttccttgtttacttattaactagccacatgtctctagaaattcactgactttttccaggccttagttgttttatttaaatagatggcttatctacagtctgaagattctttccatgcattttacctgcaagataagtttgagaggttatgaaataacacctttgttgatttaaagagatctaccgtgagttctaaaggaaagtgacatgtcatcttctaaagcaacttaatttgcttcccagtaatgacatgatgaataggtctattgtttgcaaaattcaagagcagaaatatcataatcataattttgcaccaaaaactactttgtatactcatgtgcttcatgatgtaatgtgaccagattttttcataattaagtatcaggtctctacaggtgttgccaagtctgtatcttgctatgtttgcacatactttgctttctaaagacttaggaatacttcctgttgtaaggtaggatgacttccaatacatatgtgttggtatgtgttgatttttcttgtttaaaggcttttcatagggtcctggagccttcaaactataaattaatgtgagacagcctctgaggatttatggagtcattttccctttggctaaagccttccatggtcacagaccactagatttaaaaaggcagccagacctgtccaaagaccaacataaattttcagaggcagagaaaatggtggctgcttattaaattagtgagaatatagtatttggcagctacaaataaataatgttttctccccataagctagaagcaagacattgaagctgtgtgattttggacctacatttgtcaagtttagctacatcagttgagaataatttgcatgttacatggagcacttacttgagacttccgtttagatttgactagataaatgggttcacctttgccaaaaagctcccagttctgaccacatttaaaacatttttccccagcacacagagaccgaacatgagcattaaaacaaaaaaaggaacctattgttccagcagactcttctccagttccccagtatttatcttacagggttttctaagtgcaatatcaggtgttcaccattggttgtccgcactcactttctattttccctcttgattcagagaaattatttgtcttagtccaataaaaatagggctttttcttttggtgattcactatatgaaaccattttcaccgacttccagggtttggggaagaaaacatgtttatccttgacagataatggtatttttccatgtctcacaggacccttcccaagtcttttttttcctatacaaacaaaataaattataggactagagactttatgaactaaagttgatgaactgtactggttttctagagtactttctgagaaaatgctgtgtagaatttccagtcatgaaacttgcatgaaaggataccacagaatggcaggcatctttacttcctcatactcagagatgtttttatgagataaaactattgaaaacagattacatttggagatatatttccatagcagactattctgtgtttctatggaaatgggacttatttctcttaaccccaatatcaatatcgcatgggtagaaactctaggtacaaaatgtaggatggatattatgttctaattggtatctttttttctcctctttcagttaaaccagtatctttgtctttgtcttcctttctttttctctttctttctttcttcttttttttgagacagggtctctctctgtcatccaggctagagtccagtggcacaaacacagcttactgcagccttgacctcctaggctcaagtgatcctcctgcctcagcctcccaagtagctgggaccacaggagcataccaccacacctggctaatttttttttaaatttcctgtagagatggggtcttaccatgttgcccaggctagtctcaaactcctgggctcaagccgccctcccacctcagcctcctgaagtgctgggattacaagcataagccacagtactcagcctttgttttccttttaatttttcatgtgatagttatcatctgacattagtggtatgcctactaatagcattttttaatttaaaactacattttataaatttgttgaaaatttatacacattctgctggaaaatttttgagatgttagtttatttaaattttataaattaagtctatcttattagtcaaatgttcagtcacctattggcctgggctgggagttgcttggtctcttaaagttgactttgattatttctaattagaacatagtatgataaatttattcattagatgcccacttattaagcactctctagatacaagatactgtccaagatacaaattaagttgggtcttaaaggatgaataagacttttgatcaataatgatagtgatgattacaataatagctagcattaaatgagcaattccttcatgtccaagccctatgcaaagtcatatctcatgttatacaacaacttgagaggtaggcacagaataatgtgaagatgctgatgttttactgatggcttctagtcctggctttatcacttactggtcatgtaaacctaacctgcccccctccccattttgaatatattgataggaacttcctcctggcactggtaggagaaataaatgagataatacagtctgatactatgtgctttgaatatggtaaacattcagtaaatgttagctgctatacttttctttattgtatagatgaaattgaagctcagagaagctaaataacttccctacatttaaaaagtggtgtgagcccagatttggactgagtcagtgtgactgcagagtctaggttctcaaccttgaaggattctaagaaagagtaccagtagatgcgagggcgtgcggggtgggaggaggccagtgctgaaaacacagctgagtgcatgcagggaaaggaggctgcattcagttccaggccatttgtgggggccttgggagaccttggaaagaaactgagatgttatcctggaaatcaatggaaaataacttgtttttcagttctttcgtatttaaatgaaacaagacatctctgcatttacctttgacttaaactgtcttctaaggtagtactatattttcagtcaagaaatatgaactagacattcaaatgggagactcctcaaagatttgggagattgcagaagatatctcataggcgctaaatactgaaaccctgtttttctttgtttgttttttaaaccacaatctggaatccaagcatacaactctgtcttctcactgctctggaattttttgattcaagcattctgatttcaactagcaaggttccactgggactataaggtgtataaaacctactaaggggactagagattttatatcctctagccagcctatcttctccttgctgggcaattgagggaagaagtcaaaccagagattgcttaggaaatgtgaaaccagaataagcatggagagtcatataattcaagcagggccaacttgctatgcacatgacctaagggttccatgcttataagaggcccatgcttggtttaatcctctactgtcatcatcttgaagtccttaacatttttagaacaaggtctagacattttcattatacactgggccccagaagttatgtactcagtcctagattcatgaatttgatgatattacgccatgatttttcatatgtctgtcaactatttcatagtatgtagatctctgttactgggacttcaggtttgttccttaatccagtggatcccttcaactgaacagtacctaaaatcgtcctgccagcaaatacacctctgacaccattctcctaactgtattaccatctgttatctcattgaaacaccacttctgtagcctgtttatctggtcatttaaatattgttctgggtgcatatttttaagttcactttgtgtatttataattagaacattacttttttaatagatgaactctctgagagaacccatgtttcctgattctttgagaagtgtttcatatgttacctacatgtaaataaaataagtattaagtttgaaatttacatgagagtgggattgtcagagccaactggatgatagaacagaaccaaaaccattttggtaggatagagaaatgtggttagaaagcaagcagtcatcagggtgataaaccagctgaatcctggcaaatatgctgttcaagaaatgatgaaaagaggactttggtgagagtcaaagacgcatgctcacagacacatttttatttttaacctgtcactgtcactggtcagatcctttctagagtttttaatccttggtaatttgaagaacaaggagatagtttacaggaatgcaacaaagatgattgatgactggatagtgggggattgtggaagaaaagctaaaatacataaaatgttattttttctggggaataaaaaaagtaactaatggaagcttagagtctttaagcacatgaaagtttttaaaatgagttttgtgagtagatttaccccgtgctagtaatggacatattatatgaaatttcaacataaagaattttcagaaaataatgatagacacttggattatgcagtcatcgaaatattaaaattttatttgtgcatatttttattgtaatagcttttatccatctgtatttgtttagaatatgaatgtgtgatttaaaaaccaaaggcccatcaatcaaaacacttcccacctgctctctcttaagggactatcaaagtagtaaattaaatgaaaccaacattgttttactacttgcccatcataaaatattactggttccaggtgagtgcctatttacaagagacctttgaagatttaataggggttttaagtgaatggaataccatgtaatgaaaaattttacatcataaacaaaattgaaaggtaaactggcaaaaaataaatttgcaaaaataaaagacaacttcagtatacttaaaataaaaagtacttatacatgttaataagaaacactaaaaacaaagtgaaaaagaagggcaaagagtatgaacagacactttactgaagaagtaaaaatagctcataaaaatattgtcaatatcacggtcaggcgcggtggctcacgcctgtaatcccagcacttcaggaggccgaggcaggcggatcatgaggtcaggagatggagaccatcctggctaacatggtgaaacccacctctactaaaaatacaaaaaattagccgggtgtggtggtgggcgcttgtagtcccagctactcaagaggctgatgcaggagaatggcgtgaacccaggaggtggagcttgcagtgagctgagatcttgctactgcactccagcctgggcgacagtgcgagactcagtctcaaaaaaaaaaaaaaggtatatatatatatgtgtgtatatatgtatatatgtatatatacgtatatatagagagagagaggagagagagagacagagtcaatgtcactagtaataattgaagtttaaacagcatataattttataggcaaaattagtaattattagaaataacacttagcattgggactatgcagagacaacctacactttcgtatgtctggaatgggagaatgctacaacatttacaagatggctgaatataatgtgaaatgttattcaaccatatgaattttctttatttgtctttatggattacaattagggaaagttgctcataagaaaaatagtaattgaaaatatcagaaacaaaattgtgtgttatgcattgtgaattgacatatatatgttaacatacacacacacaagaagagagagagagagagagagagagagagagagagagagaaggctggagggaaagcaccagagtttaattcttttgaagttttgttcacttttttctctctgtaacacacaaacacactacagacacaatttgctggagggatctgggggagttatatcatcatatcttgcccctacacttttctttttgaacttggaaactataaacaccaaaagtggtaaagtacaaaagtggccattaggtctgggagtattagattgaggactggctttggaaacccagtattgccaatggtcacagcaacctagatttttgggtccagtcctaatttcaaaacttgtgttccgttatttgccgtaataattatgctcaacgtatttcactttttgatttagaaacaagtcatagttttatgtgcttatattttaggtgcttttggaaggccttttgtgctaaatttataaatctaaaactaactcgcaaagactgtctatgattagagacaagacccagaaagtcaactgttcccagaaaagaggtgccacaccacttatgacagtgaggagggagcgaggaccccagccttcttgtcttcgggccccagttagcgaggcatcattctatgttggtttaatacacccacaatcataattacaaatcttgacatttagatgctcccaaagtcagcacccatcccagcagggttagccatattatcactagttaaggagatatagagcaattagaagctaaaggaaaaggttagcacttccactcagacagaaggagttcagcagctaaacccacctgtagttgcagtgttaatttttttaaatatgggctttgaagccttgtcatccatgacaagggaggtctgagtctaaatggaatatttaagagaagtgcttcctcatcctccaatcaggctatatgctgacctttctgtagcctccaccagttgctcagctgtcatgaaatgctggagaaggtagaacatcattggacctgtcatgaggtcaatcagcgggagctcaggccaatttgctaaacgtgttcatgctaaagagtcagttccctaaccagtctggtgaaatgtagtaccaattaatcaccagctaattttcaggggattgtgaccttctccatatttgcagtccactcgctaccttacctggccttgggggatctctggcctggaatatgaggccacccccaggacatatgaagctgtcaaaacttgtgttataggctaccagggtgacaggccaggagacaggtatgcccattgcacctgctccggccagcactgacctattttagtcagaacattcagtgtggtttgcaaaccctaaagatattcatacagctcaagtatatgcaaaatccatcactttgaaatttttaatgatatagtaagatactgttttttctatcaacctatcagttctttatttgtctttagaaggtggtggctttgtcaccattctctgcagaggtttattatctgagagctgttgggttgtcttaaaagcagaaaggttccttttttttattttacaaaataggctgctctatttgtagccaagtctcataaattagaatacttgtcaaaataaatgaatagtatgtttgttatattcatgacttaaaatcacatttgattgcttactcattaatccacaaaattaagcaatacatgctggattgcagtcattagtacaaataagcagcgttcttctaacagtcagccatcgtagagaatactgtacagttgtgtttgtttcaaaactaggtctgttaatgcacaaattagttttacaatttcaaaataattcctctggaagaaaatcaaatacatatatgtagtccaccaggagacaaggttggaatcataatatactaagtagattttagatgtgtaaattgttaaatgcaattttgcattgaacctcaaggatggatggaagctattttgctgtgcataggaacgtatgtggcatgaaggtgacctttatccctaacaggatggaaaagtcaggagtagggagatggtgtccacaccaaagtgaagatacccatatggcagaggctttgttctcttgcttggatatagcagaaaatgtagatcattcatttacctaaggaattttttcccatgtgccaagaaacatacttgcagcttggaatataaagtcagttgtacttcagtttttttcatctgtaaaatgggaataacagtggatttatcataggatttcttatgagtatgaaataaaataatacatttcagcacttaatacagtgcctagcacatagtaagggctatataagtatttgataaatatttttattgatgtgacccatagttttaagtagcttactgttgacatataggtagggacaagtataccaaggaccctcgtgctatgtgacaagtgatgatacagtcatggatatagcactgtgggacactggagggcctggtgcagataattatggcagacttaaactttatttcaaaagtttgacaatgtatgatgaagaacttgaagctgggccaagaccacacccagatctgtttgctggaaagaccactttggcaatagtgttatggttaaatgtcaggaggccagattggaagtcagaagcaaacccaggcccttgccatgctctttgggcttatttaattgttggagaatgatctttgcagaaataaaccaaccttaggttccaataagttattgccttcaaggatttattgatatacctatggatggtggtggcagcattatgctttggctgagagattgccaaggagtatgtttctgagacgattctatctttgctttggctagagagaagaagttgtagggaaggagggaaaatgaaatggagctagttaaataatattgaatatggatgttacaatattgtaaatgtatgtagtgctttatactttagaaatattttccatatactattttatgtcttctagtgttggatatacttgcttcaaatagaatattctttaaaaaaagcaggtaagatgtgtgtaatttagttaagattaacttgaagaaaaactacttgtgtgtgtgtgtgtgtgtgtgtgtgtatgtgtgtccacacattttaaatatcccagcttgttttgtgtctccatttcctcccaagatagtcaaagcccttgagattggaaaaaattagtctatgtagctagtgatacattgggcaaatggcaagtgaggccacctagtagattgggatcatctttgagaatcttccagacagtttaactcaagttttttatttccacctttgcatgtgtctggttttttaaattatgcgcaattcatgggaagcaagaatgttattgacaaggcaggtatatagagtttttaaactttctgaaaatttgtgttattctgtgatgcttgaaacttctccctgcttttgttctggcttgctttttccatagttaatccctagatatctctaggagaagggcttcatggatgccacttgacctccatggcaccctttgccctaccactgctagagatggtgaagggcacagagacaagggctcctcaggcctcccctttgtgtattagatgtgagtcgtgaatgttgtttaatgaatcatgagtgattgtccctaaaagtaaataatacagcagacacaaattcaaaattctctccaacttgtcaagggataacatatcatctttgaaattttaattcaagtcagagaaaaaaatgtgattcaatataagatgggtttaatgtgtatctggcttctttaggaacatactacataatttcaaagaaataaatgtatatttggctgaaatatgggtggttatttaatagggcatatttttgttattatgggataattcaagcagatgcatctttaaaaagtgataaggataaatagggttttcagtacagttgaataagtcatgttattttcttcagaataatgcttaaagctgtaaagtttttaaaggttcctgttctgaattttcagtttggggaggaaatgaaaataggtttatctcatttactgactgtcagttgaactttatgagaatcagagctgttatgtccctgctttgaggatgctggagctgatgcttgcctctgatgaagatgctaatgtgagcctgctaatttttaaaatccggattaaatgcttttagctagctgtcaaaatcctgggaaggaagagaacgtactttgaaacctttgtttaaagtagcataaaaattagctcacatagccaattgttatttagttacaagcagatgcacacatacatttaaatgaaattctgcagtttcactcccttcccaaaggtgataatgtgattttctctacttgtgaaattgttgtaatttcacagtcttacttagatttaattgtgtttattaagatttgagacaaacgattccaattttattttataggatactgggtttttttttgtcttttaatttaacttgatagttggtaacacagaatatgtaggaaacagtaaaaaatatcaatacattgtttagttcaacagtttaacccaaagaactcaatgtggcaaataagcctttcttagtaagtagtacattagttcacttgacatgtaattaaaatagagccacatatttctcagtgtaatcactaataaaaatgccattataaatacagttgattttactctgtagcatttggatgattcttttttattttctacataggctaaagataatagcatcagattataaaaattcaggctataaaaatgacagaatgctacaggttggcaacagaataaaccacaccatgaatattgagagactctgcaataaatgtacttcatggcatttattgttaaaatatttacttgtcggcatagaagttgaaggcattggtatattgcttcaagttatggttggcaaagaccagacagcacaaaccatgtactgctaggcagaagagtgatagagtactgtattgtctaagggttgtgtgttcttgtatgatgaagaacaagaataaaggaaaaacagaaattacctattggttgtgtttgatcttggtactttttgtgttcctctgtcagtcctgtgatgaagagattaaagagaaacaacaaagtgaaagcaaaatacggataaacaagtcaagtgggactcagtctggaagccagagaaggatagctatggtaggaaaagaaattaaatttaacctttcattgtgtgccagcctctatgctcagcatttgggcatgttagggatattatcaaggaagttagtattctaccctattccttctcacccccaaaaacactcacatgttcacacacacttttactagtgatattgatcataataaccttagtgttttaggataaaaacagatctgagtcctggaagggatactgatggagtgaaattgcagagtacatggctctttttatcagatctgttattcagggtcatggatgttgtaaattatccaaagttcttttttattgtttttaaattttgctttaagttctgggatacatgtgcagaacgtgcaggtttgttacttaggtatacatgtgccatggcggtttgctatacctatcaacccatcatctaggcttttacctctgcatgcattaggtgtttgtcgtgatgctctccctcccctttcccgccactcccccgacaggccctggtgtgtgatgttcccctcactgtgtccatgtgttcccattattcagctgccacttatgagtgagaacatgcggtgtttggttttctgttcctgtgttagtttggtaaggatgatgatttccagcttcatctacatctctgcaaaggacatgaactcattcttttttatggctgcacagtattccattgtgtatatgtgccacattttctttatccagtctatcattgaagggcatttgggttgattccaagtctttgctattgtaaatagtgctgcaataaacatgcatcttcatgtgtctttatagtagaatgatttatattcctttgggtatgtacccagtaatggcattgctgggtcaaatggtatttctggttctagatccttgaggaattgccacactgtcttccacaatggtagaactaatttacactcccaccaacagtgtaaaagtgtttgtttgttgttcttgttgactttccttttctttttatctttacaaggtaaaggaatgagaaaaatatggaatgagtttctaaaataaggtttatggatatcactttttttctaggagaatcctagtttcagatgttcctttcagatcgcccctgggaacataggagtgaatgcatacagttaatgaagctagtgcctaatctttaaattgggaacaccagtcagccctggcaattaatatctacatattgaaaataattcacacataccacgttaatgtatttatttccatgtgttttcctaactcctgtttagaaggtagatatgttcctgtgaacctctttctctcaaacagggttacccaaatcatgagataaacatttcactttcctgatgccttaatcatgcaatcttttcatattgaaaagaagtacagaaagctgttagggtctaaaatgtgaaattttcacgactttgaaaataaagctggacacatcactgttgagcttatgacgtgcctcttcaggctgcatctccacttgctgtgaagttttattcacatttgtccttaagctactttaagggacacttttaaaaagctttacaatagataaatcaaagtggtgtattggcagatagctgggtgagggagtgcctgggacagactgcgaactccaccacctctccattcagcctgcatcctgcttcatccagtgaccaaatgggctgactccccgttttgaaagtgagcctgaaaaggaaagagaagatagataatctccagttttggagtatgatgtggcagaagcaatttcccccagtgttgaataaaaaaggaggaatttatcggccataatttccaaagccaaaccaacaataatgatgatgatgatacctagagcatcttaagattaaatatggatcatttatacacattcatttaattttttaaaaaaatatttgaatgtttattctaaaaacatgtgaaaaatctaggtgtcttttgttgttgtgttaggttttagtatctgtttgcctcatatttcactaatttttttcagcaaatttacattgagcacctatgatggcatattcactcttcgagccaatggggatacacaatcaataacaaactcagggttctcatggagcttacattctagtgaggtgcggagacaggcaataaaataagaagagctgtgatgctgacaggatgatacacatggtataaaataaaacaaaggcggagaatacagagagtaatgaagatgctgcaatttagtgtagccagagaaaggctggcatttgattaaagatctgaaagatcgaggaagaagccttgcaggtgcctggtggaagactgtttctggcagagagaacagcaagtgcaaagaccctgaggcaggtacaaagacaatagtgcagctggatggagtcctgagaacaaggggcgggatcagcagaacacgacgtcagaaatggaacaggagcaagtgaccttctgggccattgcagagacttaggcttttcttcaagtgaggtgggaaagtattaaaggagtctcatcagaggagacaggtgatccaattcatgctagcaaggtcagtctggctgctgtgttgcgcgcaggggaaagaggcagtgggtagaaacaagggaactagtcagggggctgttaagaaacacatggtagctgggtccaaagtggtgacactggaggtggtgagaagtggtcaaatagagtgtatgggagacagagcaagaggggagagaaagagagttgaaggattgctacaaggtgtttggcctgagcaacttagaaggatgaattgccattaattgggatgtaaagagctatggaaagagctttgaaaggtcactttttccatttttgacatgttagattaggaaatgagcctggagttatagaaggtctgggttgcaccacttaaaattttgaatttatcagccgatagagttatattaacccatgaaacagatgatatcactaaacaaatttagacatatgctcttcaacatttttagagactaaatgtggaagatgacgaagaaaaaccaaaagaaaacttgatgggggcccagagaaataagggtataccaagagactggtgccctggaatccaagtgcagaaagtactttgagaaggcagtaatcacctgtgtcctgaagtaaagccagagaagcacctttggatttaggaatctagagattatttttgaccttgataagagcagtttcagtggagttgaggggtgagagcctgactagagtggcttcattaaagaatgggaggagagatactggaaactgctgtgtagacagcactttcaaatttttgctttagaggggaggcaaaaaatggggtgggacctgtggtaagtggatcctgagaaggtcattggtttgtttgatgggagaacttctagcatattcatagactgaccttcctgtgtctatctggggattagatgcttaaatactgacagagatcttgtgggaacaggagttttgactggaagtaaagattgtgtaaacagatcattttggattatggggtctcctggaaatgccagcactgcagtaggtggcatgaggacactggcatcatagaaggagactggagggcagaccagaaggagagagaaggcagcagaggaggaatcatccaatccaacattgcctgtttgtattgtgtagggtgtgggttactgcagcccctgaggtgtcagtggaagttcttctgcatgccatacaagtttactctaagcgaaaccttaacacaaaagctttttaaatagaattccttctttcatgttcagcgcatctctgtgggaaagataactttgaatgggtttaaaggcaaggagggaaggccatttccatgcactagattctttaaaaaccagcatgcattctgttgagggactagaacagtggtttatgttaattaatgagtctctgtaacactgtcttctggggagtctgctaccgaggaatgtaggtgttcagatgactgaagtaatttagttaacaaggacctgcaacatatgatttaaaccagttatcaatgttgaaacaagcattaagtctgtgtatattgtagatgttgagatgaagactggatgcagagtctctgttcagcaagcaaccatgggagccatgacaggtcaggagctggtcctcttcttcccaggagtacagactttttcatccattcaccataactaggtgctaattgggaaacagtctaagcaattgattttaatcaaagagcttatgagatttggggagcatcaggtcttactattatcatcttcaagaaaagttacgttttgcctgtgtctccaaaaagtggaattcacattctttagggtataacacgctaatggacaaattacagacagtagacagtcttcattgtagcctctctttttacagctttctttttggaaaacagctacagtataggaaaatactttctctggattgaaaattaaaaagactagattccactaccagctaccatttagtcagtgaccttgggaaacaaaacttcggagctactctgttctaccatttgataaataggtataatattcttactgcatacactgtattcttatgtggataaaatgtatggaaaacagcaaagtatcttaagaaaaaatatttatcttacgagttatcacttttaagcttttgtattatacttctagttgatgttctattttttctcgtttttccagtatttaaggcacatgggttatactgagttaaggatatcatatgaaagaagagtaagatataacttagcttacactaaactgttcatagtaccaatataatatgccattgcctagttgattggtatgttaaatgttaaaatgaacattactaatatatgttagaattaatgaatacacaaaattgaagttattatataacagaaatagtgatgaaaatcacacatccaccacattaaaaagttgatttcattttccttttcaagatttaaagtgttaaactcattctggctggatgatgagaaagatatcgttctactgatttttttatactagaataatctttcattattattaatatatttaagtcttatctccaataagttcatcagtgctaccagttacaaatagaaaatgcatgtgctcaatttcaagaattaaaaataatgccttgggagtagcatttcttttctgtggcaagaggattgttggattttccaattaaagaagtctccatactggaaatgagtagtcagttatgaaaattatttttgaatggcgaatttgcatatccttaattgtattcatttcttttgaaagatcgaacttgaaatttatgatgttttgattggttaaccctgcatttctgttattaatactattgccaacagggttcccctatgactggggctctgagtgtctttcctgaataaatgcttgaatcataagtaggtttgttttacttaatgaatagaaaatatctaaagatgtactgctggttttcacatttacacacattgcactttttggaatgacagtagcatcctgtagctgcctcatttactcacatttggacttttctacatcagctgatgagaaacccttgaagtttctgaatgttggtgctgtctgttggccaaaagtgcagtttcagcagagccgtcgtcactgtctatacagtagtgtctgtgtgattacttgaatttttaaagataccttgcccttattttaaggaaaaaatgacttggaaatgaacaatttagagtttttatattaacagtaaaaagcatagttctcacgtaaaataagattgacatataattagattaaaagtaaggatgtcgagtcttattggacttagcattccattggacttaaaccagtcaacacagagtcagtcatgaaggaaaagaacaaaattaaaggcatgtacaaaaatgggatacctatttatgcaagatcagcacaaattgtatataagtatacacacaatgtatgtatgtatatatgtatgtagagtgtatctacagggacagatacaattaggcatcttgtaatgtgttttaggtctccgagactggaataacctccctatactatttaagtctattattcaatgcatattcaactttcatttttggaagcactctttaataaagagttaatgaagtcattttaggcattttagggaaggtggggtagtgggaaggggaagcagccatttcattcctttaagagagtgggccaaaattggttctatttttcagtaatagacaaaataaacaaatgaataaaccagtatttattatttcttgaccatggtgcttatagacataatattattgaaaaattaagagttgtggtatagtaacattaacattttaagtttgatgaggcgattttctttgcaaccaaataaagatcacgttcagctagatagtgtccgtgtggtatgcatgtcctacaaagtaattagtgttgttggatttgtttgtagctgattgctgtgtttgaagaacaagaaccactccacaagattgagagccccagtggaaaccctgcagatcggcagagcccagatgcttttgagacagaagtggccgcccaactggctgcatttaagccaattggtggggagattgaagtaaccccttctgctctaaaactaggtatgtgtaatgtttatgatattcttttcacctgactgaagatccgtcatcttgttgattaggcattgtttcttctttgtgactttcatcctgttaatattttatatcgtggtttatcttttctttaaattatttttttacatagctctttgcagccactgctgcttgggtaagtggatgcagctttttcttgaactgaaggtgaagcagaattgtatgccctcgaagtaacacgggggagtcagatgctaaatgatgaagtttgcctgtatcatatgagtataacttttttaaaaattcctgaaaaaaactcatttgggaaaagccaaggtttatcaaagaatccatgctagaaataaaggtcactttattttcttagcctcagtctttttctgcccaaactataatctcagaatctgggggaaatgttttgaagttagttttgaaattcttttctgatgatttattcagacaagacaattcatccagtaattttgcttagaaatatttttcattatatttgtagaatgagaaagtaaatattattctaaagtttcaatcagtttacaactccaagagaaataacatgtctgttttggtgatacctcctaaagataaatttagctcaatttaactgcatgaagtttttgaaaatccactaatatcttggtatttcaaacaactttttatgcctgtggaatgtttgtgcaacattttgagactacttagagcacctgttatgagggaattctcaagctagaagaacagaggcttattccactttgcaaaggtcagcttcttattctttttaaagcaaaacatatgcttaaaatggttagaatcgtacatagtactcattttcccatttgaaataaaatatatactgtaaagttaaatttacatactctaatgctgacaatccatattttgtactgatttttggaaaagcatctgtagtgccccttttaaaataaaccaaatggaaattaatgacctatggtctaagtgggttttcctgtatcttttggaaccgagctagtgaagcagtctgctggaacgtggctgctggagggctttgtggcagcttctcttcatctggagccagccttgtggcttcagcaaccttacagccccatcattcatttgcataatggatgcctttttatccattatgcaaatggtatgagaggaaaattaggcaataagggaagacgaaaggagaaaattgctcttgcttattttaatattctatttataagcaagcactgtggtcttcaaatggccgaacctcagagtacttctgtgccggagaatttgttttcacctctctcttatgagctttgtcagggaaaaaagattgttttcttcagcttttttgttggaatattgaaacaacataatatcgaatgcaagaaaaaaaagtcagccgagattccccttctttgaaagtgtggactgtctacttcttccatatgatttttgataagtcagagaaaacaatatttattacatgagtacacaccatctaaatcccttactcataataactcatttatttaagcctcgtcatacttaattagtcggcttttattatttttatcgtttaagagttgaggaataggtacagagaagtttagtaactcagcagaaatcccatagctattaggtggcagagccagaatttgaactgttgctggctgtggtgtgagaaaccattttgctgtgctgcctctgacatgcaattcctaaaacaaccaactaatataactgtcttggggtttactttgagaatatatgccaaaaccctgaaaatactaaactccttggtctacaatctcatttcacttagtaccagattaaatgatgagactagctcactgttaggtgggaaacattcccttccaaccatttggcctgaaaccttggcatcacctccagttccaccgtttccttctacctcccccactctgtcagctattcagcttccttgtccacagccaccacagcaggccagagctttgccatcaattagactattgcagaggcctcagactgacctctttctttacactgtgtgctttctccagtccctactgttgccagagctgcctttctaaatcacaaatctgattatgtaatataactcccctgcttaacgaccttcactggcttcccatcaccctgagaaccatatctaaactcgttagcaagctgatgcagatggttcctctgaatcagcaggagaaatttgggcaaggatgaatgacgtaaaaaaatcatcccttacccactttcatggttctagcagtttgagtactttgcatttctggaacttaaaaagcaaagaaaaaacatatttgtcaggtttttcagatagcgaagttaaagaaggaagcaacacagccagctttggtctccacccattctgttttcctgttgttggctccggggcaggatgtggccataggctgtgcacctccagatggagagatgtggttggcagtagaggcagtattgatggcacttctgggagtgtgacctggctgtcctgtctggtccaccctgaaagcctgcttaggtgaagaatgggaggggcggtgagaggagttttgcagcacctgtgccccagcagttcctcctaacagggtgctcatgaaatgtcagccattgaacccaggcccttcatctcccttccccagtcagctagtgtagccattggaactggttgtacttttcacagctcattcacccaacctggtacaagagaaatagggcttaattttttactggttttctcactcttaaggccactttcttaagaaaatagcaaatttaatcttcattggcttacattgcttttcttaattaagcagacacaattcaacaaatattaggaatcaagagatttttgtgattacatcacattgagcacccaaaatttatgtttttctggaatctgatatcaaaatatactcagtgttcagtataatttttatatttctttttccaacacaagataaccatcaacaatattctgttaaaaaccaacaaccaccttctccatgtaatgcatacagaggttgactcctcccattctttctttatcttccaggatgtaatacttatgcatgcatattcatattcccaggcccttcatgatctagctgcttcctctctgcccacctttattgctggccagtctttcacagtcaccttaacttgcagccactgtgaaccacttgccattccaaatttaccaccttcaaacctctgtgcctttgcagatactgttctctttagctggctcattcctttgtctctttactgtatagtgaactcatatgcaccttttaagttcaagctcaaatatgaccttcttcatgaagccttgtccaaatctttaaaacagtacagtaggcttacagtaagtattatttcttaattcttcatctaacaatcaagggttacaaagacgaacagcagaaatctactgacataaaggggttcatagtctcatgccctataagctgatggggtatatatttttaattcgtaagatgagttttaaatcaagtgggcaaccacataattccaacctcattcatctaaattatttcctatcatttattttctaatggattttctaatgtaatgctgaatgactgaaccctggggattcagccctaagtagcaaatcactttcacactttaagattctgtggctctgaaatcagccaaagcatgttaccatatagtacagagattgctggcctgagagttcatttaaatgatgagatgtggtaaccaaaatcccaggcgaaattggaaagaatcatattcacatgatctatttggacttaaaaatttatagttcgagaattttccaagtcttctctgtgaaaccccatggttcttctgagcatgtattagggtttcaatggatgcttgattctagttaataaataacatttattgagcgcttaagttctagatgctatttaaatttgttcattctccatctttggacaaataggattggttatgctagtgtggaagaaagggtgcagaagtctagaaagtagccaataaacagaatcccaatgcttatctaccccaaaacctcacctccactcaaaagatgtatgcatgcctcagaaaaacgtttgtgaaatgctgacctagaaatatgcagttccacagaattttataattagcaattgtgtaggtaatcgatattattttacaaatgagcaaataaaagttaaaattcaatgtgtactctgatgttgaataaggaactagaactggaacccacatttcttggcttctagaacagtgcttgttcagttgcatgactttttaaaaattaattgtagatttcaattatccatatattttaggtactatatgtgatagcacctcacatccttttggaattgagtagagtgtaaattaataaatagatactatgaataggtataaatcaaaagctactgagagaacaagaccaggaaatggaggtggagaaaatgtcttttaaatcctatacatttcagaaatgagtttgcttctgtcttcttatcttctcatcccgtgtgtgtgtgtgtgtgtttgtatgtgtaggaaagttccactaaaaccaatatactaatgggatccatagatgtggggttttttttaataacgtggatattttaatagactttctgattttttaagtatgtacatatagggccatctgtaaaaaagacaaattagtgaggaaaattattttgaagtttaggagggtgggagtctcccggtccttcccctgactagtccctacactgccttcatgattagtacctgaccacctactgttccataagaggctttttgtggccatagatcaaggttggcccaacccaatctttgtcccttgagagtcagtgatatggagctagttctagaccctgcagtatttgatctagctgtgtgatcaggataagtcatttaacctatctctatcagaaccaactttttccaaacaaaaaataaatcaggacaaatttgggacacattctagcaaagtaaaaattgaaaaccaaggctatccaggtcactccctgatgtgtcaccaccatatctccctgggccacagtttcctcatctataaaataagctgtcctttctccaatgggccatgatggttccttgagtgttttattaataccaagctgagtttgaatccaactccatgcctctgccaatttccctgctatggccccaattaattagtagttttttattttgtaccttttgataatttttttcagtacttcttgattgaaatttgctaatttgggttcaagctttcatgggaaaatatttatttagttaaattattttagcaatgtaatttaaatagtttttcaggataaaaagtactttaaacttggctgttaccatgcttgtgatctagattaccttgatataaagtaatctaagtttggagttgaagtggtattagctttattctcctcttgtgtgttaaactttgaagatgagctactttctatttgaaagtgattcttgtttttgagacttgaaagctgaaaggtgcctcagatgctttattgtttccatgtgtgtttgtgattcttcaaaaccgaaatggaaattatgattatgtgtttgttataatatcattattttcaaaacactgagttctctttctttgcagtggtgttcagcaaatactgtgtagctatagattcctgttgaaaattgtgaccattttctatctgattttgactaatttactgcataaaggaaacatatgggaacatttttctcaatttttaagcaaaccaaatccctttatggcgctgatcttcaggaaaacgtaaagaaaggggaagtttattcctttaattaggctgctgtgtgtaagtagctgctgtgcccataatgtgagtttaagtattggcatctgatcctagacaaacacactcacaccacacacatagcagaactaaagctcagggatgggttatgcttctgatgaagcctttgaattctgactacaaagcatataagcatgtgagggttccttgttgttggaagctctttgctgtaggctgtgaaacccagagttaaaattacccagagttaaaattgcgtagatgaattcataagttacaatttggtcattgagtttcatcctgtttgtttcctgttgaggctgattattcaaaagttagcagttatagaatagtttttctttctttttttttcctttccttccctgggagtctgttttttttttccccctccatgaaggcttaaatgaataatgttgtaattagctatggtaaccttgctagggtgtcatcaatcagtcatagccatatagtcaacaaagtgtgtgcttgctttctggtgtgactataactaaatcaggactaaggaggctatagtgtttctaacccattttgagcaccactcttttgctactgttgttttgttttaatttttttttttttttttttgtagcaatgggtcttgctatgttgctcaggctgatcatgaactcctggcctcaagcagtcctcttcctcagcctcccaaagcatgagccaccacgccttggctgttttgatttttattttagattttgttttcagagtagtgaaaaagtagctctgtggaagaatgtcacgttattcattgaatatttaaaattaatactttgtaaaagggccagtggtactagttaaagaataaagtcaatacctaaagacaagtagcccctaaaaaatattaaaaggtaattaccatatgggagtaatttttgtttgtattgagtaaaactatgagcaatattttaaatatacaattttgaatatgcctggcattacctccttttgcagatgaatatatataggcctcatagttgatcacttcctaccattttgttaaaataaaatgatgaagtttgcttgagaacatgctatagttttataaatgcattttaaatgagatattacttattaaaattatatagtgttacacttcagaaaaataaaaattaccaccatcctaacagaacttgtattttcatttttttgttttatattcagttaacttttgtattttagtcttatttcaattttctttttttttctacctgcttcagttacccttttgtctctttaattttgtgtgctatatctgatggctaagtttagcagttaaatttatactaagttggttgtactcaaataaaatagaaaattattaaaaggaatttacatgtaaccatttaaccaaaaatataagacagtacataaaaccaagctctcatttttgtcctttttccagctgtattttctaagttgattatgtgacctctaaaaaaacagagttcaccatctcccctttggcctcttaccaatgctggacccacactgagacggagtctgcagatcctctaataaacaaacggaatgaaaggtcacctttcctaccattcacttgatattagacccctgggtttttaagcctcttttgcagattgcttttaatagtaagtccagtgaagtcatgtttgcagaggcctagtccctaagtagtaaaaatattttcagcactgctgtcatattcagcttcttgtagttcccctgaccactgataaaatgatttgcagtttgtccttttaataaaggggaggaaaaaaaccaagccatgcacctctggcctcttccccatgcccccaccagtaaaaccaccatcgtcctcccttgcagccagtccccagctcgctctcttctgtttcaggcactctgaggcagccgaaacacagccacacagaattgccctctgttctctaaatacaagtactgcttttcacagcctaataaggtttaacatgtctattacaaaatgcctttaaattacttatctgtattaaaaaatttgttgaagttatgactcagattttttatttatacatattcatctttgtggccataaaatagattacattttctcacaaatttctaatcattcctaaataaattatttatagtaaccatgctgattttcttttgcagtttgcaattcaggaatcttgttaacaatttaatatatggtaaagccctttttgtactgacaatgtaaatgtaatgtttagcctttaagatatttttttttctctctgagtgtgtatgtgtgattttttaaaattttctttccacccagatgggcaggcaaaaaaaaaaaaaaatccactaatttaattatttacagaagatccatcttaaggacaagtcactcagagttggacacgctttcgtgactggctcaggattttctcatttgctttatctgataaagccttatgatgaattatgccccaatatatacacatttggttatttactttttctgtatcttatttgaaattttgctaagatctttatttggcccagtgaaagtaggaaatactgaaacagcttgatctgttcattctcacaccccaaagtgataaggaaaggtgacagcctttgcttagcagtgaccataagagaagccatctctattttgcttaccccttttttgttaaatgtttaccagataaaagacaaagacctcccagatatcaccaccacaccctgtcaatttatctttgaaacaatgtattcatcatatgatacacagaaaacggtgctcattctgtttattcattggcttaatgggaaaatgttgatcgctatcagaaaataccagtaactttctaaaaatatcagaataaattctgattactaatctgtataaatatgagactgtctgccagattcttcaaacatctttacagatggaagaaatttggaactttggggggttttggtgtgtaaaattagaggaaaggaaattatgtggtacatcttattttctttattttctttttgtttatatggaagacttgactatggttatgtaatgtatgtttgtagaatatggtgtgatcggggaaaatgggtaggcttattaccttatcacaacctatttaaaatcataacacttatatttggtgttttaagataatatttactaaaataagccgtaacttcaatgtccattttgttttaaactgttggaaagaaagttgtttttatatttttttatactatttggcctaaaacatggcatagatagcaacaaactgaatggccttgtgtcatttggttctgtataattgtgatgatcaattaaacttactagtgtttttaaaacaaatagactttttaccccagagatctgaaagcatgaggaaaacttcttgttttagtcacagttcagggataatgtcctttgacctcaagactttagcttggtgttacagtgaactgcccttacggcagagttcagcatttgctcagctaacatctgctctttttagatgattggtcttaacgatacagttatgaaaatcagtatatcaagtgtcaatgccagagaaaatggtggcatgcctgtcactcccttcagttaatcaataattatttattgataacccagtagattaaaagcattgtgctaggctaccaaaggaatataaaataatacacatcacagattcattcccaagtagcttgcaatcaagttgacttaaaataaattactggatgagtctcttaacttggctaggattccaagccaagttatatatttttatcatatataacgattgttctaatattatggggtacacagttatcaaaccttatactgaagatcttacctcataataaattcagatgctcacagactcttcatgtgtaccattagtcagtatgtgatgtttcccatagcttggttaattgcttgtcttttactttggtcttcagttgatggggaggttcaaggtattcataaaattttaactttttagtctttgattcgacagtcttcattgactcactagtttggccaactttaattttatcttctattaagcaattaaaaataactaaggtctcaagtctctccatgactaccaacaatgtccgctactccccggacacgatctgcaaggacctaatgggttggtggataaatgtctatgcatccatccatccatccttctccctgaagacactccagtcagatgtactcttttaacggtaggtggttaatatagagacaagccttctacccaaatgagttcagcaggtgcactgtttagaagaatgtgttgtgcctagtctggacgtacttcttacctccttgtgttattttttcactgagtactgtgtaaattactgattggaaacccattgatgatcttttctctaaagctgtaggctgtacctcagactaatttattagcatgctattgagtggtttaagcaaatttcattttcagtccctctattctgacacaaaataccattttccagttgaatgtcaaaatagtgtaaacataattgccctatatgtaaacttatctgtgttaaggggtgaattgagaaggagcaacttggccatcttggaaaatggtctttgagaagtttggagaatgcatttagtgtctttttctcttttcagacaattcattacctttaaaaacttaaatttatttaaagtaccttccttgactgccttgttgccctgtttttaaaaaataatgtttagcatttgtttgatagttgccacaaacttgatgctgtaatattctgactttataataaggtgaagagttatgcgaggttaggcaaaattttcgtctctaattcgtctcttgttaaaattaggcttttatcttagtacccaaaatattgtactttatatcttctctgatatcttgatgaagcaagtaggcaatggaatgtttccaaaagaaataaggatggagaaatacatagattatacaatcttacatatttacagcagtgtagtgtagaaattaagagcacaagccctggagcaagcctgcctgggtcaaatatggcactgcaacttacaagctgcatgattttcggcaagttacttaagccactgagtctgtttcctcacctataaaacaagggtaatattacctaattggatagtgacctaattggatagtcgcaagcagtgaatgaattcatacatatatgtacatataaaacacagagaatactgtctgccacataataggtggtatataaatctgctagtcactgttaatttcattattatatttattatggatcatttggaggaaaaaataaaaaaactccatgtatttaggtaattgatttttttttttttttttttttgagatggagtcttgctatgtggcccaggttggagtgcagtggtgtgatctcagctcactgcaacctccacccctggactctagcaattcttctacctcagcctcctgagtagctgggactagaggtgcgggccatcacacccagctaattttcgtattttttttagtagagacggggtttcaccgtgttggtcaggctggtctcgaactcctgacctcaagtgatccacccacctctgcctcccaaagtgctgggattacaggggtgagccagtcccacctagccatgcaactgatattttgatctggtcttttgttatccctttattccactttcaactttcaacccataagatcatgttctctctttttcacgaatttagattctggttgtcttatgccttctcctaaaccataaaattaaattttggtttttctctcttcagacttataagttaaatgctaaaatggcttattgaagccaaaacagtagccagggacattaatcagaatagtataattaccacaaaggtttcaaataatgccttcgtgcttgtttttagagattcatagaagggtaattgctttgatcttttttatcttcaactcaagtatttacttttatgtcctcacccttaactcggcatatggttcacaagaattttcttttacaattggtaagtgcatgctgtctatgtttgacagtccatttttacagggaataggaatttgtttttaatgttgttctcctccctcaactgacccagaacactgtattagccagggtgccaacaggaaacggcatactcaaaggtgtgtttagagagaatttcaaataaaaagattataggtatttcagaaaatgagacacccatgttctgaaaagaatagggagccttggtaggccgggcgcggtggctcacgcctgtaatcccagcactctgggaggcctaggcgggtggatcacgaggtcaggagatcgagaccatcctggctaacacggtgaaaccccgtctccgctaaaaatacaaaaaaaaattctctgggcatggtggcgggcgcctgtagtcccagctactcgggaggctgaggcaggagaatggcgtgagcccgggaggcggagcttgcagtgagccgagatggcgccactgcactccagcctgggtgacagagcgagactccggctcaaaaaaaaaaaaaaaaaaaaaaagaatagggagcctttaccagctaaggcctgaaaggggaaagaggagaaaattcttacatatctgatgagggctccagatgttggggagaggcccttagaggatcaaaatctgcaacctatggatggcaagtgcagccactttcaaagctgaagctggcagagagagaacagaacagataaacaccccaagattcctctcttcctacccactggtctcctgctgatccttcctgatggctacattcaaaaggcagccagagggaaaatggtcttcagaaggcactgagccactgaattagagcagcctccagggggccagaacagggcatagaagactggggagtggcattggagagagtaaccaacacaaacatctagtctgtgtgtctctgaggtgagatttttctacagtgctgttttttattaaaattatatagtgttacacagatcaataatgcttttaaaattagccaacagataattattaatgtctattaggcatggagtatctctattggaatataaaaattagtaaaatgcagtttttccctcaaggtgttcacaattctgtgcaacagttctcaccccttttctatttgtattcagacataacatgggtgttattaataaacacaatatgtcagtagggcagtagtcatctttttgtgatattcatgtgcacaaaagttgtacctacctttaggtaatattcctgttttggtgactataattccaccaactttatcgctcagtaaagcacatcagctttcagcttgcaaaagtggattgaatgcacttcttttttgcctcctcctttcccaacattcataaaaatgacagattttggctgtgcatggtgtctcatgcctgtaatcctagcattctgggaggctgaagtgggaggatcacctgaggtcaggagtttgagaccagcttggccaacatggcaaaactctgtctctactaaaaatataaaaatattagccaggcatggtggtgggcacctgtaatcccagctactcaggaggctaaggcaagagaattgcttgaaccagggaggcagaagttgcagtgaacagagatcacaccactgcactccagcctggagagacaaaatgagaccctggcctcaaaaaaaaaaaaaaaaaaaaagacagttttaatgtaaaaataaaggaggtggagttagatggataaaatcactggaaatgaatacaaaaaattagccgggcgtggtggcgggcgcctttagtcccacctacttgggaggctgaggcaggagaatggcgtgaacctgggaggcggagcttgcagtgagccgagattgcaccactgcagtccagcctaggcgacagagcgagactctgtctcaaaaaaaaaaaaaatcactggaaatgggaggagaaaatggagagtaaataaaatcagatcaacagatgattcaatctttagactgccctagagtaaaggctgggatgaaggcgggcaaccagcctgtctgtctgccttctgtgtgtgcttttaagacgagacctgccaatgaacatgctttatcatgtcaaccacctaattcagtggagagtttatttcaggaaagacccatatattggcaggaacaactgaagctatttgttgttaatcaactgaataagaatatgaatatactcattcatttatattcaggaatatgaatggacagccgctactcaccagacaatatatggaaaacaacaagtcaaagataaggacagtgtagaattgacaagacagtcttgaagaatagcaaagcttaccttaacagatatgtataaaggtatagaaactgattcagtgtaattttggcacaagaacagaacaatggagtagaatagaaattatagcaatagcccctcacagatataatcatttggcttacatcatatttggtattgctggtcaattcaatatctatatagaaaaaaatttaatatccctacctcacactatatacaaaaatcagtgctagacagattatagatctaaaggtaaattaataacaaaacaagcaaaaaacaatgagagacaatgtataagactatcttcataactttggtgttaggcttgtttctaaaacagaacacaaaaagtgatagccatgggaaaaattttgataaattgggttatgtgcaataaagaacttctgttcattaaaagactgaaaagaaaagccatagattctatgaagaaattttaacacatctgtctgacaaaggatagtgtacaggatacataaataactcctaaaagtcataagaggaaagcatcctgctcaatagaaaaataggaaagaaccctaacaggcacttcataaaatggccagtagatttatataaaggtgttcaacttcattaatcgtgacagaaaagcacattaaaaccacattgcaaatttcagcaacaaaataaacaatgtagtatttgtttataacccaacatataaagtaaatttgcatgagcccatactgatataagtgattgtttgagtaaataaaactagtagtgcttagaggtaagggtaggagttgacaaatctttctagtagaattccaaataatatatatagatagtactttcaccttgagtatgggatgaacttgatgacttacttccaaagaataggatactgaaaaagaaaatgagtgaatccacagtagagaaacctggcaagcactgtttgaaccaagtgatcaagattattatctccaggcataattcagctgataccatgtagtctgaaaatgatgtgatgagcagggcatttcacctcaatggtattcttcctccaaatccatacccccaggctaatcatgagaagaacatcaaacaagcccaaattgaggaacattttacaaaatacctgacaagtcctcttcacaaagtcaaggtcatgaacaacaaggaaagattgaaaaactgttccagaccagaagagactgagaagacttgatgactaaatacagtatggtatcctaaactggatcctggaacagaaaaggtcattcgtggaaaagctggtgaaatccaaaggaaatctgtagccttgttaatagtaatgtataaatgttaaattagttttgacatacataccatagttacataagatgttaacataggggaaactcgattctttttatactatctttgcaagttataaattaattcaaaaggaaaagttggttaatacaaggccactataaattcatcagaaattactaaaatgaaagaataccagctcttggtgagcctgtgaagtaactaaacctcatacattgttggaaaactgtttgagtatccactgaaattgaaactgtacatgtcctatgactctgccatttcagtcctaggtaacctaggtaattctcaacagaaacgagcgtgtatattcactgaaaaaaaaatagaacagcatccctattcatatcaatctcaaattggaaacaacctaaatgtccatctttggtaaaataataaactgtggtgtatgcatacaatggaatactttacaacagtgagattaaactattacaatagcaatagcaagaaaaacccttagaataatttcataaaatagaaggtgtaaggagttaattccctctttcccagtggggcaatatacatctgccttaagttggtgggccaagcatatgtggctataaaaaaattaaaatgacaatctaaaattcatgcattaagcaaatatttattggacacttaactatctaccaggcacttttgtaggtgctgggaatgtagcagtaaacaacaaaaagattaaaactttctattctcatttagtttatacactagtgtgagaagacagtaaccataataaatgagatttttatatagtatgttagaaactgataaaaagttttgggagaacactaaaacatggtcaggagagtagggtgtctgatgacaagaacgaggagtctaatgttaaacagggtggcatttgaggaaaactggaagggagttggggagtgagtagtgcagattggttagaggagagaggaagggaattttgagaaaaattcttcatcttttttagcagggagtctatcaatgctatttaaagttcaaaaaaatcaagacattgtgtgtgtgtatgtacacacacacatatatatgtatataaatcttggagttatgtaaccaccaaaaaagtcaaaaatagaagtgctacaaaaagacaacttctggtaagttgagcctgtcagtgaaagggagacttttattttttatttttatatttccttccttctgcaaggtttgaattgttttgaaaatcacattttaaatggtcacattaggacacaagtaggccaggaaggagtgacattattaggtagagaaccttgaaaccactgtaattatatcttgaaaagataaatcgtttgcacaatttagtgcttattattgatgaggaatttcttgtaagattgctgtcagctgcttcaaggagctactcaccctgttttctccaactcacagacgaccaagttctgtggatcaggcatgggtgtggcctagaccagctcagagcacagctgcgaagtctccccagatcctccccaagttaagcacacaagtacaggggcttggccacatgctgcagccaccagttcacactgattctgatagctctctttcttgccccactaatccacataacaatatgttgtccatattgctttgcagcatcgtgaaagtgctgactcatgtttcacaccagtaccaactcactctaacactcacaatctttcagctcaagctaaaagattttaattaggtatatggtgacacaaaacaagttttctaattaaatttttgaaatgagtaaggaactgtaacattgcccctagataatggataaaagttcagtattaaatagactgcatgtactcacgcttaaattggtatagatgtaaaaaagaattagtcattgtatctgataaaaagtaatctattttatgaatttgtagtatactctgtagagcttgtcttttttgtctgattttacttgaggggaatatttcaaattgcatatatctgaaaggagaacgaatataattacctaaatctagaacaactaaaaatacttcagctaaagtatacaaataattggagtgctttttgtcttggttttctcggattatctggatgattgcctccattttctacctgatttagtgctttctacctgattgagtatttttcaggaggttgttactgctgttttcttagctcggtgacctgaagcattgattctgtgaactgttggtatagccaatgcagtttgggttgtccaactggtaattgggcctgataatttgcagacattatgtaggagtttctttatttggtagtttcattctcaaaaaaattggtgttattaagccttgagtaaatatagttgttaactctgcattgtggtcctaaccaacttataacaactgacatttatgaaggttccaaccgaggctttaataaacaatgcatccaaaaatgtaagcatggtggctgtggggggagtcgggagaggaaggggggaggagagaagtcagtttaaggaaagttagaaaaaaaagacaacatttgatattaaatttaatgtatttagttgagaattaagaggaaacagttcagcctgtgtggaggaaatcttcatgcattttattacctgtgaaggagttaaaaatataccaacctgccatattgactattgaagttaaagggcacttgaaaaacaccaggtgcaaaaagatgactctgaccttcgttccgtttcttaaaagcagaagatgaaattcccatgtgaaagatgccctccatatacttgcaagacacaacatccttatccttaggatcagaagttgtaaccaagagaatttagtatagacattgtaaaataactcttttaagcctctccacataacatagttgcattttcacagcttactattatttgtccaattcagtatataagtaactgactctaaccccttctttgggtcttcgtttccttatgagggctcctgtgcatataaaacttgtattgaagttgtatgtcagtacccgtcccctcctctgtatggaccttccttgtcgcctctctaaaaagaaaaaaaaatatgcatttctcctgttcatctgttttatatctatctaattctcagatccagccaaatactaagagaatagaggtggagttttgccttccctgcatctataaaacatctaaatcaaaattatatatatatttaatatatgataaaattttcacagtaatttcatggtcaaattagcaaaagaattaataaaatatacatttctctttaaaaggtctcaacttacattattggacaaatactagtaaattgctgtctgtaatagtcaagatttttcaatcttctcaatagtcagttgagactaatcaaaatagtttttacgtgtagtttggatgtggaaatgctaccactttatcactgaaattgctggagtttcatattgaaggtggaatgcacttaaaatggggtaacacacaagggaaaatttggcaaaatgatttcatggagtttcagatttaggccagtgatagccagggcccttaggagaagtagatgtttcccttttgtatttaatatgaataacattaatattaaaataaatgtatgtgtattcctttgtattcacaaaggaatgttattggatgtgtgagttgtcagttattctgggagatgtttaattcagtagcaggaaatggagcggccctggaatttgtaggaggggctttctcctctttgaggagccagatgtcatggttaggaggagaagggccatttttgcattgcatgtgtgagactggaatccccattttcacccactttaggcacttagatatgggattaatggtgcagatccatcaactaagagccctgtgtgaataccgagcttaagtctggcagaaggaatgtgaagcagtcctggaataatcatcaggaaagaattactgctcacctttgttccactgcccacccccccgcaccccaccccagatgacttcaaggtatcttaattcagcaagtgttcaagcaagtcattcagtacagccccagctctcacaaaatcttctctaccacgtttggcacgtctaataatgattataggcattgctacaaattcaatggtaatattgtaggctaccaggttagagacctctctaacttagtctgtctctttctcttctttccatttctcctcctttttcttccccttttccttcccccacttctttccttacatcctccttccttccctcctgcctgttttttccctccctttaactatctctctctactttccttccttgaacaattaaaggaatgcattaaagcccaaacaacaaaactgattaactcttaatgcttatctttctgaggaatgataatctatatgaacttgacaccaagactaaaagcttaagtggttgagtggatactaccaatatcaaaggggagaatgtcttctgtggaagataaatatttcaaaattggctatatcagaatgtgtgaggccataagctccaggaaacatacagttctaacacttttctggaaaaacaaagaggagaaaatgtcataatgtttatgttcttgccatgcaccacacacatgaacgtggctggaatttgaccaaatggacagagggtcttactgaaaccgaactgagcatctgccgccctgacttcttcagtggcagagggcccacctcagccacagttgttatatgtgaaaagccactggaaagaagtggagacaattgatgaagccccgtgtaccaagctggtttcatatggggggaagatctggtgagggttggggtgatgtgtacagaatagacaaaggagaaggggagaaacatctggattgtattgaaaaaggcttagctaggcgtggtggctcacatctgtaatcccagcactttaggaggccgaggtgggtggattgcctgagctcaggagctcgagaccagcctggcaacatggtgaaaccccgtctctactaaaaatacaaaaagttagccgggcgtgatggcaggcgcctgtagccccagctgctcaggaggctgaggcaggagaattgcttgaatccgggaggtggagcttgcagtgagccgagatagtgccattgcattccagcctggacaacagagcgagactctgtctccaaaaaaaaaaaaaaaaaaaaaaaaaagagcttatctgggcccatatgctagggactttcttgggtatggcagatctctgtcatcttttgattggatccctttacttcacttagacctgtgtgtcacctttgctgactgcaaggaaagctcagggcctgccagtatgtaacccaacagttgtatcaaaagcacatagggcataacaatatccaagtaagtttctgaattatccttcttcaaaacatgtctatacgactatgaagtgttatcgacagagcatatcaaccctaaactgtgatttgtctcagcaatggcagttactgatttgtaataatcagtactttacctagtttaaatcataatctctccttgagctcttaaatccacttttgtaatccatcaaactaaatgtaaatccctcagatggtgacatccaacaactagttattgtctttagccagtttatatttttaacgtacgcaattaatactatatatgcctgttagcattccaagatgatttttagatttcacagatgaggattgttcagagtttctcagtcttttctgtgaagtttaaaaaatctctttggcaaaaattcctaatgtgatagcagctagaagagtaattttcattggaatgaccttttcgatgggtaatttgacagacgcttgatggacagcattcttccatctctcagcccaccttttacgtcctgccataaaacgctggagcaaaattttacctcagctgataagattctcaatagtcatgtgttgcatatctccctcagagcagttcctcaaattttgaaagctgtctttctttttgaggtatttttcattaccaggagaaaatgtttcttttagggagatattctaaaacaatagcacaggtactgaacaaacttcccaagtgtctaagggactctctcgtgtggctgtatagtattggtttggtgtattaaatggcactctcatgtactataagagttaacacaacttccaaaggtgcctttcctcacaataagagaacagatttgactttggaaaaaaaatgtgactatgaagtacccagttaaaataccctaaaagaaaaaaatgaaagcacttactggtaaaatgaagacaatcaacttgcaaataaatgtgtttttaagatgtggccctggggtgacatgcaaattcaaaagactaatattttctctgggaataaaacattttggaagatattttatcttgaattctgaaaatattgccagaatagaatgcttgttgattgataaaatatgtgctttcatgaagaatatttcttatggtattacctttgtcaaagaaaagattctgtagtttggggagataaattataaagatgatacatacttatttgtgtatgtgtttgtctgtcttctctttctagaaggtatgttgatgaactcagatcatcatctcttttgtccactgttgtatctgtagtccctggcacaatgcctggtgtgtagtggtcagtcaataattatttgctgaatgaatgcataaacaaatcaaattaacaaattaaactctagattttcatcttcttcagaattttttttttcagtgttccaagactaaggacttttcattgtctttcaagttgggatcttaatcttatttactgcttttcatacaacaaacgtgttaaacatgtatcagaaaaaattagaaacattatctgtgattcttatatagggaggtgatttcattccattagctttttggggggaattcatgggtttgtcactctgttaatccagctgacaagcagaatccaaagggtgacagttagaaggctggaagggaaagggattgttgatgtggaaatgaaaaatagacttcagggaaagaggtagttagatgaaaatatggcaaaagagagagagagagaaacacctagagtccagtgggggtcatcacattgcaggaggaggatgagggcatgaagggggtccttggagaagttctggagagaaaaaagctgagacaaaaaggagatgaagttatggtcaagccagagaagacattggattagcactgcatgcatgataaaccagccatgctactagtataattctgacattttggaaatattgaaatcctacatgaagaataaatggtgtctgtattttctcagacaatgaatttgttcaaaacaattgaactcatggacatagagagtagaagaatggttaccagaggctgagaaggtagtggggggcatgtggaggacaggtggggatggttaatggtataaaaaatagaatgaataagacacagaatgactatgacacacaacatggtgactatagtcaataataatgtaattgtacatttcaaaataactaaaagattgtaattgtttgtaacacaaaggataaatacttgagggggtggataccccattctccatgatgtgcttatttcatattacatacctgtatcaaaacatctcatgtactccataaatatatatacctattgtgtacccacaataattaaaaataaaaataaatgaatttgtgacctaaataagtatgcatgacagaaaaagagaactttgttcaaaaattttagatttggaaattgttcttcatatcatactcctgaactgacttagtttccactcacatttaaaataactgaaaaagagaaatgagagaaatttacaagaaatggtgtgcccatattatagggtgacagttaaatgctgtccacgccctgacaccacacacccaaagaagattagatctatttaacaatgaaaagaatggactgctacaaaaagaaatacgttcatctctttgttcttgcattaaatgagaaatatttatcaggtactgttcatgttctaggcactgggtggtaaacctccagcagtgcacaagatagcagtggtctttgctgtcaccaagtgtactgcctagtataggaagtaatcacaaaaacagtttaaatgtaatgttaaggggggtacaggctacagtcagcactcagggcagtgtccctttacctaagaaaggagctggggagggtaagttcaaggacgatttttcagaggaagtgagggattgaccaggcaagtggaaatggaaagaatatttctaggattgcatgctcaggaaaaagaaaaaagccaagtatgactgccataaggaatgtaaggtagggaaaaattgggagagaagtatggtgagatttttctggaaaccaggatggaaccagaactggaagcacttacatagccaaggtaaggagccaggacattttactagaggccagcgaaaggatttatttttaaattaaatattgaatttgagagttttctaaaactgtggtatgtatgaagagaagcaacgcagtgagcacccatgtaactaacacctgatttgagaaactgggctgtcattatctttgaagtcccctctgtaccccttgctaattccatctatttcacttttctgtggaataatcattcctttgcttttctttataattttaccatgaattttcatatctctatggagttcattgtttagttttgtgtgattttgagctttataaatggaagtatactgaaaattttttctgtacctttttctccttaatattgcactcctaaggagtatcatgttgttgaatgtagcccattatccattcatttcattgcagtatagtttccttttttaaaaaaatggatatttgcattatttccaggtttttgctcttacatgcagcataactataaaccaccttcttcacatagtcaatgaacatataacaattttctctaggtaaatatacttagaatgaaattgtttgtttatagaatatattacttttgaaatatattagataatgccaaattgcttcccacagtaattttactaattctttaaactactaaatgtaaaatagaattccagtttttacatggtcagcaaaacaatatagctagattttaaattttcgccaattttatggatatgaaatatttcattgtgattgagctcaagcatattttaatgtaattattgaccattcagatttactcttctgtgatgttcctggtaagatttttgacaatttttttactcattgatttgcaggaactctttaaaaacatttttttttttttactgataataattgtacgtatttttggagtacatgtgatatttgatatatgcatacaatgcataatgatcacttcaggattattagcgtatcacctcaaacatatcatgtttctttgtgttgggaacattttgaatattctcttttagctatcttgaaatatacaacaaattattgttaactatagtcaccgtaccatgctgttgaacactagaactaattgtatgttgatacccattaacaaacctttctttctccctcccactttccagactctagtaactatcattctactctctgattcacaggaattatttacatattaagaacactaatcatttgtagattgtatctgtctgtgtgtgtatgtgtgtgtgtgtatgctacaaatatcttgccccagttgatgacttgtcttctcttcctgtatgttttttgatgaccaggaattcttgattttaatagagtcaacatttttatgtttgaatattttgtatcttatttaagaaatctttccctacctaaagccatagagagactcttctactttatataaaagtttcataattttgtctgtttaaaagtttactttacataggataactttttattttagcatatggtgtgacataggggtacagcttttccaccatacacgtgatcaattgtcaggcatcatttattataaagcctgtcatttctatacagaaacacacagctattataattctgtgaaattcaaatgtcttagtatttctgtgtctgcttctggatgctctaaactatttcagttgtcattcttttttttttattattatacttatataagttttagggtacatgtgcacattgtgcaggttagttacatatgtatacatgtgccatgctggtgcgctgcacccactaacgcatcatctagcattannnnnnnnnnnnnnnnnnnnnnnnnnnnnnnnnnnnnnnnnnnnnnnnnnnnnnnnnnnnnnnnnnnnnnnnnnnnnnnnnnnnnnnnnnnnnnnnnnnnnnnnnnnnnnnnnnnnnnnnnnnnnnnnnnnnnnnnnnnnnnnnnnnnnnnnnnnnnnnnnnnnnnnnnnnnnnnnnnnnnnnnnnnnnnnnnnnnnnnnnnnnnnnnnnnnnnnnnnnnnnnnnnnnnnnnnnnnnnnnnnnnnnnaatgatgttttccaatttcatccatgtccctacaaaggacatgaactcatccattttttatggctgcatagtattccatggtgtatatgtgccacattttcttaatccagtctatcattgttggacatttggcttggttccaagtctttgctattgtgaataatgccgcaataaacatacgtgtgcatgtgtctttatagcagcatgatttatagtcctttgggtatatacccagtaatgggatggctgggtcaaatggtatttctagttctagatccctgaggaatcgccacaccgacttccacaatggttgaactagtttacagtcccaccaacagtgtaaaagtgttcctatttctccacatcctctccagcacctgtggtttcctgactttttaatgattgccattctaactggtgtgagatggtatctcatagtggttttgatttgcatttctctgatggccagtgatgatgagcattttttcatgcgttttttggctgcataaatgtcttcttttgagaagtgtctgttcatgtccttcacccactttttgatggggttgtttgtttttttcttgtaaatttgttggagttcattgtagattctggatattagccctttgtcagatgagtaggttgcaaaaattttctcccatgttgtaggttgcctgtttactctgatggtagtttcttttgctgtgcagaagctctttagtttaattagatcccatttgtcaattttggcttttgttgccattgcttttggtgttttggacatgaagtctttgcccacgcctatgtcctgaatggtaatgcctaggttttcttctagggtttttatggttttaggtctaatgtttaaatctttaatccatcttgaattgatttttgtataaggtgtaaggaagggatccagtttcagctttctacatatggctagccagttttcccagcaccatttattaaatacggaatcctttccccattgcttgtttttctcaggtttgtcaaagatcagatagttgtaggtatgtggcgttatttctgagggctctgttctgttccattgatctatatctctgttttggtaccagtaccatgctgttttggttactgtagccttgtagtatagtttgaagtcaagtagtgtgatgcctccagctttgttcttttggcttaggattgccttggcgatgcgggctcttttttggttccatatgaactttaaagtagttttttccaattctgtgaagaaagtcattggtagcttgatggggatggcattgaatctgtaaattaccttgggcagtatggccattttcacgatattgattcttcctacccatgagcatggaatgttcttccatttgtttgtgtcctcttttatttccttgagcagtggtttgtagttctccttgaagaggtccttcccatcccttgtaagttggattcctaggtattttattctctttgaagcaattgtgaatgggagttcactcatgatttggctctctgtttgtctgttggtgctgtataagaatgcctgtgatttttgtacattgattttgtatcctgagactttgctgaagttgcttatcagcttaaggagattttgggctgagacgatggggttttctagataaacaatcatgtcgtctgcaaacagggacaatttgacttcctcttttcctaattgaataccctttatttccttctcctgcctgattgccctggccagaacttccaacactatgttgaataggagtggtgagagagggcatccctgtcttgtgccagttttcaaagggaatgcttccagtttttgcccattcagtatgatattggctgtgggtctgtcatagatagctcttattattttgaaatacgtcccatcaatgcctaatttattgagagtttttagcatgaagggttgttgaattttgtcaaaggctttttctgcatctattgagataatcatgtggtttttgtctgtggctctgtttatatgctggattacatttattgatttgcgtatattgaaccagccttgcatcccagggatgaagcccacttgatcatggtggataagctttttgatgtgctgctggattcgttttgccagtattttattgaggatttttgcatcaatgtttatcaaggatattggtctaaaattctcttttttggttgtgtctctgcctggctttggtatcagaatgatgctggcctcataaaatgagttagggaggattccctctttttctattgattggaatagtttcagaaggaatggtaccagttcctccttgtacctctggtagaattcggctgtgaatccatctggtcctggactctttttggttggtaaactattgattatcgccacaatttcagctcctgttattggtctattcagagattcaacttcttcctggtttagtcttgggagattgtatgtgtcgaggaatgtatccatttcttctagattttctagtttatttgtgtagaggtgtttgtagtattctctgatggtagtttgtatttctgtgggatcggtggtgatatcccctttatcattttttatcgcatctatttgattcatctctctttttttctttattagtcttgctagcggtctatcaattttgttgatcctttcaaaaaaccagctcctggattcattaattttttgaagggttttttgtgtctctatttccttcagttctgctctgattttagttattgcttgccttctgctagcttttgaatgtgtttgctcttgcttttctagttcttttaattgtgatgttagggtgtcaattttggatctttcctgctttctcttgtgggcatttagtgctataaatttccctctacacactgctttgaatgcgtcccagagattctggtatgttgtgtctttgttctcgttggtttcaaagaacatctttatttctgccttcatttcgttatgtacccagtagtcattcaggagcaggttgttcagtttccatgtagttgagcggctttgagtgagattcttaatcctgagttctagtttgattgcactgtggtctgagagatagtttgttataatttgtgttcttttacatttgctgaggagagctttacttccaagtatgtggtcaattttggaataggtgtggtgtggtgctgaaaaaaatgtatattctgttgatttggggtggagagttctgtagatgtctattaggtccgcttggtgcagagctgagttcaattcctgggtatccttgttgactctgtatctcgttgatctgtctaatgttgacagtggggtgttaaagtctcccattattaatgtgtgggagtctaagtctctttgtaggtcactcaggacttgctttatgaatctgggtgctcctgtattgggtgcataaatatttaggatagttagctcctcttgttgaattgatccctttaccattatgtaatggccttctttgtctcttttgatctttgttggtttaaagtctgtttaatccgagactaggattgcaacccctgcctttttttgttttccattggcttggtagatcttcctccatccttttattttgagcctatgtgtgtctctgcacgtgagatgggtttcctgaatacagcacactgatgggtcttgactctttatccaacttgccagtctgtgtcttttaattggagaatttagttcatttatatttaaagttaatattgttatgtgtgaatttgatcctgtcattatgatgttagctggtgattttgctcattagttgatgcagtttcttcctagtctcaatggtctttacattttggcatgattttgcagtggctgatactggttgttcctttccatgtttagcgcttccttcaggagctcttttagggcaggccttgtggtgacaaaatctctcagcatttgcttgtctataaagtattttatttctccttcacttatgaagcttagtttggctggatatgaaattctgggttgaaaattcttttctttaagaatgttgaatattggcccccactctcttctggcttgtagggtttctgccgagagatccactgttagtctgatgggcttccctttgagggtaacccgacctttctctctgactgcccttaacattttttccttcatttcaactttggtgaatctgacaattatgtgtcttggagttgctcttctcgaggagtatctttgtggcgttctctgtatttcctgaatctgaacgttggcctgccttgctagattggggaagttctcctggataatatcctgcagagtgttttccaacttggttccattctccacatcactttcaggtacaccaatcagacgtaaatttggtcttttcacatagtcccatatttcttggaggctttgctcattnnnnnnnnnnnnnnnnnnnnnnnnnnnnnnnnnnnnnnnnnnnnnnnnnnnnnnnnnnnnnnnnnnnnnnnnnnnnnnnnnnnnnnnnnnnnnnnnnnnnnnnnnnnnnnnnnnnnnnnnnnnnnnnnnnnnnnnnnnnnnnnnnnnnnnnnnnnnnnnnnnnnnnnnnnnnnnnnnnnnnnnnnnnnnnnnnnnnnnnnnnnnnnnnnnnnnnnnnnnnnnnnnnnnnnnnnnnnnnnnnnnnnnnnnnnnnnnnnnnnnnnnnnnnnnnnnnnnnnnnnnnnnnnnnnnnnnnnnnnnnnnnnnnnnnnnnnnnnnnnnnnnnnnnnnnnnnnnnnnnnnnnnnnnnnnnnnnnnnnnnnnnnnnnnnnnnnnnnnnnnnnnnnnnnnnnnnnnnnnnnnnnnntctttgatgatggtgatgtacagatgggttttcggtgtggatgtcctttctggttgttagttttccttctaacacacaggaccctcagctgcaggtctgttggaataccctcccgtgtgaggtgtcagtgtgcccctgctggggggtgcctcccagttaggctgctcaggggtcaggggtcagggacccacttgaggaggcagtgtgccggttctcagatctccagctgcgtgctgggagaaccactgctctcttcaaagctgtcagacagggccatttaagtctgcagaggttactgctgtctttttgtttatctgtgccctgcccccagaggtggagcctacagaggcaggcaggcctccttgagttgtggtgggctccacccagttcgagcttcccggctgctttgtttacctaagcaagcctgggcaatggcgggcgcccctcccccagcctcgttgccaccttgcagtttgatctcagactgctgtgctagcaatcagcgagattccgtgggcgtaggaccctccgagccaggtgtgggatatagtctcgtggtgcgccgttttttaagccggtctgaaaagcgcaatattcgggtgggagtgacccgattttccaggtgcgtccgtcacccctttctttgactcggaaagggaactccctgaccccttgcgcttcccaggtgaggcaatgcctcgccctgcttcggctcgcacatggtgcgcgcacacactggcctgcgcccactgtctggcactccctagtgagatgaacccggtacctcagatggaaatgcagaaatcacccgtcttctgcgtcgctcacgctgggagctgtagaccggagctgttcctattcggccatcttggctcctcccctcctcagttgtcattctttcaattcttgtaattccataccctaactttataatactccgtgatatctgtcagggtaggttcctgtgttgttcacagccaagaatggtcaggctgttcttggccctttgttcttccactttaattttagaactggccggttaaatttcagaagcagaaacctatgagattttgattgggattgaattgaatttgtagattagtttggagagaattggcattcttacaatactgagtcttcacatgaatgaacatgctatatcttctctgcatttatttacaacttctttattgcccttcagtaagggttgatgatctcttcataaagtttttgtacctatttggatctattcctaagtacctgatattttgatgctgttataaagtaagttactaaaatgttttgtttctgtttgtcactggcttagagaaattcagttgatttttttaagccagaaagtattctttagactttcgtggacactaataatttaactgagtctcttttaggggttttacacaattatgtcatctatgattgactattcttttcaaattattttatttttttactaattcttatacttgtccttcttgcattactacacttagagctccagtgttggatagaatgagtgatagctgattttgttcataatcttaatgaagactagttcatgtttttagttttgctatacatttatagatatataattattttatattaatttatacttgtatacacatctttaaatattataaaatatttacagtaatgtagatatttattatttatatacttaatatttttatttgttatatatagtgagtgtatgtgtatatatatatatgtgcatatatacacatataatcaatattgaaaagttgagtcagctcttattttcttattaaggttatgaataagatgacttgttgccaccaattctgttcagtactggagatcttaacatagtaaggcaagaaagacaaatataagaattagagaagacacggggaggggaacatcacacaccagggcctgtcatggggtgggatctaggagagggatagcattaggggaaatacctaatgtagatgatgggttggtgggtgcagcaaaccaccatggcatgtgtatacctatgtaacaaacatgcacattctgcacatgtatcccagaacttaaagtatatatatatatatatatatatatatatatatatataggtgtgtgtgtgtgtgtatatatgtgtgtgtatatatatataaagaattagagaagaaatgaaaaactttttttttaggttaaggaagtttcttttaatttctaatcactaaaagtttttgatataaaggaatgttaaattctactaaacatttttccatatccactgaggtggttaaatgtttttcgcttttcatctattaatatgatatattgtattgattgagtaattatagttttgcagtgttgccaggctagagtgcaatggcgcgatctcggctcactgcaacttctgacaccctggttcaagtgattctcctgcctcagcctcccgagtagctggggttacaggcatgcgccaacacgcccagctgatttttgtattttcagtagagacaaggtttcagtgtgctggacaggatggtcttgatctcctgacttcgtgatccaaagtgctgggattacaggcgtgaggcaccatgcctggctgattttttaaaatttaaattaaactggcacttctagagtaatctcaaactggcaataaagtgtaatcttttttatgcatcgctgggttcagtttgctaatgctttcttactttttttttttttgccaatattttcttcaggatgtctgtatctgtttttaagatcatcctataatttccaattgttgaactgcaaacttcttttcaaccctaaaatccaatggtcctataattcattatcgttgtcatcatcatttacctcattgctacaaaagcactaaggaaagaaaggagatggaaggaatgactcgttttgccttgttaaatggaagtatatttaaaatgtgatactctcttaagaatgatttttttaaaacatttacttagaatttccatggttccatactgtctgaaattaattcatgaaacctttttctatgagtctcactaacttgctatagaatgtaccaagaaactatttaaaattgaattctgagctttgaacatgttctttttcagtttcacctgataccagttccaagcgcacccaatcttttctatccactggagatgagaacgttttccctgtgatgtttaaacttaattccagagccacaatcccactgataatcattgtccttttctcctatacattaaagtggtcttcttaattgctataatattcacaaggagcctattggaactggagtactctcagatgaagaacagtattgtaggtgataaagataaagtggtattgagaactacccaatttacttcagtgaattcaatctttcttaggaagcaagtggtacctgatatatttacctgaacttttggagtgataaggaaaatgtttggcatgcattcaggaccagagaaactttaaaggtttatctcagcaaaatagtattggaaaaatgatctatttacttatacgatacaagggtatttccagttctttgattctgggggtttgcagaattgttaccaatgagaaatataaggagtgttcaagtcacagggtttttttttttttatcgtgctccttttgcctgtgtggaagagtcatgcatctgttggggtacactgaacaggcagctttgtggcctactactgaaacttttactggaatattattatataaaacacagactgaccaaggcagataccacatgctagaagagttctgggtagtacaacattaacaatattccctttcctatggtaatgggtgcagtggtgcacagcttgatttgctacattaggcttgttaaattatgttttcagtgtggccacggccttgtgttttctactgagtgagcctgctcaggtgtcacacataaaatctgttgctgatatttattgagtgtgtgtagtggttgggggacgagataaggttagagaaataacctttcttagttctggtttttattagatttccctaaaaattccatgtttgttatattatgttccatgtatgcctgaatatatggcacagtcacataaaaagcaatcccccattttcccaatgagaatacaacccttttaaggagatagatgaaatatccaaacgtctactcaagtttaattgattaacttactaagatatacattttataatcatatgcaaactttatttgagaaatgttgatcttttccatgctcacattttacaggttcattttattcaaacttatcacatgggttgttgatatgaatgccttcctatcatgggagcaattttttttagagtttcaaactgatttcctgagtacatcgtccctacttccatccatattgcttgagacactgaacttcttaaatctgtgcaaggtactgtcactagaagttttatcctgagacatgctttgcataacattagggccttagggttttttggtttgtttctgttttgttttgtcttttggttttgcaggtagaagcctgtaactttgactttactgtattgcttttacgaggtgttttttgtttgtttgtttgtttgttttttagacagagttttgctctttttgcccaggctgaatgcaatggtgctatcttggctcactgcaacctctgcctcccaggttcaagtgattctcctgcctcagcctccctagtagctgggattacaggtgcctgcaaccacacctggctaattttcatatttttagtagagatggggtttcaccttgttggccaggctggtctcgaactcctgacctcaggtgatctgctcacctcggcctcccaaaatgctggaaatacaggcgtgagccactgcacccagcctgcaatgctctttcagtggatagccaatactttcaattgctagaacccactctagggatcctaactctttctttggttcttttattactaattattcatcatttgtgttggaataggctgaacccctgtatcttggtaaccaaatacaacagcatttatttccttttcatacagagcccttacatatcctgatggctctccagaacaatagctttactgggagactctgacccagtgtgacaggcaccgtcagctgaagctgcaccgtccagaatacctggccttcctggttggcacgtgagagtgataaacctgggtggtctcaaacaggcagttaaaaactttgaagcagcacatactgcttttgctgttcactcattgatcagaacacatcagtggaaatggcagggaggcgtaatgtgctcctcccatgtgccaggtggcagaaaactccttgtagggcaaacaccacacggttgcacaatacccagcacttgcactggtggaaagttgttccaggctgatgtgcgccttatgacaacagtagagagcagctccacgatgagagaagctttttagtgttgaggactacattggagacgatgctgtcacctaatatatctcatacatggtattgaatgaagaaaaggagaagtagaaatacactgaaatttaattgggctcctttatggattaaatttaggaagaaatcttgagaatttccccctaaacaaaaatatatttactccattccctaatataagtagctacgattaacattcatatgacacatgtgagtagtttaaaaacccaactgcctgtcaattcccttaaagcttgtcaatagtcatgtggtagatagcatttatagggtgacagtgtatgtttctagcctaccagccaagcaagtcataaataagttttggccgtctctcaaacagccctgtttcatccccttgtagactgttaactacatttaaaaagtaaagtctaaagctttaaataggtcacattctggctctgacatttcagacagaccacatcattgaatggtgccagaccctgtgctggctttccttaatatttctttaagatgaaatctgtcctattcccacccctacccagcttcctctgcgactgacatctttacctggaggaaaacatttcattttcccaagtccaaattatatgcttcatttttcacagagtcatccttgtctcctctctgctgtcctgaagcagtgccttttctgcatcctggtaggctcaaccacttcttatctctgaccacatctacctcaacagctccagagcagcctccatcctctcgcgctctgatgtcctcctgcctgctcttctgcctccaccctgcctgctccacagcctattcttaacttgcaacaagagtccctcttcaaaatagccatcagatcaggtctttcccctgcttcatatcatctagtggctccccctttcattcagaggaaaagccacatttcttacaatgggcggattatttttctgttgatgccataagaaattaccacaaactcagtgacttcgtatgaatttattgtcttacatttctggagtctcgccggggtaatgcactcctcccatgtgctgggtgggagaaaactccttgtagggcaaacaccacaaggctgcacaacacccagcacttgcactggtcgaaggttgttccaggctgatgtggagcttaacaaggacttaacaagactgagttccttgctagaagctctggcagagaatctggctttttccagtgtgtagagaccacctgcattccttggctcctggtccccttccatcttcaaagccggcaatggccgtccggtctttattgtgctgtgccatttcgacattgactgcctttcctccctcttcacttttataggggaccttgtgattacattggactgagccatttagataatccaggacagtcttcctctgctaaggtcagctgctaagcaaccttatttcttctacttgcgatcttaatttctccataataggttcacaggttccagcaattaggagatggacttttttggggggcattgggggtggttattctgcctagcagggtacaaggccttcatgatctagcctgttacttctctgacctcatgccctactactttttcttacaaagtagggcttccccctgatggtgtcaccacctcagagacccatggagctaattatctcgtgacctttaagcctttgctcaaaagtcgccttctcagtaagctctgttctgaccactttactgaattgtagcccacagtctgctttgtgtttttccatagcacgtatccacatctaacataggaaacagtttatttttatgtttgttgtctgtaacataagctcttgcagagctcagatttctgtctgtttttcctctgttgtatcaccagcaccttgaatagtgtctggcacatagtaggcaaacaataaatatttgtggaataatggacagattcttgagagaatggcaaactgttttttaataaacataatttttttgtgtgcatcagatcttccgcatgcctccaagaggggcatgatatggtttgttttggggtcttccaaggtatttagtttgggaattggtttgttgtagacactcagaatacaccaaaaagaattacaaagtggggtctggggcagggaggcatgaagactttttcattttatcagtttagactggattccagaaacaaagttaaggagagtttgaggcagtttcataatcagtgtaattcaggatccaggctaggttgacaaggcaatggaagagtgcctgtattcttattcagagttggggtatcactatactgcttcttgaaattaccccctccaggtctttagccctgaaggctctttgttcttgtctcatagaggaaactagggaagagaatatctaatcactcagtgcattgtcagtgcagatgatgagaaatatcctgtatattctagcctgtgctcctgcttccgcaagaatttttctccctctgagtaaatgatttgaagagtgaggatttagaagaccaggtattattttttttagaaaaataaggttttgttataaaaataaatgaaatctatattttatcatttcaattcaggccctaagcatacacagtagttacctttcataaaacgttcttgcaataatgctattgcactgggctttgtaatgaagctttgatttgcatcgctattctgagaactttctgacaatggtaaggtaatattaggaaggcagaggaaatgaaatgaaatgagggtaatgtatgtccattgtgaaaaatgttaagttgccaaggcaatgtcatatcaataatattttcataaattaaattaagatacatggggcaaataaatattgcatttctctttattatcacttcaaatatgtgagggcaactattaggattaaaaccagaaattagacataaagcatctcagctgaaatgagagatgtgctattcgttggttcaacctgatgtgctctcaagattcttgtcacgtttgtttcagtctttcaatctctccccctcagtatactctagcagtccctctgctgtcctcctctctcatactctgtttcttgagacagaatttctgttgagaattagtaggagagtcagtataattccattaagcatcactttcatactccacaaccaaccttctagttttaaattctgttcttttaaatcaagctggttttcctatctttttctctcctgcttcctccctgtctcatcccctcccttcctaattcaccacctcactcccttgccctgtcttcctcccctttgctccctcttctcctctctagtatacacacacacacatatacacacagagagaaagtatacacacatgtacacaaaaagtatatacacacatatatacagcaagagaaaataatataagtgtgaagtatggatttaatccaaagtttgttacactgggaaagtgaggatgaagaaagctgaaggtggttggtatgaaagaatttgagtcctcattttccattattaggaagacaaaatatgatgtcccaaattgagaaataagtattaaaagggcacaagttttctatttaaaaatagagaggtcagcaccagaagaaacaaccaaaagaattgtgaataattgtctagagactagaaattagaactgtggctactcttttctcatcaagcctttcagatagtactgaacttcttaaggtttgtatacttttattgataaaatttaaaaaatttgacaaaaaggaatggattaagagatgcaaggcaaacagaaagagtattgatatttatatggtgaaggtaatgtaggtttaaaaatacaaagtataaaaaagcagaatgttagctaataaaaggtaaaattaataacccccaccaaaaataaaaaacaacaacttaatgattttgatcttgtgtgtgtcaaaaaacatatcatgttttaaaattattgtcttttattacagtaattttgggggtacaggtggtttttgattacatagataagtcctttaatggtgatttttgaaattttagcacaaccatcacttgagcagtgtacactgcactcaatgtgtagtctgttgtctctcaccctcctcctaacttccccgcactgagtccccgaagttcattatattagtcttaggcctttgcatcgtcatagcttagctcccatttagaagtgagaacatatgatatttggttttccattcctgagttacttcacttagaataatgccctccagctccatccaagttgctgcaaatgacattatttcattccttttttatggctgagtagtattccacggtgtatatataccacattgtttttatccactcattggtcaatggacactttaggttggttccgtatctttgcagttgcaaattgtgctgctgtaaacgtgtgtatatgtgcctttttcatgtaatgatttattttcctttgggtagatactaagtagtgagattgctggattaaatggtagatctacttttgtatccttaagaaatctccatgctattttccatagttgtactaatttacatttccaccagcaatgtaaaagcatccccttttcactatatccacaccaacatctattgttttttgactttttaataatggccattcttgcagaagtaaggtggaatctcatagtggttttaatttttgcatttctctgatgattagtgatgttgggcattttttcatatgtttattggctgtttgtatatctttttttgagaaatgtctattcatgtcctttgcccactttttgatgggattatttgttttcttcttgctgatttgtctgagttccttgtagattctgccttctactcctttgtcagatgcatagtttgcgaatattttctccaactccatgggttgtctgtttactctgctgattgtttattttgctgtgcagaagctttttagttttattaggtcccacttatttatttatttatttgttacattcgcttttgggatcttagttttgaattctttgtctaaaccaatgtccagaagcattttccgacgttatcttctagaatttttatggttttatgtcttagatttaagtatttgattcacctaatattgttaggctttgtgttctaacccgaatctcatcttgaattctaatccccataatccccacgtgttgagggtgggacctggtgattggatcatggaggcagtttccctcatgctgttctcatgatagtgagtgagttcttgtgaaatctgatggttttataagcatctggtatttcccctgcttgctcttctccttcctgccaccttgtgaagaaagtgcctgcttccccttcaccttccaccgtgattgtaagttttctggggcctcaccagccatgctgaactgtgattcaattaaacctctttcctttatgtattacccagtctcaagcagttctttataggagtgtgaaaatggactaatacgccatcttgagtttatttttggataggatgagagatggcgatccagattcattcttctacatgtggcttgccagttttcccagtaccatttattgaatagggtgtcttttccccaatttatgtttttgtatgctttactggctgtgagtttttggctttatttctggattctctattctgttccactggtctatgtgcctgtttttataccactaccgtgctgttttggtgagtatagccttgtagtgtaattggaagtcagataatgacttcagatttggatgcctccagatttgttcttttgacttagtattgcttcagctatgtgagctcttttttggttctatgtaacttttagggttgtttttctagttctgtgaagaatgatgctggcattttgatgggaattgcattgaatctgtagattgctttgggcagtatgatctcatttttaccatattgattctctcatccatgaacatgggatgttattccatttgtttcaacgaaatctatgattttttttagaagtgtttaattgttttccttgtagatatcttttacctccttggttaaatacactcctgggtattttatatttttggagctgttgcaaaaaagattgagttcctggtttgattctcagcttggttgttgttggtgtatagcagtatagcactttattttttttgatacatgagaagagcttcaataacaaaaacaaaaactaaaagaagagtggaagaaagagtggtgcctctttaaaccattgctgatcctagattttttttaagggatgagatttggttccacatttggtgcatatcatagtgtgtcaggaaaaaattttcttatccaacttggggcatgtttttctggaagttgagctttaaataatgcatagtcgtgataaaggattgccacactgttttacaggcacaaataatcttttttttttttttaattgaaaggagtagacttttcacttaaaaaccaactcttctaataggaaagttttaggcttcctttaacataactattttattgaagtgatgaatttcccttctgtactttcaaaacaaatttgtttgttttcctttaaatggaaaaaaatgtgcctttcactgccctcaacaacgttgacctttgacattaatataatacttaagaaatgtattttagcccagttcttcctttctgccttccacttgattgctctactattagatttataatgctgaacaataaatgcaattcagctttatgtatctctagactaaataaactgagagataaaaccgagatagaaaacctaagaatctttaagtatagaacagggcaaaaagtctttctctagtaaatcaattaaagacttgacaggatagatgttaggagaagttagaatatttgtttatgataatattctacatacattatttcatgtgatggatataacagtcctcattttagagatgacaatctgtgtgtcaaagaggctaagtgatttccaagatattgcagcttcagagtagcctacacagataagttacagtcaaaaatcaagtacatgagaagagtctcagaaatgaaaattaccatccaggctacactgtgactaatcataataaaataggaattaagagggaaaaataaactttacaaatattaagtgaaataaaagatagtgcccggcatgtagtaagggtacaaatatttgctaaatgtatttatatgaagcaaattaaacaaatttatgcaataccttatttttgtattatatgattaattctgctttgtaactttttaaggaaattgagacatttgggatatttatagtaactaaaataacataaaattggtatcatctaaatatttaacattctgagctgactagagttcgaaatgttttgtgaaaaattccaagatattttctagaaaaaattaattgatattgagtcttagagtatattgagtagagaaaaacataccaagaaagtatgttaatcacatttctgtttaaaaatagaattttatagtgtacacaccagccgggcatggtggctcatgcctgtaatcccagcactttgggaggcagaggcgggtggatcacaaggtcaggagatcgagaccatcctggctaacacagtgaaaccctgtctctactaaaaatacaaaaaattagccgggcatggtggcgggcgcctgtagtcccagcttctcgggaggctgaggcaggagaatggcgtgaacccgggaggcggagctttcagtgagccgagattgcgccactgcactccagcctgggccacagagcgagactccgtctcaaaaaaaaaaaaaaaaatagtgtacacaccaacatattaataagttgtgcttatgtttttagttatgggtcataggttattgtaacatcttttttgttccttttggttaccagtactttgacttttcctatgacaagtacatattatctaaaaattacctgttaagttttttaaaaagtgatggaaagatgtggaatttgaatgttgatccttaagttcagattaaatatgtttcagtatttagccaggcattgtgctaaactctttacaatggtatctcacctgttcttcacttcaacccatgaggtagatattatttgttttcattttatagagaaacagaaaactaaggtgctctctctcatatttgaaagcttgactttagtgaaccaatatagtaatatttttccaagcaggcaattttaaacaacaatactgttaacaagctgaaaagaaatactgagagagagaaggagtggagagagtcgggggagatcagttccttcattatactttttttttgaagttaagtaattgatacatattaatacaaatgtttaatttaaaatttcccacagaaataccaacatgtccacaatatagtcaagcatgtcagttcaccagctgctgcttttccctgtagtcatccctccttgcagcctctgtgcatgaactcctctttcaatctgtgttatttgccctcaagatctatgcacagctgcaatactgaaaattccttttacctttctcttgggctgcgttctctttattgagatttcatagtttctcatttctggtttagtccctcattttcatgaagctgacttctcagtagctttctaagaaagattacatgagagcaaacactttctgagaccttttatttctaagaaatttttcactctaccatcacacttgatttatagtttggctgcatatataattctaggctagaaatctatttgcttctgaatcttgaatcgattgcattgctattttctagcccccagtattgcttttgagaagtatgcttctattctctttttacattccagacatggatttttttttctctgtggaaacttttagcatcctctatttatccctaaagttctgaaaattcagagtggtgtgctttatcaagtctatatattttcagtgtggttatatatgatattttacctttgtcttcaatatttaatatcagcacttaaatcctcttcacattgtctgttacttccagattttttctactgattattttggccttttattttaaagggtttcctcatttatctgttatcctcagctgtatgtttatatttaagaaggatccccttaaaaagctgattgcggctctctggtgtatggggtttagtggtggaaggtatcccctaagctggtagcaccattaggctaattggatagagatcctgcctattcactcttggctggtagatgttgttatccactggccgtgtattgattatctgcagattatatataacttagcagcttaaaatgacaaacatttattacctcatacagatgattactgtcaggaatgcaggcatggcttagcttggtgattctggctcggggtttcccaagagtctgtagccaagctgtcatctcaaggatgggtcagagggctcactcctcagctcacatgtgtgggtgctggcagtcctaatttcctcaggttgtcagtatgtccctagggctgcttgggacatggcagctgcatcccctcagaacaagtgactcgagagagaaattaagaggggcatgctctaaagacagaagtgcagttttataacctaatctcagaatggacataccagtacttctttctgtcatattttattcatcgcacagaccaaccttggtgcactgtaggaaggaactacatagtgtaaatccaggcagtggggcttgctaggtggccgtcttggagacaggctgccatggacttcttttctcaattattttccgcagagaaagactcctctccatgtgccttacctgaagatttaagcctgggtgacagtgtttagggaacctagcttggaaataaagaaggggtctcaccattcagtatttgactcttccttagttttctgggttttttttttttacaaccatgcatcacactcagcctctgcagttatgcctggcatcatttagatcagaattggtcagcctacccagaaaatgcaactctgatttgtacaaggaggagagaagagaatgggcagtctctggagcacagactgaggaatggaaatgggccaaggcctcgttgggcattttacaggctttctacccatcctcttgccatcagccccaccctgaccttttaaagcagctgctttccccaattcctgagctttcctgggtccctgcaacttggttggcctccctacctctgtaggatgtcaggtctcagctgtctctcttctggagagagaattaccactgatcctggtccttatgttttcacttcccatcttccaacattttgttaacatcactcatctccactcattttctcctggttttcttcgtatttgtgagttttacctattttactatttcactgtctttgtggtagttttaggatggttgaatttctgtatttagcctgccattaagtatatatttccatttttctgcttgtataatttccaatacatatcctgatagatagtatttcctacaaaatttacttttagaggaaaaattcaaaatgttagcagactaatcagcttatcctgcccaaagcttttgagatgagaatagaatggattttgctttccatgactcttttgatttctggctgctttagaatgtagatttataagaaaagaagagtaggtgaaaatggtcagtagtatactgtctagggaatgagcttagaattctgaggattttagatttctcttggactgttgcttaaaagtaccactcacagcaaacacttgatagcttaacgcatacaaccgcattaaagagatagtgttttaactgcacatataacttaactatttctgtatttatcttcagttttcagtgtttaaacctgcctgtttcttacattgttggaatcatggaaagaaagctataaacaagttggaagtatttattacaatacctcaaggtgaaaccactaaagtccttctgtgggtaatttattatactgcgagatctcagacacatgagaaactgtcctgaactcccaaatgaaagcacttccaaaatacagcatttctaaaacgagtaacctttaacttatctagcataagcagaagaataagatatgtttaaagttttcatgtttttgctgatagacttaaaatctacgtagcgtttcctagattctgactttgacttgctcacacgctgtccctacccatgcaagctagaatctttcctctcccttcttgatttcaacatgagtttagaaccaaaggaacttttacttggtccggtgacagtttcccgtctgagacttccccacgcaggcacagagccatggcccctgggctgtttttatttgctctaattcaaatgccaattctaatttgctttctacggtgctcttttgttcgtctgtcttcttctagtatttataattgataactgtagtttaattattcaaaatcattatttttagatgtttaaaattgttttttttccccttcagacttgtatataaatgtcattatctcctgagaagtggtataattttcagaagcagagaatacattatcttctcttgtatccagtggtgtagtgtctgtcggggttcccaacctctacactattgatgctttaggctggctgcacctttgttgtggaggggctttcctgtacgttgggcgttgtagggtgctcagcagtgtccttggcctctgtcattggatactaataacatgcccacttcacaaatttaatctttctgtaagactcagaaatacataggaacagaaacaaaagcaaaaaatcagtatcgactgcttcttgagggctcactgcctgctgtgaagcagcatctgcaggtctgtggtcagcgctggaggttgaaaaccattttaaatgagcaactgtggcgggttcacagggtcaaagggcagagttcctgttgggatgtgggaaaagatgtgatctctactatctcagtggcaattccacagccaatggaagtaagcaatggaacaatttagaccatttgagaaccaaggtgtcaccctactgtgaaatctgcagacagagaaggcatttcatctgtatttttaccttcaatccttgtctgtgtctataagttcacattgccgacagcccacctgccagctctgctaccagaattgccttgctaaccagctttactcctggaatttaggaaagtctgagaaaagtcttcatctattcatattggcatgctggtacttaaattcaatgaaagtaagagtagaaccatgtattcaataaaaataagaatagctttatttgcatgctgtcactagtatcaacctaacttcttatgtccttttcaagtaagtcagtgaaaaccagaaatttcctgacagctggccttggaccgtggctgctttaacctctctgcaggggcaagtacatttctgtcattctgcatttgtgatcctgaggtctgactgtcacatgtacagttattggcatccacagggtagaacttctttcttatctatagttcccaggtacagagcaggaaaggagaactgcagccaaggggtgatatctaattcacaactgggatgccccagtgtgtgtgccgaggagaaggtacctgagtaatgttattcattaacatttatttctgggctttggccaattggtcttcctgtagggttatttggcatgttctaataaaatgtgcctatgattgagattatcttggattaagaaaataacttattcaacaagtatttattgagcatctcttctgtgttgagcactgtgctagagagtatagcacagaacaggccagatacagctctggtgcagcttgtagtctagtctaggagaggtagaattgaacacacatgtaactgcaaactttgagaagtgccacaaaggcaagagtattcaggaaacccagtttaattagagtcagagaaggtttctgtaaagaagtgaaatttaagctgaggacatttaaggcagaaggaatgtaactgtcataggcctgtactgtaggctgcaaagatcaacttctccatgtctcatgaatagttaattatgtatatttcttattttagcacctcacattatgcagttgactgtcgaacaatgtgagagttagggttacagggcccacatacagttgaaaatctgagtataacttgcaactccccaaaaaacttaactactaatacctattgttgaccagaagccttaccaataacataaacagttgattaacacctattttgtatgttatatgtattatgtatacaatatgtatttttatgtattcttacaataaagtaagctagaggaaagaaaaaattatcaaggaaatcataaggaagacaaaatatatttactattcattaaatggaagtagatcaatataaaggtcttcatcctcatcatctgcctgttgagtagatggaggaagagaaggggttggtcttgctctctcaggggtggcagaggtgaaagaaaatccatgtataagtgaacctgcgcagctcgaacctgtgttgttcaagggtcaaccatactgacatgtttacatgtatttctccttggcaagatgcagaccgagttcctagaagatagggatgatgtgttattcatataggtataacccagtcttgagcttcacaacaaacaggtattggatgatagttggggaattgagtgagtgaactaatgaaatgaatgaatcaatgaatgagtaaattggaggatgtaataaaggtggttgacatctgctttgtcctccgtatccatactttcttactctagatactgagaatctcttctgtcagtcatcttgtgcagtggggtttctttcttacttagttttgaacaattggccctatttgactttgcatgcccaggcctcagcaccttgcctggcacacagctgttcaatgagttatgagtgaatgaatgaaagaatgggtttattttcctgatcgtgagccttattatgtaagcttgcttgctgatgtctgaaacctgcagccttgcctgcctacctagaccgtttctgcactccacctgaggccaccactcccaacagttacactgaagttgatttgcctggaaatgcaaaatgggaaaaattggttttgtctctccaaaataaatctcaaaactgtctctttgtctgcctaggccaaaccactatcatctctgtctagcactatgacaataatctcttctttcgtctctctgcaatctgttttccacaaagcagcttaaatttatattttaaaatataaaaggcaaatataaaatataaatgtaggatttaaagtattctctaagtcagattgtgggacttacctgctgggaactgtaatggcctcctctagcacatagaatgaaatgtaaacccttctgcacctgcaaaacctatcttttttgaccccgcctacctctgttggctcattttgtgctctttttccctttgttcttcgtgctccagccaccctggccttcttcacgtaccttcacgtgtctttcacttacccaactctcattcccttcatgaggaacctgcccagaggagacactcaggaactctttggacacattcatggctttttagtccactgatttttagatatgactttacccataggatcatttctttccaaggaaacgttaagcagaacctcaacacataaagcaaatgaaagtaggggtactctgattcccatggaaacgaggatcccaggaacctccggtcctaaggcttcttctgaaaatataggtttccagagatgatggtttgcaaggcattgctcaggtccagtagtgcctgtctgacttctgtgtttactttgactggcctctttgaacttggaccactgttcttttaggcatttagaaattccttcctactcaactgaactcctgattctcaattcttagcctactgtcttgaatggccacacattctgctcttaaaatgttaaaacagtctagatgggaagatggatggataaaaaagttaaataaaacttgtatatggttaacttccagatagttcctctaagcaccaaaagagtccagagaagcaagagtttaagggtgggggctacagagatactggaataatccatggaagtgtctagatttgagaaaggtctttgaaaatagtaggaaatagtgagaaatgatgcagatagtctactatgcattatggtttgacgaaaaacataaagggaatgagacagtttgggtaatagaggggcagccatatcaacaaagcatgtgaaggagtgtctggcctgtagatatgtaatgtaaggtcacaaatgcttaggggagttggaccagtgccataacacagaacattataccctaactaacaaatgtgaacatagtagttactgttgccataaatatcatgtcctcagaaaaatatataattcagtgagcaaaaatttattttaattacattccagctcttgcttctgaagatccacctggttattttgctgagcctcagttgcccccccattccttttctggtcgaggacatgatggcagatggcaaaactcatctattatagttatttctttactgtttacagagtaaccattccctgacctcaaattctgaggtcatcgtatcaaagcctcctatgcactcattgttttctacttctgagaacatctgcccagcctggatggctctcttttgtataacatcccagcattgtctggctttgctcactggtcacagccagggttctcatgctcatctagtccttccctcaccttcacccatgtcaatgacttgcttaattacttaatttctgcttaattttttgatagcctgaatgaaatggtcctatcctcttcctgaatcatcctatgtaggtgctctccaaatcctggccttgtcactgggtgactggcagaaagataggaccattgacagaacagtgaggtcaagggggagctgacaagagggaaaagataagttaatttacaacacaattagtataagcagaggtgatgtttaggtggttacagataaggaactagaactctagtttgaaaatctgtgtttttaaataacactggaagataaagttcattcctcaggtattcattccttaaatgtaaacatatgctgttgccaggcactgtgctaaacactgtgagtataaaagtgagttctcactttaatgcctttaaggcattcactctctggtgtgagacacaggtgtgatatagctgtataatatgtctacatatttacctttagcgtaatctttccatgtaatactcagatcattaaatctggaaagaaggaaggaagtctaaaagtgagtactcactttaatgcctttaaggcattcacaccctggtgtaataaacagatatgatatatctgtataattttattgtatctacttatttacctttagcataattgttttcatgtaatatccagaacatgaaatgtgatcatgaaatctgggaagaaggaaagaagttaggagaccaacattctaccacttagtagccctatgactatagcaacccttctgaacctcagttttctgatctgcaaataagagcattggacttgatgaagtgttttcagttgatctcttgtgaaatcagatgcttttccaaggattccagaaacatttgatttcaaatgcttttttaaagtgtgatgaaaataactcatgcacttaaatgcattatgtaccaaaatttgcctcatcaggagagcctcgtttttcttgacccaaggttacaattacaccttataagtttggacaaaaggttacaaatttgatttagcagtataagcaaaaaaaaaaaaaaaaaaaaaaaaaaaaagcacgctgattaataaaatatgctttttgtttctttcacctatagttgtttcatgaaatatttgcttggcccagtgagttttgctgttaaagacattgccatcaccagccctcatctgcaacatctactctagctctaagcagctaagattttttaactcatgtaataaagttgatttatacttaaatttatcagattgggtggttctttttgacttaacagcttattgatgtataattcataacatattgttcacctacttaaggtatacaattaattggtttttagcatatgtacatagttttgcagccatcatcatcaattttagaacatttgaacgatgccagaaagaaaccctgtacttcttagcaatactccccaatttccctactttccagcccaaccttaggccaccactaatctactttctgtcttgatagatttgcctaatatgaacatttcatgtaaatgaaatcatgtaatactgtatgtggtgtgttgtgactgccttttcccgcctagcatgttttcaaggttcatccatgctgtagcaagtatcagtactttattttctttttactgccaaataatatttcattttatggatataccaaattttatttgttcatttataagttgatggacacttgttgtgagcactctttagctattatgaatagtgatgctgtgaacattttgtaccagtttttgcatgtacacatgttttgatttcttctaaatatatacctaggagtggaatggctggggccacatgatacctctgtggttaattatttgaggaaccaccaggctgttacccaaacctgtggcaccactttacattcccaccagcagtgtatggtcccagtttctccacatcctcaccaacacttgttatgatgtcttttttcttatagccatcctagtgggtgtaaagtggtattcactgtagttttgattttcatttctctgaaggtagaatggatggtttttgaaagaaaagtttcagcacaacaaaggcggaaactttgtttcaaagttacagaaaggagaaaaagatattagggatggaaacatataagtcaaagttggttagagaactgtctgagagaatagggcatggcagaggaaatctccagagagctcatttgtccagattatagccatgacacaagcttaatggcaataaagttatagtccccagaagaaaggcaggggtgtgtttgtgtgtagctacctctcacacacccagtttttccagcacaaagctgttgccgctttctaatctgagtggattggggatattcactcttactccccacctatatcccaaccctacagtccacggtcttttctgtcaccatgtcactgattttatagttcccttcacttaggatgacttctttattcatccaaatctcatccttaagacttggggacatcaggcctacctgcttggagcaacctctctgacctcttggacgatgttaacatcctttttatcccttgtgtggcatttaaagaggtttgcatcacacagcttggtacttagtgatacaattatcttgtatcattcacattattttatatgtggtttcaagtatcccagtgggttcattgaggggaaggaataggtttatacaatttgatattgcacataaaactagaagcatactaggtgcttagtgcatctttgttgagttaaataagagggttattcttctgttccatctaaactctgcttggaatttcataaacacaggcaggttctcactggctttgggaaaaaatacccctcttataaattcattaatacaaagcaaggggaagagttgatattttaagtttacattcaggtaagattacattgaaaattataacattttgttcaatctgtgcttgttacctacaggaccttgttatatgtaggaaaattatctttgaaacctctgtgtgttgtcgaagtcagatggctaatattgacccaagctggcatctccctcacttcacattggggatcctgttgagttgtcctcaaggctagccttttggaccactatactgcacttctgtccttaagctctcaatgtgaaatcagagacaggcaaagtcaagcaaacaaggcaaaggttaatacgagcaggctaatagtcaacagatgggagtcttcagcctgagtgagatcccgctagaggccttcccttcagagacccaagaacagttgaactggaaatttgaccaggaagggactccctaagagaccttgcctctgagcatgtcagctgaaaagatggcagagttcagagaaaggtgatgggagatggtgggcagagaaagcaccagttcctatgtactacctccaaaccagaaatttctaatacagcaaataaagcaaattggaatgatttcatgaacctgtgtagaggtctgcaactggaaaggatgtcctgaaaagcactattttatatagtttggtagaaatacatccacactgtatgagtctcaattttaaaactcccttgaggattaggaaacagattataagtagctagaatgtaaaataataataatttagacattgttttggaatgataaagtttattgtacatggtaaggaaattatgtattgtagattttcctgattctgggcatgcattgggaccacaggttatggtggctcacattttaggattgacttcccaacggctgctcacacagcctctggaagtggtaactttggaaggactggttgcaaagtggaaccagagtatattgcagtttcacaagcaggaggtaatagcatttattgagcaactatatgctctcttctctctctcttctcttctctctctctctctctctctctctccctctctctttctctctctctctctctctctctatatatatatatagttaatcttttcaatgaccctgtgtctttctttggatagaaatttaaaataaacttccattttaaatatgaggaaaccaagacttaaggaggttaaggaattgggtctagtaatatatcaagtcaatggcagaaacacagggaactcaggtcccttggattctgtagcactggttttattcctacactttaccccctccattgtaagggtactaaaatcttcatatgtggtcaaacaccttttacttttattaggagaaaatggaaaagaaaatccaaatactccaaaaaatccaatgcaaaaactccaaaatatcaaaagctacctttttcaaacaaattcagttttttattactcttactttcataatttgctctttttagtaattatttgcttacttcattgcttagatttaacaatacaaatagatgataaaaatctaatgattcagttagttatattttaaatgttatattattgtgtcacaaaaagtagacatgtaatgcatgtcttatctaacattacctaaaacatactggcttccctatgtaattctattatgaatactatgccagtatcttctctaatcattccaatttaaacatagtatctatgactggattgtaacagaaattggaatttgccggccaacactgaattggaaatgcttccattcaaattttcttacaaatgatctttagaaatgtattttaaatttcattctagcgaaaccaacttagagtgaatcttaatgggctagaacaaaatagattttggattgatttttctcataaaatatgcaaagccctgtttttaaatagagtttttccccttcaatattgttctttttctctgtttagcaaataatttgtctaaaacgtttctttttcagattttagttagattacaatagaattaacatcttagaattgccaaggtagatggaagatgaagagaaaatccggattccagaccatgctaacttcaagccagtgttttgcctgcagctgatctcaagaattaggtgaaagtttcactatgtaacctgttttggggctcaactcttcataatacgatcattcattaagtaatataaccatggataattgtaaaaaactgggacactgggttttccccccttactccacaggtcgactaggctgacagtatacaccagaaaacaggcatgcaaggcatccttctacatctttctcttttgcttgcctcttgttagttacaaagatacatactgtgccaggcactaagctggtttcaacagctatttatttagattgtgtgaactggagctgaacttgaacccaattaatagcaactgaacttgaacaaactgatatgaaatcattacaggctcagttccctggtccattatccctgaagagatcatccgacagcactccaggtgccttttctatgccaaatcttggtgcagtgcccaatcagagagtgtcggggggattagaagttcggttgcatcggagttagctcattaccacatttgtgatcgctttcacagagaggagaggtggtgatcccactgggcaggattgcagagaaggctttgttttcaacaccatctggcacatggttggcactcattaacacagcacaatgtcgattaaaataataattgtacgtggcagcaatgctgcttagacaggtccccacctttggccttccagcaaaggaaattgaagaaagagaaggctgaggagttgcctctggtaactctggtctctgggtttgcatctttcttcatgcccacaccttttttttttttttttttttggtaaagaagctacttttttaaatgtatgtatttatttttatttttagcagcagtacccccccaccccccgccaaatccccctgtttttttaaactgggaataccatgagtctgaccttgttcgcagttcccaaggaccctaattacagagctccggctgtagctggactcccaattcaatactgcagccaggaaatatttgctgaaaggggattctatgcagtcatatttcttctgcaacttgaattatatataattaagagttttaggcttttctcttttaaaggatgcatggatgaactcaatcattcaggtgctgagttaagactacactgcctttccttaaaaaaacagatgtgtatttacttcggcagctccagatcttgactctggtagcatctacttgatttgctgtttgggggataggagtgcagatttttgaaagaaattgtttgagtttgaatcctgtttctaccatatactaggtgtgtggtgaggagaaaatcccttaactcttggtctcccttttcttcactgctgctatggtggtaatagtcatccctaagctttaggatttctgtgaatataaacaaacatgtaatacactaagaataatgcccagtgcagggtgagctcttgatatgcattagctatgatcatgtatgcctcaccatcattttctttctttcttttttttttttttttttttttgagatggagcctcacttctgtcgcccaggctggagtgcagtggcgcgttcttggctctctgcaacctctgcctcctgggtacaagtgattctcctgcctcagcctcccaagtagttgggattacaggtgcacccccaccacacccggctaatttttgtatttttagtagagatggggttttgccatgttgggcaagctggtctcgaactccacacctcaggtgatccacatgccccagcctcccaaagtgctgggattacaggcctcactgttattttctgcaagagtttattcttcctccagattgtgcctcatacctatttaaattttttattcccaaatgataggatttactagttgtagtgatgtaggtagtggttatgtggacatttgtccagatatgttgatcaactttttttggtaggacactattatttaattccttgtcatgctagaccaaggttagaagaagccaattgatgtgggtaatttcctcatagatctataataccttcataccataataattaatgaagcacatcatttgtttccagagcagattatgcatatcttaaacaaaagaaataagttgtatatttcaagcctataggtaagcactataactaatgatcatgtggttttctctggttgtggaaccataaacagcatgccctctggcactgtaatgatttgtattctataatactcagtgtaaccatggtttttattctgtttgccgtttggtatgtggaaaagccttcaagaaactggctttttgcaggagtgtttacatatcattcatgccaccaagagaagatgaccgacattttagatgcagaagaaagattaaatgcattcagtttaactagcggcactaaaaagggctgcatctttgtattgttgctgtttatcttctttccagcagtggaatattgagcttccccaggctgtgattcaggtattaatgccgattttaggtcgggcaagagtgtgttcagtctgcggcacttagatagcaaaggcaaactgctcacggctattagtcaggagtttctgtatgccagtgattgcatgcttgtgactcataatcagggtgattcacagcaaccgttagatgggcttgctgtggctgtgtttttcgtttggactgctgtcattgccaaaagtgtcagcctttctcctacagatctgaccgtgtgacacatgcacagtgccctttggttgtgctgaatggctcaccactaacatcatggctaagttttattatcttggaggaattgtctctcacagtgagtcccaattagacaaatgaattttgtgttgttttctttctgaagtgttactctgggattgttgacagaatttgtgccacagtgttctcttgggcagtctgaattccagattctctatcttggtttaactatgctctcacttgagaatcagcaaggagatgtcatgttatctgtttttctgtatacgtggagctgtatcggtggtctgggttcctgctgagcagatacataaataaccacacgtctctctgggtttaataccagcccggttctgacatccaaggctgactcctattccatgttttgccccaaccaccgaacacgatgctctgacccctcaacacacagatgccttgtacctgacctaataagttgagtcagcaacctgtatttctgatttgtccattaattctgtgtgtcctggttgagacccacttgcatttctgcatgcttgcttaacctacgcctgtcacaactacctctgttcctttttgaacttaacaaacatttatacagcccgcggtacgctagggtctgagcatacaactgggaaaagatagataggatctctgttctcatgaaacttcccttctggctcttagaagttatacatgtaaacaaatgcacaagagtctctctgatggtaacaatgcaatgaagaaaatgaaacaggataaaggaatagagagcaagtaactatgacagggctattctgagagtagagggaaaggtgggagaacattctacgcagagggaccagctagtacaaaggcactagggcagtctgggtgaatttggaaagatagagagccaaggaggccagggtggctgcagtgtagtgggtgggcagagaagagccagatgagacagagtcaagcctgatatagacagtcttttttctattttattttaaaatatttaatttacaaataaaaattgtataaattatacatgtacagggtgatgatttgatctgtgcatgcattgtgtacttattaccacaatcaaatcaacacattcatcatcatccttagttaccatttgtgcatgtgtctatatggtgagggcacttaaaaatcttctctcatcaaatttcaggtaaacaacacagtattattaactatatttaatgctgtacatgagatccccagaatttatccatcttgtaactgaaggtttataccctttgaccaacttctcaacacttcctccaacccttcatccatgacacccatgattctactgtctgcttctatgatttaaactgttttagattctgcatatgattgagatgagatactctttgtcttttggtgtctggcttatttcgcttagcataatgtcctccaagtttatccatgatgttgcaaattgcaaaatgttcttcttcttatggctgaacgatattctcttgtttagacacaccacattttctttattaattcatcagtggacaccgaggttgttattgtaggtgttatttacacctatcttagttattgaagtaacgctgtaatgaacatgagggtgtagatacctctttgagatattgatttaaattcctttggatatatgaccaaaggtgcaattcctttggatatatggctggaccatagggtacttattaatttacacatttttaattttttaaggaacctccatactgttctctataatgactgcaccaatttccattcccatcgtgcacaaggcttcccttttctccacagcctttccaatagccagctgctatctcatctttctgataatagccatcctaacaggtatgaggtgatatctcattgtggttttgatttgcatttctctgatgattagtgatgttgtgcacctttttatatatctgttggccatttgtatgtattctttgaaaaaaatgtctattcatgtcctttgcccattattaaatctggttatttgttttttgatattgagctgcttgaatttataatatttttggagactaatccctcatcaaatatacagtttgcaaataatttttcccaattcataggttgccttttcattttgtggatttttttttcctttgctgtgcagaagctttttagtttggtgtagtcctgcttgtttgcctttgcttttgttgcctgtgcttttagtgtcatatccaaatatcattgccaagatcaatgtaaaggagctttttcactgtgctttttcctaggaattttacattttcagatgttacatttaagtcgttagtcttttttgagttaatttttgtatatgaggtaagataagggcctaatttcattatattgcatgtgtatatttggttcacacagcatcatttattgaagagactatcctttccccattttgcattcttggcactcttgtcaaagattagttgaccatatatgcacaggtttatttttgtgctctctgttctgttccattggtcaatgtgtcttgtttttatgccaataccatactgttttattactgtggctatgtacttttgtaatacagtttaaaatcagggtatgatgcctccagctttgttctttttgctcaagattacttttggtatttgggggctttttgtggttccatatgaattttagggtttttttctgtttctgtgaaaaatagaattggaatttatataggaattaaactgaatctgtggatcactttgggtagtatggacattttaacaatattaattttttaatccatgaacgtgagatctctctccattaatttgagtcttcaatttctttcaacaacatcttatagtttttgatgtacagatcttttacctcctcacattaacagaatgaaagataaaaatcatatggttctctcaacatgtgcagaaaaattcaatattctttcataattaaaaactcttaatagattatttgaccaaattcaacattctttcatgataacaactcataacaaattaggtatagaatgaatttatcgcaacataacaaaggttctgacaagcccacacctaatataatactcaacatgaaaagctgaaagtttttaaggttaacaggagcagactcatagtcgacagatgggagtcttcagcctgagtgaggtcccactagcggccttcccttcagagacctctaagatcaggaaccagacaatgatgtccatctctcaccacttctattcaacatagtcccataagtcctagccagagcaattaggcaagaaaaacaaaagacatccgaattaggaagaaattaaattgtctctgtttgcagatgtcatgatcttttacatagaaaaccctaaggaaaacccaaagaaactgttaaaactaataaattcagtaatcaattcagtaaagttcgggatataaaaatcaacgtacaaaagtcagttgtgtttttatacactaacatttaactatctgaaaaggaagtttagaaaacaattccatttacaatagcatcaaaaagagttaaacatttgggaatagattgtaatctggtagatcttggttagagtttattggattttaatagaaatggcaagaaacaagaatatgaagcaggaaagtgctaaaatctgatttattttgtgtctctgtttcagcctactttatttaagtatgatctctagtgccaggttgctagccctatctcagtttctgactcatatttttgacatcagctttaaaaatgttcacaaatatatatgcacttggttttcattattttgctgtgtcaaatacagaacagatttgttttgggtattagagcctttctccactattcaccaccatcaccctctactcacatcactgtctttctacagaaggccgcctttgactccgagagacataacctcttctgcctctgtggtgtctttgtgcctagtacttaccacttcctttgctctacctcatcctataagtgtctttcccctatgggcttggagttctttggagggagtccattttctcattcatctaagttttccctagcttccagcttagtgctttgaacatagtaggggaaagatggatatatagatgaatggattacgaatacccactaaaatgttcagtctgctatgaagccctcttcaacagttagaattataattctccctcttgctcctacagcgctttccagtgactgcttggaatctttagtggcattgtgttatgcattagtatgtatctttagagccctttgggggtcaaggactatgtcatagtcatctttgtttccccaggatttaacacagtttctagcatttagcaatcttcagtaagtgcctggacaaaagatgttaaacaggacataaaactccaaaaacagaagggctgtggaagtgtattaccagacagaaccctgggctagatgtgttttcttaaggcacttgtaattcctcagaaacttcccaaaccaatagggagttgcaaacctgctatggagcatcctccaggaaagcagctttggagctatttttcccgccaaactcttttgaccataacacaaagccagaaattgattttgcattgcaagccagtatataactgttctgcaaaacaaaaatgcatctttactctgtaatacagtccaatatcttctatgccctctgtggtatagaatgctgatcatgaccctttaaactgattttaagactcgtgaataggttgcagcccacagattgagaaaaccctgtttttgaggacagagatagtcccctgaggtgagcttcagaggaagaagcatgagctttacctggaacccataatatctcactgtactctgactgtttgttgaatatttgtataaatttagcaatgaccaagcgacaaccaattaaaacaaggcatcctggccaaaaagaatcaagttgtgtagtggagacatctttgtcatttagaattgagttgtttgaatgctgaaaagttgttagagataggtccaccagtcacttagttcaccatatccaaatacagcattgtgaatatttgaggtaaatgtgttgcttctaaaatgaaactgtgggcccactgagatatagggaacttaacgtttcttctgccaatatgttgacataaatattgatgttgttaagcatgtatgaataggagaactatttcagtctttttatctctttaaaactaatttaaatctgagcattaaaagactgtttgataccatatgtttgttttagataggaaacaaaatctattctaaacataagggcttatgaaatctgtattctgaacataagagcttataaaattagtatataggactggaagctatggtaaattgtttcatggccacagattcctcccgtgttagtatgcatggccctttgtaatgtgaccttgctgttcctcctgtccagaggggggtctgtttacccaacccttgctaagatatgttgcttttatgctgtgctaagaatccaacatttgctcagtaatgtctttttattgtggaatgtaagtccagcatgaaattgttgatttttctctttgaagaccatttaaaagctacttttgaaagtgaccaaggtctgtggacatgagcatcacaagccttttgtgaaaatattagatagacttcaagaacacaaccaaagactgccacagactagaaagatacacatcacaaatccatttagctgtgtacgtgaaaggaacaaattaaaaggttcagcaatgtcactggcatatctgagaattcaacctatttcattttgagacccacataccttatctgtgaaggcaactctgtgtgtgcgttttccaatctagatggatagcatagaatgagatgacctagacaagcacagcacaaagacagttgtgatagcatccgaactttcatgtgtagcttataagggcaattcctccttttctatgtaggccttttttgaaaatagcactgtgcattggtttgcttaccctgagaagacctgaaagatgagattatgatctttcatctcaaattaaagaaggcttgtctcaggaaccatttgacaagttcaaacgctgctgacttagatactggcctcttatcagcaccttcaatttaatgtttggagtgagtggtaggcctatgttgttgaatttttatcatatttcccctcatcttggtagattatgctttaattcactattctgtgacttatcaatattgtctgttttatgctattgagctataataaataaatagcgtaatgcagtacttacaggtagtgaaattgaggcaaaatgggcttgtgacataggctagatcaaaaaggtattacctgcaagttaataagtagctcagattctgctataatttgctttattcataggtcttgtgggggaaaaaataaaataagctttctcgttctgataatcccttaaaagagtcatgaagttttgatctttggcttatttgatttatttttaattgatagaaaccaagccattcctgtgcctctcaaaaatctatctgtggaaaatattttaacttttaaccaaattatgtcttcccagtattagtgaccctctatgttaaaatgtttttcccttgaaagttagaactccaatgttgttagaagagtttgattctctttttgaagaatcatagaaacacagtacagttttgtacctgtggcctttggattttgattcacattgaatttgatgccaggagttacatggaaaagtcaataataatccgtggatcattgccttactctgacactgggtgaattagcctgctggggtaatgttctccagcttgtgtaatgggcctatctagtagcaagacagcagccatatgaaacacctgggtggtcttccagagtactttcacatggattagatttcagttatccaacgtgaggtcacaaaggcttagacagctgggctggtgccacatcatgaacagagtgcgacttcttcctaccggatgcataatgtaaaaggtgcctgaggttaaagctgatccttgggctccaggagcagatatgggtcaaatgaggtctcaaaccacagttggaaatgttgggaaagtctctatacaggaaagaatcagattttcctctggcactttcattaggcatgttctctgccagaaaagcctagtttctgagttttctggattgagctttatttgattaacactggtttaaagttttaggtgttattaagcagaaacagaagaaagggcctgagtggccctttcctgttacacagaaaacagcatttgaggcacataggctttggaataaaatcacctttttagtgttcttagagataacagtggctccaaagcccaccatttttttccagtcttgccaggaactttgaatgatccaataaaaggtaatgatcaaaggtttcaaatgcaactgataaatcatatagatttgtattcaggatgcctgaaattgacttgtggatgtttctcatctatcaagaaggacttggtgatttgaatttagtactttgatgttgcagtaattgtttgcaactgcagctcaatggcctgaaggcattgctcatttctccctttctcttcttgcaaagagctcttgaagtattcttttacaggctgttctcaactcactgggggctgtgacctaaaatttaggataagagaatagttccataaacacttggtacagaccaacaacaatgccctaatgagccatcccaaatgtgcaccattctgaatcaatcatcccaagtccacaccctcttcactggatatatattaagattcacttcatggtatttataagggaattactaaagaaatcatggggaaaagattcctctacttattattttagtcaaggtatttcatatatttataagttacaaatatctttcaaagtatattttaaccagttcctcaatacttgaaaaaaatgctatagattatctccttttggaagataatctatttcttcctgctatttcaattagattaaattaaaacactcccaaattaaggctttctggtaatgttttctaaccgtattctgtagtttcctcaatcagttgttccactagtcatttagtgcatgcctatattctggctgagcaaatgtatcaatattcatgcaagggtgtccatctctagcatcaaaagccacgtgcccatctgtctactatgaatatcttagtcatcattttacaccaatatattatcttatatatcttctgcatctcaaaattctttttaaaattcagctcatccacagaatcttttcaggtgaactcaactattatccctttagctattccatgggttgccataaatcttatgaatatagattaacctcataaatatctaggatctaagactgtaaagtatcacaaactgaaagatcaactgtcagggcagtagattcctctataagccacagtaattgacgagattgagtcagtatctctgtgcatctactgggattgtttagcatcgttgttggtgtcacttttatgctcatttaccattaagttgcaaggctgataacatgtgctgcattagtgtgaatcgtgtttattttaaaataaatgttgatgctgaagaaaaaagtgttagttgaggggaaacaaaccagacagtagcaacttatttacatactagacgagatacccttttcatgacctccaaagttctcaggtctgggacatttcatactctaaagattacttagcttaaacatctgtctttgcgcctgtagctttgtttggttcaatttggcatgcctctgttgagtgcctattctgctagggatcctaagtgattgactaaaggaagtggcttgccatcaaacagcttacaatgtggttccaccctattctcccagatatcactttctctctcacattcttgtttgacaacttgttttatcccgattttaaatgtccgtatttatttatttacttgttgatgattggtcttccaacaatccacagctcttcacaagcaaggcctttgtgttgtgtgctgatgtatccagaatgcctggaagaccagctggcacattttaggcattcggtaaatatttaatgactcaaggggagacaaaatacaactacatacacaagacaaatagggatataacacaccctaaaaagatacaaaaacagatccacattttgcaatgctctaactacaaaacttggggggattgctatttaagaaaagcagcaataattttttaaaaattatatagaaatgaattatttagcatgaaaaataatcgcaatttataaataaagttaacatactagagatgacaaaatgtgagaaataatattaatgatatattaacacatgaaaatatctcgatattatacttttttctctataatttttggccatgtgttctttttttgttgttgtttgtttattgagatgaaatcttgctctgtcacccagactggagtgcagtcgtgctatctcagcttactgcaacctccgccacctgagttcaagtgatcctcctgcctcatcctccagagtagctgggattacaggcatgcgtgcgccaccacgcccggctgatttttttgtacttttagtagagacagggtttcaccatgttgtccaggctggtctcgaactcctaacctcaggtgatccccccccctcagcctcccaaagtgctgggattacaggcatgagccatcacacctggccagccatgtgttctttaatcacctctccatatgtaatatcaatttctgagagattgaataaatggataatttgttatttgctctagcatgggtaatccaaattgtttttgtttaaataacatttgggacatataaagggcttcacacatacatacttgtaactatgaaactgctacaggtttgtgtcttactagcgtgggaattttaattctgtgctgcattttcaagtatattctatataagagagaagttcccatttgtcaaggtatcgatgagaactgaattatttgcttataattgtatagatctggtgagtgaacaaatcttccatagagtagctctggctttgtgcatttcaaattttgtttatcttccagtgcccacatacttacagtgctggtgcaaaaacagcacagccacatcattacttcacctggccctgtaccttagtatcatgaaactggttgaacttgcacagtgggtgttgggaatattcttatattacttaccaagatgactggcaatagattatatgcagaattgtttgtgagccacataaaaatagtccattatatatattctactatgtatataaataatccactatatctatctatcggagtcagagatatatctcatatatatatatatatatatatctatatatctatatatatatatatagtgggctatatatatatgagatatataaaatatataatatatataatgggctatatatatgagatatatctctgactccactatatatatatatatatatatgactatttttacatataggggactatttatatatatagtagaatatatataatggcctatttttatgtggctcagaaacaattctgcatatagttaatttattgccattcatcttggtgagtaatagaaacatttttccaacacccactgtgcatgttcaaccagtttcattatacagaggtacatatatattatatatatataaaaaatatgtagtatatagtggactatatatacaaaataagtatatagtggactatatatataaaatatgtatatagtgggctatatatataaatatatgtatatagtgggctatatatataaatatatgtatatagtgggctatatatataaaaatatatgtatatagtgggctatatatataaaaatatatgtatatagtgggctatatatataaaaaatatatagcagactatataaaaaatatacgtatatagcagactatatataaaaatatatgtatatagtggactatatatataaaaatatatgtatatagcggactatatatataaaaacatatagcagactatatataaaaaatatatatatagcagactatatatacaaaaaatatatatacacagcggactatatgtacaaaaaatatatatacacagcggactgtatgtacaaaaaatatatatacacagcggactgtatgtacaaaaagtatatatacacagcggactgtatgtacaaaaaatatatatacacagcggactgtatgtacaaaaaatatatatacacagcggactgtatgtacaaaaaatatatatacacagcggactgtatgtacaaaaaatatatatacacagcggactgtatgtacaaaaaatatatatacacaacggactgtatgtacaaaaaacatatatagtggactgtatatgtaaagaacatatgtagcggactgtatatataaagaacatatatagcggactgtatatataaaaaacatatagtggactgtatatataaagaacatatatagcggactgtatatataaaaaacatatatagcggactgtatatataaaaaatatatacatatatagcggactgtatacataaaacaaatatacatatgtagcggactgtatatataaaacaaatatacatatatagcggactgtatatataaaacaaatatacatatatagcggactgtatatataaaacaaatatacatatatagcggactgtatatataaaacaaatatatatatagcggactatatataaaaatatgtatatagtggactgtgtatataaaaatatatatatagtggactatttgtataaaatatatatatatagtggactatttgtataaaatatatatagtggactatttgtataaaatatatatagtggactatttgtataaaatatatatagtggactatttgtataaaatatatatatagtggactatatgtataaaatatatatagtggactatatgcataaaatatatatggtggactatatgcataaaatatagtggactatatatataaaatatatagtggactatatatataaaatatgtatatagtgtactatacatatgtaaaatatatacagtggactatatataagatatatgtacagtcgactatatatattttatatatattttatatatagtcgactgtataaaatatgtatatagtggactatatataatgtatatagtggactatatatatatatgatatatctctgactcagtttccccttaactggaattccaaaaatactctgggccacttcattgccacccaatgggaggaagagtagtatggatggaaccttagtgatggaagagattacagggttaacctatagcaattaaaatattttacttatgtaaattttacaaaattatataatcatgtgatcttgttactaaggctcctcttggcatcatgtaaggggctcatgcaaatgaggacccctgaaattacatttatttccccacgcaaatctgcatctgggcattccaaagaaatagagattgtttataattattgggagtagaccttcaaagtgggacaggattacaactgattgcagtattagagaataatcatttagaggtcacatgatctaggacatttttaggtgatggcaggtggtctgtttggcatatacacctgaaaaagaatgtagtataagatataattagtggttgaggcaaacccttgaggtccttgaatgccagaacaagaaattgggaggttgacgcacacataatcaaaatccttcctttcatctctgtgattcaggagcttttatttggatttattaattcagatatatttgtttatttcagttagtactttacttgtttttttagagtgtatgcctttcaaagacctggacctttgcttgcaccaaacctcctctgtcgctttatccttaacccttgagacctagtgcatatctgagacctggcattaactaaccttaagtagcatgagcaaatttatattgtaaagtagcttaaaaattttgaaaaattgcagatttgtgaatacaactggataaaatgtgaaaactttaatagttcaacccacttcaagtggaagtcattcgtcttcagagacaagtataagtcccaataaaagtgagttaaaaaccccttcacatatttttgtagcactggctttccaatttcagctgttttccaaatactaaaagatgctttatcatgcgtgtgcttattcatatccattgtgtagtcagttgactattttgtgaattacttgcatttgtccatcatgtgttgaacaaacatggtttttgcaatctgaaatgagagaaaaatgatatgaaatgtcagttgacttgaacttccttcctcgttttatggcaatagtgggagtctcttttctaatggactcatatttaagatgaaagtttttgacttagtttccttagtgtggttttcgcatcacagtatctgaaagcatgtcctagctgctgcattcatcacaggccaggcaccaaaccgggtcaggcactcctgcggcgaaagtgatctcttctcagtactttgctataaattgtgctgctattgatatcattaccagtttttttttttatgggtctccagatttcagtgttgtgcagtttttttggcatcagctgaaaagccctatctgatgcccataaaatctatacaaaaagagaaaatgtagttgcctccaaaaacaaatgatgtaccactttcactagtcttattttattgagtattgatgggagtaatagcaatactggtaaggcatgtaaatcatctgcaagaaagactgtgtactctgggagaggagtttggatgccttgactagtgagacaagcatcttaccagatatgtccttgtgaccatgggttgatgttttcctctcaggtactcagcttccaccataccttccttttacctgtatctttctatcaaagtatttctttctgatggacagtttattttattttatttatttatttatttttgagacggaatctcgctttgtcacccaggttggagtgcagtggcgcgatctcagctcactgcaacctctgcctcccggattcaggtaattttccctgcctcagcttctcgggtagctgcaattacaggtgtgcaccaccacaccccactaatctttgtattttagtagagatggggttttgtcatgttggccaggctggtctcgaactcctgacctcaggtgatccgcctgccttggtttcccaaagtgttgggattactggcgtgagccaccacactcagcctgctgaccagtttagatgaaaagaattgctgctgcattgaagaggtgttattccccttacttctatgcacttacccagatagagaatgtggccctgccataggaaagtgtcaggtgagtaaaactagagtagaaataaagttcaaaagatttggaaacttcatttttctgggcttcagttcttttttttgtttgttgtgtttgtttgtttttgagacagagtctcgctctgttaccgaggctggagtgcagtggcacaatctcggctccctgcaacctctgcctcctgggatcaagtgatccttctgcctcagcctcctgagtagctgggactacgagtgcatgccaccatgcccagctaatttttatgtttttagtagagatggggtttcaccatattggccaggctggtctcgaactcctgacctcgtgatccacccaccttggcctcccaaagttctgggattataggcataagccaccacgcccggctacttcagtacttttattggctatctaaattagaaaactatctttttacaggtctacactggcactttgttgcagcccctcctccgtgctcatttagccagcaagaaaagggggagcagcttctttgaggtgacagtgctagaataatggttagaaggaaagtttctgacctatagtctttttgtaccatatctctgaaggatacacccatattttttcaaactcattcaacagttgttaaagttcaagataattgagaggtattgttccaggtgctgactagttgcaaagtctgttaaggaaatgtactacatgaaaccaagatgcagcctatactgtctttctatgctattaatatggattacctggaagaatgtgtttttttctacttctttctctcttctctaatttgcaagaactttagccacttgcagtttactttcatcatcaatgtaaaaaatttaccaacttacatgtattttaattcagagcattttcttctgttcatatttatcttgttatcctaagtgtcaacagtcgtggaaggagagtgtgttttttttttcttcaaactgtccaactgttttggtagcaccaaaggaatcccttagggcaaaggaaaatcgagactctgaaaagaccagccccctaaagaggagtctctttgcacataaacaggttatcgtgttaatcccagttcccttctccatgctttcaccccacccatttctctgagcactcctctgtgactttattaaacaataagcattctatatttctttctttctgaaaattctgagagagtatgaaatcctggcttttgcgttattttgcatgcgatgccattaatagttctttactgattcctcctttttattttcctctgttcacttcatgtttgtatctacctgctcattctagaaaccaatatgattttcattatcagcttcatattcatctttgtgaatgcccaccctattgaaaatctagtctttggtttctcacgcatatcaagacattttagattaaaagcaaataattctaacagtcagtgggctgaagccaagatttgtattttctctgagacaaatcatagcagttgccaaaacctccctattgctcttcttcaagccagaaatgagaatgattttaggtgtctgttttatgctccttctcatttgctttttatgtgtagtcagtttctgaattctcctgtgtcctcctccaggttctctctccatttctgcctgtgactgctgacaccctgttcaccttctccacgttgcccttctagcctctctgtgcgtgaggtcctctagttcttacagaatgtcttgtcagtgctttcaccgtgacctgccccccaccccgagagctgtccaggtgtcagtcaccctaggatgaaatgacaccaatattggtgacaagctggccttctggttatgctcaggagaatcattaaccatctttaaataaataaatccctgctgctactccccatacaatttagaacatgtgccttgtaacttttgatgtggggctcttgtttgaagccattgttgttttccctgctgcctgcatcatcatatgttatgtgattcttcaggaccttggtttcaatctctataactgcctatccttcaaaacccccaaacatattattaaatgacgtcacctgtcatttaagccatctccatcccaaacatatcctccaaatgaaaatccactgagagggagagggagagtgtgattataacaaagagacagaaacttatagaggtagcaccttacatttttgttggtctttatatcttgcatgattcattggtataccaatttcaccctttaactaatggctgccactttcaaaattgttttcctcaaactgaattagacgaccctcctcttggcttccttagtgacatttaaaggggacatggatcagtacctggaccccatttaataccagctgccccaccattaaaatagtgattactggagaattagaagatgcaccatcattcatagacacttgggaactgacttcactttctcctatgaggacgtggcttgactggtgttaattggcctaaattctgttaaaacctgacaaatcttgccatcttcctaaaggtctgtacagtaagtgagtgtgtaagtttttcctgaatgtggtataagtcctgaatgtcagtggagaatattctagtgagaattatgcttatcctgatatggcaagatcctatctggtgaggacatagtcaccagcagctacatacccaatcagggactcttctattcctgcatctagtagctttctctttggcttccattcagtttcaagtatcaactaaataaaatggggacttgatctagcctctggtgtatgttttcattggtgtgtgttctccaataagccacgtataacctacttgaacactttagtggtacctgcctttttgtgtgctggggtgtactgaaatgttcctcatttccacatttccttttctgaaagataacttgagagtggatgaacaccatgactgctgatcttaatatcctcatcccttctccctgtcctgatgcataagggcaacctcaaatatttaactgtgtgaaaaaaaaaaaaacccagcaagcagttctataagaatttatgctttaaaatactgaacaattcctattttatttgtgctttgcttccagtggcttttaaactatgattctaaggaacattgttgttccttgagctgaatctggggtttttgcctctaaattccaataataagtcttttcttaattagctgaaaaaaaactaatgaatagcaaaattttcccatttttgaactcccttctcacctcatctttatttgtgtaaaagttttgattcgtattgtaaggttatatttgttttagtgcaaggttagattttattattttaatttacaaattattccatgaaaattaacttgactttcaagagcctggctttttaagcagacgagataacacagctcacaataaataacaagtgctattacctacttttttgggggagggagtcctgtatgaaaattacataccagacagttccatgtcctatgcatgccttaatttatttcagcctcccatcagttctgttatgtgctatgttcaccaagttttaagtgatgagactgagtcacagagcagtgcaagttcaatgccacagagcaaacaaaggctcaatctgtttgactccaaaacccagggtcctctccactgtcctgacacatgacagttagcagtgttagtgtctaattgttactgttagatttataagcttcttcactgtagaggttatgtttcctttactccctaacactggaagcctctatgaaactggatagagttgtcccctctcatttcagttagctttccttgtacaatatgacttctactctaccatatattcaaggttttgcccaaattatcttcagtactcctaattacctgccctctgttgtgcattaggacttacctttctttgtcttttttttaaattttttatttattattattatactttaagttttagggtacatgtgcacaatgtgcaggttagttatgtatgtatacatgtgccatgctggagtgctgcacccaccaactcgtcatctagcattaggtatatctcccaatgctatccctcccccctccccccaacccaccacagtccccagagtgtgatgttccccttcctgtgtccatgtgttctcattgttcaattcccacctatgagtgagaatatgcagtgtttggttttttgttcttgagatagtttactgagaatgatgatttccaatttgatccatgtccctacaaaggacatgaactcatcatttttatggctgcatagtattccatggtgtatacgtgccacattttcttaatccagtctatcattgttggacatttgggttggttccaagtctttgctattgtgaataatgccgcaataaacatacgtgtgcatgtgtctttatagcagcatgatttatagtcctttgggtatatacccagtaatgggatggctgggtcaaatggtatttctagttctagatccctgaggaatcgccacactgacttccacaatggttgaactagtttacagtcccaccaacagtgtcaaagtgttcctatttctccacatcctctccagcacctgttgtttcctgactttttaatgattgccattctaactggtgtgagatggtatctcattgtggttttgatttgcatttctctgatggccagtgatggtgagcatttcttcatgtgttttttggctgcataaatgtcttcttttgagaagtgtctgttcatgtccttcgcccactttttgatggggttgtttttttcttgtaaatttgtttgagttcatcatagagtctggatattagccctttgtcagatgagtaggttgcgaaaattttctcccattttgtaggttgcctgttcactctgatggtagtttcttttgctgtgcagaagctctttagtttaattagatcccatttctcagtttaaggtggaactcagtctcttcctgacagccaccttcaaatagggtttagtagtttagaaaaacattctaggaagggttgtttaaaagtctgagataacagttcatatttaaagatgctcattattaatttcaatgtggaatgatttgcacttgttattaacacatttagagagaaagaaaaattagaagatactcaacaggagacattcaggtgtggagtacagaaaagccgagaagaagaaagttattcctgatatgtttaagaaagatctagccatcttaaagttttttttttttttttatgtttcaaatagctgatacactggtacaaaactgaattgtcatcttctaggatacactataatactatggcatattgattgaatacacaaacctgaatacttatcattattattactattattattactattattttgagacagagtctcactctgtctcttaggctggagtgcagtggcgctatctgggctcactgcaacctccgcctcccgggttcaagtgattctcctgcttcagcctccgagtagctgggattacagttgcgtaccaccatgcctggctaatttttgtattttcagtagagacagggtttcaccatgttggccagactggtctcgaactcctgacctccagtgatccacttgcctcggcctcccaaagtgctgggattataggcgtgagccactgcgtctggcatgaatgcatattattataaaattatatcttaaatattttagtgtgttattatttaaaaagcagatactgatagtgaatgaggactcataggcatgtgtctttaaatttgaagaaaaattacctactgtggcttttttaaagaaaatgtatttattacctaagaaaaaccatgtctctctctctctctcacacacgcacacatacactctctctctccatatatacacacacacacacacatacatatatatacatatacatatataaacatatatatatgactcagctgcataaaacaatgtaactaaattgttgatcgctaaaatgttcacttctgtgcctctaaatcaagttgattttgacaatgaggaaatgccttggtgaaccatgttggttttactttttgtttattttctcccattcaagattatcaacttgtaatttactggcctgattaaatgcttggaaataaaccagagttcttgaattttgccccattttcttaattttaaagataatgagttcctttgaggatattgcatttagactgacttgttcatttcatgttgctggtaattgaggggcttaatctgaaaggaacttagtcttcagattacctaagggacagaaaaagatactggtatgggactgggatcctactttcttaaaattttatggtactttttcttgcttctactcttcttgttttttttttttaaaaatgttttatttcaaagaacaattgccaaccgtacaattattggtatgtcagttggttaagaaatgtttgggatggaggtggagggatggtgaaaaatgtagtgatgtctcttaataaaaaggaaataaaggaatgtgaagttggactttataattccttttggcataggtttgtgtcctaagtagcatgttaatttcttatcatgaaagaagtttttttttttttttttaagaaaaggaagttctatctggacaaagataaaaaaatatttgcaattctatgttttgtacaaactaagaatgttaaagcacacataaaaaccaggtttgtaaataacctacaaagtggatgaaaaatgttcctttaagctggaatcgcttcagaggtttggggaatcattttcagaatattgagaaatgagaaaatgcatttcaactgttttctactcttttcccaaaagtacaaaaataaaacgctaatttttatatgagagtgattttaaaaccacaagcagattttttttgagatgtttctctgtagtggccaactttgtatgaagcaaattattttaggcctaattgcagtcagagcggttaggccgctggctctgctaaggttgaatttcatttgaactttctaatagtatgatcttttttcagaatttaataactgactcaaatatttaatagtggaagctttcattaaattaaaaagaaatcaggatatatttttagaagaactaacttattttctttatcagttctatctactttaggagaagaggaagagaatggaagcaatctctttgtgtacttaaataggcattaatgttgtaaccccagcaaataatttattttggtctatatcatcattcaaaagatttggaaagcaccaaatggcagtaataactatacttccagctctgttgaatggcaaattacactgactgtgtgaatcccttcattcgtctcctggataatcattctttttaatactcacatatattttctagatcagtttttagattgtacacagtcaacttgtgcattgcctaacagtttctgttaaacacaatggcttgttttgaaatgcaactggggaaagatgagagttgaaagattttgtttccatgtgtcaacctataaatagatgacaaaagatcattaaatggattaatttacaagcatccttagaaatagaatgtttttacataaaagcctgttgtaaaccttttaaattaaagtgcattgtgtcatgcactctcttcaccccagggttcttttgacctctcacctctcactttgtcttccaggcactccactgctggtgaggagaagcagtgacccagtgccaggcccacctgctgatacccagccaagcgcttcacaccctggtggccagagtctgaaactggttgttccagtaggtatcctgctgcttgtagttctaatgaaagatcaaagtgctgtacccataggttaagtgggactttgcagttttaaacacattgataactagatagagatcttttgatagtatatatagtattagttatactaatagctagtatgggctattacttgtatatagttatagcgatagctattacgtatatggcactgattatgtgccaagtactattttacctgttttatattaagtcatctaaacttccacatcaaggtaagcacatgtttttatctccatttaactgataatgaaattgaggcagaggaaggtttagtaatttgtttaaggtcacatagctaataagtggcaaagcaaggaatttcacccaggtgttctggctccaaaatccttgcttctggccagtacactatactgttacatttccttcatcttccagtttcgtaatgtccaaggatatcattatatttttgttgtgttaacccaatgctttgcaaaaccataccatgtgagtggtgtacattttcaagctcccaatatcacgaaaatgtggtgccaggattggatgtgtagaactcagcattcagattgaagaaaaacaaaatcattgaccaaaagtgcttataaccagatatacttataactaataggttaagtggagaataatttcctgaagagatgatattctccttccatataggactgtgggatcttcctgctaaatcctcagttgctttgaagagctgtaattgtgaataatcctctcagatagcctgagaattcaattttggctaatgactatataccattgcaataggtaatcttcgataacatagccatattaaaaattccctaaaagcaagactctttctcactttaagtctcactgtctataacgccttaagaaaaaataaacacatcatttataggtatatacggatgctgaaatgagttaaacagatttttctgatttggtataaaatattcttatcaagaaccaatgtcaatgtgtatgagataggagtcactatttgaaatcattagctctttgctaatagatttgtggcaatattttggcatatttcttttattattaaaagaaagcaggtgtcttgaaagtattttagatgtaatgtttttccactaacctatttaaaactctatccttctaaggaaatatatttgatggaacattaataaaaatcaggtgtatgtgttctattttaatgtacgtacaaacaaaactggtatgtggtatgacttttcttaaaacacacactggttgagaccatgttgagtctaattatgttggattgggggaagacagctattcagtgagagaagaattacataaaagagcagaactacaatttagttttcattttcatgatgtctgtgtgtctgtgtaccctaaaacgagagtgtgtctgattaatgtgttagcattgtttgcatggagaaagtccctgtatttgcccattttcacactgctctaaagaaatacctgagactgggtaatttataaaggaaagaggtttaactgactcacagttctgcatggctggtgaggcttctggaaacttaaaatcatggtggaaggggaagcaaacatgtccttcttcacaaggaggcaggagagagaagtgcagagtgaagggggaagaaactcttataaaaccatcaaatctcataagaactcactcactattacaagaacagcatgggggaactgtgcccatgatccagtcacttcccacagggtacctcccccaacatgtggggattacaatttggtttacaattcaagatgtgatttgtgtccggacagaaaccttaaccatatcggtcctccaatgtttatttccatgtttctatcacttaggctctgggcttaaaccaattaagatgacatcaatgttactttccctagaggaaatgatggctactgtccatctggtaaatgctgtagccccaccaaaatatgacatcagtgagttccaagttggggtatggggcagaaagacatattattactagcaaagatgcatctcataattcaagaataaatgctggcgcccaaaatccttgtgccttacttatgcaagtgatcaaatatgggctgagtccctgtgtatcaacagtgaaaaggaaacacatgtttcttcctttcctcatagtgtcctctgtggatgatggagtgcagaccacagacccaaaaaggagagtctggtccttgcccttgcatggaatagtggcacatcttaggtgtctcttgcttcagttgtaaaataatctccatgaatactttaagctttaacatcccaaggtacagacattgtgccttatgtatctttatctagggccaagtacatggaagatgctcagtgtatatgttttggacttaggaatgcaagacacgtgtaagtctaggaagagtcctagaagttcttagaaattaaccagctaattaattattattaattaatatatattaatatataaatatataataatactaattaataataattaatctgactcagccattctctccgtttcccaaagagcatctaccagggaaatgtttatctgctccaaggtctagttcaccacaggcaagtgacagatagtttaacttccctattatgcaaacattaataaagacacttaggtgtgtttatttttactagaaggaaggtgtgtgtgtgtatatatgtgtgttataactgttaatatatccttgcatagccaaacttatggaatgtttagatctacagtgtctagtttagtagccactagccacatgtggctattgagctcttgaaatgtgtctgatccaaatgtaaatgtacttaaaatttaatatacacactggatttcaaagactgaagcataaacaaaataacataaaagatctcattaataattgttatactgactatatgtggaaatgataatatattaggtatattggcttgaataaaatatattattaaaattattttcacctgtttttacttttttttttttacatggctattagaaagctgaaaattctatttgtggttcttattctgttttattggacagcgcagctctagacagaagcaaaattgggtatagcatgcatgagatagtttgagtcctggggaagatctttgagcctcacatcatctcttgggcaacagtgcaattcggtttgcctggggcagtcctggttagtgcccgttgttctggcataattattaataatgtcttcacaaactgtcagaggtgtccatgtatggatgataaattacgtggcaccctgcatatagccctacgctcacttttattgttcgctcactgataagagaagcagcctttcaaggaaaccttgggaacataacaaccacaactctaacactggtaccctgcagaggaggttctgtgtggcaaggacctgggactggagctacggacactgagacttcacattcttttccatctcttggattttgtacttggcgcttccttcacaactccagctacaccattcttgattcctatgatttgataagtgatggtgaattcggggagtgtgtgataatgtagccatgtatcaactaatatgaaaaataattgcttaaaaagccatgttcaattgcatttcagtccaatatccacaggaagaaaaaacaatcaaaatttccatctcttaaagagtgttcacatataagtaattcacagatggcagagccccaggtgggttatgttcagtcattcccaagaaatgaaacttacttataacccacagcataagaagctgtaaggatgaatatttgacacatttgattatgttgaaatactgcctttaaaacacagttgatgactgttatttttagttgcacttcattaggcttactgtagagggaagagttttcattgatgcccagagatgtgtgtttttcaaaagttgcaaaagttacacttgttttctagctgattaaatttattacaaattggttatttaagatgtacactctcagacatgctggagttttaaaaagggcttaaattagaaaaatcagattctctgaaagcttcaaattctatgtatattgagaagccactaaatctggtatttgttatttaacaccagacacacagcaaagaaatttgtttcctttgttcctcttttggtcaacatacctaattatcagaatagtacaatcattaatgtgcaaatagtaataactgtttatctttcaagacagtatagcaaatccaactctattgactgcttttgaattcagaaagagaatcctagaaacaggatattttggtgagagtctgcttgtgggacttcttaccttccttttcttgattgtaacctggtgttcttggcttaagggcatgccataaaacaaggttcttgaaactgatgttctcaaacttgcaatggaacagaactctaaaacagatgtgatttttttcttaatatccggttaactagcaaggttgttttgtgttttaatgactgtttatggtttttaatttaacccttaaggcaaattgatcctgcagggcgagaaaattaaaaactggattcctgaaaattataatactgtggttgttctcagagagtgaatggcattatttgttctaaaaccattacttgtcttacatcaccaaaatacttgacctatcttttcaaagtccatgtgtattttatatatatatgtatatatatatatatatatatatatatatataattaaaaaaataagctggcagatttgggggttgttaaattagaagttcatggatagatttcaggggggtctgttaactctctgaagttttatgccttagccaggggatgggggtgtgtttcatgaaagagattctattacttcagattttaaaagaataacaaaaaatcaaccactgtttgggggttagattaaataatgtagggaagccactaattctcacagtgagcagaatgagagaagttaagaagtagagaattatcacttcctccctgcaaatatgtattaaataatgaaggttagttcatcatattatcacctgtttacatgacacataatatgtaagttcaagattttaagaggaatagaagtttttgcattttttcattgagaggctaaaaataactctttagtcagtatcaacacaattattagcaactctaagattgggggtaaaggacacagaccggtggagggaaaacaccctgaggggaagtgtttccagttgtcctgtgtgttctactgagacaagaagggaaaatacagtgttctttggggcttttggtatgttatcagtgaggatagtggcaggtggctgctagtgagagtgcatttttacagtgagtggctgcattctctttaagtcttgctaagataatatgatgacgtgttgatttgaggaatttcccctcatatgtcacacattttcccatgtttgtcacatatattgaaattattgtcagtattgcccctgtattaaacttcctcagacccatgaaagaaatcaccgagatattacagagaaattcaaatagcttgatttcagggttaaaataattgatcgccactgtgatgttagaggacttttggttgcaggttgctgactatcaaaatccaacataaggcagggtacagtggctcatgcctgtaatcccagcactttgggagactgaggcaggtggatcacctgaggttaggagttcgagaccagctggccaacatggtgagaccccgtctctactaaaaatacaaaaaaaattatccaggcttggtggtgtgtgcctgtaatcccaagcacttgagaggctgaggcaggacaatcgcttgaacctgggaggcagaggttccagtgagccaagatcgtgtcactgccctccagcctgggcagcaacagtgaaaactccatctcaaaaaaaaaaaaaaaattccaacatataacttaccaaacattctgagtgaccaaatcatatttttctgtagaatcaaatatctgtagaaacactggaacaaaataaatgttgtgggtactgatgtgtattagaaggatggctctatccattgttttccaaagaggagagatggatgctgaagagcaaaacagggggagaaatagcatgtaatatactactgcattatttagagatactgaaactataaaaggtttttattttttttccccaccctgacacagtgatttaataatagttctggtgtttgtaactccagctgttcacgctgtgtgctgataagaccagagcttgaagacacattgcaacgatggctttcatatggctttgtttttaagagataaagctgccatccgatatttcatggggccaaatgtttacttcatttggcaagtttaggcagcttaatttttaaatcagttatgcttgcaagactcaagtttcaggtaggaaaaaacctgaagcccagtttactctgcagcagagtttttcaccatatctcagcagaagatgttaaaacaaatctggattgcctgaatgtctgtaccatgactaatcaaggaaactaagaagtgagatccctatttaggtgtgtgctccccgatttttcttcttgggtcttagtctaacactgaaaaactctaaaagaaggatcactatttaggtcaatttcagaaattaacaaggtaaccatgacatgtcttttatatatatatatatatatatatatatatatatttttttttttttttttttttaattatactctaagttttagggtatatgtgcacaacgtgcaggtttgttacatatgtatacatgtgccatgttggtttgctgcacccattcactcgtcatttacattaggtatatctcctaatgctatccctttcccttccccgcaccccacaacaggccccggtgtgtggtgttcccctttgctgtttagccttgatctgcacacaatgaaaactgaatgggttttgttttcatgtcaaaataaattgactaatcccttagatgcccaagatttctgctgtgtgctttctagaaagcctaagacatggttcctgtcctcaagaaacttacaacctcgttacagagaacacatctaaagcagttaaacagccctagcagtctgcaagcatgtatcagattatcaaataatacggttttaaccatcaaaatgagtggttttttttccctttagcctgcactttggtactctacttagccttcctaacccctgaagggaattgccatgtgcagtatctctattagctgttatctctctgaaatataatgtttacatgactgcattttttcaagactgtgaactcttcagaggcacaggccagtgtattcgtttttgtattcaagcccccaggcacagtgcctggcacttaagacgttatcacaaatatatgactagatgataaaaatcataaaatctagaatcataaagttagtaatctttgagttataactttgtaattttctaataactgttcaaaacatttagaaaggtcttgattagaagtttctggataatttcttatatccattacatctaaagatttctccttctaaattttcctcctagtccatctcccttaagaaatttttctaatttcagttgatttggaagaaaataaaaatacttctggtatgtgaattaattaaaaagaaagaacatttacgacgtgtttcttggcaaagcactgataaacatctcaatctcactttcacaatatgggcagatgtaatttgacagtgttgtttgaaattttgtaaagatgatgtttaaagtagttttattttaaagaccaagatcctgtgtctgattgcatcaataactctgtgaccctaagaaaattagttaaatagtgggtgatttcctcagaaattctatgtaatggaagggaaataataaatagagaaactgtatgaactctagttgttcttagggacttatccatccaaactagtgacttcaagattccagatgtgaattattaagttggttggtatgagttcaactttagatttcattttaatgtctcagtgttcataaccagtcatgcagtgaggttatctttccatccaaaacaccaataatcattttttattggtcaaatgaataatatcaagaaatattttttaaatgccacacacacaaaggcagcagcgtaaatgcctacatatgcgtatgtgtgtacccttaccctctttggagggaaagctactacctaaatttgaaggctaaagtacatatagtcatgttatcgtaaagtgaaagttaagggtatgggttgtgtcttccataggttctgaacttctgtatgtaccttccaaattgtggacatttagtaaagactgatgacataggaggaaagggttaatgagagttcaccttgagaagaagcaagacaattggccttgggaggagaaggaaaattatttctttgagcatggtgtgattcatagaactctcttacgataggggacgtttttttttttatcacagcataaacgcttctaaagtacaagtttcaatttggtttctgctttcaaaatcttgtcatacaatgacattgtacagacgtttaaaagagttttatttcttaggagagtggcccctttcctaatagctctgtactttaaaatagaattcccatttagatgaatcacattttaaaaagtagctactgtgagtgttttacgcttgtggaaacatatagcatcctcataagcagcatgagagcctgtcaccatacagcttttgatgtctgattaaatgatcgtagggacatctggagggagttagttttgaagtaactggtgtgaagcactggagaatccgaagccttctgacagactaaaaccattaaaaaaaaaaaaattgctacttttagcaaatcttttttaacttgaaactggctggaaattttcagactcacatagccctgatatttctcaacagatttttcagacagaactctctacgttttaagcaaagaatggttaagtagcatttgttgcaaaaatcataaaggaatatcctttgaaaggaaaaagtagatactgaaagcaacagaagtcaaaattgatttacttaaagaaattgtctcctttttatctgcctttaattttaatcagtgtattttaatttttaaaggacacaaacacacacacacacacatacacacacacacatatatatatatatatatatttgacattcagctatattcttatgaagacccaaaggcatcaaagcgattgatattgatataaggttatggcatgttttgagcacctgtcaaaagtttctaaatgtcttgagtcaaaattttatttgcatagtctcataaaatacaggcattgtttatttaaaggttgtataatttgtaatttgtccaccgaggttctcctagtatgaggtgatttcttattgtttcatgaataaaattatgatatacctacatatatgaatatatttacaaatcctgaccttatgtatgtatatgtgttatatacatatacatgtgttatacgtatatgttatatgtatgttatatacatatacatatatacatgtatgtattcgtatatgtatgttatatatgtatatgtgttatatacatatacatatatacatgtatatgtgttatatacatatacatatatacatgtatatgtgttatatacatatacatatatacatgtatatgtgttatatacatatacatatatacatgtatatgtgttatatacatgtgtatgtgtatatgtatatatacatatatgtgtatgtgcatgtgtatatatacatatatgtatatgtgtatatgtatatatacatatatgtatatgtgtatgtgtatacgtatatatacatatatgtgtatgtgtatgtgtatacgtatatatatacatatatgtgtatgtgtatacgtacatatacatatatgtgtatgtgtatacgtacatatacatatatgtgtatgtgtatacgtatatatacatatatgtgtatgtgtatatatgtatgtgtgtatatatacacacacgtgtgtgtgtgtttgtgtgtatgtttatatacatctcctgccttgaaacccttgatcattctccactgcattcaggatgttttaaaatttcttggtatggctttttaaaaaaaagacttttttctcttttttaaattgtggtaaaatatatatatttactgtcttaacaattttaagtgtatagttccatggtataagtacattcacattgttctgcatccatcactaccacctctctccagaactcttcaccttccaacactgaaactctatactcttaaacagtaactccttattccctccttttccttggcaaccaccattctgttatactttttctccctatgattttgactactctaggtgccttatacaagtagaatcatgcagtatttgtccttttttaattgtatttgtccttttttgactggcttattttactgagcataatattcttaagcatcatccatgttgtagcatatgtcagaatttccttccttgttaaggttgaaaatactctgttgtatttgtatacaaatataccacattttgcttatctactcatctcttgatggacacttgagttgcttccacattttacctaatatgaaaaatgctactgtggatacgggtgtaaaatatctcttccagactctgctttcatttctttccgggagatgtccagaagtagaattattggatcatagggtttattctaattttcattttttgaggaaccaccaaattcttttccacagaggtgtgtcattttacattcccaccaacattgcacaagagttccagtttctccacatccttgccaacacttgttggtttctgttttgtttttagtaatcatcctaatgactgtgaggtgatatttcattgtagtttcgatttgcatttccctaatgcttagtgatactgggcatctttttaagtacttattggccattcatgtatcttctttgggaaactgtcttttcaagtcctttactgatttttgaattgtgttcttcatttatttgttgctgagttctaggagttttctatatatgctggatattaactccttatcagatatatgatttgaaaatatttttctctttctttacattgccccttcactctattgtgtcctttgtgcagacatttttaattttcatgaagttcaatttttcttttttttttttaactgtgctttttgtatcacatccaagaaatcattaccaaattccacattatgaagattttgccttatgttttcttctaagagttttatagttttggctcttaggtttaggtcttcgatttattttgagttaatttttgtacacggtattagataagggtccaacttcagtcatttgcctgtgaatatccagtttccccagcatcatttgttaaaaaggttattctttcccccattgaatggtcttggcaccactgttgaaactcatctgaacataccttagagggtttatttctcagtccttgatgtggcttttaaaaacttaatcacaacctatatgcttagctttatctctagtcacactgcatgaaggaccctatgtatgagagttataatttttcacatgtgcaaagaaagcttctgtctgtgggtctttgcccagatgtttcttctgctggaagaatgacaaatatcatttgtctccctttctgctaatgaatgtacaggtacccttcaaaacttagtgtaatggcctctttctttactgatccttatccacaccctttctgctctggacagaatttaccacttcccactgatggcatgctggaatacctctagcataatttgttccaccccatgttatagttttctgcatatgtctcctttatgaatctagaaacttgtaggtggcttgaatttccttccacattagaacacggcatcatgcccaacagcagcatttatatattgtttaaggaatgggggaattttctaatcacgattgctcatttcaaccatgaagcaatttaatttcagctttaatagcgttaatttacattctacttctgctagcgagtagccacgtaatactacccagcacaccttggaggagggctacttttctctttcaattccaagttcatgtcagtcgtggacacttaattattaatatatgtgttcaaatatattatttcatcccatgaacatctgcaagttcagctttattgcctccattttacagacgacgaagttcaggctcaaacgagttaacttatttgccttagatcacagaactaacaagtagcagtgctaggattcagatttatcttaacctgcagtatagactcttcattctacccctcaaatcaaatgttagccttgagagtagcatttgtccacattatgctgccattgctttgggcaatcttcctttgaaactgcctcaaagccagtttatcagcccctcctcctaaaaaaagtcatttcatcattttatagtcactatttttccttcaaaaatggtggcgttctatttgatgccaaaatctatattgtacagttagtctcagactgtttacacaatttagatacctctgtgaaggagaaaatttttccaccacaaaggaatttaatgcaggcatttaagacattcatattcatagaagaatgcattcagatgggctgaaagcagcagagttttagaacaattttttgtttattcagttgcctagtgattaagacatgtaggttttgtccctgactcatccattgactctttgtcaggttaagcaagtgtaatttagttctgtgtctggaaaaggaagattgtcttctatattggccacggtggaattgcaaggttaatgccttctatcttgagtacagcatttagcagactgtgggtgcttaatatatgttaataatagtgataataatgaatgttgataattaaaggtcttttataattactaaattttctatgtgtgttaaatataattaaagggaaatgatttaaattaatatgcatacatataaaaactagagctagccacagcttttatttttagcttctcaactaacgtcatgaatgtgaatcttatattaagaaattcaattatgatggcagtttcactagggtcatgtatagagaacccatgcatggttctactctggaaactagaaaggcaatttgagttgaaaaacatgggcatgaatgggaagcttcaagggactttagtggttggagcttgaccaaatgaagttgtgcatcggatatcgttattatgaagtatctccataatactccctttgagttctactgggagtcagaggtaccttactggaagctgggcaccatcccagaaatacagataataaacaagactgcctggagggtctatagaagatataggtagaataaaggaaacagtaatcataaataataacccaggaaattcagcttggagattcattctttgaactcaaatgctcagggttactaaaggttattatttcttaaggttctggcatggcagtggaagtgtgaaccatgagatgtggaaggctagagtggttaagaacatggactgtaaacatgactgcttggttcaaagctagcttgaccactgactgatttgctggtcaatttctgtcaagtgtttgttttccttcttttggtctcacttttctcacctataaagtaatgataataaaagtacttacctcacaggattgtcttgagaaattgatgagtgattatttgtaaaaattcttagaacacatggtaagcactatgtgtgtgtgttaaatacatacgtatgttggatttgtgccatgcatggttggatagaaggtgtaggataagatagactatagaagtaagttggagagtaatctgcattaaaagctgaatttgatcatctttagctttaatttacagaaggcacttagcacacagctagcaaaaaatattgattccaaagtcgagcattaaatgcatactgagtgtcttttgcttatagagacccttgcaagttcttttaatttcaaaaaaaaaaaaaaaattcctccaaaggcaagttcttaaggcaatattggaactacatcaatgaacccagccctggctttcttctcttgatatgaaatgttgtcttccttataattattttgtttaagttgaaaacctagaaggaaacaggaaaggacggattattaagcaacaagccagtttcaaatggttcaaacctgtcatccatctcctgaggttttctggaagcccccttcccttgtacgcttctctaatttgctagtcctgctgcctttatcttgactcaccttcctcacttgtttacagggtggatatcttctcattcattaagacaaggttaaaataccacctcctttttctatcccttttctgaaactctacttccaagcagaagtgtagtatttttttatgtaaatattttatgtaatatttttaaagcaatgtatgataatacgttcgttgaggtcgtaatgaaagtatgttattggagaaattagtgtttaatataggaccaaaatatcagaggtcagacatgagtcacagagagcacagtgtggatgccctcagatcacacacttgttcctggactgaggcatgccctgctgtgcccacagagctacctgttccctcctcagttcctgctccccgctcccacccaaacccagaaagagtgatttataattctgtcacaaacagtaggaccactcttatttgcatttgtgtgtctctttccttcccttccttcccttggagtggaagtgcactgaggatggagaatgtattgttttttatctttgcaggccagcagtagcatgtggtaggtatttaataactgatgattgaataaatgaaagaatgcataaaagaagtaatggataagcaaatgaaaagaaaaaaagaataaattagcagagagaaattaagaaaagaataaaatgtttttaaaggtaatgtacagtatatttttgtatcttttgcagtgctcagtttttaaaaataaacaaatgtattttaatttattcagcatgaaatttatttatatcttatatctatgtctgtataagaaaataaaacagagcagatacaggtctctgagagtattatgacatttctgcatttttaatgtacttcaaactccatccttccaagtcagcttctttcattttaaatatagttgcagtgggggtgagggagggggtttgcttggaaattattgtattattaattaatctattatatatattcaactttagtctctggtcagtgttttcttagcaatttgcaaatatgcaattatctctgtatatttgggatagtagttacagaaactaccaaagtaaccgtttaaagctaaaatttggaattttatcactgcaaacatttatctttgtgttggggacatcataatccttgtagctattttgaagtatataatgtattaaccctaatttgatcattatacgttgtatgaatgtatcaaagtatcacatgcaccctcaaaacatgtacaactatgatgtactaataaaaaatataaaaaaataaaattttatattttaaaaaataaagtcaaaatttgagttttcctggatttctaaatttgtttgataaattaatgaactagaaattagtctttgcaaggaccaaaggatgcaggtagaaaaatgcttaggagtttgttatgattcaggtcacaggaggcaaccacccaaattaccagcatgattcctttatccgtgtaactcagcagttgattcagtaataattataaaacacccacaactacacttattttgtgctagttatttttctaagtgctttaaatatattatttcatcgaatcctcttaacacccccatgaggtggtcccattgatatttctgttgataaggaaatgaggtacatagaggttaagtaaatgtcaaattgtttagttgtaaagcaaataaatggcagaaatatttaggaaataaaatgtacatatcttggataagggaatagaacatataagagatgtcaagaataattcccacttttcatgtttgggtagtaaagcatgtaggtattctaccaactgacatacagaacataggatctgtttgtaggcaaagatacaagtagagatgcttggaaataaaaaaaaacgcatatccaaactttgaagtcattggtgatttcagaataagaccagtttctataaagggaagtgaggtaaaaactgttctgctattagttggaaaagatactggaggcaacgcattgggaacagccctgtggaacttataatcgcattgaggagaacatgcacaggttaaattttataagctaataacaatttaagaactaattccaagtggcaaaatacaatttaaaatggttcagtggaaaaacaagggacttttttatttttttatttttttgaagaatggcacatgtaattcatgagagtgttgaacatctacatcttgggaagtgagagatgcagctgtgcttcaggaaaaagtggaatctgagatccaagcaattgcttctgcttcactctttcatagatttcatcatgtttacctgtttacctgcccactgtcttcctccacattggggagacatgcgtggctgctaagaactctgcttttcccatctgcagagaggaactaattccttcctaagctttagggaaaaaaagtctgattggcccagaatggccactttacccaagctatggcactttaaatcaaccatggcaatgggggtgtggggaatgttctgcagacatttgatgtatgatgccagtgggagaagagcagttttcaccatgtggaagactgcgcagacattcccataagtgtatacccagagtcaaggccaggtatgaataatcagtattggcagtgagtgccgtaagttcagggaagaactcagtgtcatgtggtcaagggagcttcaaggaaaaagatggcttgatgtggactttaaagaaagggtagacatttgataagcataaaaaagtcagtgtgcaaattcacagcaacaaagatgtgtaagtcatgttgggtagaggaagacctttctgggcagagttaaatttgaaagcactgtttctcaaagagttatcaaaagaccccttccctcagaaacaccaaatggggttgcagaaatgctaatttgagggctccaactcagtctgttgaataaaaatctttgggaacaaggtctgggaatctgcatcttagacaaatatcctttagctattgcagtctccagtgtaataacagcatggagtgaatagaggttataaagaaaggctggacctggcctcaatagggcaagctgcttaggcacaggaagatgaggtcagctatttccacattggtgcttagagggaagaaacccttagaagcaccatctttatgaatttattcaaagatgccacagatagagtgagaagattacaatatatctgacaaattaataaacactggagttgtgaaaaacaactgtagaattttgcatgaaattgtgaagttgtaaaaacagaaacaaagtgagacattctgttgacgacaacagtagtgataaaacacacacaaaaaaagctttttgtttccatagaataatttcacatggccataaagatatcctgacctaatatataatttaaaccctaaatacgtattttttatttcattctgtgctatggtttggttctagtttgtttgttaccatcaaaagtcatgttgaaatttggtccccagtgtagccgtgttgggaagtggggcctagtgggaggtgtttgaatcatgggggtggattcctcaagagtggcttggtgctgttctggtggtagtaactgagttctctctctggtgagaatagattagttcctgcaagaatggattagttcccaagagagtgggtagttataaagccaggatgcccaatggattttctctctctttgcattttttgcttctgctttaaccttccctgccatgttgtgatgcagcacagaagcccttgccagaagccagggccatgcccatgaactttgcagcctgcagaaccacatgctaaataaatattttaataaattacccaatctcagatactccattataggaacacaaaatggactaagacggcccccatttattcatacttattattatcagcctcattgaacaggtagacaaaacaaccacaaaaacaacaaaaccttaccatctccataggtaagggaattttgtctcatataggacacagaaggaataatttaggacacagactctctcgggtctgggaaagttaatgtatctcatgtaactaactgacattcaccaaacgtaagaacagataaagtttcccccgacagaccctgtgcatattttctgctctcaatttggctgaggtactaatcttaatctgattgtgttgaacagaacaacccacccttttagcatttctttgtctggcaggagtcctgacatttggtcgcatggttaacatcaaacacgaagagaaattccttctggtaatacagttaagataggtgcctttttcctgaaagttagcaatattctcactctcatggaaggctgtactgatggaggaaccaatgaagcagaaaactctaaaccacagataattcttgttatttctacctgagttgaaaatacaatgtgttcattagcagcaagtgtatactgtagtctgacaactgggagacctgccttctggtgtaagcttagagactgaattgtgtggtcttggagaagttacttaacttaccagggacagtttcttcatctgtaaaatgagaaaggtggtatagttaaaatgggagctcttgtgtagaaactgataggaatataaactggtgtaacacatttggaaatcagtgatcttaattctcaatctgtgaatttgtaatgaggaaacatgttttttctgctttttttcattttgacggtttttcttctaattctaaatcatctaaataactgatgacttaaatcatcatttaaatcatcaagttatttaaatcatcatctaagtaacttttattttcagtttttcctcatgtctttcaagtgtccaaaaataccctggatgagttgaaactgacttggagtcagcttcccctgaatcccatgcagtgcgtgaggggaagggaggttgtgcacctgaacaaaactgggggatctaatggaaagggaagtaagatgaaattatctcagtagaaactaacactctattttttggtcaccaaatatttctttgcatcttgcatccacttttactaggctttttttttttttttttttttttttttttggtttataggcattggaaatattttccccagtccataattggtttttgtttttcagagaaagggtctcactctgtcactcagactggagtgcaatgctgcaatcctagctcactgtaagaaactcaaattcctgggtccaagcagtcctgcctcagctcctcagtagctaagactacatgagcatgtcaccatacctggctaattaaaaaaatttttttgtagagatagaggtttcactaggttgcataggctggcctcaaactcctggcctcaaaccatcctcctgtcttggccttccaaagctctgggatttcaggtgtgagccacgatacccagcctataattgtttctttaattttaatttgtgttacagataaattttaaatttcagtgtttatgcttatcaattttcttttattattatagtgtatatgtttaaagaaaatttctaaaatgaattacaatattttccaatgttttaagttggaatttaagcctttaatttacctataaattttttaagtggtatgtgtgtgggtctatttttattttaatatttggcatgagaaatcagttatttcagtgccatttaaaataataaattttgtttatgaaatgctatttctgtgtttatttagatgatgctattttttcttttatcactgaaagcagcgtaattccatgaatacattttctaatactcagccttcctttcatttctatggccatttatcaaacacctttggccatgatgcattctgttttatatattgctgaattcagtttgtaaatatttcacttgtgacattatcatccacataactgagatagttctgtacttttatttcttgcattgtccctgtttagttaaagaattaaggttcatgctttacatgccctacataagcctcacaaaatgtgtagggaaacttgattgggttttctcccattatctgaagcaatttgtgtttagcattggaattatattttctatgaacacctgttcagtctgggactgtgcgtatgtgttgtttctctgtttggggatggggcagggtataggagaagatgacttactcagattttctgttttgtctagatgaatttttgtgtgttgccaatttttaaaatgtccagaaatttatttgtagtattttcaaatgtattgtcatagtcttaagatttcaaagtaatctacactttatgtgtagttatgttctccacctaaccccaatattgctaatttgtacatattctgtttttaatttttttctctttggttaatcttagtagacatttgtctatactattagtttaaaaaattgtttttaaggaaacagcttttgatttagttaataccctctattctttcattcttttccagtttattaacttttgcttttatttcctttattttagttttaagtagcctaagaatagacaaggaatgaagttatttttttttttaccttttcctagcttcttgtatgcttaactcatttatttgtattttcttgttttacatgaatgcactgaaacatgtttgtttctaatcaaagtacagctactactatagctgcatccgctaatttttgatgcacaatattttcatttgcctttcatttctaaatgctttgatttctgttgacttcccctttaccgtatgaattatttagtagtatattttaaattttttgaacatatgactctgtacccattgctaatttaattgcattgtatacagatcaagagattcatataatgctgatttcttgaaatttgtggtgatattttgtgatctagtgtatgattaacttttgtaaacattcaacatgtagttaacatgaaaacatgtctcctactttttgctatatttacctgaagcttgttcattttgttcttcaaatattcgatatacctaccttttttttttcttttactctatctgccagtttctaatagaaatgtactaaaatttcctagtgtggctatatatttgtcaaattctgcttttcattttctgaggttttatcttaagtgtgctgaggctgtttttagttgtctacagttctctatccatattagtaatttttcattaaatcctattttgcctgatacatttgcaaccacttgtttgttttggttagatttttttctggtgcatttttctatccttttattttaaacttctcagtgtggttttaccataggcatgtctgttataaggggcatatagatagattgtatttaaaaatccagtctgataatctatgtatttaaatagattagtctaatctatttaaatgtattgtaattactgatctgtttggttttatttctgaccaccattgaagtgacaggttttccccaccttttttctctttgtttcaaatctacaaatgttacttgtattctttgctcattattcataaattttagcatatatatattttatttcataacacggaaatttgaagtagattatacttactgtgatacaacaagcagaattgactgatacaactctgtggtcttaccctgggttgtctgaaaaataagctagctaggaccagagccctcacccttcaccctaagtagaagaagccgcacttgaactcagcttcaagggaccagtggctccctggcaccagcagcaggcatagtaaatttccaccgtcccaaagatttccaggtgtgaggcagctggcctttgtagagcacctcagtaaagagctagtatctacactctacactgcctcatgtcaagattcttgtttaatcccccactatcaaggctactcttatgctcatcctatgaaaagtaagagtaacagtttgtgtggcctatgtcctgtgataccccacccttggcatgtttagcagaacaccctggtctctgctcagccttccttggggtcactaggaacctataccttctcttcttcctgtctcctggcttaaatttctccaagcctgttccttaacccatttgctatgtgattgtgaaatcattctcagccctgttgcttagtgagtggtctgcaaaaggaccctacttgcaagacagaagctatgacatacaacccctaaaacttaaatatgtatctaaaacaataagtatttttaatattgtaaatataacactatcgtgccccatgaaattagcagtttttaatatcaatacttaatccacattagaatttccccagttctccagctgtttttttaaatcaggatttaatctaagactaaacactgcatctagttgctatgtcttttacatctctataatctttgttcatgacattgacttgcagaaaaccaaccagttgtctctgagcaggtcattttgcatgaatttaattgcttccctgtaaagttgtttgaattgttcctcttgtccctgtaggttctgttagctgaaagtcgtactaaagccttgcttaaatgtaagttaaacattttagcaatactatatcataggtgatatatagcaatacttcttatgtataagatcaaaagatacataataagttttgttttgtttttcgccattagtaacctaaatttgattattgggttaaggtggtgacaaactcatccatccattgcaagcatcaatatgttctacttgaaacaataggtaatcatttgtgaactaactttgtcactacgtccagttactgtcaatatttttataactaacaattttatgctgaaatactaatttcattaagttttgcagtgtaacagtttttaactatttcatttcttctacatttgctcgcactcttttataatgtagagctttccacagctttctataactggggctatttgattacctggaaataaagtgcatactgttaatgtaaaaaaaaaaaccacttaatttggggttttaaatggccagttttcaaagtaaatttgtttcttggaagtgtcaaatgatgacagaagatttttctttggcttctttcttatcactgtggactcagcctttcataaatacagtgtgtgcaaatcacccatgatctttctttctgatgtctcagctttgctgagtagaagctccttcagactagcttctgggttcttgacatgattgtattaattcttacaagtttccttcctttatggaacagcaagatttcccaagatcactatataccttcattgccccacacttgccgccattcttctcgccaaagatctgtagagaatggtcctagaaaccaaactccggtcctaggtgtgcatcttgttcctgagaacaaattacttctgtatcatgttctggccagacttagggaaaatatgtgaatatatacacttaaaatccagagttgaaatcaatgtctataattgttttatcactgagtttaatttctttgattttctaattgcttctctttcaccttgagagtcttgagtgctattaactttaatgtaagtatggatttgatttattctacaatgtaaatgtttttaaataacagcactgctgttagtacagacaacaaaagatgtaccatcaaagcattaacatgtaaagtcatttgaaataagaatcttttcactttgtagtgtatcacgtatgtgtgtgtgtatacagagatacacacatagtaatttttaaaataaattattgttatccagaatttctgtcttcctaaacataactgccacttttacacactctctctaattgttggtactctcacattgctgtctatagatccaaattttatcttaaaaaaaacaaaaaatgcaaaacactggtcattacattttaagcagatttagccacttgtttgagcaatttttgtgcttgtgtgactcatgttttctgtgaattagcttttttttaaaagctataaattatgagttcttatttgtatttcttcttaaaaatatatgtagtctcacataatagtaaacatcacacttttaattcatcttgttgtaaagaaataagatatagtttgacgatggtattcctgtcattaataaatcataggcattaaataatatgatcaaaaattccacattaaaagactgcttacattcttataaacttgtatttggacttcataattaaaataattcaggtcctttttttttttttttcttctttgagacagagtttcattcttgtcccccaggctggagtgagtgcaatggcgcactcttggctcactgcaacttctgcccccctgggttcaagcgattctcctgcctcagcctcccaagtagctgggattacaggcgtgcgccaccacgcctggctaatttttacatttttggtagagacggggtttcaccacgttggccaggctagtctcaaactcctgaccttgggtgatctacccaccgtggcctccccaaagcgcagggattacaggcatgacctacggcacccagctgaggattaaagtataggtggagacaattaaattttatttcatatcagtggttcacaactatggtacagtataatctggatattttaaggtctaaataacattttcttggtaaaacttattttaaatagaaaaattgaaaataatgaggaagaaaataatatccttctctgtaactgcattcatttactgtttaaaaaataatttgcactacttgctatggccatacttcttagtttagttatactaattctatttagtaaaagcgacgataccaacttttaaaaaccaacatgcaatgagatagattagaattaaaattttatgtatgagagtcaaaccattagctccttaaggatagaaatgtcctgtttttcttcaatttgctcagtatatgatatacagtaactgcagaaattaaatttcagagggattaagtgattttcctaagtcctatcttcataaattttaatatatatcttttaaacatttaaacggtatccatgaaatttaatacaaacattattagcaaaaagccagttagttgaaaataaagaactaagattttgttttttggttactattccaattacctttctattaccctagagctgaataaatggttatttgtgtgaattaaagtgggccacttaaaaaatgtaaatgtaaaataaagctattttattcccctcttgtgtaaacagcagttttcctgtaaatcagggtgtgttttaaaaatcaccatccctttgcttaaagttgtgttattctatataaagaagattggttctggtggtgtcctgctgtggtaaattttgaaaagatgtcgaaaaacttgtcttatttgctttgaagtaagaaaccaagataaaactgaaataaaattaaatggaactagacaacatttcatctcatgctattttttcgggaaaaaaagtccaaatgtatatagtaaccttgaaagtaagtctgtagacattatcaaatcaatctaaattgagttagtgtatatgtggtaggcagaaactggtagaaattagtttatcttccccagactctttctgttttctttgtacaaagtaggataaacttgtttttagacctgattatgtttctttgttgcttttttccccctttccctaaaagggcaaggattgtccatattttgttcaattcacaccaggcgttagaacaggaaaccattaaaaagccctaggcacatgtatgacatctgtagctattattggaaagatgtgttgaatataaaacctgaaacatttccaaataaggaatataaacaatgatccccagtgttttgtagtttcactgcttataaacaacaaattgaagctgtagggctgattcttgtgatatacatacatgtgaacaacctagcccacacatattcctctttatcttattaacaggatctctacaaaatgcacttcagtcccattagacaaatggtaaggctgttgtatgactaatcttagtggacattttaaaagcttattttaaatatccattgcttcttttatttaaatgtatctttttctagttggatccattcattcctagagcttctcatttataagttcagattgtattgagaatatttgtgtcaaaatgcttgattcatatagcactttctgaaataattttgctaatcttcaaattgtctatttgaataaaaacaaagacattaattacaaaaaacttttgaaaagactattgtctcattaacttttatgctaagaattatatatcttatgtaatatatttgcatatatcaatgattttccactcatttgaacttttaaaagttgctaattggtaaaggaatcatctaattctaccttgatgggtttgaaaggagaacttaatagtagtttatggaacgacttcagaaaaactatcgtatgtcatctattgcctgttgcattcagaatgaacaacaacttatcttcatagaaaatggtactactgacttagttgctctgccctctatgtcattcttagtgaaaatgctgtgatcaggtgagctcttagtaatcatggctgtctgatgtatcaaagaggtttattaaaacttggaagcagctgtggcatagtacaatgttctcgatcattgtgcatcgcaaaatttacaaatgttgagagtgtggcttttctttagtctgtaaatggcagcacccaatgacccagattccccttctatttcacaggcgctcaaaagaaaacaaaaaacaagctgccagctttccaatttaatccttaataataacaatcttccaagactccatattttcctaggtcatttagacaaatgttattctacatcaaaatataattaaatgatccaatatcagtttaaattgcattgttggtgtattgtttccaaattataattgttaagtgttctgtagctcactgaatatttttaagtttgttgtagtgcccagaggcaaaaattgcaatgggtacaattttataaatcaaactcattaataaataatgttttcattattactggaataaagagaaccatataggatgaccttttaaaaacattactacttacaatttgaaatggctttaaatggaggattgtacataatgtattgtaatgagaccatcccttccagacctataggtatttcacatcagatttcacagtgaaggaatgtttgagagcttcccgaaagttagacaatgcatttttatcttataatgttttcttccttaaatttagaagttttgtactagtaaactttggttacttatttgtagatttcttttcattgctcatggtgaagataggaattattgcatacaatgattaaattctcccgtatgaaaattatgtttacaattaatatatagaaagtacaacttagctcaataacattttaatccaccctcaaaaaagaaaaggaaaatccaagatcatatattaagaaatatatatatgcctatgggagtttaaaattcaacttgtcttcaagaagacaagaaattttacctcttttttaggttgcaaaattatttctatacttcttatttcttcataagaaatagtttaaaagatgttgaccatagctgccttacctttataagaatttttgccattctaacaaaaaaaaaaaaaagaatttttgatagacattttttctgatacaatcatgaaaatatacaagacactccaaaaataacattttccttgatctctatggttaaacttttttcataaacacatacttttgctttgtattgtaccattcaaagtaggaatcaaattttaaacatgatggtaatgttcaaactgataaaactaatattcatcaaaaataaatattagtacaatatcccacaacaaaaatgaaccactgcttgtaattatttaaagctatgaaattatatattttatatgataaattacaactattttataattaacagtgaacatcatagtaattaaattcgtgcagtatcctgtgtcttatgagaactttcttttctttaaactttcagttttacctaacttcatgatgcagagtggttctgtttgtaattgctttgtaaagttctgaagtgcaggtttagattcacagtgcaggtttaaagctgtctggttaactatagtctcaactgggtaattcttatataactagattgatgcagctaagaaaataactaaagtcagtcaaaagtattggtcaccaatgcttcaaacaatcccattaatctggctggtgacttcaaggatgtctaaaacttctggataataacttgtctcttgttatgctaattaccctttccacatttagcatcacatctgaggagactgcagattgagttccatatcatttcaataaatgttatcttaaatgttaacatacttcaggttcaatgtatatagtttagggcttctcaaagtttgttccacagatttctagctctctagattggggatcatcagcccccagccatggactagtactggtccatggcctgttaggagccaggctgcacagcaggaggtaagcagtaggcaagaaagcactgcctgcgctcaggctcctgtcacatcagtggcagcattaggttctcatggaagtgtggatcctattgtgaactgtggatctaggttgtacgctccttacgagaatctaactaatgcctgatgatcagaggtggaaccatttcatcccaaaaccattaccccatttcccccacccccttccatgaaactggtccctggtgccaaaaagattggggaccactgctctagataatctgtgtttcattaagatctggaaatgctacatactatattccctccatgagttcacaatatagcaaattaaatattctgagtaaactactatttcctaaatttatttgactgcaggatcattttggaagcaccatccactaacatcccatagaagacattgtgagaaatactcactgcgtcacaactcattaatagcaacaaagttgcccctgaatccggtccaccaatcacacatcgtttgcttcattatctttgtctatatatagatataaacaaatatatatatctctctcaagatttagattgtcaggtgagtagagagggagggagggaggagtattgtcatttctaagaaatgtcaaaagccacaggtacttgaaaaggcctgaaagatcagggacttggcttcctttagagccttgaacaaattacagaactttgcttggttttgttttgcttttatcagttttattcatcagttgagagtgtcagaaaacttccctttgagttctcaagtttcatggctcaaggcgaattttctgtttcttttctgtttttaagaacttgggtctagaataaaagataagtaacaattcagtcatacccttttgcagaacactctcagtatttgcctggcagtttctcttgatgcatgcgtgcttgattttagagaaagccgtgaagttcatgcattctgtagttctgagagtgatctctgttacttgaagaagccaaaaatgcagagccttctgtacccctccaaatcttatttttaatgaaatattatatgattccaaggaaatttaaacctatgcaatgatttcttagagaataggtgagagagatgcctgagagataacagaatagggacgtctgggatatatatatatatccttggggatttttttgattatagaacacatgagcattaagaaatagcacttatttaaaagagactgttcagttgaatacctgtgttgctactaatcacttcatagctccttactttcctatttaaacaacaaaagagagttggccataggaatttttgtgttgaggtggggaagtttataaaggaatagaacacataatcatttcaatgtctcttttaatggaaagtagttatttgcatttgtcacaaattaaacttacctaattattaaaatgctgccctttggtttttgacttaataattaagaatgacttcattgtgattttaatcccagagagtcagtttatgtctgtataacatgcatggctttccaaaaaggtgatttatgtaattaagagtgagatatagtttatttatgaaaaggtgcttttgtgtggttaaatgtttaacctgagctaattaggagccttgagaattttagttagcaagttaaggcattcaaaactctgaatgggtatttataatttagctttgttccttttattagatgtgacagagcaatttagtattgtaggttcactcaatggctatcgcagcatcattcttcataatttttattaattgtatggttttccttttatgttttcaggtgagagtatttcttttctaaagatagaccaaagacccactttttttcctgagtaattctgtctcttaatgaatgctacttaatccattagggttcacataagtattctatcaagatagaaatttaaagtaaatgtgacttcattaatttaaacttgtagtattttgcttaaattcatgtaatttttttaatccatagggtaagtgtggagattgtcaaacatgttaataaaatatttgacactgtttcagtgaagagctgaggtctaatgtcctctcttcttgaatctggactggcccagtgacttaattgaaaatcatagcgtgcagcagacattgtgtgacttctgagactagttcagaaaaggctatacctgtggcttccatctgattcccttgggcatttgctctgggacaagccagatgccatgtaagaaagtccatttctctgagtccactttgctagaaaggccatgtgtagacaatctagttggcagccatggcagatctcccagcttccagctcgcatcaatggccagccacgtaagtgagccgtcatggatgcccagacctgtggagccttggcagcagccgactctacatctgactgcagccttgtgagagaccccaagcgagggctgcccagcttagcctttcctgaatccctgacccacaaactctatgagatgtgaatatgtaaaccagaatacatattgctttataccactgagttgcctgatgatttgctatgcagcaataacgaccagaacaagtaggttcaatacattgcatagatctgttcttacatgatgtgttttaaaagataaccatgatttaaataaattactttatctcaaaaagctaatccaatgttattattaccttgtgtcttagtctgtttgtgctgctatacatagcaaaatacccgagactaggtaatttataaagaacagaaattcgtttctcacattgctagaggcaggaagtctaagataaggcaccagcagatttggtgtctggtaagggattctctctgttttcagtatggcaccctgttgctgtatccttacatgacagaaggcagaagggcaaaaagagcaaaagggacaaaaaaggcttcgccaattccctccagcccttttataaggcattaagccattcatgagggcagatcactcaagacctgatcacctcccaaaggccacacttcttaatactgttgcattggggattcagtttcaacatgaattttggagggcacacaaatcttgagggagattatagcacctcctgagaataagttttagaaattagtaatatattattctaagtatacataaataatgtgtgctgataatataaaccataaatttatatcttaaccaaaaaacatttaataagattatgctaacgtaaaaattaatgtgcttaagagtttaattctccatgaattataaaatcacaggcagataccatatagtttatatttatttaaagattctaagagattttctgtactcatactttactacccagaaatcaaccattttccagtaagttcaagttggtgagctatggtatagaattagaacttttcaggttcttgctgagagccttttatctgtgtacatttaaactagtatttttattatagaattaatatatccacatgctcaaaactcaaatcataaaaaagtaaaatgaaaactcagcctccctggctcctattttgtttcagtcccacaggcaacccctgatcacagttgctgtttttacatttttaaggtggctatgataaaacttaaaattaaattttacacgtattcccctttttcttgatttgtcaactttacagaatatctactcttgattacctgctattgtaaatgagtaatttcttacatttaggttacctcctatctccctttctcctgctctgcttccggttatgtataattttcactttaatggttatcttcagattaattgttgcctttatagctttaaataatatacttaaacatctatttcttgatttacccaccctggccaatatttcttactccttgatatgaaaagggaaaaaataagaatactcttccttatattaacttttccttgattcatcgctatgtttttataaatccattgttacttttatctaaaaatctgttttattctactcttgatgaatatttgaattatccactttgggattattaataatgcttctatgagcatcttgcactgtctttggtgcacaaatgtacatgtgttgctaagtctgtacactgtgagttaaaggctgtgtgtataataccagttttcaaatagctatactaaattatactcacaccagcagtatgagacagtaggaattccatatcctcatcaataattggtactgtttgcctttttcattttagctattctgatgggtattttatggtataaaattaggtttaattttcgtttccttgaggattaaggaggttgagcacctcttcatatgtttgttggccatgtttattttatgaagacttatatagataggtctcttgcccataattgtattggatttcatccatctccctcctctctctcatcactgtgtagattttctttatatattctctgttacaacccttttatcaaaaacatgggttgtgggtatctgcttgtgtcttgctcttttcactctctatttggtaacctgggtgaatagttattttaagctagttcaatctatcaatcttttcctttatggatggtgcttttatattctgttaatatatctttccctattcccaaatcataagcatattctttcctatttttatgaagttgtattattatttttgtcatttattttaaaatctgtaatctacctgaaatttatttttttctgtggcataatctagagttacatttgtgttttaaaaatatatttatacatagttcactcagcaccatttattttttatggagaaaatatagatttacttattactttctagtctatgccattgtccttttttgctatgatgctaagacctatattgtactgctaaatagaaatggtgacgatcttctcaatatttgtagaacatgtttagatttttgccattaaatatgatattagttctaagttttttaatagattccctatgttaggttgaagaaggttccttctgttcctaataggctgagagtttttaatcatgaagagtgttaaattttgtcaaatattttttctacatctgtttcttttgtctgataatgtggtaaactacattagtgaatttttgaatgttaaatcaagtttgcattcctggtgaaaatcgatttaattaagataatattatcttttgtatatattgctatgtttaatttactaacagttgattaaatatttttgcctctctatttatgagtgttactggtccctgactttctttattgagtaatgtatttatatggcctaggtttcatggtaatgctagtttatataatgtgtgggaaagtgttctcttctttattatttctgaaagagtctttgtaggactagttatgtccttctcaactgtttgagatgtagtaatctcggcctggagttatctttgtttcaaggtttataaatatatattcgatttcttcatttgctatagagccctttaagttccatctttcttattggatcattactggtaattgggtcattcaagaaatatgtcaatttcatataaattgtcatatattggcataaataatagaattcctttgtttttctattattgtctgtggaatctgcagtggtgttccctttttcattcttgacattgatacagtagtccccctttatccacaggaaatacattccaagatccccagtagatgcctggaaacacggatagggctgaactctatagtatactcacacacctatgataaagcataatttataaattatgcacagtaagattaacagcactaataatagaacaattatagcaatgtgctgtgataaaagtcatggaaatgtgtgtttgctttcatgcttgtgtgcactttctctctctgtctctctctaaatatcttcttgtgctgtactcacctgttttcaaacctggaaaactgataacgcagaaagcaaaactgcagataagaggacactactgtaatttatgtcttctctctcattctgcctaggtgtttgttaatttttttcatcttttcaaaaaaaaatcagtttgatttcattgattttgtttcctgttacatgtccatgttccattttattggtttccattcttatttatactgttttattctgcttaattgttctttagttttttcaagtggaagcttagataatttattttagaggagattaaatatcttcaggccaataaatttgaagcctttgctttaatgggcaacatattactaactaagcctcttccaagaaaaatcgaaggcctaaattagaagcataatcttaagggaaattacaccaaaagttaaaatatatcttttttttttttttttttgagacacagtctcgctctatcgcccaggctggagtgcagtgacgtgatctcggctcactgcaacctctgcctactgggttcaagtgattctcctgcctcagcctcccaagttgctgggcttacaggtgcacactaccatgcctggctaattttttgtatttttagtagagacaaggtttcaccatgctgaccaggttggtctcgaactcctgacctcatgatctgcccatcttggcctcgcaaagtgctgggattacaagcgtgagctactgtgcccagccaaaatacatcaatttttttaaaataggaaaaggtactagactgttatatagtaatattcttccagatcttcaaaagatacataacctcagtagcataaaagtggttttaagaatagaaaaaaaaaaaagaggaaataactttccaagttacttggaaattcatctagtcttaaactaagtaagaatggtatgaaaggatgaacaataggctgatttcacttataaaaatcaacatcatggtagaaaaagggccaattatggttttaaaaacctaaacatcttcctgaccataccctctctttgattttaatattatttgtgcctcttctctttcatttctttatgtttatcagtcttaccattgacttttctgtttgattcttctttttttttttagttttattttttgaggaaacaatttttgccctcaaaattaatgatttcaaatgtggctgtattttctattttatttctttgttttttatattcatgtcttcttttcatttctttaggcttattttttagtgttttcaacactttatatggtttagaaacttttttaacatctttatgattgaatattttaaacatacacaaaaatagattagtataatgaacctccatgtacccatcagctagtttccataatgagcaacacattgccatcttgtttattttcccatttcataattttactttaatactgcaaagcagcttcccaacatcacgacatttatatataaatacttcagtgtacatccctaacagaaactcttaaacaaaatcactgtgtcatcattccatctgacaaaagtagtgaataattctttaaatatcacctaatacttcgtccatattaaaacttattcaaatatctcaaaaaaaatctaaggatcagtttgtgtgcaatagaatctaaaatgcacctacacgttgcttctgtctattatgactctttgcattcttattgtataattgtttttctattttttatcttaatttcttagaagttagtgaaaaaacagatttttatatatagaaaacaatcctggaattagcagattgctgccttatggtatcatctaaattgtttcttcattccctgaattttctgtagttagatctagaggcttgattggattcaggataattctttcagcaagaatatttcataggtggtgctttcagcttactacttatttgaatccctttgtaaggaacatgtcttattgctgcacagggttcagatgatagccacccaatccttcctttatataattcaccatcactctttcatttgatgtttttatcacctattgcaatcgttctcttttaaaataaacatttaatttttaaaatgttgttatgtaatttcttatacatttctacatatttctaaatttttattgtgactttctctgttatgtatgttgtttaggtaacatacttcctataaagtttcctaatgtgcagtggtgaggtttttgctcgtttttaggtttctttttgttattgatcttaattgcactgtggtcagagaacaagatgtaagatgtgtatttatgggctctttagtgtctattcaggttgttttatgtcatagtatatggtcatattttttctctatatgttcctttccttataagaataaataataaactttttctctatatattcctttcctaatatgtttcatgtatgcctttgctttaaaacattattagatgccactttctatgttcatttgaagattataccgaagtttctagctgttctgcttaaatacctgatatcctttagtctgtagtagctggcagttattgagagtacatcaaagtctccattatgatgctggatttgtcaatctccttataattgtatccctcttttatattaggaggctacgttgttaggtgcgtaggttggaatttattatatctttctctggattgttcttttttctttatgtaattaatgaccttttaattccctagtaatattttattgacagccttttgtctgatattaacatagtagtacaagtttttttaagttagtacctactaatgtatcttgctgcctttcaatgttgtcatatttagatatgactcttagctaaaggtaagagacattcagtgatcactggttttattttttttagtttgagaatctccgtgtttcattatttcattttaaaacatggaaaatctttagaacttttttcttaaaaagaatagacccttgttcaaacaaaatacttttaattaaaaattgagtttatttttatgtaaaaattgttgccattataaagcattctttcatattaaattataaattatccatgatatgattttttcctttaaacaagaaatgtatacattatcattcattgcttttccttgacatttatgtattttaaacaataaccattggggttttcaccttctttgtactttttatcttaaagttagcattatttaaattaatttaggtattttccatcaaattattggccctaaaacctttagtgctatttttatattcagtatatatttacattttaattatatttgaaggtatttaatttttgtattcatttgaggaatgaaatataacaatatatttttcattattttatcatatttatgaatgactgggttgcactggtgcaaattattatcattctgatacattatataaggctgtatcttccaaagtaagctttaaaatgtgctcagaattgttcattgcagaaaggaaccttgggagagtgctgggaaacaataaaaggtcaagtttaatgccttcaagaacttgtggtgatgctgttgctagcaagaacatactgctttattagttgcatagctttattagtaggtgcagtttactaccactcagtatagtttccagcctttcaagtgaaggagagctggcttaattaattatggcatttctaatctcacttaatttgttattttagtgaagccttcaacaagccctactggtttttcccccaggtgacagtaaatattacagaaataatacactttacaaaatgggtattgaagtgcacctctttggaaagccatatagtgcagacatatttatatgacaggagcattctaaatgggatctcatgtggcctctttattttccatgaagatgcacatagaatatgaaagggagtaaacatgtggcttatgtgggagcaattacaaaggtctctttgtatttcctaagtccaaaggcatccattcacacctagttctgcatggtttcagttgcttctctgtcaatttttttcccagtgcatatgatttgaaaactgtagttactgtgacagtattttggttattagatatttttgttatggttttaaagtaattaatcccttgctactttatacgtttcatgacagtggtggaggaaatggggggaaacctttggaggcactcctgaaagaatggagagagaaattaatctccagtcaacatagggtctaatgcagttataagagaagcaaagatttagggccagccccctgctccaccacctctgtcaattcaccactggatgatgaagcccacaggggtgggtgtgactcatctgcatatccagcccctaataaatcaaattgtgcaattcagggaatatggcaattgaaaaccagatgcttagaccactaagccatcccttctggcacatcgtaaagcatggtgttgtaaatacagcagataattgaaatttagatttcagatataggcactgttagcagccctcctctagctttcattgctgagagtcttccaagtgtgtttaacagttcatattaaggcaattgctgtcaaaattaattaagcatttttattttttcatattttttaatctcttctttgatgaggagagtattcataatacaaacaaaagacaggcgtctgaacttaaaagtacatccaaactgaatatggaaaatattctatagtttgggaaataaagttgtgaactccccatttggtttctttcaagtttttgctttaaacaaaacacaggttttttaagaaaaaaccttgctactccattgattaaaactgtcatccttctttgtccatcatataatgtactttccataaattagctgcttcacttctttttataccaatcaaattacagtggtccttaggcttaagtgggtcacaggacttggcttcttataaccctcaaagccccttagctttttataaaagccatcaagcatgccatttgatctgtacattttctctttttttttcttgctgtcttcaatattatggacaaaatttggaatattttagtaggttgtctacattttataaaacctgtttttgtaatgagactgttacaaatgagagtaatgaatgcaataaagttaagaatttgttgaaatgatattaccttattcaaaagtagatagagtaaaagtaaaaagtctatgaagagtggtggtttgaattgggcaatcaacctgggatgaatgtcaccatttcatccgtgttagtattaggcatttcaaatggcaaaattatatcaccaataatattctttcaaaaaggaaaaacagctctaccaggcttgaagtgaccctgaccatcatagctattcagacagaatgggtgttttatcattccatgtgaatatcgtgtgttgatcggaagtcataccaaaaaaaatacttaaagtgcatcttctaatgtgacagtgtaatcataaggacatcagagttaagccaattattctagttcacagcagttttaaattgaaagctatttttgtgcaatggcatctagatgaatgtgattctcagagacaggtaaatagtgtcaggctctaaagattttgcaactgtgatccaaatgatgactgagttcccgcagtgaggccataactcatgggcactcaccagtctttccagtactgagaagtcatcattagcaccctaatggaaactgaggatcatgatagaaacgtactcagtgatgcatttgacagctgtacagagtaacttcctttagagggaaggattaaaatttgacagagtttgagcataaataaggaaataaattaagataagactagatctagatgcatgagcacattgaggattgaattattcaatccaagtggacagaaagaaaataaatagattgttatatttcttttttaaaataatagggtaaaatgtgataagctgggcttggggggatgactgagttgctttgaaaaataatgggaaagaaaaccaagcagttttgctctgttttaaaccatttggaccatagccacagaattcagaggaagagaaaactatgttaagtaaaaatcaaccctcaactttcactatgttcgggcaaaactctgggaacagtgagacaaattcatgtcacattaatgaagagagttactgacttacactgtcccctttctattcctttgtatgtctttctgcctcctggtctcaacctctttgtgtcaataatagagatttatgggaatgactgccaatcataatgcaaagtatatagaatggtgcaacacttatgactgtctttttttttttttgaggtggaatcttgctttgtcgtcaggctggagtgtagtggcctgatctcggctcactgcaacctctgcctcctgggttcaagtgattctcctgcctcagcctcccgagtagctgggatgggactacaggtgcccgccaccacacccagctaatttgtttttgtatttttagtagagacggggtttcaccctgttggccaggatggtgtcagtctcttggcctcgtgatccacctgccttggcctcccaacgtgctgggattacaagcatgaaccaccatgcccggcctgcagtgaggccataactcatgggcactctcttttttttttctttctttttttttttctttttttctttttttgtttgtttgtttggagatgaagtctcgctcttgtcccctaggctggagtgcgatggcatgatcttggctcactgcgacctccgcctccagagttcaagcgattctcctgcctcagcctcctgagtagctgggattacaggcacctgccatcatgccaggctaatttttgtatttttagtacagacagggtttcaccatgttggccaggctggtcttgaactcctgacctcaggtgatccacccaccttggcctccccgactctctttttctgcaagcgcttaatccttgggcttactcataaaatatgtgccaccttgatagggacatacctgaccatctgactgaggagggcaaagtaggaggtcagcaaacaaatttcatgccctggctcctttcactgtccatggcacttcagcctagtgctgtacaccaactaccaaacaaccagtcatttctctgtttttcctttctggtgagatggcaaatctgagtccaaaatctcattgattctccatttcctgaagtcaagggtaggactgagtcaattattttgttcaacttttttgtatccagtggatgtcctaaccattactgtttctgtatgcatgtacttcagtctttaagaaagaatgaaaaccaggtttttttctttattgtcatatctgtaatttgctcctttctcagaggaaggtcatccacagaaaattaaccaatatgtttgattctatagaactatcatttttgcgtccagttgccattccttctgaagagctgttaaatgcagtgattttaatctgctttgattgcctcacaagtgaagaggtgatttgctgtattttgtagaggtgcatcaacggagtaccctcagttacagaattatttcccttgtaacaagaagagaagagcaaggtttacatcaccactgtgcttaaaaactcttatctgtcaggaagcatgtgcttttctgtgcaaccctgggagttcattaaaagtgtgaggttgcctcactgattagatatggcggagtgattgggcatagtgctgtgggagaaaccttaatgtaactggagtgaaatgaaaatctctgttttgttcataccaagggaaggtttgattaaaaagatttcctctttttcatttgggacactgttttgttgtgtcatgtggcattgagtaagtgatctgttacaggtttgaaacataactgcttcatgtatgtttttaaccattccttgctattattctcataacatattaaaagtacagttcaggaaagatccaaatatttacaacagtttctctggggtttgttatttctgcatgcacttgtgaaaaggagtgctggcccacattcctctgctagggagtatggtgctgcagtcagcttcacaatcagatggcaggttgggtaagttggtttactcactcagtcagttaatatgagtatccactataaactaagccaataaaactcaggcagacaaccggaggtgtttttacatggctttctttcttccaactttgtaagctagaagccaggtcagtcttcatgaggatttactgagtgtagacactgtgctcttggagcctcttgggagtggaagtggagagagacgggcagtgatgcacatgctatgggaaaagattggcccattagtgtggggaagttctttatgaagctggtttgtagctcttaggcaaaagcaatcagaatgtgtaaacagtcggccaatttcatcctctaccagttttcattgcataggattttggccccaaacaattgctcaactaactacccatttggtgagtctgaatgggattcaaggattaatccagagatgatatttggattaaatcatcactgtctaatagaagcagttataaatatgtaaattaagcaatctgattatagtacaccttggctgcttctagttattctagtaattgtctatgcagggttagcggaagagatttaagcattagaggctgaagtttttcaaccccaaagtagccaacaaatggaatagaagttaagaacataagacctttagtacttatggattcaacatttgaaatcatatacacatactacatgtaagccaaaggcccagagcttgtaataattcataattttgccgtggcacaaactgcatcatttacactgggaggtttgtatgtggagtgatgtattttcaaagaggctccagaaaagatcgcagcattggcgacctctcacttttctgcaccttctcggggaaatagatgaggagggtggccattagaatatcctccccacattcactcaggcttgttgttgttgtttctagcaaccaccacctctcctatttagatatggtcccacagagctatcactatttaaggatgtgtctgcgaaaacatttatcatcatctcagtgctacaagtctcttacaattctgtcaaagatatgggcttggattagcagctacatatcagttcttatcttacacttggaatgggggtgaggttagagaaagaatagcagtgtgtttgggatcttgctggtgctcagttgagttgaattatagaacatgcaaaggggaacagtagacgggccattcattagtatcttctctccagcttctgtgctccttactccccagaatggactcttcagagcaaaaagtgtatacattttttcatctctgtatctccagtgcttagcactggagcaaaggggaccctcaataaggacttgtgaactgaatgattcctgttttgctatgggtttgctagccctgttatttctcatttgatgatatagttttgttgaataatgagcgttacccaaaaacctttcccttgaattcccgtgttcaattttgcttttgattacagagttcctaaagcagaaggctactagagggagaaggtactgagtgaggtcaaggtgtaagatgcctgtggacatggatgtcacccagggtgatactaaaagataaggcatgagagagggagaaaatattaattaaaatgatggagcaagaggaagtgctgaaggaccaacttggagactctcaggtgtggacaatgaaaagggaatagtaaagcagcatggggcagcttccagaggaggaaacaggaaattcttatctagaaacagctccaggatgagagtgggcagcatgaagaaaatgatcatgtctcacttcatagggttgccaaggaagtggtttctttggggaaagtttattgtcatttacatcaaggtagcagagacaatacttaaggaagttcttgagcttatgaaagagtttcagggcatcctaggaacagaggaggagaagggtttggaggtacttgggaggtgatgcaccaatgaaggctaaggaaatgccgaaagaagaaagagcaatggaagaggacagttgccccaagagttgtttctaccttgacccacgattaagtctaaagaaaagagatagctggaagaggagaggaatatcgagcaagaggttcaaaacagattttctgagatggtgggccttgcttgcagtcttgcctcaagtgtaaggtccccatactgatcaacaatctctagtctgtaggttcaggatctggaggtttcagcatggaagtttcctttctcagctggtgagaatgtgattaactcaagcttccagcgattgtggaacttagttgattttaaatattggtttaaatgtattttataaataatgaaagtcattttaaattacattataataaataaaatataggtgcatatataaagaaacataaccagccaggtacaaatcagtgcattctcttttacttcaattatttcaatccataaataaagattagctttcaattgcactttaaattctcttgccagagatgcctctggcaatggttccagctggctggcaacttcgaatgcagagacagtatcatattgtcatattcatctttgaatccccccagagtccagcacaatactctgcacatggagtctagcataatactccagacgtcataaatatatattctattgaaagttaactaagaccctttaaggaaaaggaacagatttgtttacccagtaaaccccttgcaagtagagtatctgttgtatttcagtcctgtgctaagtgacagggataccaagatggatgagactcattccccacctcaaagctctcagaaccaagcaaggcagacagacctgtaaagaaatcttcacctaccccgagatcaatgaatgccatgacagagcttgcacatggcatgaaagtggcactgaagagggagattgagtccatgcagagtgttcagggaaaaagtggctcatactgagttgggtgtgaaggtatagatggctggatatttgccaggcaagcaatggtattctagaaaactggtgtatctaggtatgtgttgagcatctcccctttgccaggcactgttctaagctttgggaatatatttgtgaacacaacagataaaaaccactgcctgcctacttggagcttacattttagctattgataaccaatagattattttaatgggacagtgcatccctctacctctcaagcactgtaaagttttaagtttaaaacatttgtatttaaatagaaatgcatggtggtttccttgtgtgatcagaatatattctggtctggctatagctacttttgcagagtctctcctaactctttgttgtgtttctacccttgctcaaaaaacaaacaaaccttttgctgactgctgcccatgactacagctgctctcagcagttcagacctctgcacctcatttcaagctgtgtttccacatgctataagaacccacgatggtgtagccggctctggatcaccctacttctctccatacagttgtctttgactcttccgctgttcctccttcttcacataagtcatggtaaggattgcttcaagtgcctcttaggttgtctgaagaaaacccttccccaaattgtttattttcagtaggtcttataagctgtgaaattgttttttgaaactagaggcttccaataaagatgtcacaaagtgaaatgcaagaatgacaaagtgaatggcgaaatgattgtgtaggaagatatatgaaggtcataggagagcaacagatgcacatggcaaagtcaggaaggtttgagtctgggtgagaagagggtgaaatgcttatagacgataggcaataaaaaagaccttttcaagaagtccttgaacttgccttattcatgaactaagatggcttgtcaatgcggttctctatctaatagttataaaaaaattctttaacacagttttggcttcctaaattttgagattttttttttctaaatgtactaccaaactaagcacacatatgaataagtgtgcttttcttttctttcttaccctgttcatgacacagctatggaattggtctgtggattaaaaattttctgcagcacattttcatcctgaagattttcgtcatgaagaccagcagggaagtatgcttgtgttggcatgcgtgaaatgcctgtgcaaaaataaacaattgctttaatagtgtgaccttttatctctactctctctgatccaaacctggcttttgtatagctttgcatcagtgtatatgggatatttactagagccaaatttgattgagatgtatttcagccagcaaaatgaaagtggttaaggtagaaatgcttggtaattgctgaattatcccaacttccttaagttttttctatttaccagctttaggtgatgatttggagttacaaatgaagccctagtaccatataaatgtccattttgacagacctggattctaaatatttgagaagatggtatagtttaaatagattaaatgaaagaaggatgtttataatacctttgatcatacattttatgatttagcatgatctgaagcagaccttgtggaaattgctgtttttcaatatcttcaccctttcaataataaacaacattatctttgtgtatcgaagcactgggcttaagcagttttaatatatttaatgatataggaaaactaggggaaaattagctataactgaatgtgggaaagaatccaattataaatagaaattatgattataaacatgtttatatcagtcttgtatttgaaaaaattgttttccactcttttcagcacttttgaaatgtgttatttgaatatgagaaagaaacagtgaacaataaaggaggggttgcagaattactttgttgaacttctaaacttctatggctctgaagattttaaagcagcctttacttgaacatatttgtgtagggagaagtgcacccactggtgttagccttatgttgaaagattagcagagcagatgaaatgttgatcttgccatcagtagttattttcatttctgatacctcgatgagatggatgaatgtgtttggtccactcaaatctcacaaatgaaacagaattccctctctacccaccatcacctctgccttttttaaaagctcacagctgtcttttgacacctggtatcagcttaagtcaacttttacacatttctaccaaaaataagcgataaaaccaaacacaaacaaaaaaactccagcaggtaaagggtataattttaaagaactttattataaaaatttcactggtcttttaaaatctcaatcagaatactgagaaatcttaacaatgaactctaactgtgctgattattagcaatgagaagaaaagaaaatatccaagaaaagatcataggaaaataaaaaagaaataggggtatagagagaaggttttggttttatttcaggtatgcttcatgccatagatttattcctcaaaagttgtatagaaattagtatgttaagaaagtataaaagtgttatctattctgagagtgcttctcaagggaagctctccaagaaaacatttggtcaaatgaatacctcttaattgatctgttggggaatttttatatgtatgtttattcagttggagtttgcctgccttagtatttggtgcattatgacattttatgcttggaatggaccttaaaaatcttcttatccccaatataaagaaaatagaagtgagggccaggaggtgatgtgtctggtcaccagacaaagcaatgatgaacttatattagaatctgtgtctcttttgtgttagaccagaattcagttactgtatcttgatcttcactcattttaaatttatttttattaaacctatgaaaatcattcagcatctcttgcagacacaccagatgaagagaaggtgtggccaaccctgattatattgattatcaatgggatttagcctctgtagcacataatccacaactgcataatctctgtgaaaacagtccattgaaagttgtagacttttagtgcattttacaaagttcagaactgtttacactgagtgcagttttatcccatatgcattcaggtaatttatccacatggcttagtgtgtgtttgtgaatgtgcatgagcaccctgtgtgcatgctctccataagccaaggatttgagccagtcatttaatgttaatgattttacctgctcccaggattagcaagggactagttagtagaatatttatgatctaatcgtattccaaaaaaggttttttttattttaaagatgcaattattagagcataatctctagaataatgaaaaacttgatagtctttcgtataaataatttctctgtttgtttcataatatggtatcttttccttaccctgtttgcctgaaatcaacaaccaagagacattacaaggtaaatacagttaatgtgcttgctttcaaaactaagtcttaggaaacgggggtcccaagaaattttggttctttctttgaccttcagtttcttcttcgacaagatagtcatctttttgtcttgcatatgttcaggtatgaaattggaataggagtgccaagaaatccactagattgttgtggatatacatctagttatatgtgaaatagtttgagatctttgaaagaaaggtaaagtataatgaagacattattataggtttttgttgctgtcattaaaaaagaatccataacataagtaataaggtcaacattccttaagtcagcaagtatttattgtggtgcacagaaagaacactgaactgagtatcaagaatcctagattctggctttgtcactaacacaacatgtaaaaggagaccagtcatttcagctttctgcgtctgagtttccttagctataaaatgggtgaactggcttcactcatcaacaccatccttcccggcttagttaataatttttaggatttttcctgagtctcagatctgtactagctactttaaggcagtggtttttgaagtgtggctcctggacaagcagcatcagaaacttgtagaagctcgggactcaccctagacctactgcagtagaacttcaagcattgagtgcggggcccagcaatctaggttgtcacaacactccaggtaattcttctgatccacgttaaagtttgagaaccactgttaggcatagaaatgaataaaacacagttcttcttaagcagcttttaatttagcacttttatatctctaattgtcatgccaatttctggctatgtaggtgtaaaatctagtggcgtgtgtgtgtgtgtgtgtgtagtaaattataggcatattaattgctaagactgaaacatttagggatggtatctttgaagtcaactgagagatttccaatggcaaggcatttccaaaggcataaaaaatatatatgaagtttgaaaataacagtgtttaacaatcaaattgcatgttaatttcatgtgtgcttatcaaatacagtttgttttactttagcacagatatttttgttctgaaaagtaaaaacaaatattctggaattatgcccagaattttaattttaaaatttacattatgattatgtatgagcaccaggcacataacctgatgttcagatcctctctgtataatgtttctattactctcattctaacattcatgtgtattttcaaaagaaacttgcagttgacttttcagaatgcaaatcttgtttttaaatgcacctgagtttttaaaacataattcagctgcagttaaattttatgggcaagtggtttccaatgtagctaaaattcattgagggggaaaaatcatggccatatatgatcacctgtaaatcagagggagctacttattgatagacaggaccgctatttcagttctcatctgagagatgaaaaaccgagcaataaaactacttttaatttcattttgtagcgacactagaccagggaaattccatgagaacttgggaatgcgatgagcattctcttccaaaaaaaagtatcaatagtgttaagtttctttggacatgtataacctagtgatgcttcataatgaatacacgttcttgtatgaaatcagtgactggtactaactgtgaaatatgaaatgatagcctggtactgataccttaatcacccctggagagaccgttgcccctcttggtgcctggcccctttcatccagcctgtgagcacttgcagttgttagcgctagtgctaaccaaatgtaaacacctttactttccagctgttgctaattggtttgggactaattatagaagtgttgattttaaagctaaaaatagtgcggtgatgtttaaatccaactcattttggctgtcagaaatgctcccttgatcctgaaagtgttgctaaaaacgttcgctttaaaaaaaattgtagtaattaaacttgtctgttgtgagagctacatatgatctgtctgttccctgctctgatgaaagtggtaaagggcaaacatcttaaaggtgtctgaccagttggcaggacacaatctcctgctgaactttattttagacagcaaagccttgtcatttgaccaaaagaggagataaaattttgaaatagctctataccttgtatttcatacagctcattatatccttctatgttaacattaaaaatagaagctgtaagaattatattaataaaattaattatagagcgtccaaaaccattatgttttctagaggcaagtttgaggatttgaaatcacataattaatattgttcaaacataaagctgaagaaatatggtagctgtttggcatcagttgtttatacctctgattcttcataatcagggttatttttctacctttccttccaaatttaaaagtcatcttacagatttttctcaaagtcatttaaataagcaatgaggaaaactatattttcatttttagacatgtgcaatttcatgactcttcattttaccatgtaatttagtgaaggaaaagcttaagtattcttaacttatcatttgtcagttattttgtaatttttggaaaaaatgattttatgtaccctgttaagaggtaaactgccttgtcgataagtatcaaagcactgcacagctacagtgttgctgaagtcaatttgaaattggctttatgtccttataggatgccctaagcatctgtctgcctgccccatcttcagagaatatcaaagaattttgttagtgcaatatatggaaatgatcttggcaagtgataaacactgctcattagttgagatgataaactatagttactacccttttttgatagcttcggcaagggaaagtgtttttgatattatcttaataataataggagatataagtctgtgaatgtgtattctttttaaagtctgtagtcattgacatgatttctccaaatgtgtagtcagttcagaattacccttgagcagattatgacattgtatttggcccaatattactttcaaattgtaattgatatttccatatactcagagaattaagtaacttgttgatatgaatagaatctttacttgctatctaactggaactagatgaaaaattcattttttaatcttgcgtaatgttgatttgagccagaaagtatgttatttttctaccttgttagggatcaacaacaaagttccatttagagtatggtgcagaggcaacaataatgatataaaactttatagcaaatatcagtttttttctttgacactctgaggatacatcccatacagaattataaaactaaaaagaatatttattttaattaactgtcactgttaactgttcatggattgagagactttatgatggttagattgtgatactctccaaattgatctatgtattcaatgcaatccctagcaaaaacccaactgttttttttttgcagatattaacaaactgattccaaaattaatatggaaatgcaagagacccagcatagccaaagcaatcttgaaaaataagaacgaatttggaagaatcacacatcctgatttcaaaatttagtacaaagctacaataattgactgtgtcgtactgacataagaatagacaggtatagatcaatgaataaaatacaattgaggatccggaaatatacccttacatttttggaaaattcattttctttaagggtgtcgagacaattcaatgaataaaaaaacaatcttttcaatgaatgatactagcacaactagatatccacatgcaaagaatgaatttgaactccttcctcacacagtgtgcaggaatgaactcaaaatgataataggcctaaatgtaagagctaacactgtataagattcttataataaaacaaaggtgtacatctttgtgaccttatattaggcaatgtttcttagatacaaaaccaaaaacacaagctacaaaagaaaaaataaatacattggacttcgttaacataaaaaacttttgtgctttaaaggacacatgaagaaagtgaagacaacccaaagaacaggaaaacatatttgtaaatcatatattggataagaaatttgtatatggaatatttaaagaactctctacaggtcaataataaaaagacaaatagacatttctccaaagaagatacacaaagggccaataatcacagggaaagaagctcaacatcattggtcattacagaaatgtaaatcaaaactacaatgacatatcactttatacccattaggatgaatacaataaattaaaattaaaaatgaaaataagctgtggcaagtctatggagattttatacccattaggatgaataaaataaattaaaattaaaaatgaaaataagttgtggcaagtctatggagatattaaaaccctcatgtattgctggtaagaatggcaaattattcagacatgtgggaaatagtgcagcagttcctcaaaatgttaaacatatagttaccatatgagcaacaattccactccacagcgtacgccagagaacagaaagcatatgttcacacaagaacttgtacccaaatgttcatggcaacattattcataataggcaagagtggaaacaacccaaatgctcaccagctgatgaatggataaacttagtgtggtatatccataaagtggaatattgttgggccataaaatggagtaaaatactgatatatgctacaacatggatgagcttttgaaaacattattctaagtgaaagaagccacaagtcttatgattctgtttatatgaaatgtctacaataggcaactcctttgagacagaaattagattaatgattgacagggcctgttggggaaggggaggatgaggaatgactgctaatggagtttgaggtttctttttggggtgataaaaatgttctgacattagttgatgatggttacaaaactctgaatatactgaaaaccacttaattgtactctttaaaatggtgactcttatgtaaattacatatcgataaagctgttgtaagaaataaaaatgatcttaaggcaatcctttagatgactgtagctgcagccccgcagacatggggctgcaaacttacaagcgatccaaccctagaaccgcctagctaagctacttctaaatctctggctcagagaaactgtgagagagaataaatgtttatttttttaatttattaagttgtgggataatttattatacaacattagaaaattaatacaatgagctcttggtgttatgtgcttgatatatagagaagcagacacaaattcattcctgtgtaagagaaacagataagaaagttaatgattttggcaaaaatgaggccatcaaatatcctgacatacatgataatcacaggttccaatattatgttaaattatccacctaagtatttttgtaacccgcccaaccctgtctccacttatctgtaagcatatatcaagcccttcataataatatgaatgtttgagagctttcaaaaacaatcgtcttttaaaatttggtaccttaaaccatgaagtgttctttagccttatggaaattctttcttatctacatgaaaaggagaaaattaattttttaaaagtctagagtagaccaagtgtttcacaaaactaccaacccctgcatgaaatgttgctactcaatctaaaagtgagagacattttttttaactcatttcactacaacaaagtgcttctgttgcagttatgtcttactttctttaaaataataacttggctgggcgcggtggctcaagcctgtaatcccagcacttgggaggccaagatgaccagatcatgaggtcaggagattgagaccatcctggctaacacggtgaagccccatctctactaaaaatacaaaagcaaaattagccgggtgtggtggtgggcacctgtaatcccagccactcgggaggctgagccaggagaatggcatgaatcagggaggcggaggttgcagtgagccgagatcatgccactgcactccagcctgggcgacagagctcaaaaaaaataaaaataaaaatatattttttttatttttttatttttatatttatattttatatttatgtaaaataaacatattttatatttatgtaaaataaacattttatatttatgtaaacattttatatttatgtaaaataaacatattttatatttatgtaaaaaacatattttatatttatgtaaaataaacatattttatatttatgtaaaataaacatattttatatttatgtaaaataaacatatttttatttatgtaaaataaatatatttttatttatgtaaaataaatatatttttatttatgtaaaataaatatttatataaattatataaataaaatatttatagatatatttatctgtctcaaaaataaaaattaaaaaaagataacctaatttacttatgtccagcctcttaagctcgtatgttgtctttcttactctgttggaataatgcattcagatgcataaatgctgtttataagtgtgggtttttgataatgggtctttctatatctggtttgttgctttgatgaaaccggagtccacgtgtaacaatagtttattgtgactccacttatgaagagacaggtatccacaggattccctgttagggaacagctctgagccctaatgtcttctgtaaggaagcagcagcatcaggcgtgctttctagaatccatcctctcctctgcttctctgggtaacatccaatacaacttttccactgtcctggagtacagggcctctctgaccctctaacctttctgtagtgggagcctgtttacaattttagaaattaaataggcaatttgaatctctctctgaagattatcctcagagtcaaatttcatgacaaagtaagagttctggatttcttcttcctgcagtgtttctgcctgactttgacagaggtgactttgccaggcaatgttttttcatggattttgcttttctttatattttaatgttgtgaggggcaagcaagtacgtaccttaaggctaatatatcaccatctgtcaccagagtcccccctttggtattcttttcctttctggtttaaaacactcaatcccaaaagcctatggctgagtagcaagaagctaaatgtattccaaagctcttaacatattgcattgtgtagatgacccatttgagcatttcagaaaccaaacaggagagaaaagaacattgaaagcacagaaaagattaacacctgcttccagttttcaaagaaattagagcatactgtatatatccagcgtaaagcggtttactctcccatattgggatattttattcagattttcaattcaatatgcacagcatcacatgcttatgactttgtttcactataggattccacgcagaacttggaagacagagaagttttgaatggtgtacagacagaactactaacttcgccaagaactaaggacacattgaggtattctctttatacagataagaatatctgatttatttcaatttgatgtgttttttaatagtttataattgttcttactttacaagaaagatcaggataagtagaatcatggagtgcaacatgtcccaagtctaacagttacttaattcttcttttctagtgttttcttcatatgagaacttactgacaaacatatatacaaatgatccttaatccatccaatactcttctgtacccaggatttctgaaatacttttttctctcctcaaacagcaatttcaaatgaacatttcagaggtcattgtggtggttttactttgactttagctctttgaaagcaccaaatcctagccactagaccaccggggaaccctaaatttagctctttgagtgctactttgtattgtgctttaacacccttgtaatagtttacttgatgaaataaaatgaaccctgtctatcaaccagggtttttcatgttcttaatgaaggcaactcatttgctgtcagtggctgccatgtttcccagtactttctttgctttgcattgattcccagttcagctctaggtagtgcctgggttcatatcgcagctatgcctctttactagtcctgtgagcttagacaagttactcatttctctttctcttagtttctagtctgtagaatggaaatagtattaaaatcttattcagagggttagtatgggtattaaatgagttaatacatgtagaccattttgcacagtgttgtggttaggataaatcctgtgagtgtttgctgctgtttctactactatcattaatatcacatcatctctattattgttctaatcatcattttgtttaacgcacttcaaatttggcataaggaaaataatttcatatttaatagatggttacttcagcattaggtaaagctactgaagtttataattattcatgcagttgacgtattcctttcatttagtccaaacaattaacatgaaattagctttttaaaaacataggtcatcatcctttgtcatgtgctttactgtatggattctcctcaaacttatttatagccacgtgagcatagttactctttatttagatcgtttctttgactgatgagctatacagtattaaaaatttgatggaaactaggctaggtggtgcctgcctatcatcccagctacttgagaggctgatacagaggatcacttgagtgcaggagttcgagtccatcttgcaacatagggagaccctctctctctctgaagaaaaaaaaaaggcggggggatatggggtagggagtaatagaaaatcttcaagcaccatcttttcagaaacttaataagattatctaattatgtctacctccagaaactaataagattgtttctggaggtagacataatgattgtaatgctcttattctatttggctttaatttcacttatttcagtgttagctttttgaaaagtttgttaatatcttgtccaaatgctatgtgaatagcatcatagagtcaacattagtttggtttatggctgtatgaacaaattagccaagctttcttcagctacagggaattgagagaaatggagtataggaacttaaaaatatatatattcttttatttatttatttattttatttttattttgagatggagttttgctcttgttacccaggctggagtgcaatggcgtgatctcggctcaccgcaacctccgccccccaggttcaagtgattctcctgcctcagcctcccaagtagctgggattacaggcatgtgccaccccaaacccagctaattttgtatttatagcagagacagggtttctccatgttggtcaggctggtctcgaactcctaacctcaggtgatccatctgcctcagcctcccaaagtgctgggattacaggcatgagctaccacgcccggccaaaaacatatatattctttagttaagaaatgtatgtgtgtgtgtgtgtgtgtgtgtgtgtgtgtgtgtgtgtgtatatatatttgattatcaaaacgggcttttcacatgagttttcttatcacctttaataggttaaggaactacaattcatagcaattaagtgacagctagagacttaattgacacccaccactcttgtctacaaagccactatttcaaacattcctgttgcgtgtacattccctgatgccttggtgttttatttcatgctacctgaccaaggctaggaaacttctcatataaaagtgcagctaaaatcagttttatatcaaattcaaaaagtagagtgagtgcaattcccagcactttaagaccctggagtgggaaaaggatgataacaatcttaatgccattgaatgcatgggggaaagcttggaggttacagttctaagacaggacattgattctagccagtatgagatgaaaaacagttgaagtgaaattaggaagccaattctgtctgaattacatggtccatatgctcctggggcagggagaatctcatatgccacagggcttggcccatgcataggactttgggcacgcatccacgtagaagctaagtaaattatttgtagtctatctcaaaatgtcttgtaactgtttaatttctataatcattgctcaagcctttgttatccctcagctacaccattataataacctactaacttctctgtcaaatgtcagtttccccttattctaattgatcccacatattactgttggataaaatgttttaaaccacagaatttatcaagccattccttagttccagaccttttggatttagataagtcttgggtttgagtactaactctgctacttactacctgtgcaatcttggactaattacattacttctttaatatgtatcttcataggaaaattggtatcatggtcacatagattattgtgaagattaaatgagatatagtacagacaaccgacttagcacaatgctaaatgaaaggctgaagaaacattaattgctattgccattatcattgtcatttttacacagattgtagtttattgtaactatttctcattcacccaagcaagactgtgaatcctccaaagggtttctgacacctaatacaggtcttggaatataatagggacatatttgctaagtgaatgactgaatggataaaacacattgctccataaatcataagcaaaactgttaactgctcacccattattaacgcaaacatctttatttaaaataacatttaaaagacattctccaaatagttttacaatatgcatctcttatgaagcaccactcaacttattttgatcttaaaaagacaatgaagcaagaggtttggtggttttttaagaaaattacactttgaatgtctctttaaatagcaagcaatatgtacaaaagaccttcacctcatccctaattcctatctcatttctgactctgccttatctctccactcctgcttccacagataagccttcttccagacttgccttttgtttcattcttaaaacgccagcgcattttagcctatcctctcctgtgtcaaggatatctattcattgatcaaactgtttgcagaggccatctcaaaatatgtgggacatttccccatgttttgatgctttattcctgtaatcattgctcaagcctctgttactctattagtttcagctagattattgcaataatttagtaattcctgcctcaagtaccagtctctcccttgtggttcccttttccaattggtgtcacatatcactgcataaatatttctaaaccatagcgtttatcacacttctccctaattctagaacctgtagtgacttcattttctgcaaattaagtataaatttgctagccagaaatttaacacaccactctgagctttgatctcaagctaatggtttaatctgtctcctatacacagcacctttctttgtttcccttttctcccttcttctttctcctcgttattctctctcccaccttcctccctccctccctctctctaatattacaaccaattgttatgctcacagactatcctcgttcaatatctccatacagttgactttctctcctgtgcatgcccactccatcccctcacctatcttttctgatggaagacccgtttgtccttcttcaggaatagattcctaatcccagcttcccttcctaatcctgtaccctcctctgaaacacatcacaaggtgcctccactttgaaactgcaccttggttaggcagttaagaactctgctctggggtgcaataaatcactatttgagtcttgactctatagaaatggtatgatgtcggacaagttattaaactctctaagcataagtttacttctaaaatggatgtgatataaatgtttactttatagatttagtatcagtacatgatataatgtccagaagaaggttagtacactgcctcccaagtaataccttgcattcaccgagaatctactactgtaacccatcgctttctattcttttttattacctgtcacaaccttccccttagattataaactcctcaagcattggtctttgttttttccttgtggaacttccccaatgaaacaactcaattaatatttgttgaattcaagtgaagtaagtggatctcatcaccaacaacaaagtctttgatagatttttactcagtacatttgcatcctcaagatatttcaccatcaagtagagttcaaggttatccacagattcttcctggaggtttcgctctgtagtccgcctctcatactattgcatgccacagatctatgaatccacccttccagaaaatcagctaacactcagccatgtgctgcagtcctttgtcttctctctgcatgtcagcagtctgattgcaaataaaacgtgttcctcaatcctgcagtatttaaggcttttttaagaaagtcttactgaggaaatcaatagaaaaaaatggattattctcttttagcctataagcttgtttccttagacagttctaacaatcatactaatagcaggtagttattgaatgctttgtaaataccagatgtggtatgtgtaacatatatgtgttatgatctttatttttcttattaaagccaacaactctaatagggaaatacctaatcttttttttttttttttttttgagatgaagttttgctctttcacccaggctggagtgaagtggtgtgatctccgctcactgcaacctctgcctcctgggttcaagtgattcttatgcctcagcctcccgagtagctgggactacaagtgtgtgccaccacaccctgctaatttttgtatttttagtagagatggtgtttctccatggtggccaggctggtctcgaacttctgacctcaagtgatctgcccgccttggcctcccaaagtacagggattacagacgtgagccaacgcgcctggccaggaattacctaatcttaatgttctccgtgtgcaaatgaggaaactgaggcaccaggtcttaattaaaataatttactcagactcctgactcaaaagttaccactgggatacactttctctgtaattacacatgtgaatcatgattttcttctgaaataaattacccccggctccccatcctcaatttcatctcttccatacctcaacaagtgacctgccactgagttcagtaatcttagtgttaaaaatgctgtccatttgccttgtgtaaagaaatgagacttacaaacatctgcagcttctattgtatatttttccctcaagcttgaagtctttcttctggatggaaaccaaatgaagcctttcacttctagctctagcagagttgccattcatgacagtctcatttttagaccactgattctgcagcttcgcctatagttttgtctaaatctcagattggtagcagctggtttcagttttatcaattagatcttagagcattttgctattttaatactagttgaactaatgctttgtaactatctgcttgttttagtatgtcttagaaagttgtataaagatagctattttgatcttagtaaaattttcccacttttcttctatgtataaccaaaatatttttcttttatctcacacagtttattttctgttttttgtttttttttttttttgtaagtggctgtcaaccgctttttctttccattgccagaatatcctgtctacctcattttctgtattttccattttaaaccaaccttctagcttattttctggctactatactgtcctctaaaacataaacataaatgtgcacatgtcctgttcactagtccctgaattctactctagagtttatctaaacaaatagcaataatagcctattttcatgtctttgtaaaatctcactttatgagatatgtcgtcaaataattgtgtccagtcctacttgctgtgtttctcttccatgaagagtgcatatatagagatctctacagagcacaactccatcacgtatttctagtactgagggttgttttctctttttaaataaataaaaatatgtgaactggtccatggggcattatttttcaaatgttctcctttctaacttgaaacaaataatagataacattttataaagaacatgatgagacatggtctatgtaaaattttattacttatctttattaaatagatctaactttctataagtgcttatatattacagtaaacaaaattgaaagtctgctaggctttttttctgggctagtactatttttgtgataataatttaaaagttatcaaaaatgcttctagctacaaaattgcaactattgtgtgtaatggtagaataaaaatttattctgagatactgaaaggagaatctcataaaatagaactcaacttttaaaattccattctcacaaattttttaagtattcttttttaaaagattggctacttaaaaatgtttggctttcttaagtgaatgtaaaaacacattattaatgattactaaagagtaggtatcagtatgatacatataatttattatgtcttatagaagggattttgagtgggagtaaagaaatatttgtgaaatagaaaagaacatgagaattcataaaaggtattctaaaaattcttaagctgaaaagttaaagtctgtaacagactaaacacattccaaatgcctctagatattacatatggatgctatctctcagcatgtggatacttgatacatttaataggaaagatttgtgttgtgctttcagtgcaaaactataaaaatatgttacaaaggtaagggtaataattttcagtgactaagcaaagcttgaatctctgtttataaaagtctttaaaagcagtattttaaagctagaatgcaaatgctttgggtttagtcttccacaaatgcctaaaaatgcactataaattctgttagtatataaaacgtattgcttttttgtctcttgaaagccatacaactttctctgtcaaccaagcattttatattcagaccttataatgcatatctatatataacagtccatatacatatgagtgttcatatcctcaaatatatagaatcatttaatactatattatcactctaagatttgttttgtttttagcttttattccaagcctctgacataagctgcttgactgaacaagttttatatatatcagcaatatctgggcaaaactcacttgaaatttattaccagatttgaaatttcatcatattccacaaatgctgaaaactgatgtgctcctttttgcatttcttaatgataataggcttgcaaagaaaacacattaaaaatcaacctaatccactgatgagaatatatttaatgtatttattttagattgctgataatttagagaatacttcgtgcagagtgaattcatcatgcattttgcttaatgctgttctcaactttccagcaagaagtcaaaatttcaccattttcaatttggagcagaaagcatttgtagcagctgtagctcttaatttgacatctagtttcaggtcattttcatgtaaatagggaacaatggagaccggcttacaatttccataacgtggatgtttccttcaactttattattttcttatgacaattatattttctctgtgggattaacggagccagtaattgttcacagttattatttttaatctttatgaaaacttggtagttctactctttagtactcaaaagctcccagtgccttctatatttcagtcatacacacaatccattaatgtttctagctgatcctttccttaatcaggggtaggttaggcaggtcaggctttctatttctttctataatacattttcttcaggctttgcaacctctttttctacctttacaaaagtataggaggtgaaaatttggaattgttctgttgaatagaactgatgccctattgaaaagcaagtttgagttttgatttatattgctttgaacatgcccatatgtattaccaactgtggcttcacagccattataacacgtaattctgtgctttttctaataaatattttatttcatttttcctctgttccagagaagaagcctactttatgctgaagcatcgatgtgctttcttctgtgttttttatgatctgtacagcaattttcaagtgtgttttaatggggaaaattttaatttttgtgtacctcttttaaaatatgttgatttatgcagattaagttaagtaggaagttatttttgtaggtagtcatttccatttgttcctcttctaggagtaaaagtaagaaatcagatagacttttaaacattttgttttctggatcatctgaacataccaataaattatgtactcttttgactttgaagttgtattagttgatataatcctgagcgggggtgtgtgtgtgtgtgtgtgtgtgtgtgtgtattttagatgtgctccctctgttttttagcagacactcatttgtgctcttgtttttttctgccccagtgatatgacaagaacagtggagatttctggggaaggaggcccattgggaatacatgtagtgcccttcttttcatctctgagtggaaggtaagatgtttttctcattccagaagctcatgctaatgaaaaccctgatttgagctccttttcccaaatatttttcacaaggagattaaatgtgaattctattattcaaatggatacctcaagacatacttctgttggccacttaagtgttggaaacaaaataaaataattgactttaggatgtaatggggaaagaaatcaatcactgtttctccatttacaattaattatgaaatactttcttaaagtatccttatcagtgacacatagtaaacagaatccttggcaaagatgttaacatattgttagacaaatgttgcaactgaattttttaatattccagaatatacttcaacaagtgagtataataattccaaattgatatatcctgttattcttcaagtatgtagcatttagaataataaatattctaacattttaagtagctatatctgatgctgtgtatgtatgatggctttataaaagcaatgtgtcatcatgctgtattttcctaaaatataatttagtcaattaaaaataatttaccacatccttttggaatttttaatacattatgttgctaaatccacactggtaaaaatggcattgtagatcgtatcaacacttcttgaaatttacatctatctaactggatttaaaacttgttctcttgatggaaattaaagtgtgtgccacagagttcatattacccctgttaaaacaattgtactgaacttgttttagatattatgtcactttgtaataagacgaccacatttagcactagattgatattgacaagggttgtcagaaacttaaaagaaaatcagtttttcactaacatgacatgattttagttaacttactgaatttattttcttaaacacatcattgaaaaggggggattccttagtttagtttaggatatcaaagacgagacaagtcaattgattttcccaaggtcatacaaaatccagctctcctaacttctcacttcattgttctttcaagaactaaaattttctcaaaggttatatagtattaatttagtggttctgaatatttattcaattcagtctgccctatagcgaaaagaacagatttagtcatggtattttggttggcatcatattcagcaggtagccatctgctacctgtaattgcgaagtcatcacctttttttttttttgcaaataacatctgatgccaagctctcactggaatgaatgttccccaaaagaaatgaaccaaaaagctagcaactcttattgtctcatttcctgtgtgtgttaataagtgtgtttataaatgttatgggttatggcataggacaaactgaggttgtttttgatagatagggtgaatatttactcagttgtcatgagaaattctaatgacttttggcagaagtatactgacagaattttgtgaactaccagagctattaaatgaccaggctctttagtttaatgaaggtgggatagagcacaagatcttcccaatttccaaaaatgagaaaatatacagtgtgacagtcactagacttcattttcagtagttcagaaaacaagctgatcctatagatcagaaatcacattctctcacttcaaacgagggaaatacactaagctttattgatttcctcccttccttttcctggttctgattcctagcacaagccttgtagaatagaaggaagagtattggacgtggtttcagaacaactggatttgaatcccagtgttcttttttataaccttgagcaagtcccctaaacttgccccttttgagtacctactttacatcaaggttatggggattaaataacattaaaaatgtgaaagttccttgtaaaacacctaatgtatgaacgtgtaaatcatcagtctgatgattattttggctaaaaccaaaaagcctgattcagaaatgtagttttattataagttcatggttaactgttcagtaacttggtgaaatagttctattatttattttttgctatccaccagtattataggaaggaaatttaattaaaaaacattaaaaatgctatggaagtggagacatgagccaataaaagttaaggagtaatgagtacaggctgaaacagcacgcttaactcaacccatgtgtctagatgcaactgtgtatagagcatgtcagacaagtgtctgacttcataatgccatatggtttcactgtgtgagcacaggggcttcgttaaggtcatagtggtatactttgctcttaatttccttccatttattggtttgtgccattattttaaattagaatttacatttaatttttttactaagattactgtaattggctttgcctccaatgtatttttttatttttttttcttttagaaaaatgttgccacacctgttgttgaataagaaacctaatctaagttagatcatcctaataagtaaattatagtggctgctctgctagataaagcctcaatgaattcattagataccatcgcagaggggtgctgaatgctgcttgtattgagggccattggctttcccagtaaaaacaaagcaaacataaaaaaaacaccaaagttcttgcaactaaaatgcaacttaattttattcagatttttaaaatcaatgtggtttttgtgaattaaaaacatgaaatctaattcgtttcagtacagatgcataatatgcctcagtttcatagggaagacagctaaacaggagagagaaggagaaggactggatgaaggctgataaagactgtgagaagagatgttcaaaccaaaattccaagctggtagagtcactgaggctgtgtgacattgggaaaagaacaggaagggggcaaggagaagatgttggtgcctaaatgataattagaagagcaagaagaattgttacccctctaattctgtgaggctgtggatttcagcatcctttatcactgttcattaatgcaaattaactggttagtctcggcctataactcctcgacagcattaatctttaaattctgcgagtcttggtcccaaatgagacagctaccacagcccaccagttcagggcaaagaggataatgaggtattgttttctgagccttcttgtattggtctggatgaaatcaaactggagggaatctatcccttccacggagcagagagggcagaagtggtttgttgccagggaccaaactaataaaatcagtcagttttacattttaccaaaattacctctgacacatgggttttacagttgggcttattctgtcaataaatttttcatggaaagttagattatttagatcagtgaggttcacatagcatactccagctgtaatatgccagctaaattgcaacccagtggcccgaaagaattaattcatctcccaaaatgtgaaattaaatcctagggagtaacattacatgactgatgatgtactgaattaaattaaaggaagacttgaatgcttgttaaaaaaatatcacttacataaacacgtttataaccacatgtgagcctcctaatgaatcaagttattgtgaatccaccctaacaaaaatccaaaatgtgaactcttaggatgctgtttaatttagggaaaaaacccataagttttatctattattttaatgtgtcaaatagtttcatttttaatactgtgtttcaagattaaagtaacacagaatatgactaatttgctaacctactggaactaggaaatgaaccacaagaccccactgcacacttgtgcctatgaccctgagccttccctgcagtagatggcatggctgtttgctgttctttctcctgcagcagcgtgctgtattcatttaacattttgaagtgagacccaaatatcactgccatgcctgttgaggtcttgagatgatgggagctcattaaggggacagaggttcaactccgtggccactccaaacaggaggactactttctctaatacttgcattgtagattccccttttctatggctgaccctgttatttacacataaaatgtactcatgttttatttaggtttgaaatttaatgtgaaggtattttgtaatagcacacatggattttatacaaaagagagtgacaaagtcgaaaagcaagagtattgataaagtgcagatcacagtttctccaaatgtagcagactcctcttgcaggacatatctatctttcttactctggacacagctaagccttgtcacatcacgaggagaagggaaatcccacaaataagaaataatgaaaatatgtataagttccatttcttacggtttttggtttagttttggtttatatatgtaacagaattgtgtatgtatgtgtgtacacacacacacacacacacatacacacacacatattttaattctagtggctatagttttctttcttctttccttctcttccaaccctcctgattctaagctacagccacaaaaatccagaggcctctttgtatcctctctaatttagcctcttcttggttgaaattttggacaactcttcccaaagcctgccttcatcatgtcgctgccctactcggaagcggggtctgctagatgcccccctccaggtccatcagattaagttcattggctgtttgttcaaagcctttgtgtgtggcactggtctcccatctagttagctctcaaatctttgaaggctctaggcttgttaatgtctttagtttttggacttcagctgtcccccaaatgtatagtgaaattacctggtcctggtcctatgactttgtctcatactcctccatcctgatcacacaggaaacacccaacacatacctgatttggtagcaccaacaaatgggatccagcttccttctaaactgagtaatatgatctgagcttaaatgtttctttacttcttaaaatgcaaatttttagaataggtagtaagactgcaaaaatgttactgtgaatatcctaatgctctcccactgctaaacatcacgttgccacgttggcactaactcagacttactatagtcaggtgtgatgcccttctccaaaccacaagtctttggtgtcaactccagtaaactagcctttcaataagtttactgcaagcatgagaaatgaagtcgcagattgatgttggtacttatgcatatttatctagaagggctttttctcttgtagtcagttttggctttttttggattagggattaaaataacaaacagttgcctgaatataaagtaaaatttcttttgtaaatagaaatcaatatgtatttctgaatagttgcaagtggagaaataattagcatttattattcagtaattatatttcaatctaaattttgcatttaggattctaggactcttcatccgaggcattgaagacaacagcaggtccaagcgggagggactatttcacgaaaatgaatgtattgtaaaaatcaacaatgtggatctcgtagacaaaacctttgctcagtaagcattttttcattgttttatttactttcttgatccctagcatggttataagcattactgaactcattatgatcaaaatagtaggtagaatttctagtcagttccctttgaacgatccaggatatccattttcgaatgcttctaatgttttagcctactcaaaggtggcccacacatgtctctggcaggtctgagaatgctaaactacagaatatcacaagccttcctgcctggctgtctttactggggcgtcgttgaacgggtttgtttttcttgggctatgggtcacttaaactggtatttaacggctcttttcacagactgttggttcagcttattaattaactttcttggtgtcagcagtcttccttaaactaaaaaatctgtgagagatgtctgaggactcaccgaatcatagaaacaaacagaaaaaataaaataccgtctcctggccaggcggagtggttcatgcctgtaatcccagcattttggggggccgaggagggcagatcatgaggtcaggagttcaagaccaactggccaatatggtgaaaccccatctctactaaaggtacgagaaaaattagccaggcgtggtggtacgcgcctgtaatcccagctacttgggaggctgaggcaggagaatcgcttgaacctgggggacagaggttgcggtgagccgagatcgcgcctttgcactccaccctgggtgacagggagaaactccgtcttcaaaataaataaataaataatactgtctccctcaagaaatcatctttctgcatgtgaaaatgttaagggaatagcttcctgtacccaggaattagagtgtatagtaatctgatgcatatttttttaatgtgtgttggcattgcagtgggattctggaccaaaggactaagtactaataatccttgggagtcatcaccaccctcttgtttctgaccaaaacagctcctaatacatcttctcgctgggcattagttgtcaatattgtatgcgtgtttgtggacaaagatgagtggttgtgggtcgaggaaaagtgggtactggctgctaagtatgaaaagaaatgaaaccttagaagaatctattgtgttaaaataatgaatgatagacaaaactatagttagtaataatttttaatatactactgtgctttttcacaaggacttgataattatgcaaagcaatcattattacttctgttttatagaggtggaaactgaggctcataaaaatttagtatagagttagtatggagtagaaactgattcctatgcaagcaaaaataacataggggaactgaccacaggagttaggtggagttaggcctatgtgaaatcttccttctcccctaacaatttgcagaattaagcacttcagaaaggggggtgcggggtagggtttaaggaatcagattgcagttgggattatgattagttattatgtgctgtggctgctaggaacagagacctgaaataagaatagctgaaacaagattaacattaatttttcctagcaacaagcaaacgtggaagagggcactccacagttagtgcggcagctgcacagccgccagtgggtcaggcagcttccgttttctgctttgccatctcgccatgtggctactatccttcagtggaaaaatgggcacaagatggctgctgagtttcctcagtcacttctgagtttcaagaaatagggaagagaaacaggagaacaataaaagtttttgtctctctactgaaccagccgcttctaaagagctttcctttaacgccttcatttatatcttctgggcaagaaagagtgggaaaggtagttgtttgacctgggcacagggcatctagaggcatgaggaagaagaaaatgttataagaagtttgaggaagaacacaaagtgttaggtcataaaagtgaaaaacacagttgctctgtgtgagagtaacaggaagggtgcatgttggattgaaattccactgagacattttggcacagccaaagcacctgccaaaatgtctccatgagcaaacatggatgtcaaacttgaacttgtgtaacacaacccatgttagagaagatctgtactttagaaggatgtcctaaaagaaacctaactaatgatctgatccaaaatatctattttgctttttatattcactttggtaatcacttctggttagattttcatctttagaaacatgtaaaagctgtgggtcattggataaattatttcatctctctgagcctcaacttccatgtccgtgaaatgaaagctatttatacttaccgaatgtgctttctaaattagagaaggatgcatgctaataatgcatgtataagctagtgcaggggcacctagtgcaaatagtaagtggtaactagtatgtagttggcaaagtcattctgataggaatattgatcgtgtctcctatgattagccactgtgctgctcttggttgccatcctcctggggtactttagaagatgctgcacctcaaagcagggtcatcatacatttatcaactttctttccagggctcaagatgtcttccgccaggcaatgaaatctccaagtgtgctcctccacgtgcttcctccacaaaaccgtgaacagtatgaaaagtcagtcattggctctcttaacatttttggtaataatgatggcgttttgaaaaccaaagtgccgcctcctgtccatggaaaatcgggactaaagacagcaaatctcacaggaaccgatagtcctgaaacagatgcatcagcttccctgcaacaaaacaagagtccccgagtaccaaggctgggaggaaaaccatcctctccctcactctcgcctctcatgggatttggcagcaataaaaatgcaaagaaaattaagattgacctaaagaaaggtaattattaaattatgcctaatagcattctattattgtaacatgtaaaattggttaagagaaatgcattaaggctaatttagttaattctcccttcatttaattgtatcaaagaatagatttaagtgtatacttaggtaacttaaatttcttgaaattgtacttttttattcttttcttcggagtgtatagattattttaaacaagaaaataataaagacatgttgggaagtggaaagaatcattgcaaacctgatatcaacagagcaatattgtattacaacttaataccaaataggcatgaaaattcagttgtccctgttctgagcacgattagtgattcttgaagcatcctttaggccatgtccaaaaagcatattgtttttctaagacagtcttctaacaacaaaaatttactcctcagaaagcaaatatgtaatgtttactaatttctctgattcaacgtcacaaacatttaaaacatacctaatttcaaaagcatgtataatattttctttcttcatctttttcaacttttctatccatttcaagcacagatcagtgagaagagatcatgtgtgtacatgcatatttatgcagtattctacacacatacataagcattcatgtgcttctgtgcttttgttcattttgtaacctctgctttatattaccttcccccattgcaaccttctgaaattctgtgtttttcaagacaactcaaaagaaaccaagatcttatagattcttgtctgaattaatagagaatttatggtcaaaaggtagttttagaaaaactattaaggtctttcaaaaacaaataatgtatcatcatttaggatatgaaaattattctggaaagattctctgatcaaaatttcattcacctataagaattctattctgggaataaaatacattgactagtaggtacaaaaatacttcagtgtgcttatcaatcaggttttttatttaaatgcctcagttgtattttttgtacaaatgatccagctgtgtgtaagacacagatttgggtgttttgaatatagaaaaatgaatcagacacagaatcaccttaaaaatttattacaaagccttgaatgcaaaaatgaaagatacgacatcacatctgtactttggcaagattaatctgacagcaaaaagatacactgaagacaaggccaaacaacaaaggataagtaaagggtgcactgcatctgtctaaaggtggaaacataataggcatgcattaataaatgactggttgtaggaaggaaaaaagagaagaattacagtgattcctgaggtttttcagccagagcaagttgcataatggagatgtcattgctagaaattagaattttaagtagatgaggatatttgaaaaggtcaggatctggactggagagggaggtacatagtgaagtttgaaatgtgcatgatgacatctaggaagctgacatcaaaaagagacattggagccatagagatttaggtctctttcattggaagatatacttggatccaggagctggccaaggcagggagtctaggggacaaactggtctaagacagatccttgaggaacatctgtggctacatgggaggacaatgagtaagatttagagagagtgatggatgtgatgtgatcaaagataggaaaataatcagaaaataaagacatgaaaaccaaagagagtcaatttcaaaaaaaaaaaaaaaaaaagtggtgggaatcatcaaagctagaccaacagagatggtcgcgggtaggtcactggtgatggaagcttgaagaagcagtaagatggaagtaaggatccttcagggtagagaaatctgagcatacctttagactgagtgaaaaatacatgagaagggagaaattggagatgcaggagaacaggacaggaacaacaagatgcttgctgaccagacaatgggatgcagcagtacaaggaattgagacacaagtagagggctcagccataggttgtccagctcatgtaagaggctgacagaacttaagtcaaatggccttttgcttctcaggaagtatgaagtcaggttatggtttattgagaagtcaatctcctgggcatctggataacatgtgcatttcttctagaacctgaataagccaaagtgttacacatctggattgggccctaaattcactttgatactgtcatggcctgtcaggaactataatctgcatttgaaacacaaataactgaagcatatttaaaatgtcccagaatgtaaatattttactgattctatattagtctaaattaggtagatcttactgtaagactgaatataatattactcatgcttaagatgactatacattttcctgttcttatacactaggccctgaaggacttggtttcactgtggttaccagagactcttccatacatggtcccggtcccatttttgtaaaaaacattttaccaaagggagcagcaataaaagatggccgcctacaatcaggggacagaattttggaggtaagaattggaattaatagttgtatgaaaatatttcttggcatttaaataatgccatttaattgcattgaaatatatgtaaatatattaatatttttattttgaacctaatatatattaaaaattattacttatagacaagataagaactttaactatagaactggttaatgaggagtctaactttgtaaatccccaataaggtcagtgatatggggccaaatgatagtgaaaaccatttctgatcttccctctcttatttctacctcttagagtccctgtgaaatttggattgaatctaagaattcaacatatattcagttagggctaaaaagttaaaaagtctttgtaatagtcttttcaaacttggccaggacaagccagagtatctcaggtcattctatgctttgtccatatccctatcatctgtgctaggatagcaatgaaaacagctggaagggattttgcagagagatatatttgggataccaaaagcaagagggtggctgtttgttttcatttatttttgtctgaggacattatcgtcttgataattatatattgtccatttacctttgaagcaaacatcttcattaaaagcaacactttagcttttcatgttgttctagatcatgaaagaagatgcaccaaatgactactgtagctccaaattagaatttcccttaatctatgataatctggtgactataattttctaaatatgtttaaaacctgcaggattctattgctaggttcgtatttgcagagaaatttgccttgtgatcatggttcactctgcttgttgaattaggcagaaaatggcgctaagtaagcctttgaaatctgctttctaccttaagcggaatcattttctggtatctgtcagtccagtttcccccacataagaatgtgatgtcttaggaaaaactgctgatattaattaccgactctgagttcatccagcatcatgatgatgcattatgggaaatattgttgggttttgcccatgtatttagttatcatcttttcagagcttcctcaagtatgggagcccatttgcttcttgttttcaaaaactatctagtgtagaaggagataacaagtattgtgattgtggctgttcatatgcttttattcattaggtaaatgggagagatgtcactggacgaacccaggaagagcttgtggccatgctcaggagcaccaagcagggggagacagcatcgctggtcattgcccgccaagaaggacattttctgccccgagagttggtaatgttcagatctcagtctcactgaatttttaatgccgagcttaatacactcaatgaactcattatagctgagaaacgagttctaaatcacaggcttcattcataaccaaaattgaatcacactcagggtattttaccccatttggggtatcgcatttttaaaacattgatacagccagtgggtatatgtaaacagtgattccggggcacagactcaaacacctttagcaataagcaactattcaacagtatgcaactaattcaataaaatatatattgaatatgtgctacgtgcgaagccctaggcaaaacacagtcagcaaaataatttgtggacctactttaatgaagtttacagtctaacaggaaataaaaagatagccaagtattcaaaatggcgatgaagattatgaagggaaaatgcagagtgccatgataacatagaacaagggtatttaacctattcttgagggctgggatagacatcttgagaaagatgagttcaaaagccttattaaaaatgtatacccttagacctagtaactagacttcaagtaatctgtcctaaactgatgatcaaagatgtggaaaaaattcatgtacattgattttttcccctcaagttctatctattgcagtgatatattgggtcctgtataactgtaaggcattggttagataaataactagatagcttgccagtgaaatatagaagtacttaaaatggtttctgtaaaaaattgataatacccagcactttgggaggccgaggcgggtggatcatgaggtcaggagatcgagaccatcctggctaacaaggtgaaaccccgtctctactaaaaatacaaaaaaaaaaattagccgggcgcggtggcgggcacctgtagtcccagctactcgggaggctgaggcaggagaatggcgtgaacccgggaagcggagcttgcagtgagccgagattgcgccactgcagtccgcagtcccacctgggcgacagagcgagactccgtctcaaaaaaaaaaaaaaaaaaaaaaaaaaaattgataatagcatgagaaaatgttcataatctaatactatatttaaaagtaggatgtaaaattatttgtgcagtatcattaaattacattttaaaacgttaacaactagaagcagatacatctgggatattggttatgagaggttttcattttcttttcttaccataaataaatattatttattttattgaaattgtgcttttaagaatgctatagaaaattcaaaaggaggacaggtgcagtggctcatgcctgtaatcccagcactttgggaggccgaggcaggtggatcacctgaggtcaggagttcgaaacctgaccagtatggtgaaaccccgtctctactaaaaaatacaaaaagtagccaggcatggtggcatgtgcctgtagtcccagctgctcaggaggctgagacaggagaattgcttgaacctgggaagcagaggttgcagtgagccaagattgcacgagtgcgctccagcctgggcaacagaacgagactctgtctcaaaaaaaaaaaaaaaaaaggaaaaagaaaagaaaattcagaagggattttgtagctaataacaaatagaaacaaatgtgataaaaggacttgtatttactccttgttatttcctttgaatctgtataagaattgacaaaggcacatgtaggttcccagagttaggttattggaacagtaaggattagttgacagaactgatgatgtttcacttgaagaagagaaattttaggagacatgacagttattatcaaatatgtaaagagttattgtatggattggaaagtagacctgatctgtttcttcagacagtttccaagtttccttggcatggaattttctttctccctttccttctctttcccatcatcttacccatttttccctttccttattgtgtactctggggagatctgtaacaaaatagggaaaataagaaaaaaagagtgatctgagtcatgcagatatagtccccatttccattcctctacttgactcctccatacccaaccatttgaaaggtagaatcctgaatgtctgtctcatctcctcacactttctagagaaatgatgcagaaacttggagtctggattttttttctaaaatacagatggattcttctttcaatcttttatttatccaaagaccttggtctttctctacaagggtcaaagtgaaaagaaacaataaaaaggggggcagttatgtgtatgcaccacaagaggccctttcatttcttgtctgatatttaggttgttagaaataaaaactctccaaaatcctcagtggaactatgtgcttatttctgagataggagagcaaagaaataagttttgactgtgtattccattgaactgtggtcctggaagaaataaaaccctgcataaaaacagaaatatttcaggcagcccctgagcatgcaaaagaatgcaaccacagaactccaactaggaacttaaaccctcgagcctgcagtttctgtctagtagttccttatacctttctcccatatgtcctctggaatttttaaccccacagttaataccttcttcctagaagctatgcccctccaccaggtaagggatgctgatttatcccagtttgaagctctgaattcattcctcatcaaaggcaattatatctggaagttagcaactggaataacatttaacattgtctctggagttcacatcccagaattcaacttctgtatccaccacttactagctgtgtgatgtagagccattcggaacatcactcagaggctgtttcctcatctgtattgtaagaattgttgtgaagattaaatgagataatacaggcaaagcttgtagcatagtttctggctaattgtaagttctcaaaatacgttagctataatttttttttctaatacatgaccatttctgtagtagtgtaaacacaattctatactctagatatattatggggtagatagatttatgcagccttgcctgggactaaccactatttttgaacaatgattgttttatttttttattattttataatgtattctgggatccaaaatactgagttaaaaacaacatttttataaccagtcaaattgataagggaggcagctgtatgtgttatttcactctcatttaatggaatttagtgaaatttgatttctatcccagaatgacataggccaagtccaccagggagcatattaagttaactgtgcaactgtgagattatgagtgcaaacaaattatttgttctcattgtttctagttctatactaaatttggagggtatatgcttagtattcattcctttagaagtttctagcaaatatctagactctcaaaaatagttgacagtcaaccatccaaatatgtggaattttctttgtcaccatagcaaagcaagggcatttgaggtttataagcacctaagtcacgtggacccatagccttcctattggagaaataaggaaaagcactctttttccagcccaaatgcctgcctcgaatgccaagaggcaagaaccttgcaggaagtttaaaaagaggtgatgtttggcacgtgctgggctatttcagtgggaattacttcatagtgtggcatacaccggcctgtttgaaagggcaaaataaagaagtgtgttatgtgatacatctttgtgttttcctttcaaaaacttgaaggtgatatcactttggtctcttcttccttatcatgattgatgtacacacttgactttccattgaaaatctggcaggatgaaggaaggacagcacttcctacttttgtcgtgttctatctcctttgaggaaaacaaactgtgtttattggtttcctcttctaagaaactgtcctcttttgttaagccttgctgttctgcgagctctgtaccttcttaacagcactgcactgcctagtttccgacgcttaaatcttccttacttccttgttatcgttagcttcttgtaaagtcttaacacttaagctaagggagcatgtggtcagcagttatacaggaagtcccaatatagaattgtctcttggatgtgactctgtcattctgaaggccatggtatccatttcctggtcatttctcctgacctgccacctaaaagaactgtgctgaactcctatattctagttcgtgtccttcctgagcaattgattaacgtcccaagtttagcagcatatttagccaaccttctttccatctggggcagaccgggttgaaaatcaagtgagaggaatttatataataacattacaactatttagctgtttctagcatctttaccaaaagaagggtatttcaaagataatctttccagaatcccattctgaaagatcctttggtgtcctcaccccctgactgggtgagagtttactgaagaggtgttcacataaggaacagttttgcagaaggtactttgagattagttttggtaatagatttagaatctgaaggctaaactgctgtgtctgtgtctatacttgaaatgaaaactatgctagttaatcaactggtggtttgcgtggtcagttctgtaagagatgtggcctacaaattcttttctgtctctgatacctgaaattctttcttatgctaaatgtcagataaagccgtatttccacttaagaaagctcctgaaaaactgaagtttttctgttaatttcatggcttcatttctttaagagctagagagagaaggagaaagttatttgctatgtatgtgtgtgtacatgtgcatgtatgtgcatgtcttctttttttattgggtagaaaggaagattctgccctttctttgttaacctctttaacgtttcattttctgacctgctgccttatttctaaatcatcctgaaaatcacagcaacccctggtgggtaaaatgagcttaaaaaatttcaaatgtatttataatttctacctgccacgtttgcctgctatttgatgctggcctctgcaagtgagattaactgtatttcaagcaagcaagtttctcctgcctggcatgattgaaaaccaaaagttagccatgtttgtcatgctgctttgaccttcacttaggaatattgcttttgctgagaaaaaatgatgcacatgcatgtggaaccctacttaacagttgctgagcttagtgtagtccaacactgtcatggttacctgtccctgtgactaccttagcatgcgagatgtggttccaactctttcttatttttaagtaaaaagttcacatcttgaaatgtcaaattatttagcatcataaattatagaattttggtttgaaatcttagatgaacctcatttaaatgatatattatttcattccctttggctatttgattcaaatgattccatgcttaattaactgagatacttaaggaaaaatgaatattatagcagttatttgtggataagtagcagaaattgaaagataatttcaaaatgatttttctacctaaactaatgtgcatgagatatgttctggaatttaaataattatgcaaaatccaaagtaccttgctatattttatgtattctccaagtaacacagttcatgtcttatgatgaagtccttgctaagacagagtttctttttcagcttttccctacaataatttccattttcttcttactgcattttcattcaaccagtatgtactgaatcttagtcaaggctctgcaacatgaacttccagagatgaagctagaagcttcatctgaagatgtgtcctgtcttcaaggagcttctagcccataaagaaaagaagagtgataagtggatcaaatgagcaaataaattgttacagggattcaaagtatgtcaggaaccaagaaaaccttcaagaacatgacagcatttgaaaaagagacttgagaattgaataaatttcaagatgcagagccacatgggcaaaagaaatactctcttcagttactcagagattagaaagtactaaagtacaataagaccgtaagcagcccagtttgacagattaccgaacaggagactaagatgagaagtagtgctattttgaataagtttggaggggaaaaaagatgttgggatatctattaagagcttattgtaattcactagagggtaccagtaaggagcttgggacctggaatccgtcacacctgggttgagccttgactctatcacttattgattaaatggccttgatgaagttatctccctgagcctccattcctcttctgtaacacagggactagactagtgtctacccaagagactagttgttaggattaaatgagatgcatgtaaaatgcttacattgggccacagagaatgggatttaacaaatattccttgttattataaccattgctcatttgaatgagagatattaagtgcacagattagattttcccacctgttaagaatggagagaagaaaatattgtggtagaaaactttggttttggcaactggtagatgtgggagtgaaggagtgagaaatatcaataattccaaagtttttaatttggctgtgttgtgatattattacttgttgcaggagaaaacaatttttattatcctagagttttatgactttcatgaatcccaagctgttttatgggccagtgagcctcggcatttttcttcccctactctctactctcattccaaactcttcatctttgaaagggaggacactcctctcctcccttttatctcaaaactccttaagatatctacttataggtcatttgcttgggcaaagcttccttgaacccccaagtctagtttatggaaccttacgcagctttccatccatattaagggttcacctcagcatgcgcccgaatcacacaatattataatttctccaatagaccttaagaactataaagaaatagtccttaagatgccacatttgggaatctcatggcctggatgtgaatccctgctttgcaatttcatttagcctttcagtgtctcaatttcctcatttgttaaaaatgaggataaaagcaacacctaccttgtagggttgtgtgagaattaactgtgtgcagctgttgacgcacagtgagtgccaaatcatattaatccttgttatttcctgtgcctagagcatagtgtatgctcagtggatatttgttgactgaatgaatgaaagctacgcattactaaagttggtgatatagaaggctgggaaacgtattactaaatgagccattactgctagtctgtatctagtctgcattcagtatattattatcctgtacaattcttttaaaccaaattaaaaaaatatatgcagggattttctctgagcaatagcgatttctgatttacagctgcgtgccacaatgagggttaggatagttttccatgtaaatgacagcttcagtggtttaagttaccatgatgacatttgcacaatctagttgtacagtttacttgtaaagacatatgagagccataagtatcatgttataatttgaaatgttagcggtatttttacagtatcgtgttaaagtattttaaatgcttcaatttgggctgcaataatttgttagaacaatggttctcagagtgtggtctcaggctagtagtcttggcatcacttggggatttggtaagcatgcagattgccaggctccctccacacctactgaaccagaaattctggaggtgggcttagaaatctgtattgtaacaagccttccagataattctggtgctcactcaagtttgagaaccattggaatagtggtttcattataaagaacatgaagcctgtaggataacttagtggctattgctgactagcttcagtgatcaaattttcaactttatgtctcctgtgaaaaatgtcttgttctgggaaaaatattctgtgaaattttttaagcccagttgagttgtgcctttttggctatgtgcccctcattttggcaaagggccagtgctgagtgcaatgcagttacccaactcaattacccctgattcatttaggcaaactcaattgtacttgactttctcaggtccaactcgattgtgctttaaaatttccacactcaatttgattgtgctcaaaattttttatgtgccaccttgtaacttgtagattcagacacatatcacaggaggtacttttgagagacttggaatattgggttgttggtatttgtttgcagttatacccatttcccttcttcctttcctcttatcacctctattggaggctttagggtaagatatgttccattgaccccattacatggacaatattccagcatccacccttttactatggttggactcaagttagagatatcacagattctaggaaagtgatccttaaactgtcacaaagcaactgtgcttagtttccatttatctcattttaaagatgaaagtgaggtacagaaacactgccccttaccagcatttacatcgtcaaaatcagaaatacgactgggtgtggtggctcatgcctgtaatcccatcacttcaggaggctgaggttggtggattgcttgaacccaggagtttgagaccaggctggacaacatggtgaaaccccatctctacaaaaaaaaaaaaaaattagccaggcatggtggcacacacctgtagtcccagccacttggtaggctgaggcaggaggatcatctgagcctagagaagtagaggctgtagtgaaccaagatcatgccactgcactctagcctgggcaacagagtgagaccctgtctcaaaaaacaaagtcagaaatagcttttaagtaagacttccacctcactgaggtaaatgctgtaccttctctcacttgtgcaatgtgctcagagactgggtccttaatcatggccagctttttgaatgtgctcaatagcccacaaggccaagggattaatagtcatttgctgctccctaagaagtacttatatctggaagaattctactgaactattgtcagcaaaatctagtcttgataaaataggtgatgataaatgctgtggttcagcattattaaaacagatggaggaagtgcggggctattttgctgggttgtatggcttccaggtgtcagaatgtaaatacttaatggcttttatcacaagatgggttttgttggagattggaaggtagtggaaggaggagtgttctatgttgtaaagatctcatgacatttcagaaaactggggcctaaatacgttgtcttgcaaagttagcagtgaagagctatgagatttggcctcattttcatggtgcatgacatatgtcttattagtggcgactgtggctatgattatgcttctggagactggagaaaaagaattttctgaatttatatatttgaacagctcggaaaaagtcatattgtgaccaaccacctactatatcttatcatccagttagccaaatgttaccagtaatttaggccagctgttgatttggagcaagctggataagaagttggttacaaaacttaggggacaaccttgatttgcttaattgcctccatgcctgtgatcagtacatttgttaaggtacatttggtgtaaggtaaggaaatgtgttcattttgtaaaggatctttaaagattagggaaaaaaatactaccttaattgatggtggttgacttttccagctgttatcaaagtaaataccacacatgtgaaattgccactacagtccatctcattttgagagtatagttagaagtctgaacatgtttcatctgcctggttttccaggaaaatgtgtgatctttatcattaaagaatatcagcttaagatcacctttttttttttttcccctaagggctggtaaaacagagatagacacttaaataacaatctgttgctacttacttcttctcctgccctgtccccaaagattctctgggcaatgacttttaaatatgttctcattatttttaatgagtgtgcagaacatatgacacataacgcaacagtagataggtgcccttttactgaacctgtcggatacaatcaaacatcgcaggggttaagatgcatttttctttaagatactataattatttaaattaagatgttcaagtacacatcacatactattcaattcttgctgctgcctaaatgatgccccaccacagtcccagctctctctttaaaaagaatgttttatcccaaatgttaaaaagaccaaagaacatttaatattgttatgtctctttaagtttacccttcttaaaatctgtcccggatggcaggatattcaattataaacgagttcaatgatgtttccttgccactgattgagttatatgaaggacttctatcacctagtctttccgtaattaatcctttgcatttcttagaggtttagcactgccccccacacaccaaaaaaaggattgtttaacggcttgaaatgttgtttcaattttcttatatttcttctttctcccctttaccttcctccttttctttccattcttgcttctgacctcccatcgtacctttctggaactaagtaacactctatgtgtttctcaattatatagaacttatttacttctacttcacatgaaaatgccaggtggtggtggacataatagtacattacattaaattacattaaatgccattgaagatggcagtgatggcagtagaatagagaaagatatcagctctgagaacagcaaagctgcctatgctatgcattcgtcccataaatattggagcctatggttcccggcttatggaaatgcctgccttagcactctgcaggtaagttacagactttccacatgacttgaaagagctggctttcacccttctctccttcccagcagctatatatttcatctttagacccttgacttcttactggaggagaaaaacaaacagaaacaaatcaacagaaaagcaaacaaacaaaaaacagcacaacagaaaaacggccagccaaaacatcttagccatgatttactttcactccatctctctgaaatgaaatgttctcttctatgataatcaaagaaaggttgatgttcagaagaattgccatcttccacctctctttcccttttttctgggtccacattggagatgacaggaatcaattgttcagcaagtatttactgaacacctactattcccagtttagctgatcaaatatttattgaatgtttatttttgctagatgctgttccatgcagtgggtattctaaaatgtactaaaacatgattctttaactccaggagttcatagataatgctaagtggtattagagaaacaatataagaatatagcatggtacctgtcagtagggaaagctaatgaaagaaaaatagttgcacaagtttcaggaagaggttaaggggctaataaggacataaaagttataaaaaggaagaaattaaagttctttaaagtcaaaagactttaaaagtcaaaggactttaaaatcatgaaagatttcgtttatgaggtgggactctggtcaggccctagatagattcgaagaagcaagaagagaaaaaagttccagaaatatggacaaataatgaataacgaacatctttccgaaggcaggaaagaaaactgcagaaaaggaaggaaaggaacagaaaggaacatttttgttagagtgacatgttgttggctacttatgctatcatttaaagtcggtaacaagaccacatttttttaaaaacccatcagatgtgaatttaaaatcgaactaatgccctcctttataagttctatgttttagttatctcttgctatttaacttaactacccaccactttaagagttaaaattatgttttattatttctcgcagttctgtgggttgtgtgacttcttcccctgccagtttcgtttagacttatgcatggagctgcattgaaccagagagtctactgggcgggaaggcccagaatggccttccttacacgtgtctgtcagttggtactctaatagctgttgggtgggacaccatggtcctccttcatgtgccctcccaccctccaaaaggctagttcagtgtccttacatggcattctccaagacaacaaaagcagaagatgtagggctcataagtcttaactttggaagttgcactgtgacttctgcttcatccttttggtcaaaacaaggtcaagtcacaaggccagacaagatcccagggatggaggaatagattcctttcaggatggaaagagcaccaaatcacatttcaaggagatataattcatggagtccgatagggaagtgggagtgtgcactgttctatagccgaataagtattggtcagggatggaagattcaagttatcagcccaggactgtcagtagatggttgagttttgaatggtcgtttaatttcttgagtcttaattccgttcatgaatttcttattgggaaatcttttcccaataattcttattcttattttcccataaattcttgtttttatgcaaatacagtgttgaagatacagagtaggccaggcatgctcctttcccctacattgctgtttagcagcgtttttacctaaaacattgtggctcttgacatatacgtgcatttctctcttatgctggacaccagtctccctagatgaagaatgtgctttcccctcccgttcttctcccacctcacatagagaattactcttttagacatctacaatctgaattggcattgaagaatagaagtttagttgtatagatgttgataaactaaattttagtatttaaatgctgaaattatcaaaaaagtaatttgacaataaagagggagaagaattttttttatctgtaaaaggaggaaattgaactgaattgtcttttaagattctttcctattccaaaataacctctaagtttctgtgcatcaaatcttggcatgacactcaatacagacagtgcccaaattatgaaagatctgtatatatgaatgggaatgggctgcatgaattctcttcttagtgtttgtttgttccatacttcagaatgtctggggaacatttgacctagagattaccttaagtaaatgtagagctaacagattgccaacagatatctttctcatggctacctcttcgacccctgccatggcaacgcttgttgccatagtagtaggcacagatggagcccttcctccaatcctctactgatgccaccactgctgtgggtagcataagggacttcactcccatagccagctcagagggaagtgtgatccttcattcctgaattggaggtttcagtgtattctcccatagaacatggttaactataacccatccaatagaatgcaaattattacttactagtatgttttggagataccatggagtaaacaagcactcttggctaagagagaaatgtagccaaaatttatcagtattttttttttttaagaaaaacaaaggctcaacgtgcaggcaccaagtttacagacaaacttatggcatcagcctgttttctaactagaaattgccttgcctgtacccacacccacagtcattgtctacttaaagcttgtttccattacacattaaaatgaatgaattacaaacattattcattaaggttttggccacctttaataaaaaaaacctctgggttctggattcttctattagaaaaatatgactatgtcaacactagcaacttgttggaaactgggcgtatattttcagtgtaattattaatgcaatcacctcaattcctctttggtattaggttgcaaataaattatataaataagtattaatgcaattattaacttgataattttatgtactatgtaggcatgcaaggaaattaaacaaagatgaaggctgctacatttgttcatgtttgggatatacataacagtgacttattctctatatcataaagagatagaagtgtactagatagaactttgtcttcagctgtataactgagtatgattgtaaaaaaaaaaactgagtatgattttcatggtggttaagttaataacatgtcactattatttgtgcccttctaaaacagaaaccaaataaatcatgtgtgtcctaactggaaagaaagtaaaggcaaaaagctgcaaacaagctagtggcttacttattaagaagccaagcttttgctgtcagatagcagttcagaggttcctctttaacctgtagggtttcttgcagaaaagaatactgatcgcatgtgaatgtcttacttccttcacaaacctttgaaaatatttcccaaagattgcgttgcctctgctcttagctcaatagctctcaagggagttggcatctcttatcagaagcacacagccaggccaggggcagccggcacattgagaggccagggcggagtaatggccaaggccaccgggcaggtagtgaaaggcccctcgctgtgttaaacaaatgcagtttccttcctggcttccgctggagctaattttgtttttcacttctcttctggtatatgaacaataaggatgtataaggccattctgcctgtgaggagatgtgcattagattatcataaatccacagataaaaagcacagtggtcaatgagaacaggcattcttggatgaaataaaaggtttaattgaaagtgtggtcccaggggagacagatgattgagcgtggtattgagtagacattaattaccatagtccagagagtgaaaaaaaaaaaaaaaaaggaagaccgttcctttttttttttttttttttaaagtttccaaatctgtttctctttgagagaatatgggagatcatcctaataggatgttaggaaaacaaaatgagtcttgcttatacacagtattcttagaatactattaatgtttcttaagaagtagcagttgatttttctaatagatatttttgttcgaagttagagatctagacaaagtacaatgtgtactgttatgctgaataatggttttaaaagatatatgcatattgaattataacacattagtaaatgatttgtacttattcataaatctagaatttttcattctttggttatatctctcagcatttttttggtaggctgagattttcttctacaatttagcagaaaaaaatgaagtcgaaaaggcatctgaacatacagtcttcattaaatattaggccactagttttgcattgctgaaatatggctgcctttataaatcatacatgtttgtttagctagtgccctacttttgatgtggctaaaattatgggaagaactctacatccaccgggataacggatggtgtcaagaactgccttaacaagaaaataattggtcaggtgtctcttttaacagtcattagcatatttgaattatgagtttggttcttctttcgggtcaaatagagtataaaagtattctgaattatctgtacctaatgtgcaacggttttgaaaggacaaaaactgggagactgaatatattaagagtatgttactttgtgcttgcttacaaactgcttcccaattccgttatttaagaagaaaaaataaaaaaataaaagcaccaccaactgtcagagcaacttttagttggcttttcagttttatttagaacaaatgaatttgctccctgagtgaatttaaacttttcaatcaattgtttagatgttgatgtagacatagtcttagttttaaatgtgaaaaattgctttttttggtttaatttgaacagggtagttgccaaatagcaccagctgtcataataaagtagaagtgaatgacagatttactccaccccatatcaaaactcagaagcggatatggtgatcaaatgagccaaagtaaatgtaagatcttagaaacatttgcaagctattttcttgcatagctcagcccttcatgtgtatcaaagtgcaaacaggttacggttatgcttagcactattatggcaatggaaaaaggggaatcactttgttactgtagatatgccaaatatattatctaatgttccaaaataccatttgatgatggtgatggtggttatagtgaatcttgtttttaccaaatacactaccagtctataagatggtattataaagtattgaaactagaagcttaattagcagtttatgaactgttttttaattttaatgagaacgtggcacatactgagctacaatggaagaaataactgcaggagcacttgttgacaatgttctttaaaaaatatgtaccatacacttgttcttaggcatggcgttgggataagggacagtggcataaacataaaaatggagtggtctctgttgcccttaaagtccttaaagatgtacataataataaataaccatgatataacgtgattagtgctatgcttttattatgtatagagtgttttgaagacctagatgagagccacaaacagcaggtgacaattaagatgggatttgataggtaagagtttgctagtgggtggcaaagcagggtaaagagagagcataagttttaggtggagagaatcccatttaaatagttaaagaaggtatatgtaacatttgattaattccagtttcctttactaaacatgataaaaagtttaggtgagaggtgttgaaaactatgattttggtagataagatgaaagacatagtagtcgcttttgggagggaacttaaatacaatttcaaagaggtattgtggcagagaagtgtcaacaaaacatgtatgaagtcatcgcataacgaatacttactagatgcatacattctgctggatgctaaacaggaatcaaagttgaattaaacataatttctgcccttgatgagatcacagtggtatagcagagttaagatagacaggcaaccaggcacagtggctcacgcctgtaatcccaacactttgggaggccgaggtgggcggatcaagaggtcaggagtttgagaccaacctggtcaacatggtgaaaccccgtctctactaaaaatacaaaaattagccaggcgtggtggtgcgtgcctgtaatcccagctactcaggaagctgacgcaggagaatcgtttgaacccgggaggcagaggttgcagtgagccgagatcacgccattgcactccggcctgggtgacaggatgagacttcggtctcaaaaaataaataaataaataaataaataaataaataagataggcaagctggcaaataattgtaagaaagtgatgcgaatcatcagaatgggaaaacataagtgaaatgggagctgcgagaagggcatattgttcctgtgctgataaggtcagggaatagttaaaagaagaggtagcttatgtgctgagacataaagcatattttgaaatattgtgcaaagaattcttaattccattaccccttcattgtgaaatttcttttcagttgaatattatgtcagcacttgatatatacacacatgaaatgtgtttttttccttatgtatgatttcattaagtatcgtaaaaattgtgggtttgcgccatcagggaaatgattgactaaaaagattcatccacttgtggtgcttcgatgagtctttctttttcatgtatcagcaagtaaaaacggggctgtgatggattaatttgaaaaaattaattccttaggcatgaactgaactgagatagtacttgtttagtctttgaagcatacttaactttgttggaaaattaagatccattagttcagggaagaaagaagtcctgctcaacctacatccagcaaaatattgattggaagtgtgctgaacttttaaacttcttgtaattacacactgattttacaggaattaaggccatagaaattgctcccttacccttgtcctgcttttctatacatataacagcacgggagaggaacacttggaagatgaatactgaggaagagtaatgtgaaataaaagacaatattcagtagcccgagccagtattttagggctctggagccacctgaacaatccccttcaagaacctggcatgaacagtgcagggatatgcaggaagaattttcctgaatctaggctatgtatttccctacttcaggaaaatctcacaaaccaagatgctactctgaggttcagagcctagaagcaatatatgtgtcaaatagaaaatgtgatacctaagagaagggaaagatgtgattcagagaaatataaattctataatatatcattaacccttgataggtcccatgtgttccaccctcctccccctaaaaatggcatccagttggtggatgggattattagtttttattctttactttcaaattgcagcattatatagctttggcatagccccatggtgtttggagagtactttccaaccataggctgtggacttggccatgcgaattcatttggccaataagatgttagcagatatcacgtgagcaaattcttgaaaggttattttgttttttcttccttttatcatgtgataaatatacttcaggcatgtggtggtccaaggaagatgggagatatgtggagcagacgtatacctaattcatagcttggaggcaagcctacatgagcctagcatatatcagccaaacctcagccaacctgtagatatatgagccagctataaatgctttattgtgcatatcataatttggggatgatttgttatgcagcatttgtgtgacagtagctgactgataaattccttcacttttccttatgaattaattctgggtagatttcccctctcccttcaatttgtttgtagtatgatgataggaagatatattcacattttaattttaatggatttgtcatcttctataagacctaagtgacttcttattttatagtcagttgtatctgacaattttaacagagtaattgatttaattattaagataaaaggcaaattatatgtttttatctacaaatgacatgttgtagatatggtaagaactttttcattaaaatagtaaacatgtactgtgaattttaagtggttgttacccactgagatttctcaatctctacttggaatttcgaattatttatcattaacagcatactaaaggggattggtatccagcaggaatcacattagatgcaattcaaacgtgagagaaaaggatggggtaaaaagggctatgcttttattgtttgattttcttagaagctttaaccaacgaaaagaaactccccgctcatgcccctacaaaaatactgcctcttttcgaggctgtggtagtattgttactacattatagcataatttaataaatgttactccctgagccttaaagtgaaatacattcactgggtcctctaaggaaaatgaagatgattgagatgtaatccctgcctttaaaatccttgagttgggaagaaagctatattatctttattaagagagttattgtaccctaaataatggcacatatacctaaacttgaggtggctgtgtagaacactctcaaatttctactctactggtttaagattatattttttaactatggcacttcctaagatctcagtgaaaatatccagtaactaattgtctttctgtacagaaacttcccaatccaaccctccgccgcccccgcaaaaaaaaagagaaaagaaatttctcatatggaaatgaaacatcatttatccatttatggaataaagacaagactcaattctacaaatttcagaacgtacctgctgctctgcatctttaaaagccagcatgaggcagtactccacttttgtgatactctgtttttaatactaattgtgaaatatgtcatttacacagaagtgtgatgtagaaataatggaactggaaggtttaatcatgcagctctgtggcatctctcagaccttgctggtgacctacaaggtatctctgtcctctgctcctttccctctagcccattctcccccatgttctctaaggcaccattgctttaagtgtatgctagggaaaatttctacggcatgctccgtgtaaagttgttttcatggccagggaagttaggaaaccctgcatactctgtctccctctcaaagactctgaatatgttttaactttaaaaatagcctccaagaagtcaaaaaaaaaaaaaaaaaacaccttttcccccagattttttcatcatagacaccctcattctctccccatatgcgatggctgagagcctgtatattagacattggattgatccaagttttagagggagccagtttggttgccttcgttggtttctgaagccagccctaaatgggcacagccttgggccagacctcctggggaagcgccagcagcctgtggattgactgtccatagcgaagggcacctgcacatcagtcggtgccacccttgcttcctgggtgcaagtctcatctgtggatacagcaggcaccgtagcccatgtactcactttaatgagatgctctgtactgtcatttatgtttcattcttgtccttgatgttgtgctatcttttaaagatgttacatgcaggtagcctggcatcaaagaatttgtgatagcaaagatattggaagtatcttcctaagggcccagcttcccaaatgggctacttctcaggatcaggcccattatgctcccttttaaggttattaaattgttacatcaggctgggtgcggtggctcacccctgtaatcccagcattttgggaggccgaggtgggcggatcacgaggtcaggagatcgagaccatcctggctaacacggcaaaaccccgtctctactaaaaatacaaaaacatttatctgggcgtggtggcgggcgcctgtagtcccagctactcgggaggctgaggcaggagaatggcgtgaacccgggaggcggagcttgcagtgagccgagatagcgccactgcactccagcctgggcgacagagcgagactccgcctcaaaaaaaaaaattgttacatcatattgtttgttcctgaatcttatgttcatataaaaggacacattctttttttattttttgtttttttgtttttaagatggagtctcactctgttgcccagggtggaatgcagtggagcgatctcagctcagtgcatccttcgcctcccgggttggagcgattctcctgcctcagcttcctgagtagctgggattataggacccggctaattttttgtatttttagtaggaatggggttttgccatgttggccaggctggtctcgaactcctgacctcaagtgttctgcctgccttggcctcccaaagtcctgggattacaagcatgagccaccgtgcctggccacagtcatgtattttaatcactaaattattgcatgtaaaatataatacttaagacaggtctaatcaggtttctctaatctacttttaacagaaagaagtaaaaacaaaacaaaacgtcctattgttcctcaatataaacaaagcaagttgtagttgtataatttcatattgtctgaattataaaatttctatttgttatttttcatgacacaaaatattatattcatttctttaatctttatctggaaagaaaaaacttccttgtgtcactaaacattgaattttctgatctttcaaggttatatactatattcgggggagagggttactgtaggaatcttaaatctgacttgctttacttttgttagttttaatctctgacttaatattatattaaggtacaatattacattaaggtactgactaaatattacattgaacaggcaatatggaatggccattttctgatttttattttctagtattagattaatcctttacttaaagaaaattggtttttggtaagttgagtcagagatcggctcttgcttttagtagtttcctccctctaccccctttcatggggatgggtttttaaaaacatgaaaaaaaatgtctgaattataaagaatgtctagaattgtctcactcatatctgtcgtcgaaaattatttcaaaggaatagatacagatttcaggaagtcacataaggacgtatatttaagatagtcacattattggactaactataacctatatcttaaaagttttcttttactgaaagtaaataccagagctggttacaccgagctctgtgaaactcttctcttatttattgcaacgttaacttacatttttcctttctttatgagtgacgtaatattgaattttgagttaactctcaacaaattagagtacaattcagatgtgtgtgggttttctaatatatatcagagatcatagggctatacagacaatacagacatacatagtctatattctaatttatttttgttgtctatagctagacaatatagagtatatataatattgtctgtattctaatgtattttgccctctagactatatagtccatattgtctatctatctatatattctattttctatctatagtctatcatctatattgtctatctatatagtctgtgttgtttagagggtgaaatactttaaaagatcatctacatacttgtaaatcaccaagattacatcagcagtagtaagggaaatgtcctttactatttagtataataaaaatgatcctccttagatcacctttttctttgacatgtgcctgctcatctctcatctttttcttttctttaccctcagaaaagtacaattgaaaataaaatgcctccctgctgttgaaatgagtctctgatccctactctaggatgatatccacattctgaattttatataatccaattggccaaaaacctttcatgcttataatagctacccagtgcttcttcagaagattaaataatttcagaaaattaagtgtcttgcaggtgtcttatcctttcattgttgtgaaaatttatttagctgtaacaaaagttttgtcaccttaaatttcttagaatttacttaggcaaaagttaacaatggataagcttattataaaatatcctggcagaattgccagatatggcttttgctttatatattttaaaagttattctttttttaaaaaaaaaaagctcttttgtttgagttttggtaattgacaaaatgattgcatgtgaaacataattcttacataaagtaagctgctcacaacacagactaattacacatttgggaggcaaggcaaagacatccagaggttgctcgtgctgagccaagagcacagcatttaatgaaatgagggccataaaaggttcagcatggatgctttcaggtctgagctgggcttctgggaaattggatgttggccctgtggactggtggattcccctgggctttgaaaggctgggttattaccacttgcatgcgtgaatcaggcactgctttgcagtacaagacatttgtgattccagagatggccttatttggaacactcttaaggtaatagtatggatgtctccccagtcatccatcttccttcctctctttcttcctctcatgccaagtaattacttttgatatttgttttctaaaaaatggttagtatatctagcgaggcctgaccaggtagactcttcagtttcctctttccgattcttaaacccatgttggccaggctggtctcaaactcctgacctcaagtcatctccccgcctcggcttctgaaagtcctgggattacaggcatgagccactgtgccttgccccatcctggattcctatataagtaaaaggaaacattttatatatgtaccaataagtttgttttctaccacccgtcctcctctgttcatcccacagagatcatacttcctctggaaaattagctgccatgtaactagaaatataacaattacaggattctccagcagttcattctgaccaactaagtgttcagtcatgaacctgtggatctaacactttttcatcttaattgtgctgaagtatctcctattttctccactcagagatatctggcatccctcacagtaaaaactgccaccccttcctgggacttggaaacatatgaacaggcagcaatgcagcctgttgctaaaacaccttctgggccctggttgctttgaatttgactgcatttgccaattgttgattcagggcagtagttcttaattggaagtgattttgaccccaggtaacatttggcaatgtctgaaagcattttaattgtcacagcttggggaagggggtactgctaacgtctggtgggtagtagccaaggacttggtcaaatatcaggcactgcattggacagacacccacaacaaaaaattatcaggcttcaaatatcagttgtgccaaggtcaaaaaagcctaagttgaaggttctgtatgaccagccctgggcaggtgctgggcattaggcctacacctatgcaggggaggcattagagcatccattctgggcctggctctgggaatctcaaggacagagcctctagtggcaaagaataacaagtaatgaaaagatttaaaactaaatgaaattcacaagatttcccttactacgccagccaggctctgtgtgtgtgtgtgtgtgtgtgtgtgtgtgtgtgtgtgtgtgccgcacacgcttgaaatctgtgagtggaaagagctgttgcctgaaagatggaaaccaggagaatccgaggtctagatgtgccactgcttgggggttcgtcatatcactaaggtctggcatttagggcacttggtagtactttatacccatttccattttgctacaaaatgctgtctggcaagatttgagtttaattttgagagttactggttgaaccaggattcttggagggaggcattcagcatattgatttttttaatgttagataaagggacatttatttctaacagaggaaatggctgtgttaactactgtaatggtttcctttaccatttgggaagtttgctattattagagggcactaattatggcttaagcctggtacagcataagaaagatataaaacataactgtacttgggtggagaatgtaaatggcatagtgtcttactgtcattgtagaaatctgtcctggaatttcttgagggtcaaatcatggaatggacaaaagttgagacacaaggatacagtatagtatggcagtgaagagtctgacagttgaactcacagagtagaatggtggttacaggcacagaggaggaggagagtggggaaatgttggtcaaaagacacaatctcagttaggaggaataagttcaagaggtgtatcctactacatagtgactatagttaataacattgtagtttatacttgaaaatctctaggagagtagaatttaagtgttctcaacacacacacatacaaattcgtaagaatataaggtaatgcatatgttaattagctcaatttagctattccacaatgtatacatagtttaaaacaccatgctgtactccataaatatatataattttgttttgtcatgatttctgttcttttacatttgctgaggagtgctttacttccaactatgtggtcaattttggaataagtgtgatatggtgctgagaagaatgtgtattctgttgatttggggtggagagttctatagatgtctattaggtctgtttggtgcagagctgagttcaactcctggatatccttgttaactttctgtctcattgatctgtctagtgttgacagcagggtgttaaagtctcccattattactgtgtgggggtctaagtctctttgtaggtccctaaggacttgctttatgaatctgggtgctcctgtattgggtgcatatatatttaggatagttacctcttcttgtggaattgatccctttaccattatgtaatgaccttctttgtctcttttgaactttgttggtttaaagtctgttttatcagagactaggattgcaacccctgcttttttgtttgtttgtttgtttgttttccatttgcttggtagatcttcctccatcccattattttgagcctatttgtgtctctgcatgtgagatgggtctcctgatgtgtcttgactcttcatccaatttaccagtctgtcttttaattggggcatttagccaatttacatttaaggttaatattgttatgtgtgaatttgatcctgtcattatgatgttagctggatattttgcccattagttgatgcagtttcttcctagcctggatggtctttacaatttagcatgtttttgcagtggctggtaccagttgttcctttccatgtttagtgcttccttcaggagctgttgtaaggcaggcctggtagtgacaaaatctctcagcatttgcttctccgtaaaggattttatttctccttcacttatgaagcttagtttggcaggatatgaaattctgggttgaaaattcttttctttaagaatgttgaatattgggccttactctcttctagcctttacagtttctgccaagagatcagctgttagtctgatgggcttccctttgtgggtaacctgacctttctctggctgcccttaacattttttccttcatttcaaccttggtgaatctgacagttatgtgttttggagttgctcttctcaaggagtatctttgtggcgttctctgtatttcctgaatttgaatgttggcctgccttgctaggttggggaagttctcctgggtaacatcctgaagagtgttttccaacttggttccattctccctgtcactttcaggtataccaatcagacacagagttggtcttttcacatagtcccatatttcttggaggctttgttcatttctttttactcttttttctctaaacttctcgcttcatttcattcatttgatcttcaatcactgataccctttcttccacttgatcgaatcggctactgaagcttgtgcatgtgtcacgtagttctcttgccatggttttcagctccatcgggtcatttaaggtcttctttatactgtttattctagttagccattcgtctaatcttttttcaaggtttttagcttcctcgcaatgggttcgaatatcctcctttagctcggagaagtttgttattaccgatctcctgaagcctacttctgtcaacttgtcagagtcattctttgtccagctttgttctcttgctggtgaggagctgcgatcctttggaggagaagaggtgctctggtttttagaattttcagcttttctgctctgttttttccccatctttgtggttttatctacctttggtctttgatgatggtgacctacagatggggttttggtgtggatgtcctttttgttgatgttgctcctattccgttctgtttgttggttttccttctaacactcaggacgctcagctgcaggtctgttagagtttgctggtggtccactccagaccctgtttgcctgggtatcaccagcagaggctgcagatcagcaaatattgcagaacagcaaacgttgctgcctgatccttcctctggaagcttcatctcagaggggcacccggctgtatgaggtgtcagtcagcccctactgggaggtgtctcccagttaggctacttgggggtcagggacccacttgaagaggcagtctgtctgttctcagatctcaaactccatgctgagagaaccactgctctcttcatagctcaattggaaaggcagaaatcacccgtcttctgtgtcactcatgctgggagctgtagactggagctgttcctatgtgaccatcttggaacaaaatggaagaacattccatgctcatggataggaagaatcaatatcatgaaaatggccatactgcccaaggtaatttatagattcaatgccatccccatcaagctacaaatgactttcttcacagaattggaaaaaactactttaaagttcatatggaaccaaaaaagagcccacattgccaagacaatcctaaccaaaaagaacaaagctagaggcatcacgctacctgacttcaaactttactacaaggctacagtaaccaaaacagcatggtactggtaccaaaacagagatatacaccaatggaacagaacagagccctcagaaataataccatacatccgtaaccatctgatcttcaacaaacctgacaaaaacaagaaatggggaaaggattccctatttaataaatggtgctgggaaaactggctagccatatgtagaaagctgaaactggatcccttccttacatcttgtacaaaaattaattcaagatggattaaagacttaaatgttagacctaaaagcataaaaaccctagaagaaaacctacgcaatatcattcaggacataggcatgggcaaggacttcatgaataaaacaccaaaagcaatggcaacaaaagccaaaatagacaaatgagatctaattaaactaaagagcttctgcacagcaaaagaaactaccatcagagtgaacaggcaacctacagaatgggagaaaatttttgcaatctacccatctgacaaagggctaatatccagaatctacaaagaacttaaactaatttacaagaaaaaaacaagcaaccccatccaaaagtgggtgaaggatatgaaaaaacacttctcaaaagaagacatttatgtagccaacagacacatgaaaacatgctcatcatcactggccatcagagaaatgcaaatcaaaaccaccatgagacaccatctcacaccaattagaatgacaatcattaaaaagtcaggaaacaacaggtgctggagaggatgtggagaaatagggacacttttacactgttgtgggactgtaaactagttcaaacattgtggaagacagtgtggcgattcctcaaggatctagaactagaaatactatttgacccatcaatcccattactgggtatatacccaaaggattataaatcatgctactataaagacacatgcacacatatgtttattgcggcactattcacaatagcaaagacttggaaccaacccaaatgtccatcaatgacagactggattaagaaaacatggcacatatacactatggaatactatgcatccataaaaaaggatgagttcatgtcctttgtaggaacatggatgaagctggaaaccatcattctgagcaaactatcgcaaggacagaaaaccacacaccgcatgttctcactcataggtgggaattgaacaatgagaacagttggacacagggtggggaacttcacacccaggcctgttgtggggtgggggcctgggggagggatagcattaggagaaatacctaatgtaaatgacaaattaatgggtgcagcacaccaacatggcacatgtatacatatgtaacaaacctgcacattgtgcacatgtactctagaacttaaagtataataataataaatttcatttcaaaaaaaaaaacaaatttaggttattcttatttcagaatatgagctcactcacccacacagatgctagttcttgaattttgtttgtactaaatgaaaaacaacttattggttggttgacacatttaccccactggggcctgaattcagccccttttaggagggacagtttcagaatatgccatgaggtgtctgcggtgtagatccatgctctctgcaaataggggcagcggctctatagctgagtcctttcccagactcctttaagaaatttcaacaggctttcacagagctatgcctgctccaaaatatacattgacataataaaccacaatggatttaagtgtttaaagtcagaaatacacttttaaaaataagtacttcagttggccagtggagcagtaatacctggatgctaaattgaatttgtttagaataaaccacagagtaaactttaaaaaaaatgaaaataaaaaaattttgatttgtcaattaaaatatacatttataaagaaaaaataataaaacactttccacatcatagtttatctatagaaaatgtgtcaccttccacaatggttgaactagtttacagtccgacaaatattgtaaaagtgttcctatttctccacatcctctccagcacctgttgtttcctgactttttaatgattgccattctaactggtgtgagatggtatctcattgtggttttgatttgcatttctctgatggccagtgatggtgagcattttttcatgtgttttttggctgcataagtgtcttcctttgagaagtgtctgttcatgtccttcgcccactttttgatggggttgtttgtttttttcttgggtaatgtacccaaaggactataaatcatgctgctataaagacacatgcacacgtatgtttattgcggcactattcacaatagcaaagacttggaaccaacccaaatgtccaacagtgatagactggattaagaaaatgtggcacatatacaccatggaatactatgcagccataaaaaatgatgagttaatgtcctttgtagggacatggatgaaattggaaatcatcattctcagtaaactatcgcaaggacaaaaaaccaaacaccacatgttctcactcataggtgggaattgaacaatgagaacacatggacacaggaaggggaacatcacactctggggactgttgtggggtgggcgggggggggaggaatagcattaggagatatacctaatgctaaatgacgagttaatgggtgcagcacaccagcatggcacatgtatacatatgtaactaacctgcacattgtgcacatgtaccctaaaacttaaagtataataataataaaatttaaaaaaaaagaaaatgtgtcaccttaaaattgtatacttttgttgaaaatggatattgaataatgtcaaacatgaaaatgcagcagaccactcagaagtattcactagaggaaaagataaaaaaaaaaaagagagtctgacataggaaccacactgtgcttgagccccacaaagcttccacattccaagtcttctgggctgtaaacatggcgtttatttgctgtgcacctcagtttcctcatctgtggaatggacatgacaataaacctcacaggtttgttgtgaagcataagtgtattaatatgtgtaaagtactcagaaatgaagtagtcaatcattgttagcctctagtatattgtttctgttgtattcttgaatctcagatgtcagagacttaaaaaaaattttcaaaagaaaagataatgataatgcaacctgatttctattttgcttctaccacttaaataataaatgataagtgttagtgcaaagagtggttgtcagtcttgctaagaattaaatataattgccaaaagaggaatgatttaatcataaaatgaagtgatttgaaggtattactaaagcaaaattagttcttgtctctttgtctctgatagacaaaagccagagaacctttctagtttttctcttgaaatggtgttcacaaacttacagtaggatggtttttctttaatttgcactttaattcagtggaactttattagactgaaattaagcaaatcccagagaggcctggaaacataaatggttttgaaatgttatggattctaaattgggcattttgaaagacaaaggtgaaggctaatagtttacatttagtacgaaactctggcattccaatggaaattggaatcaaataatgggatttgttttttaggtaataatataatgagttagctgaaagagctaacttgtaatagatttattaagccataaagtttcatttctttgaacaacatattgtcaaaatcttcacagacaacttcacttataagaaaattaaatgaaagaactatttctttaaaagttagatgtggattttctctatttggggaggggttgaaaatgccgcgtcaatggatctggctgtgatccgacctcttaatcctgttttaattatgggttctttgctacttctgattttatagttatatgtgactgacattcagacattcatagtaattttttaaatatgtaattttacataagagtcccttcaatgtgaccttaagatgggagtctctagatataattatagagaggaaggaaccgacctagaatgagttgatcatttccaggagtatctcattgtcagatttttcagttgaacactgtggcagtttcacatttctacaagcttgagaggaatgcagaagggagacccacaaagatgctcatgtggacagcacttgtctgttcccactgctgtatatttgaaaacactggggaccaaatatgattaaccacatacttctccctggagacctgaaccctaaatatgcctttttccaccatactctgtgttttttgagaccagtatgcttgcggctaggtgtcatttatcaaatatgacatgaatgtttgttgtgcataatcatttttgtttaggtttaaaaatttaatggcagtgagttatactacctgaagatgcaggctgaaagcatgagttttgacaaagtgaaatttcatttgatgatatccattataaatcgtttttctctaactttaaagtaacatctcatttttactgtgtcttattaacaaactttaccaatagtgttgtttccatagtaaatgatatgttttaaattatatatgccccatattttcctgaaattttaagacgtttctacactaagctctgttccttcatctgtaaagtgaagatgttaagactccattatctctaagatctcttctgatacccagggcaccctaagtctaatgtccagccttttttattatggagaatatcttagtaaatttccaaaggcttgcgaggtgtttcagattgcatcgctctgacttgccaaacgatcctctctattgaccattaccgaatagtattccctgaaacctcttcccctgctccatggatgtgactgtggctccttgtggagagctaaacccagcctttgcctgccaggagccgattacagctgtgagaggtccagtcatcctgtcctactgattgcatctgtgtctggtcatctgagagagtgaaatattaatctgctttcttctcttcactcttttcatgtgtattcccctaacagaaaggagaacctgactgctgtgcactctctctggagacaagcgagcagctcacctttgagatccccctgaatgattcaggttctgctggcctcggggtgagcttaaaagggaacaaatccagagaaactggaacagacttggggatttttatcaaatccatcattcatggaggcgctgcttttaaggtgggtaggaatgacatttgtacatcctttgagaaggcacttggagatgtgactgttgtacttagagactgaatggagaaagtgtctgaagacttgaggccactgagactttcccgccagatacaaaaaatatatgtgtgaacagatctgggaaataactggctgctgtttttgtaccttaactggttatttttacttcttagagttacctctaaaaacccaacatgattcacattcttttttgcatactttttattactgtaataggattcctctggatttgtaaactgacaagagttgagcctaaaagtacacaatcagaaaaacaaaactaaaaacaagtaaacataaaggcagcaaataagacagttgtgcttgcaagaatgaaagctcagtggagcctgagagtgattgtagtataaattaaaggccatttatcacattttatacacttgaagaaaaccatggtgcccagaatgcatatttccttttgtatacttagagaagcttagttttctaggtttccagaaaaagaaggaagatcatgcttcagtcctttcacgttgaggtgagtatagtgtactggttagctagatggccggtgttcaagtccagctcagtccttgctagctgtatggaaatgtaggcaagggtcttgaccagctgtctcccatttcctcaccggtagaatggtgataataaataataactacttcataggcttccaggattaaatcacacaatgtgatgaaaacaataaagtgatgatagaggaaggatacacgtttgcacctcttgccaccctcattattatctcacaccgtgcaaggagacttcttgagtttgaattctgccttacctactctctccctgtgcatgtaggtaagctgctcagccttgacatgcctcagtttcctcatttgtgaaattagcagtgcctggttcctcatgctgctgttaagactaaaagagacaatatgtgtcaagtgcttagcacagtgcctgtcaccagctgctgataaatgttagccatctgaaaataatcgtgatatgaataatgtctatcctctcccacagcaaagccaagaaggccccgttacactcaacagagcacccctgcacctagaattctggctttgttgaagcaactgtcgtctcacacttacccttccacttttgtttcagactagatgtggagataatgcctttttcactgggaaataaatgtactttggacagacacctcttcagtttactccttggtttagttagcttttgtcgcataataaatagtcataatttttcagtaatatacacatcaataagcctttatttttctcatagctctgtgtgggggagctggggtttgggtaggattctgattcaggctggtgtctcttgatcccactgtaactctgcagatctgagtgtgctgcacttctttctcctgctccttggatcagcaggctagctggcgcatgtccctctcatgcctcgagctgtcagagggccagcggcagtgggtgaatccgcgggctccaagctagcacactgtcaccccacacataggccactggtcaaagcaagtcatatggctgagtccaaggttgagcagtagaaaacacactccacccacgatgaagttatggcaaagatgtagatacagagaagggtaaagaattgagtcccatcactccatctataaaactggctcagaaatacataagcaggagcaaaagcgaaatagtagtaatagcaacaacaacaatagcaatgaacatttattgtgcttagtatatgctggacactaggataggtgttttatatgggttatctaactttattcacatttacattggattattttcagtccattttatcaaagtggaaattacagattagaccctttagtgcctttcctgtggtcagatagccaggaattactttaagatttgaatccaggcagtctgactccagaacctgcgttatgctgcactgaaatgaagctcttccatatgatccattcatgttcctagagagcagggcctgttcgcctggaggtgtcttgtatggtgctatcatccttagccaagccatctaggtttgaggatgagttcttggtcatgtttgtggataccagcttgaaattagtcttcttattcctaatgacagctctatttgtagaatttactccaagtaaaattgaaactgagatgacttttcggaaattaaaagcaaacatcttagcttttttatgggcaataacttaagctcaagcagatattggcgagcaggtttaatatgtatatccatgtttgtgtaagtgagcatctccttacctaagcagtttctaacagtcctgtttcttgcagaaagatttcactttccatttatgtaaatttctttcctgacactggtctgctgagtcagacaatcacaccattaaaaaccactggacagcatatttatagctgatcttaaacagtaagaggcatcagtcatgaacttagccttcttgtgaatgtttagtatccatttgtcttgtttaccttttgcagtgtaaagggtagaggcctgagatttgttcacaaaaaatctgattaaccaggggaaaaaaaagtatttttccattctcctactgttgttccagtaatccactgttacgcctcggaaaattgccacccattctatgattcaggattctgtcttaggaaaattgttttgagactttgttcctgtccctgttgagaggatacacatgtaacagactacagtgtctctggggcagaggagagatcagcactgggaacatctttgtctcagcatttggccctaggtttttacccggaatcaacaaaataatctttcaaccagagcacaatctttttctcctcgcccttcataccactaattagttctcaaggtgtttttccctttagggaaggtggattttttgaaaactaaactactttgaaagatatgaccaaattcttcctgtgcattctgtgtgctggattctcctgggggcttccattggtctaaacaaagataggctacttcttgccagatgtaaaacccctgaatacctcgactctaattgagggcattgctttgttttgttttgttttattttgttttccttaattctcagtctactgctttctgtcatgtcatctcttgtttgaattatttctaatagaggatgtaaatctctatttggaaacaagagcagccagctactctaggacgccctcttggaagtgagtccctgactcattctaaaaaccaacagaacaataattctaccctgctcagaattatccaaatgcttaatctcaacttgatatttaacttcaagtctgtacattaagaaataaagcccagaaactcttctgtgcatgcatcaggctgcaccacttttgattacaggctgttttgtcatacggagctcttcataggcccctctgaagcataacttgtagctatgcctcttagtgtactatatggccattgaccataacagcggaatattgcttcttagagtattgatgccaatgtgcctaagcactagcatgcattacatgtttgtggtttcatttagttactgtctttcttcctgggcgtttgcccctgacatacagtgtagttgcttctagaactaaaatatactaaatacaagcatatatgtcaactgcttctgaaagaattatgagcagaatgaagttacgacatccatgagaatgattttctaaaatgttgcttttgtggttggaatttatgtggtagtgctgttgctgttcaataaaaagaagtatcagctctgttgcagttagaaaaaatacctttccctaaatccacatcaaaatgtccctaaatccacatcaaaatttgcgttttattttgtccaggaaagcacaaatgaagtctaaatgatccgtctgaagatgttagatatttttatgttcatttgctaaacattttaaattcattttgagatcagtggtttttctttgctttgcttttcatgtaccatattaactgaaaatttttagtaaaaatttttacatctatggactacacttccttaagttgcttgttttgctaccctaaagaattactttaaaaatgtatacataactagaatagtgctttctttaaagttaggtaagatattgtaagaacacactgtagtgagaataaaagtcccatgaagtctgttgtaccagttctgaatggtgtttttgacttcactatgctgactttgggagtggtatgtctcctactgaaactttgacctagtaaggtaagaattcaaatttacaggaatttttgctaaaggaagaatgtcgtatatcaggtagattgtttaggggctgctaaatagagagaatacatttaagactatcagttattctctagagaattaattagccaggtttgtgcttaataaattctcttgatgatgaagaaattaagtgaaagaaaaatgcctgacatggctaattgtaaatgtatgcactcagaatatgaaatagacataattgaagtaatttgattcttgtgtgcttaggaaatttgggattctccttctgaaggatgcaggatttcataatctgcactgtttagtaatgggcaaaagaaagaatttggaccaatacaagcaatcatgatatttttaaatgactaaactctaaatttttggagagaaaatgcacatctctagaatatccagaaacatggcgcttgatcctgaatctccatgtctcattgtcatgtgagacatttaacagcatccaaactacttaactccagtaggagctcccagcgtgactaatttccacccccatctctgccggtatctataaatcatgtgatagatctataattaatgaattcaaaggaagataaaagggacagctttttaaggaaaactaatgttaaatgatttcttcaactggccatttttcttaaaatttataatgttttctactggtgggagaaccttgaggatccttactggtagtcagtgacttctaagctgttacctctggcaaaaggaccagataatgtgagaatgtcaaaatgctattgaaactcctcaaatgtaagaagccaaacactaacattttatttctaaccacaaagatgtgatacattttaaggactttaaaagcaggaactttgcctggaaatatacataaattcataatcactatatatccaataagaatttgaccttaaaaaaggaagttattaatttaagcctaggaaaaatacattttagctaattttccgttttaaaaaaatctgaaaatgttagcatatgttaattcacatagtcaggcttatttatgaattttctaccataggaactattaaaatgtaatataacattacttttaaaatctcaaagtagctggcacagtaatgggcacctgtattttcaactaagcaggaggatcacttgagctcaggagttccagactgtaatgcagtataatcgtgcctgtgaatagtcactgtgctctaggcctgggcaacacagcgagaccccatctctttttttaaaaaatcccataattccagcatctatcattgttttttcttgctgatctttatcacttttgcatttttatttcatgaatggaaatgcaaacaggaaataaatttacatgtacactatactgaataaaattttggaatgctacaacattttgatgtgtattttggactccgtgattgtctcagtgggcttgaaaaaatttaagggttgatattcctaatgaaaaaggaaattataatctacaaaagttgatatagcatggtaatgatgctttggctctgaaaatagtaactttcccctgaaaagctatattcgtcttcattatgggtacctataggccatatatatgtatcacacacacacacacacacacacacacgtaagaccagtcactaggaaaatggacacaaaccagaatgctcaaataaaactctgaccacagtatgaactctgcatacatatacacacgtttttgttctagcattctggttgtacccatttttatagtgactggttttaagcaatctcagtataagcaagtgccaagtgcataaaaaccaccaccaagaagtaaatcaataagataagtatgttgaaatggcttccgaaattctaacctagttaggcattcatgcaaattattcttaattcatatataacatatatgctttaacaagcttctttttaatctggttttctaggccaaagtaaattaagagcagaaaatcaggaaggagataggaaaggatggagaagaaactggaatgacaggaaagaaaaaagtgtaaaacaagcacagaatgttattattgtatggtacaccagagaatatttctgatggtttgaagtcagtatttctcaaactttcttgcagaagaaattataagattcaatgtggccatagtaaaggccataagttgcagtatatctgtttatgccccatatttttccagaatgattttaaaatgaaaagatttataatacattttgaaagcattatttcagaatggtttatgcatatgttaactcctatagtcaggcttattacaataagcctgaccaacatggtgaaaccccatctctgctaaaaatacaaaaactagccaggcatgatggtacgcacctgtaatcccagctacttgggaggctgaggcaggagaattgcttgaaccagggaggcggaggttgcaatgagccgagatcataccactgcactccagccggagcaacaagagggagagactctgtctcaataaataaataaataaataaataaataaaagcttcatatgcccacaggtgatttgctgctgggacttcattggtttgttacatagaaatggagtgaggttcttaagacaataactgaattacataaatttaaattttacaatttctgaacaagtagagataggggcagtatacagaacgtaatcaaactttttttttcttttttggaattctgaaggttctctgaatatgccctggcatattcaagacagcttaggttcgtgactctctcatagttacaatttgtagatgaaacttaacaccaggaccaaaacacctgactgacttaatttagcaagcacttcttgaacatttagagtgagttaggcaacagtgtatagtggactagacaccgcatacttaaaattacccattctataatctaggaaggtagtaacacaatacattaaatatataaaaaacactaatatgataagagctatgataggcaaatgtgagaagtatcgtgggtgttgagatgatgaagcatttaattctgtctggggagaaaactatgaaaggaaggcaattgcaaggcttgcttggggtgaggagtaagtagactttgaagaggtgagcaggaatgcaaagggcattttgggtagaagaaagaatatgggcaaagtcaccaaggtatgtacaccaaagtacagtctgttgtgcctggaaaatagaggtcttatttgggaagaatggacctcttcacataagctgaaatgatgtgaaacatgtagtagcttttttgttttaacaactgtactttaaaaatcttgattcattcttgcccttccattgcaattgtttttaaatgaaggtaaatgatttcaatctggaatacaaggttcttttcttagtttagggttttgggttttttggggggtttgatttgttttttcaaaaaatgcagtagacagatgttgtcatagagtgattgtagggccatgagaaggattcgttgaggataattctctccctgaatcaggtgccatcttgcctggggtccagccctattccagggaacatctgctctgcaacctgaagtcaagctttggggtttgggacctgggagttgataatatcccaggaggccgtaccaagggccccgttagaagcatgcagaggcagaagccaacatctggtcatgattaatcctctcaacaccctggactaatgtggactggccttgggccacagccagctacccctgggaaagccagcccactttctcatgcttctctcatattcttcagtggctagttcagttctttgccttggctttcttacttttcctctgtattcattagaattttagaggtaacagggcagttgaggggagggtttaacaaaaaatttgccaagccaggtggattaagccacacaacattgccagtaatcatggcagaggaagtacccaggcaccagtgaatataccacaggggatgaactacaaggtcattgcaccccccagcaatcataaataagctttagaggacacatggagtagcctacagcatacataacgacccctcactccaaagaattatctggcccaaatgtacaattgtggaaagaccctggtgtaaatattttttttttcaaaaatgagtatctgtagcttttattagattctcaaaggagtctaagaacccataaaggctaaaaatcactagcagattgtttgaaaacatgggctgcagagtgacccagacctagttcacatctgcttttagaaacatgacttgtaacaattcatttaacctctctgactgcaatttcttcttttataaaatgggggcagcaatctcaaatatacagggtttctataaggagtaaattgtctgctacatgtaaagggtttagcatgatgcacagagtagaaactctttgtcattaatatagtgcctttaataatctctaaaagtctgaatgtagaagcaacgtagcataaaggattcatgtcattaacctgagagatgaggagacctggctatgaccataccctttgacaagtcacttaatttctctgagccttcatctttacatctcctaaatagcagagagtagcatttatatcacagggttgctgtaagaaatgaatgggcaaatatatgcaaaagacatgctcaaggactagcctacattaggtgttcagtaaaagggagatgtcatactcaaaggtcttgtctcctggtcctctgtgcgtcctactgtgataggaccagctaaagctgatgagattgaaaccatgccaggacatggagaagacctaacctcataccaggttttttcgttctaaagtgcactgaagaagttacattttgtctttactctgtcctcctgattctttttaatatgttttccttccctttgggaatttcctttactcctttctagcttgaggatggagttggttatggggggatgccagaagcggggaacataattgaagtatttttgcttaggagtctgatgggagtaatagaggaagaaaaaggggtgagaaagggagagagagagagagagagagagagagagagagagagagtgtgtgtgtgtgtgaatattgcaagcataacccaggtgaaataaatatcctagaattaccaagcaacatccttgaatatttgaattcatttatgtaaagtcaattgaaagttaatattctcatgcctaaatatttactagaatttaatattaattttaaaaaccataaaaagctgattgtctttgtccaaattattccaaagcaaatgggacatacacaattttgagagagatttgatgagtttttgaataatgagctcctcattgaatcaacttcattttaggtcaagactggacatagacgtgcatgtatggatgtctagctaagtaggtagacagccttttttttttttttttccctcctctgggttgctctgccatgcccctgcacagtttcctgtctccatatcttctgttgtgtgtcttgattttatattgtcttcccttccaggagatatctggtagcatattgtcctctctggttctgaaagtcttttttttcttgaagcattacccctttaggggcttgtcattgtcatctatgtagaatatagaatggtttggtgaatagggacgctgtggaattcagaacttgggctgttctgttccaattctgaccttaactagctgaacaagtctaatatctgtggaagtgccttttcctaataggtgttcgataaatggtttctcatcctctttgggcatcccattattcatctgtaaacggaagaggttggatgagatgacctctaaggacccttccagctctaaattcagtgattatattctaaatgttaggacaacatggtgcttactggcatcgccattaatgaaattacacatcatttatcttataaagaaaaagcacacaccaataacaacagaccagccaagcctgacagtgagagtgtgtggatttttattgcacccacaactctctggtgatgcttgtgatgaatgtgaatgtctttgaaaaaaaatttcagctgccctgaggtgacctgaactgtctttttgtttgggacttggttacaggaaacatgccctacttcagtgtcattctgcatgcttgagatttagaatgtaactgaaaataaaaaaataaaaaataaaaagtttgtgcttagtaactgttgatagattttaccaaaagttctcctatcttcttgtctgttatctacctcttcactctgacgttgtctcatacttcacagaaaaggttcacaagagattaccaggtgggatctcactcatatttccttccctccatctctagaggttcccataaagcttccatctttatcttgtttcttcctgtcgtagcagatgaggtgtcctgccaagacaaagcactgcaaaatctcaacatttcctgttaacctcatttcctgttaacaggactaggaccaggaactggattcaactcttctgcttcctcctcctctttaaaaaccacacatcagtctccagtcatcctaaaacgatttttagtaacaagattcagcccaatggttctcctttcttatatgacaatagagcagaaatatttctccagttatatctcacatcacataacgaaaccattcagggtgtttttgttgttccccccaccctttttttttttttttggagatggagtttcgctattgttgcccaggttggagtgcagtggcgccatcttgcctcactgcaacctccgcctcctcggttcaagcgattctcctgcctcagcctcccgagtagctgggattacaggcatgcaccaccgcgcccagctaattttgtattttaagtagagacggggtttctccatgttggtcagactggtctcgaactcctgacctcaggggatccgcccacctcggcctcccagagtgctggggttacaggtgtgagccaccgtgcccagcccgtcatatcccatttcatgtagccttatgcttttttgtgcctcactcaaaattggataacagaaatgaagagatttctttcttgtttggcctttcctgtaaatctcatttccagacttgcttcaaattagggtaaaggttaagtgaaatgggaaaacaagaggaaggcaggggacattaagctctgaggaggcggtccacttaaacggtttacatctctgacttgacgcctttgtctattgatcccattaccctgccatctccatttcttccccgagtgggtgtgtcctcctatgggcggcccctgcaatcccacgtggctaacaccctctccagcaggcggcgtgggcagtgtgtcttcaccagggcattggctctggggaacagcagctctcaccatgccctcccttttctccactatcagcagagggacttcctcgggccatctgctactgcattagtccgagtttaacgacccgtctgcacagtttccctcccaaagctgtctggttggtttctattgttcattgtgtgtgtctggctatctcatttcttttttttttcttttactttttttttcttttacatttcattctgttaatttgaccacaaatcccagatacttctcaccactagaactctttaatattttcctttccctatttttgtgttgtgcagttgtagtctagagacaagaaacaaagggaattgtcgtggaagaactaaagagtcaagattcatgggaacctttgactcactttcgtggcctggaacaagttacattttgtgcctcagtttccttttctgtaaaatgtttctgaaaatataaatcttaaattcttaggttctgtgagaatcactagaggtaatttatggaagaattctctgtaagggtaaactgttacacacctgctgttaattctgttgactttattagcagcagcagcagcagcagcatgataacattcgtaatcacagctgtgctttatagcaagcactttctacctgagtgtagaataggtagagagcatatcccctgagtctggctgtcaacatttcaagcatctttgctcctgggctgcctttggggaaatgcactgtggtcccttcaagttctgttctaggcagagcaggcatcccagtgtgtcagccactgatctaggcctctgcttatgagggacttctggctggagatggtcagtgcctcattcactcaaaagtgaatgagaccacagtctgggctgtgtattcatatgccgaggttctttgtgctttgtagtaagtggtatttcttcctgaagatgctggttgaaagtactcattcatcagagcctctttgaaaaaaccttgacaattctttttgtcaagcttttccaccagaaaatatcagggcgaactggcccttttctacacacctctgtgttctttggcagacgagcaactttgtggttgtgttagacaaaattatgtggttgtttttttttagtactgttcagtagagctagcaatgatatcaggagatacattactactgtcaagcacacagcatttatgcatgatgcctctttgtgcctgaaaaggcaaattctcctttcaagagttgtgactacctcctttggtttccaaacccccttcccttgagtcaacaacatggtctccgccagagcaaatggcagaatcaggtcagattagcatgcttgccaaagatttaggtaagaggcattatacaaatgtctaaattattgcagctcaggactctaagatttctaaaaaatactttcacacaattcattatcactggtatttgtgactatttgataagctccagagcctttttctgccatggaaaataaatcacttctaacagctaggttttctttttttctttttttcatttttaaacttgaacttttccccaaaacgccacatgtcatcaccatacttttctctgttgaatattgttttcctttcttctgccttaggatggtcgtctgcgaatgaatgaccagctgattgcagttaatggggaatctcttttgggaaagtccaaccacgaagctatggaaacacttaggcggtcaatgtccatggagggaaacatccgagggatgatccagttggtgattctgaggaggccagagagaccaatggaggtgatgcaaatcttgattctcctcagccagttgcccaaattgccaccagaatatgcagacttccattcctagtatggcagctagattcatatcgagaaaatatgccccagaagggctttgatgggaaacaggtggttgtgtattttaggtataatagaaaggtgtaaaaatgtgcatataaagtaagtcatttatcagatgtaacaggtctataatttctagttttttcccccagaaattccaagagctctgaacttgttcataaacatctttatatacttttttggttgatatgctagcagtgtccataccttagaaagtgtctaatcacatgtgtacaatgtttaatgtggagatcattgtaatgcagtcagctctctgtattctcttccataatctgcatataaataatgcagacctgagacttaactaatttaacatttgatttattaaacaagctgcttgctcatgttattaaataaatgggagtcttgttttttgaaatcttttattattttttataagttttttaaaatatcaagaatattttcacttacacatggagtctaagtgtatgatagctttaataataatattcctaacattatacatataaacataaaaatacctaaaacattattttctcttatatgaagaataattattaaatgctcataaaataattttagaaaaagctaagaagaaaaagttaatagtactgaaagtttagaaaaacatcagcaaatcacacattttgtcatatcaggatattctctaaggccaaattgtgtttgtgtaataaaataatatacaaaatttaaaaaactatttaaaaagctaatataaagtactagttttaataaagagttcagcgtaataattgaaaaatgaaagctttatcaagttaatcaagagttaatggtagtggggctcattgtagttaaaagcttcagctctggagtttcgaattgcttgggtttcaatcctagatttgctatttcctggctatgtaagtacatacataatttagtgcttggtattcatagatgacagatattgctgtctgttttatcccttaatgtgtccttggtttccacatgtagtagatgcttgataaatattgagtgaatgaaaatgtcacatctgagacttacttcatctcagagagtaaacttgagtagtaaagttatatactctatcttactttattctattatcagctacgggcaaggagtagctataccttttatgctctcctttatataagctcgtagatgttaaataaatttaaattggccaattactggagactaaatataatgaacttattttcaacatttgtgtctgcttaagtgacagtgttccataaatatttaatgggctttacttatgtacctagttataacacccttatctgccacttcctgccctgagagaattggccccatctggtttaggatagttcttactctagagccctaggactccatggaacccgtttattggagagagttgaaaggatggactgcgaacgcctgagtcatcccttctgtgcatctgcatatcagatctcccttaagactttttaaacaaagatacctcaactaatagaagagtctagaaaaaactgctgtagcataacatacctgtgcagatagcaaaagttaaaaaagaaatgactatggttctaaaagagttagtagatgacagcagataggcgttatatattttggctcatcgagttggcacactttactatttgcattcccctttactgcaggtattttcattttaattctcacactctgggtagattggcgttattccatcagaagaaagtatgaaactctcatttgttgcccgccatcagaagtgccatgttaatgtagatcaccagggaattgatcaagaataagaactgggtcaaaaagcaatttctatgaggacgtttaaacaagatccatttttagtttccctaatatttacatgctttccatggggaatgagcaggcacttgactctcggctactgagcatctctgcggtacccatgaagattaaagagcattgtttcttataaagacagaagactaatgtacagtttatctttattaaattgaaaaaaattgcaactgtttgatcttcaaatctgtgtttcactgtgtcagagcatattttgtgtgctcatgtttttgctgtattctctggtggaacagcacttgccctccagtacaataaaaagtatccataacctagaaaaaggtctcagcactgttgatacattcaggcaaatcaattagttagatttgccaggaataccaaaatggttgcttgaacattatattgatatctcaaaaattgaagaagctacttaagaaaagtcaaaatatatagttgttgggatttttcccgcattacccagatgtacaagatatgtaaacagttttgatgaggaccttgtgaagaatacataatgagcccttgattgaatcaaaattgttttaaacagaaacatatttttcaaaggatgagcttgaggttcaattgtaattctatttgagcctagagacttggtattaaaaaatgggttatgacctgattttgtttttcctttccccaaaacatttccctccctgctgccagctcatcgtggcaaaagcagaatatgtttaaaaatccattatattttttattggctgggacactaatggagggctctgcgacggctctattttacaggctgaatactttaattaggctggttactgatcagttgttgggatatcgattgtgtcatttatcaaagagctggggaagcagaaaaaaattttttgttcttgttgttattgttaaatcaaagcacaaggctgagcaaagcaagccctagctctctttcctgctgcagctccagctttaatttaggactagcttacctcctataccaggctcagtttgactagcagttcagaagaaagggtaatacactgggtgtgggaaaagtgttacaagccttgacaaaaagctaaaggaccttcagcagctgaaaacattttaattattaagaatgcataaatggaatgttttagatattttgtgtgactagctcaacactgaatttttataaccaaagaggaaaatataaatccaatgctttgttttagccaaatgctatactcagaagagctctgggaatcagatgggtgctgctgtttgtggtacattcttctcacaaatggtcaagggaacagccatgagatggcttccaaatcatttacctccttaaaatctgttattgagacaaataatacgaacaagagcataccctaattctctttgctccaacctttttggaaaaaaaaatagttaagagttctctatcatcagcctcctccaataattccttcttcagcacctgtggaagatggatcgtaggggtgttactctggatacagcagttttcagaaaactgtgaatgtgtttacagactgtaaaaatcaaaataggaaggggaaatatagggggggaaccctcaggagaactgctgtctggcgtcacagcggtttgatttagctcctggccaaagacctagtatctgcacagagacacactggtggtatttcagaggcgaacctgcttgaattctgacttgtcctagagcatatgcacttaggcgcagagagagagaggaaccagctggttggcagagaaacacccttggcatgaactgtattcttgtgttgacactgccacaagctgtattccccagatggaagaaaatttgaaagaagccagttataagtgggaaaagagaataataaagttaatcctcttttgtgttggctatcagcactcctaatccttagcaccacagtgtcagtactttttattttagactcaaagatgttttcactgatagggccattttgagtttccacagttgaggacttaagtgtaatagactcttgaaagactattcatacagcgatcattctttcactttgcttcaactgaccaagttggaacatattaaaaatgcaaatgtaatttttacttttatctcttaggatcctgcagagtgtggggcattttccaagccatgctttgagaactgtcaaaatgctgtaaccacctctaggcgaaatgataatagtatcctgcatccacttggcacttgcagtccacaagacaaacagaaaggtaagagtctattcattttatccactgcaaatggagtgagaaaacacaaaagtgtctttttatctaaaaaaaaaaaaaaagagtaaaggggagttaattagactaagtgcagactttgttactcggagtcacaaacactgagagagttgggggagagctgactcagaacttgtgaatcagattcctggcaatgtctctagtttaagtgacactttctgtgcttgctgccccaaacatggagggttatatataaaacaaacgatcactggagaatcaaagatggcaaactgttatttttaagctcttctaatactggaagttaccaagtataaataaataactaccaaaatttaaaaatgtatggatttataatccataaaatggtcatagcgtgattcacagatgatcctcgattctaatatgagtatgataaatgggtgaatatcctaacctgaaaccatctcgtgatggttggaatgttcttgttattgtcttgctacactgttttgccttattatctaatgtggatcccatttctagctgactccagatgtaaaaaaatctgggttttcctctttgtcttttaaaaaatatacttcaggtcaccaagaaaattgttttatctccctgtatctcttttctttaataaaatgaattttttattacaaaaacaatacatattcattgcagaaaatttagagaaaagaaataaaaagaaaatttaattttacttatacttctatcaaagatcctaatcagtaacattttatgtatatctttcaggactttttaatgaaaatattttatacaaaaaatgaaataatgaaatgtatgtaatgtttaggaaatttctttttaaaattaatagcacattatatgcctcttagtcattgaatattcttctacaatatcacattcagtagttgcatagtgtcttttgaaggtaagtaccatatattatgtaatcagtccctatattttgaacacttaagtgttatcataatttaactatgtggaaagaagttccaagctgtgaaattactccatcataacatacttgtaaatctgaggtggctctagaattaaattatctcattagaatgggatgttgttttttccacagaattcctccattttagcaagagtagtagcaacagctgctatcatttattaagtgtttactgtctgttagatactgtgttgagcaatttgcctgcagactcaaagtggataatgttatcttcattttacaaatgaaggtctagaaagtcagtaaataatttactcacaaatgcatatttgatacatgcacagtctggattcaattcctgtctccctgtcctcagtttgtcttccaaaccacagcatgggtctgacttatattggtctattgaaactattggagtcctttcacctactgagaatgcccattagaagctgactttagaccgggcacagtggctcacgcctgtaatcccagcactttgggaggccgaggcaggcagatcacctaaggtcggaagttcgagaccagccagcccaacatggcaaaatcccatctgtactaaaaaaaaaaaaaaaaaaaaaaaaaaaaaaaaattagtctgatgtgatagcacatgcctgtaatcccagctactatgggggggggaaaaaaaaaagaagaagctgactttacttagtatacagataaaaaaaaaatactcagtatgtcttttctcatcttaaagaaattatggtggcaggcacctgtagtcccagctactcgggaggctgaggcaggagaatggtgtaaacccaggaggcggagcttgcagtgagccaagatcgtgccactgtactctgggcgacagagcaaggagactctgtttcaaagaaaaaaaagaaattaaaaattttcttgacagaacaagattgccttctgaaatcttaaattgcagtagcaaaagagcctgggaaaggaatggcaagttttctgcaaaataaaacagtcttctttctaccttatgatcacgaatgtggacatttgtattaaaatatctagatttcatgtaacttgattggcatttaattctctagcaacgtgtggcccagtgtctgtctaagtctagagtttaattcctagttacaccagtgacatctaaatgaacactaagtaccttttgtttttaatgtctataaaatacagttatgtgccacataatgacattttggtcaacaacagaccacatatatcatggtggtcccataagattttaatggagctgaaaaattcctaatgctatactataatttttatcatcattttagagtacacttctacttattttttaaaaaaggtaactgtaaacagcctcaggcagttcctttaggaggtatccagaagaaggcattgttaccataggaaatgacagctctgtgcctgttactgcccctgaagaccttccagtgggataagatatgaagggggaagacagtaatattgatgatcctgaccctatctaggcctaggctaatgtgtgtttgtgtctcaggttttaccaaaaaagtttaaaaggttaaaagaaaaagtataatagaaaaagcttatagaataaagatataaagaaaaaatatgtttctacagctgtacaatgtgtttgtgttttaagctgttattaaaaagattcaaaaagttaaattaaaatttataaagtaacaaagttactgagattgaagaaagaaaatattttttagaaatgtagtgtagcctaagtgccttgtgtctgtaatgtctatagtagtgtacagtagtgttttaggccttcagatttactcatcctcactcactgactcacccagagcaactgccagtcctgcaagctccattcatggtaagtgtcctatgcaggtgtaccaatttttatcttttatactggattttcactgtagcttttctgtttacatacacaaataccattgtgttgtaattgcctgtagtattcagtaaatgctatacaggattgtagcctaggagcaataggctataccacagagcttaccagagtaagctaatccttctaggtttgagtaagtacactatgatgttgatgcaaggacaaaattgcctaacgaagcttttctcagaatatatcctccttaagtgacacaagatgtattttctgaagacattgagatacttaagtaaatggaataatatctctgcaaagaatagcaaaggctaaactaatgaaaccatagaagtagttaatgtgtaaggatacatccagaaaacaaaaaataagaaaatccactccaagtgcatgctaaaaatacaatacaataatcatttggtttggaatttcaatagaatgttcagactttgtatatcttctgtacaaatagagtcctttgggcacaagtggcctcagacaaccactgggagattttgtctcttcttttcttcccaggacgtagatttagttagaacaatttttacatcagtgaaaaaaatatataaattaactatctacaagtttcctgtttctctttcttccaaagtgactccattaaacattattttttcaaaagtagagaaaatctattattatattttctttgtggatctgtgctaccatactagattataaaatttaggcctatcaaaacacagacttattacattttcattgttagaggccagtagatgaaattttcttactttttatgtaagtctattgatttagagaccaaaaaattatagcagaatatataaacatgatgctataaaagagtatcatggccatcacgtctttgtaatattaatggcattttatatttagggaactattgggagttcctgagtttcagatccatgtcaggtggtaacaggccactaaggcttataaaacctgaatgttgattgccactaccagtttttttaaggatcttctttagaaaaacaagattaacttgacaaaatgtaatgtctagtgaggagaggagctgttacagccaaaacattggcttttttttttttctttcctttttcctttcctttgtatatttaagaatccaatgttgatattctgtgttccatttatttttgtaataatagtacataccacccacagttcttggtttttattttttttattcctgtcaagctgttacacagaaaaaaggcatttttagaactaatgtttatagaaatcgtaataccagaaaattcacatttgtactgaagaattgctagcaatgccggtagtgaaataagtgtggtgcttcaagatggtaatagggatggaggctgtgtcccaggggcttcctataaaatcctgttaagcatttgaatggtaatgaaatgcaccaacactgtattttctgaggaatcttgctggcagatcttaccctgggccgaggaatagcctcatgcagtttgcctctggttagcattacctctcatttcactgcacttgtctcccctatatagctcttttcctgcttctcctttttcagctcaagtgcactcctgtcttaggcacccactgcccccaaatctgcccagcatcacccactgggttaggcctttcatctccatctcaaatcaaatgtggtggttctgtgacctgtctctctggatccatattccctggggtcctctgagacacatcatagtagaattatttctaatgtgtatctttctggggaccagcatgtatctacccctctatagcatgtaaagcactacgtctggaatgactatccaagattgaattatacgtttcaatttggctaatgtttattggatacctccattgtgcagaatacactatcaggagtggtgaatgcagtagtattattgtccttaagaatagtctgaagcaggagtcaaaaaactttgtccttaaagtgcaagatagtaaatatttcaggttttggactgtaggtctctgtcatcactcaattctgccatcgtagagcagaagcactcatggacaatacataaacaaataggcatggctattcagtaaaactttatttgcaaaggcaggtggcaagctggttttggaccagggccatagcttgctgacctgttgtctaaagttacaatctcttttactcattcttttctgatgtggccttggtaggatagatcccacaacacaaataacaacaaaagatgataattaaaaagaagagccatttggccatcaatgaagtaatgactacagggagtgctgtgtcaacatttacaggcatagatatatacgaaatgaccatcaagaagactgtacctcgtacactcaatgaaatccagaaatattattataggagataagagttccagacttttacactgaaacaagggcttaacaaaggtgtctgggcccagaagaaaataaaaattccttacagcatctgaatatgttgtttaaaaaatgtaacaaggggccgggtgtggtggcttacgcctgtaatcccagcactttgggaggccaaggcaggcagatcacgaggtcaggagatcaagatcatcctggctaacacagtgaaatcccttctctacttaaaatacaaaaaattagctgggcttggtggcaggtgcctgtagtcccagctacgcgggaggctgaggcaggagaatggcttgaacccgggaggcggagtttgcagtgagccaagatcgcaccactgcactccagcctgggtgacagagtgagactctgtctcaaaaaaagaaaaaaaaaaaagtaacaaggatagagagtcaacaaataagatacttacctcaacaaacaaggtacttacctctacaccgatcaccactttaaaaaaaaacactgaaaaacacataaacacataaagaacgataaatggttcacatgagtgtaataaaaattaaatttaatgattgtaataaaactagctagagaagagactgtagaagacatggaaaaacgagaaagaggaacacgaggagaaagttatctacagtctagtaaaagaaatagacatagataaatagataatagcttgatagaacaataaatacatacatagttcattgcaaaagtggcatttgataaatgctatccaagaattactttacataatattaagtaatagataaacctaaagtgtcactggatagataaagacagtgaaagtctatttcctggtcctgtcactgcacaatgaggtttggcagctgtgctccatgcagtgattacaggacctaggctccttccactggtggctgggcacctcgtcacctggctttcaggtgatgtagatggggaaaggaagagagagtgaggaagctgcaccctctcataaccactgagactgggaatgacatttatcatagcagcccacattccatttgcaagaactagtctagggacaaagaggccctagcaatggtgtccagccgtatgcccaggaagagaggaagagcacggatagagtgggcactggtcttcttggccactgttataaaagtgacagatccttggcaacagcgaaggcttcatagtaaaagtgatatttgggtggaccttgggagaagggtaggattttgacaggtagagtaggttttgcagttacataagcaaagatactgaggcaggaacacccaggggtgttggcagggaatggtaagctaacgggtaatgggagataaagttgtttgccaggatcatagacctttattccgtaggcaatgtgtgcagctgaagtgattttgagcaacaagttacatgatcacaaatacgttcaccatcactgtggaagatggactgagaggttgaggatagaagatgagagccaacagaaaggaagttgtcccaggatgtccattgtccccaatttacattacagtccttctgttctgtttctcttagcaagtcttgaatgcctgactgctgccaccactaacaaatcaatgggcccctagggttggaggtggtgcaggggcacagtgcaggcgctgcctttgtgcttctttccccctggtcacctacttagcaggtctgcttcaagcttcatccccaggggcatgtcagctgtgctacaactacctccacatcagtctagtgcctggggcagagcttggagcaagtccttgccttgtgtatttctcagggttctgcagagaaacagaaccaagttgtgtgtgtgtgtgtgtgtgtgtgtgtgtgtgtgtgtgtgtgtgaacagatttatgataaggaattggctcacatggccatggagacaggcacatcccaggatctgcaggatgagtcagcaagctggggttgcagaagagttgatggtgcagattgagtctgaaggccggagaaccagaaaagctggtggcgtggtttcagtctgaagacaaacgggcttgagactcaggaagaactgatgtttccgtttgggtctgaagatagaaaaaagccaatgtcccatgtcaaagtcactcagtcggggaattctctcttattcaggagagaggcaatcttttttgttctattcatgccttcacgtgattagacaaggcccaccccattagaggggacagtctacttatttaaatgtgaatcttgtttaaaaacaccctcacagaaactcccagaataatatctaggtaccctgtggcccagtgagattgacatataaaattaaccatcatatccagcacgtggacaagccaaagcaggttttatcaccaacagcagttctcaagggtagagatatttgtcccttattctgtcattcagggacaaatcaggtacatatcttatcaaatatgtcactgtaatagatacaagtagaacttacaatctatggaataataatcctctgtttacttaacagtatgcatttacaaatcactgcttaaatataatttagtttggcccggcgcggtggctcacgcctgtaatcccagcactttgggaggcggagatgagtggatcatgaggtcaggagatcaagaccatcctggctaacacggtgaaaccccatctctactaaaaatacaaaaaattagccaggcgtggtggcgagcgcctgtagttccagctattcgggaggctgaggcaggagaatggcgtgaacccaggaggcagagcttgcagtgagccaagatcgtgccactgcactccagcctgggtggcagagcgagactccatctcaaaaataataataataataaatatatacacacacacacacatatatatatatataaataaaatttaattctcatattcctccagtaaaggtattcttgttgccacttgatggctttaaaaactgaggcttggagaagttgagtaatttgccaagttcacacagcagtagggttggaaacatggcagtcttgctccaaaaaccatgcactttaccacgatgttatataatgcttttcatacactagggaatatggttagtaattatgagcattcaatgaaataatatacaaggcttaatataatgtctgctgtataataagatctcaacaaccttacttgttagttgtggtgatattagagatacatgtctattcttatagtacagaacaaactggaaaagtatacatttttagtagatgggaaaaccaggatttagacccctgtcttttccttataaggccttaaactcagatgtctccattatggcacagatagaaaaaaagagcgcacgtttgtgtgtttgtgtgtgtgtgtgtgtgtgtttatctccactatgtctaaatggtggacagatatactatatcgtgattttttaaaagaagtttttgctactgaagcaaatgctttaatcaccatataatccagagtattcactatagagacttgtttacaaaaatattaaggcataaaacagatgactttgttaatcttccacaaatcacaggtaatgagtatgtgtcagccttttgttggtgggaaaaggtagtcaagatctgtggagtgggtttgctaggggttgcctgcaggtcaccagtgtaaaaacatattagcaggcttagatttcctcatacaagcagtattcattctcataaggatccttcagttctgtatgagaacttatttatttcagggctggtttatgtgttggctaaaactgcgtctgagagagatactgaaaccaaaccaggcatcgaatggttctgcttccactttatacagcttcatttgttctttgtttataggtctattgctgcccaatgacggatgggccgagagtgaagttccaccttctccaacaccacattctgctctgggattgggcctcgaagattacagccacaggtattgataaaatgatgtatcgtaaatgctccttgttattgtttttctgggagaacacagcaaccttattcagcaaacttattttaactctatttctttctggaatggaaatcttatagtatctataattcctttccagcgaaagcttcagtgaaagtttctcatagctaatagcttagattgggcatattttgcttcctggtatttgttaagattcaccttaaattattaaaatatttaagaaaatggttgaactttcatttacaaatttaaaaactagagccatggagctcaaagaaaagtgacatgggaaggtataaaacaaaactgagaaaataggaagcttatgggtttttattagtaattggcaaaccctagaggtattttaaaaatagatgttccaagaaagttaatggaatctaaaaattaaagcaacaccatatataatctaaaatattgaagagggtacccaatattatatccattctgtaatagaaactaaaaaaatcaataatttttagaatcacacaagaatgagagagatttactaagcatacatactatttgacaaggggaattcatagattttgttcttctgatgagttttaaaaatcattaaattgtccctttgctattttctatatttactatggctgttagaaactgtgtattttattccattctgtgtcccatgataatcctgtgaaatttcttcatttttcttgcagcaatgctagtgtcattcctattatgttttttaatacagtctgctaaaaataaagcagcatgccttagagtatagctaactgtattaggtggaagctcacctatatttagctatctctgattcttatacttttgaagtcagttatcttgctaactacagtttcgtgaactagattgataatcataataatattctagatcaatgtctctaggggtttcataaaagaaaatgtggacctatttaattttgtccattcatttccattgcctgcctcgattctgaattgaaaatgacaatttggtggcataaaaaaagccatttaaaacataatttcatttgttctaccttactgtttatcctgtatatatgtgcaaaatgtttgggatggtgcaaagctgaatcagatataaaccctgtcttcaggaagctggtaggctgacaggtaggctcatgggacgactggaacacaagggttccaagtgatatttaccagaaggtatagataaaatgctctgagcatctgaggcagaggagaatgcctccagataaaggaatcagggaaaatactatggtaaaagtgtcatttgagctgaaccctaactcatgaatagcaggtggacatgagatgagcccaggaagaaagggcatttcgggagggaagagcagcagaagaaacagcatagagacgggagagtaaattgaattgtacaaggtggagctgatcagccagatgataaagcccagagtgcaagaataaggtatgcagacttcatttggtagatagtcaatcttattgcagggttttcgcaggtaatacacagaatgaaacctgggttttttgtgtgtgtataacatggattgggtgaatggaagaggtttgatatcccctggaagccaggactctttggataccttttagggcaactgcagtcagaggtactgagcatctgtgcaggggaggctagagagaagcactcagatgagaaaccttcaagggagagaggtggttcagagatcacctgggatttagcaactgtctttttggcttcaaagtctccacggatttctttccttcccttttctgcaaagccattcctttgtgaattggggagagaaaaaagtttatattgctcctcgctgctgtaaatcttcattacatggtatgaactagtaacttccatcttcttttcacgtcttccttcctagtcccgtgtgttttaggcctctgttctcacttctttattagaactgctctcttaatcatcaacggtaatctcctttcagtcaaaagtatgacgttgtcttagacttcattcttcttttccactctgcagtatttggttattaagtcatttattcacttactcatccattcaaaagtatttctggagctctgagccagacactgtagaaagaactcaaatggattggaaagcatccctgcctgcaagaaatgcagcgtcctcttagagacagacacgcagataattaggatgcagccagctaagcattagatacaaaatgcaatgggagcctagaggaagaagccactaactttgcctggagttgtcaagtaagttttcacaggagagcagtgtttaagcagtttcttggaaaacggaagaaagctctctagacagagaagtggcgggaagggcaatttaggttaaggaaaccagggatgggaaagaatgcagagtgtgttcagtgtggctaaagcttgtggtatctcagggaagaatcaatgggaagggcattgtctgtcctgctccatgggtgccatgcttctccggagagcagtggagaagcattgaagcgctttgagcctggagatgacagtatcaggcagagcagtttcagtgatggagggtggagggaatggcagaagccgccatagacaaggaggctgctccgacttgggactagcaagagaagagcagggcctggatggagggatcagaagcatgggtggagaagaaagggcagagatattttaaaaatggaaggaacaagtcttaagccttgaaactctcccctcctaggatcgtgtgacctgcaccatcctgcaagctgctgcgttgcctaggtgaccagcagcagcaggggttggatgtgtgaaacttgggatggaggaaggactggaagggagccaggaggattgagcaagaaaggctctcctgccttctgcctttcaaaaaaaaaaaaaaaaaaaaggaaaagccctctcaaaggaaaaaagggtgttggagggatgaggctaatcttgtaaaagagaaaactgctatggcgtgaggaaagaaaaacaaatttgatcaaacttaatgcctgtacaaaatgaaatcaggaaattgctcaacctatttttactattatgcaatgattattacagaaaagtttataatatgtgggtctaagtaataaataaatataaaggaaataaacttactgtgagatctcaggcagagttgaagctaaatcagcagcagacagaatatatcgaatattattaacagtttagacaacattgggctattccccacatgttcatattctctttctctctctctctctgtctgtttcttcatgcacatacctgaaactactctcactcatagaagccaattgttgaagtccatctgtggacacctgagacttcagacatcatggtttttgtcttgcctctcaaaatcttcatcccccaccttttcacctcagacagttcttgaacattcattgttggctcttatacatcttttacattcctggtttgtcaccatagtcaaacactggcatatgtttcatgctacccttacttattcattaggcagcataatttgacgttgagtatcgtttctatttggtagattctctggtcgttcatgctgaaaacacggcctttatctaagacatgtctttggcctgctgtcaacttccagcttccaacagccttcactgcagcccactcagccatgagcacatgctaactcccttcaaaattaaaatgttgtatttcatagttaatcattgtgtcaccctcttaatgcaaacactcgagatatgtagcgtaaagttacaaaccgttttactagtctaacttacatgtctaaaatattttcacatgaactaactcaatacggcactcactcattattctggtgctctatatgcccacattggctctaatcctatgacttatattacactcacttgcctccttaatatccatcaatctgatatcagccttatttgccttatttccattttgtaccgcagcaaagggggggcccttttatgaaacgttttcaaagtgtacacttggtcacaatcaaaatgatggtaacatatatgtgtatgtatatagatagatatgtagatatctcattatgatcaatttaaaggacataatcagatgtgtacataagagcatttgttacattcatatgtacagtgcagccttttatttctttgatccttcttgattatatgccaacatttgtataaaagttcactttattagacagatcctagcttgatgttactgcatcgagtgtcattgccaccttactttttaaacggggattgggatcattgctacctaagagtctgggaaaatttgagctcttattcctaatttgtgaattaacacctggcttaagaggataaactaagacaatgagtcaggttcaccaacacattgttcagttgggtagattctcagtctgccttgagcagagcactttaaatgcaatctgatctatgttttaatgagggtcctacacctcctccctggaggctttcactgctttgattaaggatttagttttctattattgcatgatgtgcaccattctattgaaacaaaaagcaaacctaaaatgtaagccacatagtaaaaggtgagcaagtcttcactaaaagtgaaaggcttgatttttgcggattcgggatcagcaacaacctgtgtcccaggctggccaccatttcagccagatcttctggctctggtcccagctttgcccctggccagctgtgtgacctggcaatgccaactctcctctttgagcctcagggtcttatctgagagatgaggtgacctttaatcccttctggctcttaaactttttgattctatgaaggccatgagtctttctgacactaaacccacatcatcacaacagatcaaaggatggaaaacttaagtgcaaataaaggtcgaataacacatttaaaggcaagtgcttccaaacaccaagactcaggggaaagctcatgtttgcagtagtgtctcagaattcttctataaaatgggctgaaaaaatgaaagtattgctattaggccaggctagtgtcaataacactaagtgggtccaggatttttgttcacaattggcatattttgtcattactagataccatatctaatacactttatatatcaatggcttcgtgtattgagaatgtacccagacaccaggaaagaaatagaaaaaaaaaaaaaaaaggctacataaccctaaagagaggatttaaacttcttgagaaatttttatgaaaacatgtgaaatctcttcattggcaaatgctttaggccctcattcgaagaccatactaacctacagaaataaagaaaaggattcttaatagctcaggttgatcaagctcttactgtgtgctaggtacttttctcaatatataacgtaacttacgtatcttacaaaaattttaaagagtcataaattctattcttatccattttatggatgaggaaactgaggccactcaccctgacattttcctacaggggccactctcctaaccatcaaaccacatcacccttctaaatagaaagagaaaagggctcctagtcacagacttgctgagagtctgacaaaaacagagatgtcaaagaaactgtaaaaagcacaggtaatgggaaaaactcagaaatttatagtgttttgggaagcaaaagtaggacattttactgatctgcttatttgttaacttacctaatttatctgtttctatagcacatactctgtaccagaccctaatgtccttactttacaaatcttcactcattctattctctcaacaaccttgtgaggtagagagtgtaattttactcattttatacataaggaaattgaagcccagagaggtccagtaagtctcttagttgacactgctagtaagtaccggagccaggatttagagtgggccagacacaccacagtgctgtgctggttgatgggtacttcctttctgggggagggtggaggagatgaggtctacctttgtcacccaagctggagggaagaggtgcaatcttagctcactgcagcctcaaactcctagactcaagtgatcctccagcctcagactcccaagtaactgggactacaggtgcatgccaccacacctggctaaacaggtacttccttaatttacccacggcattataaaaagggaggttcatttattcatttggcaatactattattgctgcatactaattttaatattgcttgaaagcagtattgaatatggagggatgatgagtttcaagaaaagattaaacttattttggtatttcaggtcgagattctcttgtacattttagaaggattttctttcaaaacagttatttttgctattgttttgttgtttatagtatcaaactccaactgtttgaaaaacccaacatcaatactttagattttgtaaggatacatgatttggattttcactatatttgggattagaatagcaattataatgagatgagccaccatatttactttccaaacagatgagagtgccaaggtaagaaaatggctataatttagtttattaaaattatataaatttatttctaaaacaagaactaagtcattgtctgtaattctcttatgtaataccctctatcctcaagcaaaataaataaaatattcagcagaaggaaagttatttgagattgcctacaagtactaagaaaactataatgggcatttgatgtatcttgtgtcttaattgtcaactgtgctcttcctattatttccttttggcacttttggtgagcagactgtctgcttagtgttaacattagttttaggaaaaagacctaaataaagtagaaaaccaaactcctacaggcatcagtcattcaacaggatggttttctctaaaggatacaaccctttcacttgtgttttaaaataggcatagcttagtccacagaaatcccttaacctgcttttgggctctgctaatatccagtgacatcttttgaagtgctagtgttttccaggccctctttacccacttaaagttatatagtgtacagcaggatcccaattagcagaaatcagtgaagagtaaaacacgatattgcccagagaatattttatttaaattgtacagtgtgataaaatacatgaaaacagagttgctacatctcataaaagaaacctgagatttaagaattagttgaaaatatgtggttgggagctgcgcagagtgatgagtggctgtgttcaaaatgagaactgcttcctcattttttaaaagattttattctaaacctaaatacaacatatggcttccttccacagctctggggtggattcagcagtatattttccagatcagcacatcaacttcagatctgtgacaccggccaggcagcctgaatcaattaatttgaaagcctcgaagagcatggaccttggtaagcaagggtgaggtgacatccaggtcagctctccagcctcagcccatttatcttcccaaatgtcctggttttgtttcttcaactcaaacctcagggaacaaggtctgcagaagcctggaggaagggataatggccatcccaccttcctatctcttcgcacatttaattgtaattacccactttgtgaaacaaagagaagtgatttatttttacaaagtgatctataaactatcctcccatcatagatgacaaaaatgattccttctggaggatctgaattccagaggcatctttatctcatctatctgcctttgcatttgcaccctcgcttctgccagggcatttccactctgtgcgggcatacctgttgcagagcctgggaaaatcatgtggttcaaagcatcctttgccttagtgcttcacttccttctattcttctccatgtgtgatggatagagatggcatcagtgcagaagattcagctttttaaatgcccatccccaaatcctgtgacactggaggggaaaagggtctcttgggcgtgccacactgagggtgtcaaggtaccctgtgtccatgcctgaacaacctcactgaggttctgagcaccatggggaacttcgtggtgactgttgggtgccagggcagagcaagggcccctgttaactgtgttctgaaagccttgggacatctcagataccctagagcatcactgccctcccatgggctcttagagagaacaccattagagaaaagtatggatacaataaattctcagcaaaatatccattgcctcatgaatgcttggaggccaagctttgcaattgttttttctcaaggcatattatatatttctttagtaacaacgagaaaatagaataatcaaaagtgcgtgctccaccaaacgatctgataaatagtgcttatctgttactcacttacaggagttcagaaaaatgttcagtcatgatgaaacaagagaaattgattctattttgtataaattaactaaatgactgggatgcatttgctgtaatcgcctgtagtgagagacagatagaaaccttaacaaggaagctgtcttgagcactggtcagaaagagtattttctcaagcgtgaacctttgacaaaccaaaggaataatttgtgacagtgacataggttattactaattatttaaagagcagttcattttcatagagtgcttgataaacatttcctgttctgtcttcccaatttctctgtaaagaagatgaatggatcaaaactgctcttatttttgaggagagaaatatatttgttttcctcatttaattaaagcagccactattatgtttctaaaaagaaaaaacagcacccattttaaattaagagagaaaaaatattatgaaacctgtaaaaaataaaaccaaagacatgtgcagaatcaatatttttgtttacattttaattttattattattattatttttattttgagatggagtctcgctctgtcacccaggatggagtgcagtagtgcgatctcggctcactgcaacctccgccccctgggttcaagtgattctcctacctcagcctcgcaagtagcttggattacaggtgtctgccaccacgccaggctaattttttttttttttttttttgtatttttagtagagatggggtttctccatgttggccggggtgttctcgaactcctgacctcaagtgatccacccaccttggcctcccaaagtgctgggattacaggcgtgagccaccgcatccagccgttttgtttacatttttattaccaaaaactgttttttgagttttctcttctaaactgaaatagtcctagcaaaatatatgtagttagccgtcattctttgcatttttttatacatatgccataaatgacaacgataatagtaaggtttattcattttacaaaattggtcaggttacgagctattttcttcaggaccctagtaccaaactaaaagcattggctaaaatgcaccatgcagtggaaatactcaacagcatgctgtaaaaacaagtttagagtaatcatcaaactttgctcctttccaagaagtaccaggctaaagccaacagtctttcagaaggccctgagagtcagcattctagtaccattttgatcccttctccccagaacagtcaagtcagggagcctaacaaatgtgttagccttctcaatatgaaattcacttaggtgataccgcaatggtaaacatttgaaagtgtcttttctgtttcattagaggaatagactattcgttttccatttatagcactaggccaatgtaagagattaatttatttgctcaaaaagtaggtgactatgtttataggaataatcctagcaggatcttgattctttaaagcgttttaacattctttaaaacgtcttaataagtagcctatttaggatgaatacacaattcatgatgtctatttttgacctggaaaaccagcattttcatatggttcaaaatttaaaaaaaaaaccttctatttgttacataattaatttatattggctatttctcactttataaagtctgtaggaatcttcaaaggctgatggatcctatcagtagccttgtttttgtttcatatttgctactaagaccaaactagtattttaacttgcatgttaatgagtcattgttcatctgctcaagctattttaaaggtgagtggcttccatttacttattttcacttatattttcaaagacagacaattccaattaagaaaaaataaagcctccttattcccatcccttttacctattcatcagacacaaatatagtctaaaatgtgagtgctcctagaaagcactagttgcttccccatctatgtacatgtccacatcacatatcatttctttataatagttgcatagtgttacattcattaatcttcatttacagcttactttactcttccccttttaatggaatgtgggcttcattggcagttcttttgttgttgttttggtgggtttttgagtcgtttgtgtttaagattttgcaatttgtttatttatagcctttgccacgttaccatttgttaattttgtcctctttcatttataaaatattgttacatgggatgcaagtgatttttttgcaacccattatttgtctttttagtttgattgtgatatttctcatcataaaaaaggtttcagtcttattctcaaatattttcatcatttcttcttttgtgacatttgggttatatgtttatctcattttcctctggtacttttagaggctttaaaaatatttaggactctatcatatatttttatccatggggtatgagatggaagaattttctcacataaataagcaaattattaataacatgtattgacttctccgttctttccctattaatttgaaatttagtcacattgaatagtaaatttgcacacatagatgtgtgggtttctagacatactattctgttgatatattagtccatctcatgtcagcatcaccccatttaaattatcttgctattatgtcttgttttgattacttacaggataatcttcctttaatttttcttcctttgtgaaattactttggctcttcatatgtactcattctcctgcatggactgtacaatcagctaatcaaaatgagtttaaagatgaaacaggaatgcttccactgtgggggtgtgtgtgtgtgtgtgtgtgtgtgtgtgtgtgtgtgtgtgtgagagagagagagagagagcatgcacattaattataatgtttgctattggcttctgatggaaacatttgatcaagctacataagtttctttgcattcctaacttcctaaaagttttttgattaaatcatttattttttttaatcaagaatgaatgtttaattttagtaagtgattttaaggcccttactggctgataatgtggattttgttctttattctattagtgaaataaaagtgagttaattaatagattccccaatattaaatcttcgattctttttcaatgactctaaatttttctctttacttgcaaaaatgtttattgattaactacagatatgtatattaaacacttcttgagatggttaacacattatatgctctaaaatgtaggtgtacaactctgataacaattttactcagtgtcattaattcctatatatacattataagtataatgtatatgtagcccttttgaggctgctttgccttgggattttgtggatacttttactggcatgcatgtggtcacatttaaatcagaacagaaatgattaacatgataaataaaaggaaatttgtttttaaataattgcatgtagtcatgctaattcaaaggggttagggtgtcacttaagagactggagagtggatacttctgggttttggagaaaatcaatcttttcctactaattgtagacttttctctatttatttaaattaccagaattactgtgttcagtctggacccctttaatttgttcataattgagcttgtgtgggtgttgagttggaagctctcaggagctgaataacacagctgcctctttggcctttggcatagggttttcccccaaagagctgcccttgttggcagtatgccaggaagttacattcaaagactttttgatgaggcataaaaatctttaatttccaggcttggtgttttatgaccccataatactgtttgagaattagtctgaattattcaaaagatagcacttcagtttgttggccccctttgttgacctactctgtagccccattcagagttaagtttaaaatgctgtttctcacaagatactgtttttagagttttctatcctgtttcacattggcctcccacgcccatttcagaagggtgttctataacacagtttggagaaggctaagggcagtgcaaatggaagatgctggccagctgccctgttcagtaagaggaaatgagcttaaagtgatgcatgaggcattcagacgaaattttaggaagtttcctgacaatgaagattgttaacattccatgtctcatagtcttttaagaaagagcatgtgtcctgaaaaactctccctaaaatcaagacgataaataggttggctgacttcctttcaagattagtgattcaccagttttattttctgttagttacttgctctaatttttttaaattaggaaatgtttttagacacccacaattgaagtaatttataagccaactgagttctcacatctacaaaggtaaatatttgagatacattttgaatatgaaaccttttatatatgtcagatattcctcttagacagtacatttctagtatcagctcaaagatgagcatgaaaaaagccccattctactgctctaatactttctttttaagattatattcatatagtgaggtacttctatatgaattattgataataaagactgaatacataggataatttttataaaattgtatattctaataagtgtgatgctggtttgtattaatatataaaatatattttactatttttatttatatccatggatttcttttattgtccaccaataagtagtacctctgaatatagttaaaagctgaattggatattactgtttgggatacaactttgacttaaagaaaagaacctgttttgtaaagaaaaattaatggtaatattgtaagaaagtgtctatttgtataatagacaagtatacaaagatgaagtcagctatatactttaagctctagtaagtcaaaataaaggaattatagagaatgttctttcattaagtaaatgtttattaagtgcctactgtgtgccgggaagtgcattaaacactggagatgtggtaaataaatgaaagaaatggtgcttgctgcctgtacctagattagaaccccaacaggaaagaaaagctcaagagttaaggaaaaactaccaaaaggaaattctgacattatgataacttatctcagggaggaagaaagggaagaggcatctgaagacactcatgtggctgcctcaagaactcactgataacctcggctatgtagaaaagaggaagagagaagcaaatgattaaaatatatacatatatgtacatttttactgtgtgtgtatatacacatacacacacacacatatatatatacacacgcacacacgcacacacgtagtaaaaatctgaaataatatatgcaggaagaggtaaacagctgcatgagaggagacttgcaaaacctagtaaaagttagacagccaagctatttttaaagcatgaaaaagaaagtgtgcgaggtggcccattgttttaaacccctgctagatgtcaggtggaaagcaaagccactcagttcctgtgttagtattatcctcatacataggagagaatgatggtcaaaccaaaaaagcatggctgccaggcaatggaaaactagacaatttacatccctgtgcactaaaaggcttgtgattataaagtggccgtccctgatcatcagaaattatgaagagtaggcctcacactggaagacaaggaagcaaatgatcaattttcagaaagataatgaattccagaaacaactggtaatctcaatgctgatcatcagatttccatgtttgtgaaattaaaaaaaaaaaaatgtggtggtcaccagcaatctcaatggagtccttgaaataactggtgtctcctttcctttttgatgggatttctaaactgctaagtcaggaaaatgttttacatataggttatgttgatgtttataaaagtatttccatttgttttcttattgagacttatgggtcaaattacatacagaggtagacacagcattaaaatgtcccttcctgaaatgtgctaattaatgtctcattgtcaccttggagaaaattaaataacatataccataaaacgacatctttattgtgttctgataaaactcaacagaatttgatgaagattggatataggtaatttggcacatatctaacttaatatttgtatacttccctgtctgttatacaaagcaaacagacctctttcagtcttagttaatttttctttacaaaacaggattttttccttaaagtcaaagaagagtaaagaaggaaaaggcactcttcacaaattttcaagaaataccgtcttagagaattgggtgatagattgacagaattagcattcagatgatttctccagaattgaagaagatagaatttaataaagaatgatgcattcattcaacaaggatttattgacacttactgtatgccaggcaacatcccaggtaaataagacaaaggctgcagtcttacagtgttttcattctcgttatgtaaacagatggtaaagatgtatacagtgaataaataataaaatttcacatgatagagattcaaatagaaatgttttttcctaaagccaaattcaggtagagagaatgactgaggggacgtgaaggtattttagatgggatagtgaatgataaaggttatgtcctaaagtcaggttaaaaaagattaattgtataagtgtaggatttacgagagtggggatagtaactattgaagtaatcccctggttcttagctgcttgcctgacacggccatccccagagctagttctgtgttttcagatcaaaggagaaaacagctccactttattctggcctggtcataacacatttacagttccatattcaattatgggtacaatattttaataactacaaagacagtatagaatgcaatccagatattggtgagaggcctagaaaccatgtttagtaaaaaacagttgaaagaataaagatattatgcctgaaagagagatgatttgagtcataggagagctctcctcaaatattttcatgcaaatattgaaagactcacatatgtttaaaattaatcagtaccccagatacatcaagcaatgataatcacatcagaagatacatcacatttacaagttttgaaatcgaaaaggataacagtgatggaaaacggaattctggtttatggcatgtttggtatgaaaggaaaaatatataaattaaaacagctcctgaagactgaaaagagaagcagaactcaccaaaattatgagaaagagaccatcatatatttttcagtgtttgacaagggatacaggttctttttattttttgttagagtattttaatatgattatgtcattaaaacatattatagggccgggcacagtggcttacacctgtaatcccagccctttggggggccaaggcgggcagatcacctgaggtcgggagttcgagaccagcctgaccaacatggagaaaccctgtctctactaaaaatacaaaattagctgggcgtggtggcccatgcctgtaatcccagctacttgggaggctgaggcaggagaatcgcttgaacctgggaggtggagtttgcggtgagcggagatcacgccattgcactccagcctgggcaacgagagtgaaactccatctcaaaaaataaataaataaaacgtattataatgtatatagttatatgttttaactacataactgtattataatatgtacacagattataacactgtgtacatattacacagaatataattgtagtgagatgaatagatgaaaagttgaatttagagaacctacctgtcagaactcaggctgaattcttagacatctctagtggtaaaagacttcagatagtttccagcacctccatccacggcaggcctctttcaaaacattaagaaaaccaacatttggattaaccaaaatttaacatgtaattatattttagatgattgctacatttaaagtgaattatagactattagtagtagtaactgaaatgtagaaatatagatcactataatataacttgatcaatatttcagatgtagcggaataaggcagattctgtttaaaattcattaaaataaccatttgagttggaagcaaaggtgtaaaaatggttctctatgtcaaggacatgcttttcatatccctgtaagtctctatctatcctttcctcctgctgtatttttgcattccctaggaaacatactttcaagaagaatttgactttgtattcattcttactactattaattggaaaacaatatcttttgtgtaggaattgtacttttataatgcttcatatgtttctagacttgtctaaaagttgtggcaaatgccaggccatccctgtcatacccctcccatgactaaatgctcacaaatgccataaacttagctgcactcttttataagttattgaatgagtgaataagaggtacaactttctcaaatgcccccatctgaaacaggaaaacattcggagtaaggatcatccctcttacataaaaacacttaacctaatgcctagaacatccctaatgcctagggatttggtggtgtcattagtaatagtagcagtcatggagagggtagtgttggtagtataattagaaatgagcttctacatctcctacaagtttttcttataattagtagtggacttgaacagtcaatataagtaaattctcctaaagttaagtattatgaaatgctgggagaaaagttaacctgtggatttcataggtatatccttaagtcaataatggggccacaaatggtctcaaatgttgccaggcagtttttcactgagtgtattttctcaagctgggggcatgtttaatggaatatgtagttaatttaaaatgtcactgtctctaagagaaatgtaagactctatttccccagaagagatacaaaaaaactataaagtttagaaaaccttaaccaatgatattctgccagtaacaaacccacgcagatttttactaaattgacctctgtgtacttagaacattgtctgtgctctgattagaaattttggtcaatggaaaaactgccctattctttaaaatttaaatattctgggctcctcttaaaacttggattagaacatgaagtgctttcttctttttattttgtactgaggctctgtatctaggattctaagccttttttttttcactttttatttttttactatacttttactttttactttttatttttttactatacttttactttttactttttatttttttactatactatactgggatacatgtggagaacatgcaggtttgttaaataggcacacacgtgccatggtggtttgctcacccatcaacccatcatctacattaggtatttctcctaagactatccctcccctatgctcccaccccccaacaggccctggtgtgtgatgttcctctccctgtgtccatgtgttctcattgttcaactgccacttatgagtgagaacatgcggtatttagttttctgttcctgtgttagtttgctgagaatgatggtttccagcttcatccatgtccctgcaaagttcatgaactcatacttttttatggctgcatagtattccatggtgcatgtgtgccacattttcttaatccagtctatccttgatgggcatttggattggttccaagtctttgctattgtgaatagtgccgcaataaacatacgtgtacatgtctcttcagagtagcatgatttataatcctttgggtatatacccagtaatgggatggctgggtcaaatggtatttctggttctggatccttgaggaatcaccacactgtcttccacaatggctgaactaatttatactcccaccaacaatgtaaaagtattcctatttctccacatcttctccagcatctgttgtttcctgactttttaatgattgccattctaactggcatgagatggtatctcattgtggttttgatttgcatttgtctaatgatcagtgatgatgagcttttcttcatatgtttgttggctgcataaatgtcttcttttgagaagtgtctgttcatatccttcacccactttttgatggggttgttttttacttgtaaatttgtttaagttccttgtagattctggatattagccctttgtcagatggatagattgcaaaaatttgttcccattctgtaggttgcctgttcactctgatgatagtttcttttgctgtgcagaagctctttaatttaattagatcccatttgtcaattttggcttttgttgccattgcttttggtgttttagacatgaagtctttgcccatgcctgtgagctgaatggtattgcctaggtgttcttctagggtttttatggttttaggcattatttttaagtctttaatccatcttgagttaatttttgtaaaaaatataaggaaggagtccagtttcagttttctgcgtgtggctagcaattttcccaacaccatttattaaatagggaatcctttccccattgcttgtttttgtcaggtctgtcatagatcagatggttgtagatgtgtgatgttatttctgaggtctctattctgttccattggtctatatatctgttttggtaccagtaccatgctgtttttgttactgtagccttgtagtatagtttgaagtcaggtagcatgatgcccccagctttgttctttttgcttagggctgtcttggctatatgggctcctttttggttccatatgaaatttaaagtagcttttcctaattctgtgaagaaagtcaatggtagcttgatggggatagcattaaatctataaattactttgggcagtatggccattttcactatattgattcttcctatccctaagcatggaatgtttttccatttgtttgtttcccctcttatttccttgagcagtggtttgtagttctccttgaagaggtccttcacatcccttgtaagttggattcctaggtattttattccctttgtagcaattgtgaatgggagttcactcatgatttggctctctgtctgttactggtgtataggaatgcttgtgatttttgcacattgattttgtatctggagactttgctgaatttgcttatcagcttaaggggattttgggctgagacgatggggttttctaaatatacagtcatatcatctgcaaacagagataatttgacttcctgtcttcttagttcaataccctttatttttttctcttgcctgattgccctggccagaacttccaatactatgttaaataggagtggtgagagagggcatccttgtcttgtgccagttttcaaagggaatgcttccagcttatgcccattcagtgtgatattagctgtgggtttgtcataaatcgtttttattattttgagatacattccatcaatacctagtttattgagactttttagcctgaagcagtgttgaattttattaaaggccttttctgcatctgttgagataatcatgtggtttttgtcattggttccgtttatgtgaaggattacattaattgatttgcgtatgttgaaccagccttgcatcccagggatgaagccaacttgatcatggtggataagctttttgatgtgctgctggatttggtttgccagtattttattgaggatttttgcatcgatgttcttcagggatattggcctgaaattttcttctttggttgtgcctctgccaggctttggtatcaggatgatgctggcctcataacatgagttagggaggattccctctttttctattgtttggaatagtttcagaaggaatggtatcagctcctctttgtacctctggtagagttcggctgtgactttgtctggtcctgggcttttttttggttagtaggctattaattactgcctcaatttcataaagacagatatgaactttttcttatcacttgcttttgtttcctaaaccattgttcatatttaaatgaaattctgtgttcctttttttttttcttttttttttttattatactttaagttttagggtacatgtgcacattgtgcaggttagttacacatgtatacatgtgccctgctggtgcactgcacccaccaactcgtcatctagcattaggtatatctcccgatgctatccctcccccctcccccaaccccacaacagtccccagagtgtgatattccccttcctgtgtccatgtgatctcattgttcaagtcccacctatgagtgagaatatgtggtgtttggttttctgttcttgcgatagtttaccgagaatgatgatttccaatttcatccatgtccctacaaaggacatgaactcatcattttttatggctgcatagtattccatggtgtatatgtgccacattttcttaatccagtctatcattattggacatttggcttggttccaagtctttgctattgtgaataatgccgcaataaacatacgtgtgcatgtgtctttatagcagcatgctttatagtcctttgggtatatacccagtaatgggatggctgggtcaaatggtataataatgggagactttaacaccccactgtcaacattagacagatcaacgagacagaaagtcaacaaggatacccaggaattgaactcagctctgcaccaagcggacctaatagacatctacagaactctccaccccaaatcaacagaatatacatttttttcggcaccacaccacacctattccaaaattgaccacatacttggaagtaaagctctcctcagcaaatgtaaaagaacacaaattataacaaactatctctcagaccacagtgcaatcaaactagaactcaggattaagaatctcactcaaaaccgctcaactacatggaaactgaacaacctgctcctgaatgactactgggtatataacgaaatgaaggcagaaataaagatgttctttgaaaccaacgagaacaaagacacaacataccagaatctctgggacgcattcaaagcagtgtgtagagggaaatttatagcactaaatgcccacaagagaaagcaggaaagatccaaaattgacaccctaacatcacaattaaaagaactagaaaagcaagagcaaacacattcaaaagctagcagaaggcaagcaataactaaaatcagagcagaactgaaggaaatagagacacaaaaaacccttcaaaaaattaatgaatccaagagctggttttttgaaaggatcaacaaaattgatagaccgctagcaagactaataaagaaaaaaagagagatgaatcaaatagatgcgataaaaaatgataaaggggatatcaccaccgatcccacagaaatacaaactaccatcagagaatactacaaacacctctacacaaataaactagaaaatctagaagaaatggatacattcctcgacacatacaatctcccaagactaaaccaggaagaagttgaatctctgaatagaccaataacaggagctgaaattgtggcgataatcaatagtttaccaaccaaaaagagtccaggaccagatggattcacagccgaattctaccagaggtacaaggaggaactggtaccattccttctgaaactattccaatcaatagaaaaagagggaatcctccctaactcattttatgaggccagcatcattctgataccgaagccaggcagagacacaaccaaaaaagagaattttagaccaatatccttgataaacattgatgcaaaaatcctcaataaaatactggcaaaacgaatccagcggcacatcaaaaagcttatccaccatgatcaagtgggcttcatccctgggatgcaaggctggttcaatatacgcaaatcaataaatgtaatccagcatataaacagagccaaagacaaaaaccacatgattatctcaatagatgcagaaaaagcctttgacaaaattcaacaacccttcatgctaaaaactctcaataaattaggcattgatgggacgtatttcaaaataataagagctatctatgacagacccacagccaatatcatactgaatgggcaaaaactggaagcattccctttgaaaactggcacaagacagggatgccctctctcaccactcctattcaacatagtgttggaagttctggccagggcaatcaggcaggagaaggaaataaagggtattcaattaggaaaagaggaagtcaaattgtccctgtttgcagatgacatgatcgtatatctagaaaaccccattgtctcaggccaaaatctccttaagctgataagcaacttcagcaaagtctcaggatacaaaatcaatgtacaaaaatcacaagcattcttatacaccaataacagacaaacagagagccaaatcatgagtgaactcccattcacaattgcttcaaagagaataaaatacctaggaatccaacttacaagggatgggaaggacctcttcaaggagaactacaaaccactgctcaatgaaataaaagaggatacaaacaaatggaagaacattccatgctcatgggtaggaacaatcaatatcgtgaaaatggccatactgcccagggtaatttacagattcaatgccatccccatcaagctaccaaagcctttcttcacagaattggaaaaaactactttaaagttcatatggaaccaaaaaagagcctgcatcgccaagtcaatcctaagccaaaagaacaaagctggaggcatcacactacctgacttcaaactatactacaaggctacagtaaccaaaacagcatggtactggtaccaaaacagagatatagatcaatggaacagaacagagccctcagaaataacgccgcatatctacaactatctgatctttgacaaacctgagaaaaacaagcaatggggaaaggattccctatttaataaatggtgctgggaaaactggctagccatatgtagaaagcggaaactggatcccttccttacaccttatacaaaaatcaattcaagatggattaaagacttaaacattagacctaaaaccataaaaaccctagaagaaaacctaggcattaccattcaggacataggcatgggcaaggacttcatgtctaaaacaccaaaagcaatggcaacaaaagacaaaattgacaaatgggatctaattaatctgtgttcctttttaaagaacttttgttttcatataagaacatcttcctaaaagtatgaagctaaggatgcttattcaaagaatggaacaaaatacttaagttctccttgcaaatatgaaccaaatccattttagttttttgaagtgagaatttcattagttgaaaatgttatatataatgtgcaattaaatatacaattaataattaaaatatacaattaaataattaaaaatatatgatataaatataggttaaatgaagtttagcagtttcataattatcccttctgaatattttgaatgataaaatttgttattggcaatactttatgaagtgattaaagacactgtaaggagagacaactatctgatttttagatgcagtagttgcagtttgttctttaaaaagcaaaatataaaaaaaaattagaatgaatgaataaggcctagtatttgatagtatgacagagtgactatagtcaataatgatttaattgtacattttaaaataactaaaggattactggattgtttgtaacgcaaaggataaatgtttaaggggatgataccccactttccatgatggattattatgcattgtatgcctaggtcagaacatctcatgtatcccataaatatatacacctactaagtacacacaaaaatacaaaataaaaaattatcttaagggataaaacagggccagtcatggtggctcatgcctataatctcagcactttgagaggctgcgttgggaggatcgtttcaccctgggagtttgagaccagcctcagcaacaaagcaagaccccatctctacaaaaaaaattttaaaaataaataaaattttttaaaaaataaaataaaaagaaaatcagctttagtcttacatatttttattctcttatatacctacctgtgttcttatattctaatttttctcaagtgattgtaccaaacatatttctttaaatttgtattaaaaacagtctaacctaaacattgttctctggatctttacttctacaacattatcttttagttgtaaagtttactctggaataaatgtagcgtgattcacttgactaatattatactctttgccataaaagttgtttccaattcttcacttctagaaacaggaatgcattgagcctgctagtacatcaacctttgtaaacaatcatgattatgttatcattataatttctatacgtgtactccccagccagatgatgtattaaagatatgaggcttttgattcatatgaccagttgccctgcagaaaagcagttttgctcgtatcagcagtatatggaagaatctgggtgtcatcatttttttttcatttttgccagtgttataggcttaaaaaggttattttattttacttttaaaatcacttctgtggttaaacctctcccagctgtttgactgtatgttttctattgtgaatgatctgagcatttcctttataaggctgaaaatttctaaagtaaatatcactttttggaattaaaatgttactctacattaaagatcaaatttcagcccttgctcacaggggaaaatagatactttgctttcatttaaatgttaccctctctgaagtacatgctaatgaatacatttgtgtctttcattaagtgttcagaaaaatgtttaactaaacatgaggcagaggcagaattcagatttatttatgataaaactgcttaatctgggtcaagtcaattaatctttctaaaaataatttatttttggtttttcatcagaaccccagaagccaatatacttgacatacagcagtgctggctgctttagagcatattagtacaaagactggcatcaccataaacacctactctgcttttataagactgaaaagtgcttgaaaatacaatttcagctccatgtgaatgtatgtatccatacatacaatagatgtatggatgcgaaagtcatccatacatctattccctccttccttcattcatcatttattgggtgcactgtctatgccaggtaatgttccaaatatttgagacatatcagtgacaacagacagtatcttatttctgtagcttacctttctttagtggaaatactctcatgaacaaagtttgagcgatgaggtaaataaacgataataacgcaataagtgaataaagttgctggaaagatatccagtaggacaaacataacactacaaattgtggaaagaggaaacatgactggaaaggctagtgtttcaatacccacttggtttctagtgttcataagaaaaggtaactagcaacactatccaatgaaggtataaaaattaaagtgaaaattaaaatagagatcaaattggaaactgactaatcaagactgatggttttaagtgggctgggaataagctaatctgtcctctgctgatccaggaactaactggcataatccccagtccccaaacgcttcagaattgtcttgaaagaattgtgagagcctgaaaaggtttcagcttggaattccttaaaagtaaaacaagggggtaccaatgaattggagaacatttagcatgttttcaaaatttggaataaattatcatagcacccaaattgaaggaaaaatgagttccattagaatttttttattttcagctttaataaataagtagatgtcaggtaaatgatctcagtgctttctctgtacccagaaaggccagagggaaatcttaggtgcccagtcctctcacttgaggctaatagtaccaccttatcaaagattgaagaatatatttgttaatataaacagtattcacaaaaatgtcagtgaaacttaacagattggcggttttagtagtgactttaatgataaaagtctcggaaatgctgacaaagttaaacaggcttcttaaatacgggattgctcacaaccattagtgcatgttttgtacgtttccaggcttcaagaatcttcaggatgtaataaatgcagcatttcccaaactcatttgatcacagaaactttgagtacagactatctcataggtctcatcctttgaggaatgtccttagcaaagaagatgtgagtttgcttgtgagatttaaaggtgatgtgcaacagccagagtagggtgaggaaggattgccaacaagctgggacacgtggagcaatgctgtgaagtggggtgtaacctgagagagaatctccagggcagagaagtgtccacagccactaagcaagtaggaattaactgcagagcagcaagaatgaacagggctgtaatcaactaagcatacattaaccatggacggtgatgatagaatgtaactgacagcactgcaatatgcctccaaaagaatggcaaaagaatggtaaagataacctctgatgttactgattatctgtggccagaaacctttgactctcttttacatatggtaaaaagatcaagccctaatatttaagcttcagtgcctattaatctagaatatgaagattaaaaagaggaaaagcattagtagtaactgtaatcttcatagctatatgtcaggcatagtttttttgcacagcaattccatcgccattttacagatggggcaatcagggcttaaagatgttgacttatataagatatctcagctagtaaatggtggggccaggatttgaactcaggcacatttaactttgatggttgggcttcagaccattatggctgtttcaaataaggcttgtcagtttcccagtcttaactcaaaaacagacgacctattctctctccactcttttttaaattctgtctttcattcaggacccattcaaatcttgccttctctaggggactgtcattttttttttccagctccttttctgaattcctaaagcagtaactattggttattcaacttcacaagtaattaagaaaattgagatactatatcttagcacagaatggcatactcctttgatattcttttgagtgagcattttttttcccattccaatcaggttataagcttctacaggtgatactgtatacttcttgggcacctcccttcaccacttagcatgtgtaggtgcccactaaatccaagatgaatgagtgaatgaatagtgttggagcaatctggctgcaatctcagaaaccccgtggaccacgatgattgatttggctcatcttactatctgggcaggttcccttttcctacatcaaaagattgaataaataaaagtagaaacaaatgattaaatgacaagtgaataaaagtgcaaattaatggtttgtttgagtaggaaaatagaatgaggataaaggtagcccagaacatagcaccatacgctcatattcacttacctggttttgtccacttaaaaggaaagtgtttgggaaaggctgataaaaatgaacgtatttaaggaaggaaccaaacacaggaaataaagaaggtcaaaggcttcaatttcattaaataaagaagaatgaaagcagttgtttaaaacttgaagaaaagggctgtgtgctttatttcctaattggaggaatctatgaataaattaggcaatcacttgacataattggtttaggtcatgtgaattcacttgcaccacaagagagggtaaattagatcaaattgtttgtggcccctcctagtcttctgttcattacaggcattcttttttccttttgtattcctctgtatcttccttttaggttttttggttgttttttaatctcaagaagtatgtgtttttatttatattattttaatgtataagatgtttttccttttggttgcagaacagagtagaagataatattcctgtaataaaaaaatttgtgtgcttcttatttattaatcccattttgattttttcataaaactgtttgcacaaaaataacgtagtctgtacataaacacagtgccatgggaattatattcaaaacatgcttgaactgcttgcttttacctgaagcaacatgaaattgaattacattagtatagagcaatttggttgcatgtcacttgtggcaaatattgtgtaagctgaatatttagagattttgttcaccttgggtcacacagtattagttgtcacgaaaaataccccaaggtgataccaaaaaaaaaaaaaaatcctgactcaaagaagacaattgactcaaaataaattgagaatattccattccaaatggtttaaacacttggtacagacccaatgtagcttcataatttatgcaaatttttatctgcaaagcaatttttgtatttaggtttaatcaaagagcttaataatgcaagtacaatctatttactgtcacctcatatgctaagacaactgagaaacattaaaaggccctacgttcgcatgacccagtttgtacagtagccagcataacttcttgatgttgatggatatgtgagttaactctaaaatgggctaaattaactaacccattagatatctaaatgtgtatccctttaaaaaatagtacttacttaaagggcttatccgtgaccaagctataatttagagatgttgttatattgaaaatgtggtcacaaagtcatttaagggcaagaatttctaaaggcggctcagtctaattgtccaccccactgggaaaactgatgatatgcttcgtcattaatggattgggaatatcatatctgtaaaagaagttaatagccttaaattgttgtttaatatgttattaccatgcacttttctaggtgtgttttagaaggttcattttaaaaataaaatgctggtgtgtaagagaaatacttggagaagcttatttcaatgaaaagagaaaaatttgtttaagttggagaagatatttactatggataatatatgtaaaaccaagaagtgatcctaagagttcactttggattacattgttcttttttttttttaattcagcaacatcctgtaaagttacttgatttggaaatgccaacattcttaaaataggattaagagacactgctttaataatcgctccctattatccacatgttctttgtcattcaagagaataaaggaataattagaaaatacttgacaaaagattaacatccttaacatatgaagagctcttataaattatgggaaaacaaatatttcaattcggaattggaaaagtatatgacaattcacaaagggcaaaagaaatttatttgggacataaatatgaaatatattcaacctcacaagtaattaagaaaattgagatattatattggcaaacattggcaaatgctgaaatatatatgttccagtggtacagaacatgcttgttggccatttaaatgaatgctgctttctgtaaggcagagtggtaattatataggcaccttaacactattttcatcttctacccagtaattctatttctaaaaattatcctaccaaaaaaataaaagacttgaccaagatggaatataaaaattttccctatagttaattttccagcaataagagaattagtgaaattatataatattaatctaatctatataatacactattatgcaactaatagaaatcttcagaatgcttcatgaaataaaaaatgttaatggtaaaatgccagttaaaaaaagcagagtatacaattatagtagtgtgtatgtgtgtgtgtatgtatatatataatcatgtacgatgtagtaacatttcagtcaactgcagactgcatattagtcccatgagcttataacagtctatgtttactatatcttttctatgtttagatttgtttagaaacacagatacttaccattaggttgaaattgcctatagtattcactatagtaacgtgctctatgggttaacagcataggtaccataggctaggccatatagcctaggtgtgtagcaggctaaaccatcgaggtttgtggaagtacatgttatgatgttcacacaatgatgaaactgcctagcaatgcatttctcagaacctatctcagtcatctagtgacgcatggcttataaatcaaagaagaaagtttggcaaaatgttaatattgactttctcttagtggaagttacgtgtataatttttactttattttttatatgtttctgtatatttcaaatctttaccacaaatatgtattacacatataataaaatcaattggcagtataaaactaattttaaaatagaataaaaaagcagaagcctgttcatggtaaaaagaaatgcagatatttaactacaaaaaggacaaaaggggtatgaagtatgtttaatgcttacttcgtatcattgaggacttatcacctggaaagacaaataagaatatttatggggcagaatgatgacatgtttgttaagaggttttaggtcaacacagaacagtactctttatcagttaaaatagcattagctacgagcacattccactgcaatgctcagggatccgtaccaaactgttgttgtaagcaggagttcatttgtcttatgtaatgtgaagcctgaataaggccaatccagggtctccgtgaaggtaccagaggcctaggctccttctcctcttcactctgccactcttgactttctggctctcgcacccatatttgtcactgtggagtgtacagatggcttctatgtcttcagcaatcacatccatgtttcaggcaaaaaaaaaaagtaacagaaggcaaaagggtacgccaacattcttccctaattcaggaaatccagtatcagctaagaagtgctgtccagcaaacttctactcttattcattggccaggactatcacatgtcacatactgtctagccagaaagtagctagggaaaacagggttgtaggtggcattggatcagtcaagctacatgtctgccatagccacccagtgtgtctgtaagtttctggtcactgcatgtgtgcagaagtgcacagacagcctcattagttaggcagaatttctgagttgctttagatcttagtcctgagagactattattttaattttgttttgacagaattgtagaataagtagaaaaatgataagagagcaatgtcctgattctctgtccactgccaaagtcaagcttggccaattatatttaagctggaacagaggataagaagtgagagttgcttgagagaatcatagtaccatcttcaaacagagaagctagtgaaggaacaagatgcaggaaggagacacccagagagaagaataaccagagaagctagtgaaggaacaagatgcaggaaggagacacccagagagaaaaatataacaacaaattactattttttcttaatgtctctaacctactggttttaaattttatatatatacacacatacatatatatatacacacatacatatacacatatatgtatgtgtgtatatatgtgtgtagataagtatatatgtatatatatgtgtgcatgtatatatgtgtgtatatatgtatatgtgtgtgtatatatgtgtgtatatgtgtgtgtgtgtgtgtgtgtgtgtatatatatatatatatatatatatatttttttttttttttttttgagatggtctctcgctctgtcacccaggctgcagtgcaatggtacaatggctcactgcaacctccacctcctgggttcaagcgattcttctgcctcaacctcctgagtagctgggattacagacgtgcttcacaatgctcagctaatttttgtatttttaatagaggtggggtttcaccatgttggtcaggctggtctcgaactcctgaccccatgatccacccaccttggcttctcaaagtgctaggattacaagacatgagccaccacgcccagcccaaattttctatttttatgtcctaaattgttgaagcaattcttctgatcgaaacaggcaagggttttatttttcttatgagtcactataggcacaaggcctagagcctataagctttacaaaaacctactgaagtatgtgagatatgaacaaaattattggctgtaatgtatgaacataaatccaagtgtgaaattaataaatgtttatccctgaaatggaagcttatgccaattttagtaattattacacttagaatttattattttaaaaaatatcaattgcaaaaaggttacacttttggtttttttacaactcaaaagaatttctaagtatgcagagagattgctaaaaaaatcagtcaatctataattaactcataggcaaataattgtaaatagattttgtaaatctctttcaaatttttacagcaaaaattttatttaatgtaggagggggatggggaggaagagagagtagcaggagagaacacactatgggtacagcccattgcttttaccttttccctccctttattatttgcctctgagatgtccaaagaaatctctggtcttaggaaaaaaagattttaaaaattactgcctgtggctgggcatggtggctcatggctgtaatccaagcactttgggaggctgaagtgggcagatcacctgaggtcaggaattcaagaccagcctgcccaacatggtgaaactccatctccactaaaaatacaaaaatcagctgggtgtggtggcacgtgcctgtaattccagctactcgggaggctgaagcaggagaattgcttgaatctgagaggcggaagttacggtgagctgagattgcaccactgcactacagcctgggggacaaagggagactctgtttaaaaaaaaaaaaaaatgctgcctgtgaggtcactctggactctgggtctagccactgtctgtttgtccagttaatgttttctattagctcaactttgttcgagattcttaatataactcaatactttccaaaaagctagcagatatttaatatgtatgtgtaatcgccttttctgcagaaaggagcgtgatttaagtgagctcatctaatagatcagtataaaataccagatgagttcactagagtgtgtgaagaactttgtgcatcccatttaagtgaatggttgtgtgctctgaaatgaagagacagcacataaacccccaaagttaataaactctaataaacaatgaatctggatgacaacttttcaaaatctattacacagtagtagccctggttttgcacagtttgcatattaaacagatgatagtagattctgggcagaaatatagacagtattatgtacttcaattcgtgccagaagagaaattttttgatagcacttattgtagccaagaacaaagcagctatacaatccccagccagaaaccaggtgccaaaattaattcatgcaagaataaaatgggttggcaccttatggtaaagtcataagctcttgaggaaatgcacaggaaagttctgggtagcttgagttactacgtctttatggttacttccattctgggctggctcattaactttgcaataagaaataccatggaatgatcagaaaatgttttcacccagccaggaaatctcacaaccacaggcaaaagtgccatgaagagagcagacatggttttcagtaatgtaagccctgcacatgatttggatatagcaggcttacttgtcacgtttgtaggagccacataacttggtaggttagcaaatcacactggatgacagaatcaggattcaaaaaggtctcaacagggagaactgttgagccgcaattcagaagattaaatttaatagggatgaatgtaaattcctgtatttgggttcaaaaaaggaagcaactgcttcctgccttactcccatccaatttattttccacgctgcagcctgggtgatcattttaaaacacaaatctgatcatgtcacttccttgctaaaaatcccttaacaacatcccattgccctgaggatgaagacagaactcattaatgtggtttttgagattctctatgactggccccttcctttctcttccgcctgttctctctccaggctccctctcacactgagcaccccagccaaatggaagatcttagggttcctcattttaggctgcttttaggttctcatgttttctttgcccgaaacacatcttcccaatttcctatacatttccagaaaagcccaatccatgggctactgttaggtgcctcattaccaactttcaaggttctctgaccagccttttatttaacaaatatgtattgagtgcctactacatttcagacatgttctaggctccagagataaaacagtgaacaaagtaaagctcatgtccacgtgaagcttatgttttcttggggaagatgccaggcagtaccaagtcttttgaagaaaaatggagaatgataagaagataatgatggacagtcagggttgggaggcctgctttacatagggtggcgatgggaggacctctctgataagatgacatttttggagataagatcaaaggaggtcagtgaactttgtggctatctgtgagaatagcaccacagtatggaaaagagcatgttccaaaaccttgaggaggggcatggtttgcgtgtcctaggacttgtggtgaggctggattgggtgaagtaccctgatccagggcagagctgtgcagatgatattggaggggctgctgcactcagcccaggcagggcttggaagctgtggaagcctttggattttcttctaaatgtggttggaagctaactgggaggctttaagcaaggggctattataataagatttttgttttggtttggttttagtttttaaataattacagtagctttgttgtggaaaatagaccatagggactaaatgcagagtcccacagattagtcaagagatgttacatctgtcaaggtgagagctggaggtagctttggccaggtaggtttgctagcacttactccactctttgtgattacttgtgtgttagaagccctgccagtgcagggctcaggactaccttgctccttttacaacctcagtgcctagcatggtgcccgatgtaccaccggctctccgtaaacattcatcggatggagatgatctggtttaacggcagttagtacgaaaaacgacttcaggatttttagctgactgcacacagttgatgagccagcagtagcccggttcagctgccaggaaagctaatgctgtcttaggtggcattaaaaactttggtgagggtgtcagtgaaagggagatgtgggtcctagggtgctccatgctgtttatgctacactggactgttggcctgatcctacactactttttcccttgtatcttctttctaataatggcatatttcaatcacgaggccacacactttggattcatctgtggttctttctgttgcttcattaccatgtacaaacaataaattctctatgatatcacctagcactgtctctctctctctgtctgtctgtctccgtctctgtcttatttttcccttttcccctgctctgacacaatgccaacagtagtccatgcctgtcttggtaaaagtttccaggtgcgtgagactctaaacaacttattataactcttatttctgagagtatcaacaattatttttaaaaacattatatgctggacacatagaggggaacaacacactctggggcctattggagggtggagggtaggaggagggagaggatcaggaaaaataactaatgggtactaggcttaatatttgggtgatgaaataatctgttcaacagacctctattacacaagtatacctaggtaacaaacctctacatgcgcctctgaacttaaaagttgaaaaaaaaatcccagtaattttctcatgaaaaatacccagaaagttaatgaactattagaccttccaatataaaaaaaaaaaaagaaacacatatgctgtttcatataggttggtatgaaattctactttagtagatagtgttaagtagtagaaatatgtagttctttatggcaaagtcattagcaaaatcttctcaaagtcacacagtagaaggaatttgtgctttgaagtcaggaacccttcagatccctgctgttccacgtacaaactttatgtcataacccttcttagcctaagttccctcctctgtgaaatgaagataataaaacccaactcaaagagtttttgtaaggattaaatgagataacacatattgaaatgcttaccatgatttctgacacatgctaaattggtaataagttttcatttccttcctatctgttaaaaaaggggtcactagacaatgtgaaaacatacattataaatagtggaaacagaggtgtgttttccatcagttaatagtgaataatggccgtttgccttaaggtagcctgtgccccttttattgatggtttaatgaatatcaatttcttgctgatagcagaaatatttgtcaaaggtctgagaatcatgaaagcttttacaatttgagtggtaaacatagtccatccctgacagattccagaaatgagcagagaatgaggtttcctaggagcaatcttgcacaaatagtcttttctctgtgtcaggtgggaaaaaaaaaagatggagcagagacttcatagtatcgttgtaaactgtaactgtttattttgtaaagatgagtaaaatgctatctttgccttcattgaggttgtccataaatcagtgtagtacagagtagaaagtggtacgtattcttggaggaaatgctaaagtgttctgaggcaggatcgggagcagagatggagagaatattctaggaagtacaggtcccagaaggagtaacagtgcagcatctaaacatgtgagatcagcggcattttcaacaagagataaacacaaatgagaaaaaaacaggaatcactctatgtgacttgaagatgaatagaggataatataatggaaaaggtaaaaagggtacaaatctgggatacaaagataaagagaatattattcataggcagtgaaatattagtgaaggtttggagtagcttagaaaaattatgaaagtgatgtttagcatggatgaatgttgatgtggtaaataagatgagtagtagagttacagagacagaggtgggtcaagagcaagttggaggcaattgcaaaaattcagccatggaataacaaaagccataggtccaggtatgagaattcttgaaaggaagacctgacggctgactggctgtgactgctgctcatgaagacagcatgtatgttgtcaggacaggagaataaccctgagcctagatatggtttcttttcagtctgcccactcagctgctttctttttatggtcctgtattcaaaaaaaccaaccaaccaaccaaccaaccaaataaaacttgcctgttctcagcaatgatttcataatatccttatgtaggaaagaagtaagtgatgagacctccaaaggatattgtcctcagccactgatcacattcttagcttagtgttcttccattatgtttccttttaattttgtagttatgtgataagtatatatttatggggtacatgagatgttttgatacaggtgtacaatgcatactaatcacatcagagtaaatggggtgtccatcacatcaagcatttatcctgtcattgtattacaaacaatccaattatactattttagtcattccggaggctgaggcaggagaaatggcatgaacccaggaggtggagcttacagtgagccaagatcacaccactgcactccagcctgggtgacagagtgagactccatctcaaaaaaaaaaaaagaaaataaatgggccaggcacggtggctcacacctgtaatcccagcactttgggaggctgaggcaggcggatcatgaggtcaggagattgagaccatcctggagaacatggttgaaaccccgtctctactaaaaatacaaaaaaattagccgggcatggtggcaggtgcctgtagtcccagctactcgggaggctgaggcaggagaatggtgtgagcccaggaggtggagcttgcagtgagcggagacagcaccactgcactccagcctgggccacagagcgagactccgtctcaaaaaaaaaaaaaaaaaagaaagaaagaaagaaaaagaaaaagaaaaaaaaagtacaataaattattgttgactgtagtcaccctgttatgctatcaaatactagatcttattctgactatatttttgtgcccattcatcattcccacttccccaccgccactccccagaagccccccgcccccaaccccccagcacacactagccttcccaacccctctggttatcatcattctattctctatctccatgacttcagttgttttaatttttagatcccacaaaaaaagtgagaacattcaaagtttgcctttctgtgcctggcttatttcatttaacataatgacctccagttccatccatttgttggaaaagatagaatctcattcttttttatggctgaatagtacctgatttttttttcttttctcataattttttattccatgggtcgaaagaaaaagaaagagataattatttttgccaacctggaactggccattcaagccaacatgcttgaaactttcttttatcttccataaccatatttttttcctattttttattatactttaagttctagggtacatgtagtacctgattatttatatgtacattttctttattcattcctctgttgatggacaattaggtagcttccaaatcttggctattgtgaatagtgctgcaataaacatgggagtgaagatatctctttgatatactgatttccttgcttttgggtatatacatagcagtaggattgctggatcatatgggagctctatattgagttttttaaggaacctccaaaccattttccataatagttgtactaatttacattcccaccaacagtgtttgagggttcccttttctccacatccttgccagcatttgttattgcctgtcttttggatgaaagccattttaactggggtgagatgacatctcactatagttttgacttgcatttctctgatgatcaatgatgttgagcaccttttactatacctgtttgccatttttatgtcttgagaaatatctgtgcagatattttgtccatttttaaaatcagatttttagatttttttcctctggagttgtttgagctctttatgtatactgtttaataatccattttcagatggtatattagtctgttctcactcacactgttttaaagaactacctgagactgggtaatttatgaagaaaagaagtttaattaactcatagttctgcaggctgtacaagaagcatgactgagtggcctcaagaaacttacaatcatggcagaaggcaaaggggaagcaagcacatctttacatgtcagaccaggataaagagagaaaaggggaaagtgccgcacacttttaaacaatcagatctcatgagagctcactaactatcatgagaacaaacagcaagggggaaatccacccccatgatcaaattacctcccaccaggtcctttccccaacatttggaattacaattaaacatgagatgtgggtggagacacagagacaaaccatatcagatgggtagtttgcaaatattttcacccattctgtggattgtctcttcactttgttcactgtttcttttgctgagaagcagctttttttgttttgttttatgagacgaattctcattctgtcacccaggctagagtgcaatggcacgatctcaagagtctcgttgtgtcacccaggccagagtgcagtggcacaatctctgctcactgcaagctccgcctcccgggttcacaccattctcctgcctcagcctcccgagtagctgggactacaggtgcctgccaccacgcccggctaattttttgtgtttttagtagagacgaggtttcatcgtgttagccaggatggtctcgatctcctgatcttgtgatccgcccgccttggcctcccaagttctgggatcacaggcatgagccaccacgcccggccaaaaaagctttttaatttgatgtgatcccatttgcccatgtttgcagttggttgcttgtacttgtggagtattactcaagaaatcgttgccgagtctaatgtcctggagcatttccctgatgttttcttgtagtagtttcatggtttggggttttatatgtaagtatttaatccatgtagatttgatttttttttatatggtgagagataagagtctagtttcattctcctgcatatgaatatccagttttcccagtaccgtttattgaagagactgttctttccccagtgtatgttcttggcttatttgtcaaaaataagttcattgtggatatatggatttctttctagtttctctgttctgtcccattaatctatgactctagttttatgccaggatcatgctgttctgattactttagctgtgtagtataatttgaagtcaggtaatgtgattcctctagttttgttcagtttgctcaggatggctttggctattctgggccttttgtgatatgacatagattttaggattgtctttttttctgtttctgtgaagaatagccaaagccattctttcttaattgatccactggtcattcaggagtgtattggttaatttccatgtgtttatatttagttttcaaaatttatgtctttactgatgtatagttttattacattgtagtcagagaatatactcgatataatttcagggttttttttttgcatattttaagacttgttttgtagtctaatgtgtggtctacccttcagaatgatctacgtgcttaggagaagaatgtgtattctgcagccattgtgggaaatgttctatgaacatctatttagtccatttggtctataatagtgagattaaatctgatgtttgttgatttttctgtctcgatgatctgtccaatgctgaaagtgaagtgttgaagtctccagccattattgtattgggatctctctgcctctttagctttagtaatatttgcttcatttatctgggtgttccagtgttggatgcatatacatttataattgctatatccttttgctgaattgagccctttatcattatatagtgaccttctttgtctcttttcataatttttgccttgaaatctattttgcctgatggaaatatacctactcctgctcttttttagtttccactgggatgggatatctttttttatctatttattttcaatctatgtctgtcttcttaggtgaagtgtatttcttataggcaacagattattgcatctttttttttaaatctattcagccactctgtgtctattgattagagaatgtagtccacttacaatcaattttgttattgataagtaaggtcttactcttgccattttgttatttgttttctggttgttttgtggtcttctcatccttctttcattccttcctatcttacttttagtgacagtgattttctctggtggtatgatttaatttctttctttttcttttttgtatatccgttgtatgtttttgatttgaggttaccatgaggcttccaaatactatcttataacccactattttaaactgatgacaacactgactgcataaagaaacaaactaataaacaggcaaaaagaagactaatgaaaattctgcactttaacttcatcctcctgctttttaacttttgattgtttctgtttatatcttattgtactgtgtatgtcttaaaaagttgttgtagttagtatttttgatcagtttatattttagtctttctgctcaaggtaagagtagtttacatggcacaattacaatgttttaatattctgtgtttttctatgtacttaacattactagtgagttttgtaccttcaaataatatctcattgttcatcaatgtccttttctttcagattgaagaactccctttagcatttcttgtaggacacatctggtgtagatgaaatccctcaggttttgtttgggaaaatctttatttctccttcacgtttgaaggatatttatgccagatatactattctagaataaaaagcgttctttttttccttcagcagtttaaatatatcctgtcactctctcatggcctgtagggtttccactgagaagtctgctgcaacacttactggagctccattgtttattatttgtttcttttctcttgctgcttttgggatcctttctgtatctttgacatttgaggatttgcttattacttgtcttgaggtagtcttatttggggtaaatttgcttggtgttctatatctttctcttggtttgggaaattatctgttacgatccctttgagtaaaaaaatttaccctttgggtaaatcccttttacccctgtctctctctctgcctcctctttaaggccaataactcttagatttgctcttttgaggctgttttctagatcttgtaggtgtgcttcattgtttttttattctttttattctctgactgtcttttcaaatagcctggcttcaagctcactgattctttcttttgcttgatcagttctgctgttaagagaatctcatgcattctacactatgtcaattacatttttcaactccagaatttctgtttgattctttttaattatttcagtctccttgttaaatttatctgataggagtctgaatgacttctctttgttaccttgaatttcactgagtttcctcaaaacagctattttgaattctgtatctgaaaggtcacttatgtctgtctctctgggtttgggtcacttgtgccttatttagttcgtttggtgaagtcatgttttcctggatggtcttgaggcttgtgattgtttatcattgtctcaacattgaagagttaggtatttattgtagtctttgcagtctgggcttgttgtacccatccttcttgggaaggttttaaatcggttcttggggtcatcaattccacgctttggctcttcaagggaattgagtgttgtgaccttaatcttcggcccctgcaaccataactgcattagggggcaccccaagcccagtaatgctgtgactcttacagacttgtagaggtgccatgttggtggtcttggataagatctgggagaattaattccctgaaattaccaggtagtgactctgctctcttcccttattttcccccaaacacataaagcctctctctgtgtgctgagccacctagaaccggtgtagggctgacacaagcaccctgtggccactacgactaccactggtactgtttggggtcagacctgaaggcagcacagcactgggtctctccctaggctcacagtaaccactgcctggctaccacctacatttgcttaggacactagagctccgcaataagcaggtggtaaagccacccaggcttgtgtccttcccttcaggacagcaaggtccccctggcctcgagtgagtccacagatgccgtccaggagccagggcctagagtcagaaaccttagatgtctacctggtgctccattttcttgagtctgagctggcaccaagccccacttttccctcttctttccacaagcagaggactctctccccacagccaccaccaccacgtccatggcaagtactgcctgtctaccactgatgctcattccaggtctaaggactcttcagtcagctcatggtgaatgctgccaggcctgggactctctcttcagggcagtgggctctcctctggcccagggcagatccagagatgctgtctaagagccaaagtgtggaattggtgatcccaagaacccgctttgtgctctataccactacggctgagctggtacctaaggtgcaagaccaagtccctctccttttctcaagcaggagaccctctccgtagccaccatagttgggaatgtgctgggccataccataagttagcatgtctctgagtctcacccaagacccatggcaagtactgcctggctactgctgctaattattcaggacccacattttctttagtcagcaagtgatgaatcctaccaggtctgggttctccccttcaaagctgcgagtttccttctggcagagtgtgtgtctggaaatgtcatccaggagctaaagcctagaatgggggccccaggactctgcccagtgccccctactgtggtagagctaggattcaagttgcaagatgaagtcctcttaactcttccctcttttctcctctagcagaaggcaggagtctctcctggagccgtgagctgcactgcctggggttgggggaggagtggtgcaagcactgcattagccgcccaacggctgtctcactaggttattaccccccaagtccacttactccaagcccagcacagcatcaagacttgcccagtaattgcagtccttagggcctagactacctttcaagtctgtttaggaccccagagcgctttagcctgcagtgccaaggcttggcagaactcaggttctgactgctgggatgggcaatttccctctggctagggctggtctgagtgctccctccatggactctggctgtgttctgcctggtgttgctttccaccatgacagggtggaaagcactgagttccagtgcaaagtctccaatcactatgctctccctccccaaggtgcacagattctgtctgtaccatgtgtcttcttcaggggagtggaggacgtgggagtggtggtgtcagcaaatcaagactgtctttcctatccccttcagtgcctttttcagtgatatgaagtaaaagtggttactgtgatcactcacctgatttttggttcttatgaaggggctttttcatgtgtctagtagttcaattcggtgtgcttgtggggaggattatcagtggaagcttctatttggctctcttactcctcattacgttttaagacttaagtggtcttagggccattggttgtatgatttagaaggctgtagttataagaataaagatgtttcatatgttaagtagattaactatttttttttttttttgagacaaggtctcactctgttgcccagtctggagtacagtggtgcaatcatggctcactgcagcctcgacctcctgggctcaagcagtcctcccaccttagcctcttgagtagctgggaccacaggcacataacaccatgcccaactaatttttgtattttttttttttttttgtagagatggggttttgccatgttgcccaggctggtgtcaaacttctggactcaagtgatccacctaccttggcctcccaaagtactggtattacagatgtgaaccactgcacccagccagattcactatttttaaacttatttctggaaaattaataccatactatgaagcttgatgtaaaattaatatcacagttttcagttattgagtctaagaaatggagctatgagtcagggaaagcaagggggttagagtgtacagagaaacataccagagaagagagatctgcatagcgtgaactccacgtatagttggagggttttccttaagtattgcacagagtattcatcagagcatgcatgtagggaactaccaaggctaggccaaaaggattcaagaagcagtacccagagcacactcaagagtgagaccaatgtttgttcccacccacaagattggagaaaatatctcataatccgtaggacattggataaggtatgcaagaggccattgcctctgttgtacagcacaatcagcatagagtaaatgctgctatagtcctgcctagcagatcataaaggcaagactcaagaggatcactctttccaagtaactatattccaatgacattttaaaaaattacaggaagggctaagcacagtggctcatgcctgtaattccaacatttggggaggcaaaggtgggaggattgcttgaggccgagagtttgagaccagcctgggcgatatagtgaaacccctacgcacacacacagagtgtaaatattagccaagcatagtggcacacactgtagtcctagctacttgggaggcttgaggccaggagttcaaggttgtagtaaactgtgattgtgccactgtactccaacttgggtagcagagccagatcttatctgtaaaaaagttttaaatacaaaaagtgtatttaaaattacaggaatatatatgacacaaaaaggtaaaatttctaatatctggaatccaataaaatattaatatgcatgtaaagaaataagacatataataaggaaaaaaattagttaaaaccagaactgacacagatgttagaattagcagacaaagacatttaaattattatagttgtatttaatacattcaaaagccaaaggaaaattgatcatattaagtatagctatggaagatataaaagaagacccaaatcaaatttctagaaaagaaaagtttaatatctgagatgtaaaatactctggatgagagtaacagcaaattagacattgcaggaaaccagacaagtgaatatgaatacacacagtagaaatatacaaactgaaaggaaaaagacacacagaattgaacagtgaattgtggggcaacttcaggtggtttcagatacatgtaattggattcaccaaatgagagaaaaacagggacagagaaaaaatatctgagaaaacaatggtcaacatgttttcgaatgtaatgaaatctggaaactcaaattcatgaatctcaaatgaacctctaagtacagacacaaaaaatgaggaaaccacaccaaggcacattataaacaatttgctgaaatcatggttaaagagaacatctaaaaaacaggacgacacatttcatacagagaaaaaaagaggaacagcagcagatttctcacaggaaaaatacaaaggtgtcatcgtgtaacagtatctttaaaatattgaaagaaaaatactattcaactagaattctttaactagcaaaaatatttttctaaaacaaagaattttccagaaatacaaaagttgaaagagtaaatcaccaacaggtacactatatgacatgttaaaggaaggctttctggtagaagaaaaatggtaccagataaaaatatggatctacataaatgaagataatcagaaattataattacttggatgaatgtgttttaaaattttccttatttaaatataaggttaattgtttaaacaaaaataatgacaatgtagaatggggtttttaagacatataaaaatatattatttttatatgacaataacagcacagaggctgtgaggggagacattgaaatacagatccctctctatttatgatggggttacgttccaataaacctatcattaagttgaaaatagtataagtaaaaaatgtgttgctaccaaacatcatagtttagcctagcctgccttacatgtgctcagaaaacttatattaccctacagttgggcaaaatcatctaacacaaagcctattttacaatatactgttgaaaatctaatgtaagttattagatactgtactgaaagtgacaacagaatggttatgtagttacttaaaatatgtttctacttaatgcatatgacattgcaaagccaaaaaatcatacactgaaccattttaagttgatgaactgtctgtaagtctatatactattgtaagatatacataataacaaaagaacactctaataataatacaaaaaatacccaaaagaggcagagtaggggaaagggaagaaagaacagataggacaacagcaagatggtatgttcaagatcaaccataacaatagtcacattaaatatatatgttagaccataaaaggcagaaatggtcaattggataaaaaaggcaagtcatggccagacatggtggctcatgcctgtaatcccagcactttgggaggctgaggcaggaggatcacttgagcccaggagttcaaggctacagtgagctgtgatcatggcattgctctccaatatgggcgccacagcaagtcccactttagagacacaagtaacttaaaagtaaaaggaaggaaaaagacataccctgctaacattaatgaagagactactagaatggtcacattgatatcagagaaagtagatttcagaaaaatattaccagaaatagagtcctttcatagctttaatggaaccaaatcatcaaaacaatgtaattattctaaatgcttatgcacctaataatagtgcttcaaaaaataagagaaaaatacatcaaacaacaggaaaaataggcaaatccaaagttatagtcaaagattttgacactatgtctcaataattaatagaacaagtataccaaaaaatcaataaggctatagaagatttgaacaatattatcaactatcttgacctaattaacgtttatagaacactctgcacaacaactgaatacacattttttttcaagagcacatagaacatttaacaggacataccgcattctggactattaaaaagtcttaaaagttttgaaagaattcaagtcatacaacatatattctgtcagcatagtaaaattaaattagaattcaatagcagaaagaaatctggaaaatctgcaaatacttggaaaataaattatatacttcttaataacacatggatcaaagaaggaagccagagagaaattagaaagtatttgaactacatgaaaataaaaacacttcctataaaaatgtgtgggataagaaaaattgtgagatgtcactaagaggataatttataacactgaacttagaaaaggaagaaagatttcaaataaatgacctcagctttcacttaaaaaaatggtaagagaggctgtgtgaaatggctcacacctgtaatcacagcaatttgggaggctgaggtgggcagatcatttgagcgtaggagtttgagaccagcctgggcaacatgactagaccccatctatactgaaaatacaaaaagttagtcgggcatggtggcatttgcctgtagtcctagctactcgggaggctgacgtgggagaatcacctgagcctgggaagtcgacgctgcagtgagctgagatcacaccactgcactccagcctggacaatgagaatgagaacctgtctaaaaagaaaacagaaaaagtagagtacagtagtctccaccccccttgtctacaggggatatgccccaggacccccagtggatgcctgaaactgagtatagttctgaaccccatagtgctgtagaggatagtactatacaccacaatggatctgataaccaaaatgcttactaagtgactaatacacaggtacatatacagtgcggctactgtgcacaaaggggatgattaatggtttgagtgcaatgaagcaagatggcacaagatttcatcacactactcagaacagtacacaatttaaaaagtgtgaattgtttatttcttgaattttccatttaatattttagactatgattgaccataggtaactgaaaccaaagacagcagaaccatggataaggggaggctttactgtaaattcaatccaaattaagcataagagaaataaaaattagagcagaaatcaatgcgttagaaaaaatttggtaaagtcatagaaaccaaatgccagttttcttataaagtcaataaaccattaaccagactgattagtataatataaaacaagacgtgtgaacattattaggtttgagagaggggacatcagtacagatttcacagatattcaaaggatgttaaggcaatattatgcacaataaatttgacaactaaaatgtaatggacaaagattttgaaagattcaaatgatcatattcatgcaagaagaaataaatagtgtggaaaccttgtagatattaaagaaactgaattatagctaaatactttctcacacaggaaactccaggtacaaatgacttcactggcaaatttgacttgtttcataaaaagaaataataacaattctacagacattcttccagataaataaagaggagtgaatatttccccaactcattctatgaagccaacattactctgataccaaaatcagacaaggacattagaaaaaaaaatttagattgatatccttcttgaattgatgtaaaatttggcacacacacagatgaaagactgtgtgaagacacagggagaagacagccatctacgagccaaggagagatgccccaggagaaatcagcactgctcacaggttgatcttggacttctatcctccagaaatgtgagaaaataaatttgtccaagccaccctcaaaaataaaaactaataaaaatttagtgaattgaacccaacaatatataaaaaagataatatatcatgaccaagaagattttatcccaggaatacaatgtgactttaacatttgaaattgatcaatggacacatattaacagactaaaacagaaaaagcataaccatatgatcatatggtggacacatcacgttactgacatcactgatcagtcgcagtgacatcagtcacatcagtggacacagaaaaaatacttgatagaatctaatgtcatttaatgaaagttttatacacatttaaagagtactatttggggacaaatttgtcgtataaagaagtgcaagagaattataaagtacaacattcaggattgtggttacctctgagcaaagagggaaaggaatggcactgggttgaaacacccatagtgcttcaaagataaaataatatttttcttcaacacagtggttgatacacagtgtttgcttaaaccctttgtttgtttgtttgtttgtttgtttttgagacagagttttgcccttgtcgtccaggctagggtgcaatgacgcgatcactgctcattgcaacctccgcctcccaggttcaagcaattctcctgccttagcctcccaagtagctgggattacaggcctgtaccaccacgccaggctaatttttttatattttcagtagagacggggtttcaccatgttgaccaggctagtcttgaatgcctgacctcagatgatccacccgactcggcctcccaaagtgtaggtgggagccaccacactcagccagttgttatcctttataccttacacatattggtattttttcatgctttaatatttagtaaaagcaatttttaaagctagtatttctgttcttggcctttttctgaaattatcataccagaaagacatttatttcctgtatttacagctttggaaactcataacatttgcaggttgaaagaagagctgtttgtatgaagtattcagttttttttagaaatatagtgtgatttttctataaacagagggaactggtatttcaagtatactacgtgaagaacaagagtgtgattagagccaacaagccaaaaaatagagaggaatcactaccctagtggtcagttatatataaccgagagaaagacagcaaagtgagactagcctgctaatcatatatttttctacatttctaaagttcattactcaaaatacaagtgaattatatttattccaaacagttctgttacgttttggtctttatttagacctgtcccagaattggaccccaattaccttctcctacccttccttgctaggaacttgtctgaaaattctgccacaagaattttacagtgtttaaatacatttacactacaccattcctataattatatatatctcacaatgaacagttgtctcattcatgagtctagaatcctttgctgaatggacatgcccaaatttggtgtcatttatttattcttacacatgccgcattcactcagcagacattaatgagtacctgagcggtgctagacgtggtactaggctaaaatggaaaaacaagacaaatgccctgctgaaggtgtttaatgtgaaacagacccgtgcacaaataattgagatatttgcaattcagaagaaatagtatgtgttacttagattttgtacctaagtacaaagttgcatggcctacttaaaaaccttcttctatagccaggtgcagtggcaccggctgtcattccatctacttgggttgctgaggcaggaggatcacttgagtgcaggaatttgagtccagccagggcaacatagcaagatccctgtctctaaatttttttaataaataaaaatgtttaaatttgtataatgtaaaaatgtttaatgttgtgtagtaaggtaaaattctatttaaaaacaataataaaaaatatttctgggctgggtgcggtggcttacgcctgtaatcccagcactttgggaggctgaggcgggtgtatcacctgaggtcaggagttcgagaccagcttgaccaacatggtgaaaccccgtctttactaaaaatacaaaaattagctgggcctggtggcaggcgcttgtaatcccagatacttgggaggctgaggcaggagaatcacttaaacccaggaggcagaggttgcagtgagccaagatcgcaccattgcactacagcctgggcaacaaaagctaaaaaactccgtttcaaaaaaaaaaaaaaaaaaatatatatatatatatatatatatgtatgtgtgtatatatatatatatatatatatgtatgtgtatatatatatatgtatgtgcatatatatatatatatatctgatgtgctagagtacagaaaagctggcaaaagtggtgagatgtgaaaggctatcataatctatttgtgaacacctacttctgttaggtttcatgataaatttttacatcaagttgtctcatcctatgaggccttatctacattttacaaataagttcagtaagcttgaaaaaagactcagtaattaaatcatactcacagatgtaattagcatcagaatccagggccttttaaggtcaaagcttgggatcttcctttttattttcatgctactcccttccccaggagtaaaggtgttctaggtgctaaaaggcatttttgctcctcccagatcaattgatgcaaataattattcacctaaaacctttattgtctttatgaaccttcatgtctgtctgaccttccactcttcctgaagcatatctttttcttaatgaaactatttaacatattttattctaacaaatatgtcatttgtatctcctcattagaccatggggttgagtatctgattcttttaagaaaaacagtgtgtactgaatggattaaaacaaattaacaaatttatgaaggaattacttggattttccaatattctttaatgagctaaagatgacagtgtaagaacatatgaaaagtattggattttcgcaactttcaatttaagactttctaaggttcatagagaaagaaaaggaattttaaagagatcactgaagagttgtgaacatatggatagttggataacgatgaagggaataagccctccttttttaccctatgtcaccatggctgagagatgcattatgatattggaaaaaaatttcagctgctgagttctgattagctcactctcagagctgcagcacattcgagatggaacacagtgcttttgggaaagcttgctaagataaatgagataaatgtttgcaccattatactaattccctagcccccttttcagcaaaagccttgttttgtgtgtgtgggtgtgggtgtgtgtttgtgtgtgtgtgtgtttcaatagatggaagaattttttaacacatgaaaactcacattgctgaaaactcaaaaagtcttcctaagcagaatcattatgccaaattgtcattgacatacgaaaacactatagattaatgcagtaatagttcatggttgctcaggaagaaacttaatttacaatttgaaacaggtttgcattccttagaaattctggaaatcaatcagtggcacagaaattgatctgctaaaggagaggaaaattgatttttaatattggcaactacatcaatttttttaagttctgaaggaacaactcttgaaaacaaatttattaactgttaagggattacttgatatttagtttcctagcaaactatccaaagagaagtatttatggcctcattagaagatgtatttttattgtgccaaacatcaacttcaaaattgcagtctctattatttcaaagatatggaaatcaaaaattaaatgaaatggagttatctatataagactaccattgcatcatattttagagtggtactttgcctcaaagtatctcaatatgaatagtgagaatctgaacacatttgcatattccccattcgtgatatagtgttggcattctaaaaaagaataactgtagctgatggcaatttttatctgaagagacttgtgcatgatagcaatatacaatcttctgtcagcataagaagagcatctggggcccattaactcaccaaatctgccactgttctgcaaatttttattaagcaagtgtagtccctaatagtcacttatgttatagaatgcgtatcaaatgctatcaataagcaaggggattgttttcccccagtgagaatgcatttgaagtgtataagaaagcttgacaaaagaataaaacactttaagtgatcactatattaatataaatgtatcctactgggaagccaatgtgtgtaagtattatgtgcactttgatgtttgccactaactagttctcagagtgccatctttttcatagattttttcccctgtattttctttctctcaattctaatgatgaactggttgaaattaagtgaaaagacacagactgtttatttatgctttttaaaaagatgccattgatgctgggcagttctaattagcttcaaaggcttacaaccatgagaattagaaacataggccatcaggctgctgtttctcaaacaagtcttcctgaatcagagaacacaccaggaaattaacaagcatccaagccaaagagtgtcctctttattaagcaccttatgataattaggtaaaataatgtacatcaatcttgaattgaatatgaggaagcatgaggttagtctagaaatcctattatctaaataaatcggaagaaagatcaagaggaggcagtccatggtactctctaagtatgtaataatggttataataaaataacagttataaaaatatttatgaattgcagcttcagaaacctgagcatttcattggtatctcttcaattattgtaatatccatttacgataatcaagagcaagtagtaccagtccttgggtaaaactgaaggataagaaagggaatgaaataacctttaaatacaaatacttttttaaaaaagaaagaagaaagaaaaggagaaaaaattctgtcatcagaacgagaacaagaaacttagactcttgctccatcaacactctcttactcaatgcttttaattaatactttactgttttggaatcaaagacctttcccacaccaggcccatttatttttcaatctcttgtaaataagtcctttgtttaaaatgacacacctgtcacatttcatatcactaccattccaatcactgtgctaaatattatgcagtgaaactactagacgtaagcttaagccccaagagataattttaatagtagctctaagttaatgtgagttataaaggaagttggtattaattataacacttgccatttaaaaaaaaacttggtggcatgtgtaattttacctcattttctcatttgctactgttatttaaattacttcccagcactaagcatgtgtataaaagatgattgttccaaatttaaccttttaaataaaatgtattctatcaattaagtcattatagttccctctcttttccattatgtttattcatttatcttctgtcctaaagatagacatctgtgtcagtgaatatttcagagaaaggcctctaatttttatgcctatcacccatttggattttctacaatgtttttcaaatagtttatattagtgtttgatataatttcaaattgtcaattaaaataatgataagtataagaaataataaatattattcagccaaaaagttaagaagataatttgttaagcctaatatggccagggaatttgcaagtacttaaatcagcttagattttttaaaaaagataaaaacaaagcagcaaaagccttacctttgtatgaatcccttcttctgaatgactatacataataaaaccgtacagtctagtgtactttcattgcctttcttccactgcaggatgatttaggagccaggtaaattgctaggtcgtatcttttgtggttgtggaatgatccatacaataacaatgtaaaagtacctagtgcccggctgaagcatagtatgttctcaattattttctctctttagttctttataatcctgagcaaattaaatcacgtaccccacaaccgtcatcaaatacaccacctttaccactctcacaacttccatttatcaaatgttttcatttattgagaattatgtgtctggaactgtgcaaagtgcttttgtacattttttttcatttagttccaactctctgtgtactgttttttcccccatttctcatatggagaaactaaagctaaaaagaacttagtggccgggcgcagtggttcacgcctgtaatcccagcgctttgggaggccaaagcaggcggatcacctgaggtcaggagttcgagaccagcctgaccaacatggagaaaccccgtctctactaaaaatacaaaattagcagggcatggtggcacatgcctgtaatcccagctactcaggaggctgaggcagaagaattggttgaactcgggaagtggaggttgcagtgagacgagatcgtgccattgcactttagcctgggcaacaagagcgaaactccgtctcaaaaaaaaaaaaggagcttagtaacttgcctggtaatgctggcattcaacccacatctgtctgattactagctatgatgttagtctctctttctattttgtttctcattaatgatgatgacagtagttcatatttattaagtacttattctgttgtcttctaagtaccttgcatatatttgcacatgtaatcatcaccacaaacctgtggggtaagcaatatcctcttatgatgagactgaggccacagaaagttaaaatgatttgcacaaaactgttgtttccaaacaaggattccaattcagaaagattatttctcatctgtagaatgagaatggatattttagcttgaacccatcagaatcatcaatttcaaaacatgttaaacaaaattatagctaacatttagtaagcttggtcaccacagaaagataactattaatagcatatattcaaataaagagagtagttttccagcatatagttagttgcgttgtcttatattccaggtttctcaggtaatgactcttctgtgactcttatcacaagtgtaatggagtggttaagagtgccatatttaagttcaggcttctccatttatgaggtgtatgtcagtttctttatctgtaatataaggatagtaataataatactttccaggtcgttgtgagaatcgaatgaatgaatagatacaaagtgcatagcataaaacctgtgtattacaagtactcagaaaatatgagttcctatggttatttttaatcattatcattgttttctaatgcttttctacttacagtgtagattgattctatgtaagtgctttttaggcctgagaaaaacagaatttggctcacaactggtgccttataaatacttacctcccaactagaaataaaacaaaaagtctaacaatatttttaagcagttgggaacagaataatcacagatatgtagtgcttttatctagaaaataaagaaatagcttagaaaaggagggctaggtgggagtgggaagattatgtatagtaactgggtcaattaagactgaatgttgtgggcagagaaaaaaagggacatgttactctgagatcaatctagtgttaggcgaaatggaagagattcttcttgttagcaaatttcccctcgccttgcttcaacccttgagaccacagttttgtgtactaacatagacagtggcacatggtaataaacagcttttgttgaatattaaagtgatgatctatgcagagatgcttaaggattaagaactttgcatctgtgttcatgaaggatgtgggttagcagttttcatatcatgtatttttctgatattagttagtatctgggtaacactagcctcatagagtggcttgggaaatcctctctctttctaatacattttctgtagaattggtcttatttatttcttaaatgtttggtagaattcaccagtgaagccatctgggcctagagttttgtttgtgggaaagttttacttataaacacattttttttttcaaaaaactactatagggcgacccatgttatctaattcttcctatatgagcttcagtaattgtgtcttttaaaaacgaatccgtttcatcagagctccattaatctagagttagtttttccccgctgttgaggcaagacccttcttcacattcaaatggatgcccttcagttatgaagttttctactctggctgttggaaataggcactattcccagccctgtgtgaacttcggatgctgttcctcttccagtttggaatggttctttgccaactcttgggttaattttcttacacacatatgatcatcagtattcaactacatatatgaggagatttttctgaagatagtattgctctttcctctctggttctctgctctgcaacctctgtctgctttggcttcctgggatgcccagcaccatgccctcaagctggggccatcactgttctgcttgggtgttggctttcccgcacggctgcctggaggctttcttcagagaataagctggggcaattgtaaagttcacgtcatttgttttccatctcttgggatcactgcattttgttgcctaatgtctaatctgttgaatgccattgtttcttgttttgtctagtttttaaaattgtttcaaggggaattacaaatctgttcccttttactctattttgactagataacagaagtctaattcttaagtatttaatatacacacagacacacacacgtattgctgttatgctgaaagaattttattatattgtatacatccctgggtctatgaatttggtttctcctcttgtaaatgtggaagaaacaacccagttaaaataactgaaagtattgaaaattatgagaaaatgaagttatgttcataaaagatctaataaacatatatttattcatagctgtcttcaagatatctaccaataaaagtgaggtatcccagggtaggctgggagaaaaaaatgtttctcaaatctctgccagtaaaagatttaacttattatgaatctgcattaatttactgtttaaaaattgtctgatttacaagccggtctgatccttgtctcttttatttcttctcctcagtgccagatgaaagcaaggttcactcattggctggacaaaaatcgggtaagaaattccttgtaactgactatattcctcttcctggaaatcactggctgtgttttagtagcagttggaacctgtttctatccactagtcactgaaaggctttctaattaatacatgagatgtctctgacttccacaaagatgacttattgcttggctgtgtgtatagtggcataatgtatgctgactcagaatgtttgggaggaaagaataaagatttccaaaaagatatataaaaccaaaaatcttaaatctgtactctagctaaacacttaaaaaaattgcaagaaaacccaagaaagttcaagattctttcccatgatgactttcatatttaagtggcgggacagagaattccagaataagaaagatacgatcatttttttctcctcaaaaaagaataggattttttttctttttttttttctgcctgtcatcaaaatggattgttccagggatgtatgcattatttttatttagagacatgaatgagctccctagatattctctaggaagtccacaaaaatttctaaggatctcttaggtctttatcatgtgtgagttaccttcactcctaaaatccaagctgttttttcattgccaagtcgactgccttctattcctttttccttcctccatcatcatttattcacattagttgaaaacatttaaagctactaagctagcaaatagtggagtaatccctttcctctaggggcacattgttttggaggagaaaatgtccattttgctcatagcattgcccctctaaacaacagaaggattatgattttctgacatccctccattggtgaaacaaagaagtctttcccatcaccaagtgtctcccgtgtttgtgtgccaattatgttttcagcagtaagtggccttgatgcctcattacctccatcatgttccagggcaagattatgatttttttcctttcttctttctccagattctcttgtgataacagcagggaagggctggttcacaactcttagatttttttttcttgcttttcctaataaaaagcctaagaagttagatcactgtgaaagagatttctatgggagtgataaattgccacatgctccttgctcccaacatcctcttccattaaattctctactactggacatatttttaggagcttcagaaggaagttctcatgaccagggaaccccaaggataatctataatatcttcatcttaaatacattctactgcttatagttctcttatacatattgttataatacctgaagatgaaaagccttttcttagtactgggataggcttcaaggcaaaaagttgaagtccttttctggaatttttatcaatttggtttttgaaaatgagcaaataataaattttctggctttttccaggaaatcaaatcttattctaaccttaatttccaagcacactactattaggtggcaattaaaagtttgtcactctttttagatgagaactttgtcatctttgtatattgccataacattttatgtaaatttcaatgatctgtctttacatagtatgatataaaatattaataaagaattatgctaagtgcaaaatttgaaataataatcttccaaaaaagttttagtcaaaaatggcagaattttaaagctgtcacacaggttcattgcaaattccatacagcaacttcactttagctgatagaaatagttccaacagtctttatgtcacatgaaccacactgtttaaatacttctgatgttttaaagaatatttctgttactaattagtactgttattccaacatgcactatttttatatttttaagtgctattataacgttattactacttcacgtttttcattgggcatctgtagaaatgctgaaaaataaccagccacttgataactttggagcaaaagtggcctgcaatgaagagggctaaacaatcaccaaaaaccatatactgtagagtcacattaaatgagagcatcttgtaaaacactagaaacggttctgagaaagcacagagcagcattagaggaacatactcaaataaggttcaaaatttatgtactctaagaacatacccttccccattttttgttttttgttttttgtttttgtttttgagacagaatctctctctgtcacccaggctggagtgcaatgccatgatcacagctcactgcagcctcaacttccctggctcaggtgatccttccacctcagcctcccggatagctgggactacatgtgcatgccaccatgcccagctaacttttatttttatttttattttttttgtagaaatgggattttgccttgttgcccaggttagcgtcaaactcttctgggctcaagcaatccacctgccttagcttcctaaagtgctgggattacaggtatgaaccacagagcctggccactcccccaattttttacatttctttcttttggaaaattagtcttgaattataatgatcctcaggaactcacccctcacataaaacatagctcccctctgtgcgttgcatttacgtgaagggatatctcattgggatttggtggtggtggtggtggtggtggtggtggtggtggcggcagcagcagcagcagagggttaagggttctcttgattctaacaacctctttcagttacaaaatcattttttaaattcatttaaattcacctgtagtctcagtcggctacaggtcatctgtgaccactaagcaagttaccaggttgtattttaacttataaatctctacttgtctcaccattctttttttttttttttttttttttttgagacggagtggctctgtccgccaggctggagtgcagtggcgcgatctaggctcactgcaagctccgcctcccgggttcacgccatttctcctgcctcagcctcccgagtagctgggaccacaggcgcccactaccgcgcctggctaattttttgtattttcagtagagacaaggtttcaccatgttagccaggatggtttcgatctcctgaccttgtgatccgcccgcctcggcctcccaaagtgctgggattacaggcgtgagccaccgcgcccagcctgtctcaccattcttaaaaggaatcagttaacttctttttgttgtgatattgtccccttttccaaattctttcttcagaatatttaggttaaaataagagtttttttttttttttttttttgagacagattctccctgtgtcacccaggctggagtgtagtggcacgatctctgctcactgcaacctctgcctcccagattcaagcaattctcctgcctcagcctcctgagtagctgggattacaggcatgtgtgtggtgcccggctaatttttttttttttttgtattttttttttatgctaagagtctctcgctctttctctttaactatagaaatgtgagcagcttttatactatccaagaccaacaggaagttaaacaaattaaattgtatatactgacctaaatctatcatccagcctcttattcaagatgacattcaacattttaataaattcatctgagttaaaatttcttgagtcagctacttagtctgtaaagagctatttcgtgccaagttccatctgttggtctggcttgggtacctcccaaatttgtgacaatatttttggtacccttttcttggcttaatttttaaatggttgatccttcggagctcagatccaatcaaaggcccaggtaaaataaatctttataatatttttgacccaaaaatgtagtgttcccctcaccccttctggaattagtccagtattcttgagatttctctaacccctatttcaggggcttccccaaaagggcattgtatctcattaccttggcaaggaagatagcaggatgattctcctgtttctgagttggtagaatcctcctccaaatatgagagacatttaagtctatggtatggtgagacctgcccggagaagttagaaataaaataccctttgtttggttccttgaagaaaaatcacaagtttcatagagccttgaaaaaccaaaaacgtctttaacctctttccttgtttcactaattgaactctgacaaaattcaaattctagcaatgcctggagaaaaaaaaaaaacagaaaaatgtattttttaacagtaaaaccatttttaaatgatttaaatattctgagggaacattaggatccagagaaaatgacatcaaatttagcacagctttttttttattgttatgctttaattttgcttatactcagggtcttaaagtgtgtctttaagaaggaattctttcttattttctttctgtctactaaaatgacacttcaaccaatagtttaatgctcctttatgttcagacagaaagggcttataaattttactttttttagtgtcttcttttttttttgttttgatttactgcttggaactgttttaatatgtattgactgtctgcagagatctttgctgacccagctctttaagatgatgcagtactgaagaaggccgatgagttcttctttatgagctctgacatattaattagcaaaatggactaaaaagcttggctattcctgttttaatttcttatattctcaaacacctgtccatatagctgtaaaacaggcaagtgtgtgaaagtaatggttggcagcaagtccagaccttttctgagacaactttatcaattaatgagcaagtactcattaacaatctagggagctatttctatgtgaggccactaagtatgtttggtatcctaacacagtttgatgaaaaaactgaagctcaggtaatttaaatacttgatctcagctgggcatggtggctcacacctgtaatcccagcactttgggaggccaaggcaggtggatcatttgagatcaggagtttgagaccagcctggacaacatagtgaaaccccgtctctactaaaaatacaaaaattagctgggcatggtggcccatgcctgtaatcccagctacttggaagcctgaggcaagagaatcgcttgaacccacaaggtggaggttgcagtgagccaagatcacaccactgtgccccagcctgggcaacagagcaagactccatctcaaaaaaataaaaaataaaaaaataaaaaacttgacctctcagctggtaactagtttggggtaaggatatgaaccccagcattgtatggtggagcttatgctttggggcaatttatatttcactagcacatgccttatgaaagacacagcccctacatgacacacacacatatcaagctatctgatacatctttacttgcgttgtgtaacctcagccagctgaactaggaacacaatagctttaatttatctaccaaactactgtagttccttgagtatgagagggacatctaatctgatcgttcttgcctttgtttccttacatgtatgtgtgcatgtgtacatgtacaggagtgtgtgggccaagttaagagctgtatgagagagaagatgtgcatgtgacgtgtataaattataccaaaggcacacgtgcaggtgttgtgtatccttataacaaaggccaagagtttagtatgcaagttactacttcagcaggccttacattttgttctaaatgcaatgtgtataaacctcaaatccagagtgttcaaatgtgacctaagaaatttctagatccttgcaaaagaacagagcttttaaaaccatagggtgattggatagtcactttaattcaagagcaatgagttattaaatgacatttcataaattgtgttgagtcttattattccatacttttatagaatattaaaatttgaatgtgcatttacactttggaacaccagttatggccatttaaaaaatatttgcatcttctaattggattgcaaattttcatgaatttttatggttattattgatgaggagctaaaattttcaagttaatggttagtgtacttgaactcttttctttcctcatcgactcattaagatatgacagcatggttctctatttggacaaacatctttattggatgctttctaagcttttgtcatttgttttgttggataaatatagcattagacacaagaaatatatacatttctcacatgctgcagccttggtttatatttccatgggattcaggaagttgtcataaagaagttagcaatatgtctagcgttcttcctatacaaagttgattgtgaagcaactctagtatttccacatttgcaaaaaaaattactgaataatgtggtctgtaaaattcaatgaattaaactgaattagaaacaaatatatcagtcttttccataaaattctttactcctcaaatatggagcaggtgtatgcatctctaaaattcatgagtaaataaagagacaacatatgtttccaaatcaagtttcaaaataaattattttagttccactcatgtttattaaatgcccactctacacagatattgtgttaagtgctagagatacaaagtaaaataagacaagttctcagccttataaaatgtttataatatggtagaggagaaaaaatacaaatgcctaattcagtatttgtttgacaccctcatgctaaagagttcaatgcaaaaacctcacagaggaaatattgcttaattccatttggaattggggatggctgtcacgtttcagaaaggatatgcttccatagcaggatctgaaagcaaaatagaaactggcgatacagaaaaggtcaatgagccaacacatttcaggcttctggaaagttctgagaacatgaaacatcatggtatatttaagaaattttaagcagttcagtgtggcagcagtacaaagagaaagtgacaagataccaagttaagccaagtaggcagagattagaccatacagactcacaccaaatgaaaaagtaccattttatcctgtaggctcagataatctaaacagattaaataagaggtcacttttatattctagtaatatcaatcttttggttgtaggaacctgaagggaccccccccccccaccaaaaaaaaaaaaaaaggagagagagactaatagtccatataagagatgatgttggcctaagtgtcagtgattagcaatggaaggggaaagaaaagtaagaaatatttaggcaagaaagctttgagtattttttttaagttaaacttaatgggtaagtaaaaaagggtatccaacttgattttcattgtacttgtcagctattgctgcaactatgctgcataataaaaccaacagtaaacatttatttcttgatcacatatctccaggtatactggaatttgctggtatctccagtgtttgggtttagctccaacttacaggttaggaccagcttttctgcaggtgttgaccagcaatttcctgcggcatttacttcttgataacaagagtgagaagatagagacagggtagatagacacttaagagtaaaatgtattaacacaaaggctctggccgcccccctacaaaggaggccatggaaccgatggaactgatggaggaaatgctgggactgtgggtcagtgctgacacacccatggccatacgtttggtcttcttggccttggctgggctggtggatgggaagccagtatggatcaccttgtggatggatgcaaagagaccaaacttggcgggcactggaagtacctggggaagcaggagagactcacactgctgtcatggccccacagcctggagcctcccctgcctcctctgcctcttcagagcccagcagaaagacagagaaagaagcctccttggggttccattacccacactccaaggtggaaatctttcagatggttagatgatgaaggtagtagaaggcaaggatgattgggagtagaaggaagagtgacaggctagcatgagctgtgcagcagcaagattccatatgagcaaagtgcagaaagtgagaaaaaaggaccaagttggatctcctcctaaccctgacctgcatgatatgggtgtgagaagcttcaattgagaaagctgctgagaaagtagaattcatagtggagaactgcatttcaattaagaaaacaaaaacaaaaacaccacagaggtggtttgaaagaagaggttgggttgaaaatgaacagtattttgtcaaccatggaaggatagttggactcaagaaggcaaggtagaagagtctaggatagaggggagaagtaggacagcaagtcacgttggaagacacacagagtggtatcattagttgtagagaaattaaaaaaaaaaaaaaaaaaaaaaaaagctgagatgctctgattctagtgaccaagggagattataagctacctacttgcaagacctttcattttaaacatctttggaaaatctagtctgccaggattcaccaaatggctgtctagccattctagcaatgttttaaatcttaagttttttcagctaaatcgtagccgacacctcatattggaagtacacattaaatactcaacctggaaaatctgaaggtgagctcttacataatggacctcccagtctatgttgaataatgtatgtcaagctgaaattttatttctaaaatctgataaagttataatattgccagctaatgttgagaaatattttaggatgtattggttttcctaatattgctattacttcatgtaagatgaagggtgtttaggtgtacgagtttcaaacatgaatactgtttattggaggtaagaggaagccttaaaagacatatatttcaggaatagtattgcctccttacaaagcactcttttgttcctacattgaggctccagtaatgtgatgaatttcagtattttattttattttattttttttttttgagatggagtctcgctctgtcgcccagactggagtgcagtggcgcgatctcggctcactgcaggctccgccccccggggttcacgccattctcctgcctcagcctcccgagtagctgggactacaggcgcccgccacctcgcccggctaattttttgtatttttagtagagacggggtttcaccatgttggtcaggatggtctcgatctcctgacctcgtgatccgcccgcctcggcctcccaaagtgctgggattacaggtgtgagccaccgcgcccggccgaagttcagtattattaaccagttatacgaatgcttccatcaccttgtcatgacctgcccttccagccttgccttttgccaccatcaccctccatctacaggttcccaactcccagctagtcacagttactctctgaccatattttgcccttttatgcctcggagccccagctgaactcttgaagacgcacctcccagggaaaccttcccctgctttctcaggcaggctctctcttggtgcccaggattgtttaacttcaagtgtctctaggttctattctttcacactttcttgcctcaactcacacttctgctccagagccagtcagttcctgtaagagatagggagaaaaacagtttttttctattctcacacatacaacacagaatactaagcacagcacagaatgcttcaattctggtcaccaaaatgtgtatggtttttccccacacacactgaccagttctccagtggacagcaactcggtgtcctataattcaattcaattctgacactatctacctggcgatagagtcagaatccacagattaagctcttagttccacaagcctgtcccattcagaagccagtcccacgtcctaagttgtgacttgggcctctgaccaacgagctgtaattcacagttcccatgactctcctcaggttcaattaatattctagagtagctcacagaactcaggcaaatgacttacttaggcttactcatttattataaagaacattgcaaaggatacacatgaagggctggatggaagagatgaatagaacaaggttgtgggaaggttctaggagcttccatgcactctctccaggcatctccgtgtgttcagcaatctaggagctttccaaaccctgtgctcttgggctattatggaggcttccgtaagtaggtaggattgattacattattggccattggttagcaactgaactttcagctctttttctctctctccggcttagagggtgggactgaaaattccaaccctctagtcacttggttgattcccttggcaggcagccccaaatcctgaggctattcaagagctcttgttcatcagtcatcttattaacgttcaaagatacatcactttggagattccaagggttttaggagctgagtgtcaggaaatgagaggaaaaccaaatatatattttatattacatatcacagcctcaaagatccctctcaggatgttttttttaaaaaaatctcctttgatcaatagtcatggctcccttatattattaatattccccaaatccagctttttttcatacaggaaggaaaactcttatctattgcatagagtggggcaaccaatgataaactcatttagtaagctagtatttattgaacatgtaccgtataccaggctctttgccaactgctacaaatacaaagtggtatagaatatggattctgcccctaaggttctcacagtttagtagcaacaataggaatgcaaacagtgacaataccatgtgcttatgtataaatgcaaatgcacagaaaaagtaacagtggttatctttattgaagaggaagattatggttgggggtcaaagggaccttctgctttatctgtagtatttgagttttacattcagactatatttaatgtactatttaggtaacaaataatttatggattaaaaaataacatttttaaacttaaaccatcacatacaaaacctagtaatagaaatattgtacaaatggaaagatctagcatggggactggcaaagattatgggcagaagaaccacaggaaaagggagcttctagtttctgggaaggagatgaaaggctgaatcccggagtcatactggaaacctatttgggaacctatttgcagcacagaagtattttggaagaaaagagaatagagaaaggcttaaccatgagacctgtcatttatgggttgctggaaaagaaaaaagccataaggaaaatcataattagggaatattaaacccccttgtcaatttttggtatcctagagggcaaaaacttagtcctagtaatttatttaataaggtacccatgcaatgccatgtacaaaaagtccttttttagaggcccatgatgcccaactgtatccaataaaaacagacttataattagggggttaatgaagaatgtgtgaaatgaaagagaaaacttaaaggaacctagattacttctccttgctaaaataagcaatgcagaatcattcccactctactgataattagaaaccgcatacccctacgaaacagcttacaaatttcaccccatcaaaagagaacaaagccattcaaagttaccttttgaatgaaaacacttttattagccaatcagttttttttttaaaccaagcaaaccaaaccacaactgcaaaagaaaaaaaaaaagacagtttggttttagttttgtaaaatatcatggcatgccctcagtgagctgtgagagatatttagaaatactggcatcaaactggtgacagagacattttactgctgcactaacaggcctcacagaaatactactgtaggttgatttagtagtctggtggcccataccctattttaaatggtttatatgggcaaacattctttattttgaaaaattatatatttaaattaatgtacattagtaaaagactgatttttcacttacagcgctgctacatgtttttcgcaaataaaatttttgttcaaaaactgagttatttttaaggaaataagaatataaaatgctatatgaaaatggcagaatattataaaatggtaacactaattgttgaggtttgaaaagcactgattaattctgtaagcttctatcagcatttccatagtttctgtcatgcttctttacaaagttcagggaatcttagtttgagcaaagagtctctacccagaccttcaggatacattaacaatgacctacaccctgggtgccttttcctgtccgtagtcaaatgccttcatttctggttgaacactggcttcttcagtgcaagaaatgtgcaaagcttcaccttttacttactataaacttctctcaataaactctaacttgagttatattttcaaatatagtcccccagcaggccatttcattggagagagaaacataacagatgcaatggtacacttccatgtgggcctggaaagccttaccagatgcagtcagctttgactttttcctctcttaagccctgacatttaccagcaggaaatcaggttgatcccacaagaatacatcccaaagcctcactttccaccctttcccgagccaccgtcacctggagagcttcagtgaggaaaactctcctcaggcctttgcacatgcattcgattagcccagagtgatcttccactctatacggctgattcactctgattcaattctcaggtcaaatgttctttcttcaaagacaatttctgtgaccaccctatctaaaatagtcacccaacaagaagccagtttctctcaccttactgtttacctccttatagagctaatcacagtctgtagtaaatgtgtgtgcatttattgatgtatgtaacctactgtctgtttcccctacctccagaagtgagcttcatgaaggcagagactttgtatccccagttccaaaagcagtgtgtggcacacggcaggcatcctttacgtagtacttgctaaatcttttttcttgatacgtctttttgcatatttttgctctcaaactttgtgtccttaagctttatgtgtatgtcttgtcctaataaatagctggattttgttttgatgttcaatgtgacaacctgaattgtaactggggtttaacacatttacatttattgcaattactagcatatttagatttatgttttattttcagttttaaatttggactactttttaatgaccttttttccctctcttgtcattttaggctgaattgctttttaatcccatttttttctgatagtgatttgaaaattatacactgcatttttggcatgcatacctaacaaaatctaaaattagtctgtatctaatccttctcccaaacaatacaaggaactgagaaccctttagctttccttacctgcttccaatttttatatgatttccattttgttttctttcttattttttggtcccgcaaattatatattaatttcagtgttttatgcattcaatatttgttcagacttctccaagtatttaccaatttcttaactcaccatttttctttgaatctctgaccttccctcttgggtctttttccttcttctgaagtatgccttccagacattctttaatgctagtctaatgatgacactgttttgtttattagaacatgtattttccttggcaactagtttttgttgggtatataaagttagacttatagcacattggagatcttcttctattgtcttatggcttctgctctgaaaagtcagccatcagtctaattggcttctctttacctttgataagtcttttatctctggttactcttaaattctctttgtccttgacgttcactttcactacagtctaggttttggtgtagatttctttatattatccttcttggtatgtggtatgactcccatggctttatatcaatgttttttatcacttctgggatattatggctgttactatgcctcttgctcattctgtctcctctttgtggaattcttactatttagtaaaatgatttttaggccatactctctcaactgtatgtgttaaatcctttttgatatttttctgtcttcttgactctgcactccattctgagtacaagtcgagtatctcttatctaaaatgctggagaccagaaatgcttcggatttcaaatttttctggattttggaatatttgcatatacataatgagatattttggggatgggacccaagtctagacataaaattcatttacatttcatatacatgttgtacacataggctgaagataattttatataatatttttactaatttgtgcataaaacaaagtttgtgtacattgaaccactagaaagcaaaggtgtcactatctcagccacccatgtggtcagtctgtggttgtttggcaccaccatcattcccaactctgaatttatatgctaccattaggtagtcattttttatacttacacacatgagtagttaatgacaaaaaataggaataccattaatacagtaaaaaataatgtgttcaggtaaaaaagcagcacagtggcatcaccagaatacctatgtcagctgctcagcaacagcaacaacaaacagtggcatatgaggtcctatgtggaactttccacttatagcatcatgtcagtgctcaaaaagttctggatttaggagtatttcagattttggattgttggaatagggatgtacaacctggactaatttctccagacctatcttctagctccagtttagtgtctaaatctcacatctctgctgactctcattcatggtgactttttctttataagtttggtaatttccatttgggaggtcatatttggttggctttaatgtatgagaatcttggggagcctgatttgcatgtgcttttcttcagagaggatttagatttgtttcttctggagtactggcaggacactgctaacctgggatcactttcatataatttcttggctgacagtttaattgattgggagaaaataaacttgatttaatacctctaagaggtcagtattatggttgcaagttctcaaaggaatatggtgattttttttaattgttgtttttcctatctagagccagagatgagacagattttcttagactggctttgcttaaggaaatgtatcagggggatgaggcttttcagcccagtcttctactaaagttgtaggccccttgagggtcactgctttaactctcctgcttttgactttgactcccagatcctccaagataccaccattgtgtcccctcccaagctccaggttcctagattcagcatttacctaaaaggcaatctcaaattgcaagtttgcttgcctaccatcactcactgttggttttttcacttgtttttttgtttgttgaagggctttcctttaggatttcctttaatttcctatgaacaaatcaacccatttaaatgtgcatttttaatctatccaagatctatttgtggcatgtgaggtcatgtgcagagttttattcatattttgagaattgatatattattggaagcagaagtctagagtctaataattgtttgttaaatgaatgaatgaatgaatgaatattctttgtaaaagactgaattcaaataaaccattgggtttaatgcagatttaactctcctacatttcactttgactcccacatcctccaagataccaccattgtgtctttgcagaatgagtgaatgaatgaatgaatgattattctttataaaggactgaagtcaaataaaccattgtgtttaatgcagattagagcacacatgaagccagacatggttttatttcactggatctcttttgacaagacaatccaatataaaatgccccttagaaatatatggaaagccatgtgacataagaacaaagtgggaaatgatggtcataatatgctgagaaagtctgaaatggaaaattcctttcaataagaaaccacataataaaaagttctcgttatatttgtagttacaagctatggtttattactctgtctagagattcttgtaatgattcattgttattggaagaaataaaatagggttcacaaaggagcttttatcagattataatgtgccctatcataaagtggggaaaaagaggcttatctggctatttgtagtccttgcccatgtggccatggatcagatactaattagaattctttttgaacccctggaatgctctgcagagtgaattccatgtcatgaccacacttgaagagtagtgcatgagaaggctgtttgataagtcctttaggtactaaaacaaatcaaaaccagtcctatttattctaacaaaagcctctctcctcatatgttctctgctttgcaccaaatgatttttggcttttcatctttctaaagtctagatatcctgatactttcatggaatttttgtgtaacttaccagtcatgtaagactgttaccatagagtaagtggtgagtttggcaaagagaatggattgagaatttggatcaagacagcccatagtcatattgctgaagagctacctttcctattggagtttacaagggttaaagaaacaccactatttctctaggatactaccttggtcaactttagtaaaacagatgatgtactagttgtgtattgtggctgaagatatcagtaggcttttatttttcttcttctttctctgtgcttttttctcctttgtttctataaattaaaatttctgggcatggcaacgagaactggctttgcacacacaatacccttggctccaaggaggtcatagatttggatcatctcccagattatacatctgcccctctagcttgcctttcagagcatatggctgtggcagagggggcagattacaaatcacctctgtgttgtttcaaaagtataagaaaggggaagcaccttttcctatgaccataaagttgttacttgagtgttaaaagacaacgattttcttgtgaattgtcttcagtgagttaagatgcattcagtgcattgcagtcatagaagtcacactaaacactatgtaggggaatacatgacatgaaaagtcctgacctctgtttttgggaacttacatgtcagctgaaatggctacagcaacacctgcaaagagggacaactcagagggtccatttattgctttacattttattctcaggtgctgacaaataatttttcttaaaaattatatttctggatatgaatacatattggagcaatcaattcatttcagagtatatcagccgtcagggcttcttttgaaattgcaggcattgaaaattctggatctaggcatagaatcctaccaaaagacaatacagagctagattgaaagcccaaggtactgccatgggggtaatttatgaatctggagaaataacagagtaagaagagatgaaggaaaagaggtggatattagagaagatatgttattcccttttctaagctcatctgtgttctgaatctgtacccaactatttatttcagagccttgttctattagttaatggttctttctcttctgtcttcagattttccctcttgattggctccttcctttaatccaaggagaattaatcaaggtgacaaaggtggtggggcaaaaacagtgggaatatatggaagcagcaaggaacataagaggaggtccaagcaaaagcagtggataacagtgcaaacaggaactatttactgaaagtccttactaaggagtttccctttatcatttaaatagcaaacagaatgaacattttaaagtaaaattctgtcatttcacttcttataaaccttcaatatggaacaattatatgaccacatgcaaaaagaaaagaaaaaataacctccgtctataccttacaccatataagaagctaatctgacatggttcacagatcttaaatgtgagcactaaaactataaaacttctagaaaacaaatgggagaaattttagttacagtgggttaagcagaactttttagagcactaaaaccaggaagtacaaaaaaatcaacaaattagatcttctgaaaattaaaaatgtttactcttcaaaagatactcttgagaaaatgaaaagacaagtcacagactaaaaatatttgaaaaacacatatccaacaaaggatctgtatacagaatatataaaagttccgaacccaaggaattgccaaaatttaaggataagcaaaggcacaagtagactatttactaggttattttagacaaagagtaatgagaagtggaagaagattgtcagagagaataggacacaaatgataaatgtattataaaatgtggcagagacaggtggataggacttgacacttttttatatttgtaaacaagagacaggaaggacccaaagctgacctgagactttgaggctagaagatcagaagaaaggtagtgcctttaatagaaagaatcatgaagaagggtcaagttatgagaatgaaagtatgagtctggagctccagagagatcaatcaaggttagcgatacagatttagaagtcatctgcattagaggtggtagttgaatattgaatttgtccacaagattgcacagattaaattaagtaataattctttgatgggggtaacagccattagttttttggttaactaaaagcctaagatgaaggcaaaggcagttactagagttaatgatcagtctcatttttgctattatcatgttcagtggtttgaaacaactagaatttttctctgaaaattagcagctgcatggaaatgcaaagtttctagcagttacaaattggatactaagttaaattgacttatatatttatatttacagaggatcttaaacagaaaaatgagatctttgttcaagtttttaaatattagtgagacatgagaacatagaagtcatacaatgaaatttgcactgattttgtgaacataatcttatgatttcttttaaaatgcaattatatgctttctttaaatcatattagttgtctgttttgatcaactgacaaaagtcagcttatccacatttttccatttagtaaaaataaattttgaataaatgatgatatggtcttcctaaagtgattagtaatacaaatatagggttttctctttttgttgttttcatcttcagagattagtagaaaatttttcttgttatttgaaaatacttttttttacacacatacatataaattacaggtttgcaaaaagtgacttcattttatctattgtaaactggtgattcctgtttatgtgatcataaatcttagtttgcctacttcttgcttgtgtttgttggcattaatgctgaagttttgacaaaaattactttaacttttgcttccctcggaacaaccagggaaaaatatcaacagcgaaaccggatagatgtggcaccaatagcttacttcaaataaattaatacttcattttttaggcaagaatggtaatcggttctgttctattagcctcagtggtgtgaacatagagtttcatcacattattgtgtgtaagatatatttacaagagacttagacaaagcaaggtcttccaagaataagcacaaaatgtctatacacacgagccttcagggaagattggggtgatacatggaatcgatgcactttcaagttggcggatctgatcatcagtctctaaatgttagtaatcatttggtttatttacttttgaaattaatgtgaagggctctgtagcttctttttcttccttgggttttgatgtgctgatgtaatttggacattgcttttctgcctacaaatgggacgattcctgatatgtgtagattagggtgaaatctcaggtgctttttgattttctactttcagagaaaaagtagaaattgctgctgatataccgagacttcaccgaagagatgttcagtgtaatataattattttgatgtcacttttcattgttttattcacaaaaaggaaaaacaatattttataggaaaacattagtaacaagagagatatcttaatttttaaattaatattcagtgctctttttaacacgatatttattaggtgcaagttacatgctattgtagtaaagttaaaagattattcaaatctttggaattttcagagatgaattttatcaaatacatatttttaaattaaatgggctatcaagtagagtttagaaatcttctgttcatacagatttttatcattttagtacttcatctgtgatataaaacataaatcttgagagaagggcttttgatttttgttaaaagcagcatgcacatcctataaggcatcagtcagaagactcattagaaacatcatactaaaaagttaaaatgtttcttacgctaagattatatcaccaaatccttgaaaagacatagcttcttatcagattgttctttgccttttagacttccgtttcaagggagaaaaagtaatttttgactaaatgtctattgatttaatgtctcccagacccaccaaatagagtttattcaacactaaaatgcagttacctctagaataaattttgaaagctgaaatggaatttggcaactgtttaactcgacacagaaaattcactgaatttagaacaagaagtaaagtgaacattattttatttaattcaagatgcagttgtattttaagaagacataataatgagatggcaaaccaaaataaataaatgaaaatgaattctgttttctaagctcctaactccatgcaaacattataggtcaaaaatacaattattgtagtcttaattggagtcatagcaacttgttgcttaatttataatttctctgtagtcacatatacagatatatagttttgagagagttaatacatggaaaatacttagcttagtgcctagaacactgaaagtactcagtcagtggttgcaattactgtggtgtttgttgctattttctgttgcattcttgtgtctcttttgacctttctcccttgcttcactctgaataatttcaagaaacatgattttggcttaactgcttaactagatttgaactactgattctattcttttagcaattaaaggattcttttcaatatttggtctctgattcaaccaggaaagaagagatgagaaatggtggtgttctttttgttgatttatctagaacctgtggttttcagactcaggttgagggaatataagtgattttcaataagatatgccagttttagggcttgttattgacttgcccctatagtcagggctgttaaaaggattttcaacaaaaacgatctcatcctcaatcttaatgtgctaaagaagaagacaataaaagaaaaaaaggcattcctctcaaacaatttgaaatatctgcagttattttttcagagtttttactaaaactcaagctagtctagctcattgtgaaattttacaaatgcatacttcggatttattttcaaaggggagaaatcattctaaacttccctgtttcttatttttcttttacagtccccatgctatttctccatttcagccaacactgttaacagactcttttaacatttatatgctcttgcaaattatggcataaaaaactatttcttgacttcttgctatgtactgatattgtataaggtactgtgaggatccacaaaattaaaaggcatagatttcagagagggtaaaacttacacatgggaaacaattaagatcaagtgatttataaacagtaacctctgaaatagaaggtgccaaattgtgtgacacagacaatagggcaacagggctcagagatgggcaagatcagcggggctgtattcatcaaggaaggatttggcttgagcttcagaaggatcggttggatttgtatcactgtagaagagaggggaaggcattccaggcagcagggagagcaaaagcaagctcagaagcagaaatgtcatgcaaatgtcatggtatgccctaattttaatgattccgcagtcctatgaggtgactttgatctcattgtaatttatatcagcagcaaaggatttgagtttacaagctggcttcatttaaagaaaaggcagatagaggggtgaagatagaataaatacattcaacaaatagtaatagtcaataaaaatatgaaattttaaggttctagctattctaagcatgtccttcagtctgatgtttggttttaagaaggtaaaattcttagggcatcataaagaacctcaaacatttaagataactaatctaatctctaaaccagaggaaggatgtttttcttaatactgtaataaaagaggctgccaccatattttatatggcaccaactctattggttattaatcaagttcttaggctaaacttcaggccttctctcatcccaggacctttagctagtgagccctagtgaacatagccatcattcaactccttgccttctccaatgagaaagaatgctgacacagaaatgttttagagtcaactgcaagaactcattaataccaagcccaagaaggaactgctgatcatcagggatctgatcacaaaataaattagcagttttgcatcacgatgtcttgtgacatacatgcattagtgaaagtaaataagcatgaagacagactgattaagctcactcatataattggtttttgagaacggttccaatatattgggagaaaaataagcatcaacttggaaatcaaattgacttttttcttaacactgaacaaaagaattgttagaggtttgaggtaaaagatcgtggcagaagccagtattgattcacattactggtcagccctcttaagattctatgcttctctgggtgttaaaagtccactggaaaataagagaaagaaaattgagtttcaaggacgtagaaaaatctgatttgaaatcaggtggaaagtgctctaatgccactagtattaggaggcggtaatttgcagataaaaagtaaaaatacaggtctggaagtggtatatttaaaattttacttctgagatatatgatgagtccaaaataagttttaaaataaaatgaagaataattttgaggaatatagtgccaatttgacagaagagacttctcagctctttggggaaaatattgaaatgcatggttttaagtgatgctggctagaataaaggtggaaggaggaaaataaattacctcattttaacaacctcattaataaggtaataagagactgtcttaccagtgatgttatttgcggactaaagtttctcaaaaggaagaaaagagtatagtcttgaataaaaggtgtacccaagtatgaataaaataagtataaatcattcatttttcaaaaacctgtgaagctcaaagaataggtattattccattttgtagatgagaaaattgaggttttgaggcaaatagtagggaacagagtctagatttgaacctaggtcactttagacttgtttaaatatgtaaatcactcaaaactcagaatttttgcatttgacttcagataaacagactggataaattcctacctaaacagaaactaactttattgtaattttctaattcctcaatgttaagttctcaatgattaaaggtgccttgagtattttattcaaaactttttggtacttaatcctataaaaataatgacatactcttataattaaatagacttatttcaaactgtttcccaatttcaatttattcatcctttttactagtgacatcattcattcatgataaaggaaacaaggaggctttttcaggtaatgtcttaggagtaaggagagagaaagcaaagttagtaccttgttaagatttccaagaacttttatattcaggaatttatattcaggaatttcactgatttttttttaaagttccttcaggggcaattgggctgctgggctgctgattctcaataaccacacttacacctgacaaacaaaaatgcattactctgtgacaaggcataattagtaatttcccactgaactggaatagtcattttagctgtcagaaatatttcttttcctagtaagaaaattcacttgcaaaaacaaaaattaagatctgaagagtacttaccaagttgagcaagcaaggggaaatggataagctaaaaggcagctatgtgcttctctcctactggcatgtatcatagactcagtattttctagagaattatctggatactctcatcaatatatcctaattcaccaatatcagtataacatgtaattttttccctagaatacagcaaataataactgaagattttaagggacaacttcagacaataatacctaaatacattaaaatgactaaaggagtgtaattggcttgtttgtaacacaaaggataaattcttcaggggatggagacccccattcgccatcatgtgattatttcacattgcatgcatgtatgaaaacatctcatgtaccccacaaatatgtatacctactatgtactcaaagttaaaaattttaaaaaaattttaaaagtaaagaatatcctgtcagtaataataatatctaaatacaggactaaattaattcataatacaatttgtgttggttaggaatgctctaggctgcagataacagaaagccctactattggtggctgggcatggtggctcacacctgtaatcccagcactttgggaggccgaggcaggcggatcacaaggtcaggagatagagaccaacctgaccaacatggtgaaaccctgtctctactaaaaatacaaaaattagccaagtatcatgtcacgtgtctgtaatcccagctactcaggaggctgaggcaggaatatcgcttgaacccgggaggcggaggttgcagtgagccaagatcatgccaccacactccagcctgtgtgacagagtgagactccatctcaaaaaaaaaacaaaaagaaagaaagaaagaaagaacaccctactattggtgacataaagaagtaaagttcctgtttctcacctagtaagtagtatagaaatgggcggctgctagcagggaagaggagggagatttcagtggatatcagattggttgtatctctgattctctgggattcttccacttgaccatcttgcagtagatctaggcaaaacaggaagggataaagggagggaaaagagcgtgccagccttatttatcttaccagtaaaagctaaggtcttcccccagacggctttaacacatttccacacatagctcattgtccagaattggctcattgccaatcctggcctcaaaggctaggaagtaagaacataccggattttctcgcctctcctccagaggcaaaaaaggaaaaaggtgtctggaaatgggggtgggatgaccaaccaacagagactgccatgccacaaaaaataatacattctgccactaaaaggaactttaccatttattacattactctgttaccatgagcttacctgaagtgtaccttaaataatcacttgaggagaatttctatatatccaaaaacaagcagagaagaaaaaaatcatactcttaaggatttcagaagctaggctttgttccaggtgtgctttctgcaaagtgttttaaattcaagccttagcaaaatatcagattgctaccaggcaaggaccttcagagtcacttgataatataggaaaccacagtgtcatgcatttgctacagtggatgatggtgggacacccccataatccccttatttgaaggattttattcactgataaaagtcactgctatgtgatcatgattgattgctcaacttttaattattgacatatattacaagtaaatatgccatacatatacacacacacagacaaatatacacaaacacactagaatttctgatctacatgagataactattactctaaattgacataatttcagcccaaagcagaaatatttgctcttttggaaagtatgtgagcttagtaagatgtagttgtgaatcttcattttgatacttagcaataacttttcagatcttcattattattgcctagtatttccttcaggggcccccaaatgtggattgggaatccaggttggaaaccactatcctcaactttccactgatgctcccatattgcttttaaaagaaaacatatcagacttaaaagttatttaaatcttaaattagctacatcttaacagcataattagccttttataccaagattagtgaaagatgctcggctgggtgcggtggctcctgcctataatcccggtactttgggaggccgaggcgggtggatcacttgaggtcaggaatttgagaccagcctggccaacatggggaaaccccgtctctactaaaaatacaaaaattagccaggcatggtagtgcacacctgtagtcccagcaactcaggaggctgaggcaggagaatcgtttgaacccgggaggcagagtttccagtgagctgagatcacaccactgcactccagcctgggcaacagagtgagactctgtctcaaaaaaaaaaaaaaagaagatgctttatttttgtcttgttttctgaatgggtgataacaagattgataccaataaaattttgcttaatttgatttttcaaggtaaatatggcaatatatattttaccactttgttatttattttcttagttctatttcagatcacctgtcccctcgtttctataattattttccccacaattatatttgtatctgatagaccgtatttgccataaataagaagcactaatagctggtgttaaaataggtaaactttagtatattttatataaggaccattgaatacttatgattacttgttttaacaattaggatgtgtttgactgcaaataacagataattgataacagtggcttaactaaaaaaagggtttcttcttgtctggcatcaaggacagaggaggcaggcaggctagggttggtacagttgttcaaataagtcatcaaataccagacttctggcctcctgcgtctccatccataccgtgtagcttccaacctcatgtttgtgggatggctgctgcccctccatgtgccaggcaggaagaaggaggacaggtgaaggacaaaagacataattctgtcccttttatttggaaaataatagctgtccaaaaacttaacctcagatgcttcatccgtgtcttattattcaaaaccattacatgaaaacaaaaaaccgcatgaatatctggagagatgaatatttttaactagtcaggttgctactccaaagtcaggattttgttaaaaagaagctgaaaaactatttggcataaacaataagtagttatacatgagacagataagttagccaaatcaaaatcatcctctttatatcagtttttcccctaaatttaacttaaaatacctgaagtaattggaaataaagtagttttccaatgtagacattgaaaattatctgtaaactagttcagtgttctctgaacagcaactaacacatacattgcagaaatttcatgaatattagattgtgttgattgcttcaatgtttgttcttaatctaaattttcactttaacagttgcagctaactattcatatatacaatcaactctcagttaccaaagggtgaatgccctgaattcccactattgttggaaaacctggctatccatttcttctttgcattgtcacccagtggaaagagttcgctcctttgttatacttactgtgaattccactccttcacctaacaaaacaatgccagagcagaagcacgtgtgagttttttctttatagtcagatcagctgctgtggagggcctttccctctaatgaccagctcttccttcagcaaaagtataaagcatgcaggcagctatctaaaggagcaactactttggagccagacttctcaatcttgaccatgaatccaggtgagaaatactgagtaaaaatataaaatggatttgcgtaagagttcactaactcctcctagatcaggtcttcactttcttctttgagatgtcatgagtttacagtatggaagacactctatttgtttatttcatcagtcatgtgttcacttggccaacacctgttaaatgcctaccttgtgctgtgtatcatgctgactcacaatgtatacagtcgcaccgtattctgcggccaaatggattaatatttgtaaacatagttagaagttttacttttgtaagttatctatgatcttgaacttttgttacaagtccaccaggttgtacagctctgtggtgggggtgagggtcatttataaaggctgcatgtgaatcatatcagcagtcccccaggggttgcagagcacacaccaccatgagtgtgtgtaattactctggttacttcattgcacatttgaggattggctcctgttttgtgttatccatattattagctcagctcatctagatctggacaaatatagtttttttaaaaaaagtctattttattttccctcatatgtatatatatctttatcttagataaattactattgcctataattttcatatatattataacctctgaagagaatttagtacctatattctttctactctttatttctttgtgtgaataggcaacatgtttacctcccttcactatagcatattggtattaggatatactatatacttgaaacttagaaaatttgcaagaataatcagctgatttcattcctgatgtataaaggaaaatattccattccttaagtgcttttagtaacttatattgcagtgactttaatattactgaggaagaaacctgtagtaatcttattcacctcattggtaagttcttgcaatatttattattaaacattaattattaaatatgaatagtattaaatgtgtggtacattgctttttttaattaataacccctttcctgatatcccttaatttacatggtatacttttacattgatttttttataaatcatttctacttactttctatctgaatattatctatctgaatattaatatcaattatctacctgaatatttctatctgaatattaattcttcagttagcaccaaatgcagaatttattatgcaacttttaagccctctacagaaatcattatattattttataaagaatccataacattttctcttcttggcttttcagcaagttgtctatagtatgtatatcataatattaccttgtgttttaaaccactcagaaaactggtaaaaagcagaattgtcattttactaaatattctttcttcagccaattcccatgtttatcatttccttaatttttattgtcctgtgttgtaaagtggtctgtggcttcaaagggcttttatttgctttacttgcttctaggtttctaactgcttgtgtgccttttgaatacatgtttaaacataagagaaaaaatgtgagtaaggctcgcttctgatttcagactgcttgagagggaagtgactgaaggggtaatatataatcacaaatcaaacccaaggccactgttaggcttctttcggtgccctgttgaacgggaaaaattaaaaaaaaaaaaagtctctcgagtttcacagattagcaaaaacttccttgtatttaccatgcactgaaaatacaattaacagtttgtatgagaagacgaaagataatgaaaagagaaattagtctctgaaaagcacattcttatgaggtcatgaattacaagttcatgtgtcttatggcaaaatatttatctaagagattcggctataaaaatcaggagtcaccaccctctttagattacccaaaagagttgataatgacttcataatagcataaaaaatctggggtctttattgtttttaattctgatttctatattttatctattgaaaatcaagagctgtggataaaaagttcatttagggcagggtgtggtggctcacacctgtaatcccatttgagagatcaaggcaggtggatcagctgacgtcagaagttcgagaccagccttaccaacatggtgaaaccctgtctctactaacaatacaaaaaattagccgggcatggtggcaggcacctgtaatcccagctactcgggaggctgaggcaagagaatcgcttgaacctgggaggcggaggttgcagtgagccgagattgcaccattgcaccccagcctgagtaacaagagtgaaactttgtctcaaaaaaaaaaaaaaaaaaaaaaaaaggttcaattagatgtcctaatgagagaaaagaaatttagcagggatcttttcatatcaatatcaacagttgttcaaatgctaatacaggtttctcttaatggttatgagaatggtgtttgcattaatggaaagcagacacagtaatctcaggtgtgttcatattatcattatttagtctgagaaatctattaagagttagtcttaatacaagtaactgaagttgttgccttcattaaggatttctgttcctgaaatttgtaatgtacacagtgaattaaatatggcatacattagccgctgatacaggaagacatatttgaaagaaacaggggaagtagaaatgtggatgggaagagcatttagcagtctcatccctctgccattccttccttttgtagtgagccagcagggcgcctggtgctgacagccttggcaaacaacctagagagaaaatatgtcttctgaaaagatcacgaaatctcaaagacctccagttccttggtatttatacagcatttgtggtattttcctcctttcttttcttatttatccttaacagaagaaacaacaagtaaatctggtgaaaagcttcaccaagaaaatgctttctgaaagaatttaaaagaagacaaaggagttgcagggagaagcaggttggcaatgaggagctaggcggggccttcgggagcgggagcagcacccaccatctcacaaatggcccttctcggcaacgttgggggatatttattccggggaagtcagagaagctccaaagtggcttgcagcgctttatcagccgacatttacacagaaactcctgcctctgagcttcctgtgaaatctataggaggagaagcccaagggactctggctgttagaaaatttgtcatcctgctagagagacctatagattggtggttaaccacatggatattgctgtcagacctgggtttgagtcctggccccatagctggctctctgtgtgacccttagtcatgctgagcctcagcttatttagctttaaatgatgggtaataataatatccacctcacaggtggaagtggggtgagagaatttgtgtggaacacctagctccatttctggcacctaggacaacctccatacctgctagttgttatgtttgagtgatctgcatatttgtaacaacagggatacaattaaacaagagtccatgctcttcaggaattaaggagaggcaaccttctaggttacagtcaggaaggtttcatttgccagacaacgaataatccttgagtattcactctgctggccgttgatacaaaagtgaccgtgacttcatcactgccttcaaaaagcttagcaaggaagacaggtatatacacaaacaatgtacagaatggggagtgtgcttgggttcaaatcccagttttgttgttcattagctgtgtgaccttgaacaagatatttaacctctctgttcccaggttttcctctatataaatgacagtaataatagcactcacatccaagagttgtggtgaggattaaacttgtgaatactgtacagtatagcacttagaataatgcttggtactcaataaatatatattagtcattattataatacattgtggtaatagaaatgagagatctggcagattttctctcctaatttcttttttgacatagaagtggttaggaaaggcttcctggtagaagtgatgtctaaaaaatggccagtaaggagaggagagaacagaatcttagaaagagagacggcagatgcagagacccaatggaggagggagggaactgatgtctttgaagtatggcaatttgttcaaaatggctggagtttggactgtggggggaagaacaaaggaaggagaagagaggtgaagtaagatgagtgagagaggccaggtcaagaaggcctttgtaaatcatcccgaggagtttggaccttctgaaagccaaagggagccctacaggagtaatttgaccagacaatcaaaaatcctggaaacagatgcccagagggagaaagtgtataaataaagacagtattgagctgagagttaagccttggagaaagcccacatttgggggaaggagaaagaaagggcactggtaccagagaccaagaaggaataaatatattgtgagaagaaccaggtagcaccatgcttggacgcggagggaggataggatttcaagtaggaagggttaagcaaaggtagcgagtgctgagaagagatcaaacaaaataaggactgaaagaagtttattggttctggcaattaggaggcaattggtgaccttggagctttagggaagccttggagctagaaaccatatggcagggggtacagagagcaaggagaaagtcgacttcctggatgacacctctgggttctccaacttggcaataaaagaaagaaaaggatagaagtgagagtacttgcagggtttttaggagagactcaagggatgatttcagtgaatagattttcaagatttcggggactagagagaactggacgactgataggcttgggggggagaggggtccctcatacataaggctaagaagacaggttagatgcagagaccattttgaggctgaggaaggagaaaattagggaatttttttcaaaggtctgataaagagaaatacagaaatgggaggcttctgttttggaaggttttgagttagctgatgtgggagaagctttagggacttagaaataaataaaacaattgctgagcactcgagagacttgtgtgcctcttccacgacaaattaatgaatttaatttttctacaagtcttccataatagaatgaaaaattgtgcctacttaactccttatgaaacttcaatttaattctaattcagaactttaagaagccactaaactttataataactgttgttcataggctgagcgctgtggctcacacgtgtaatcccagcactttgggaggccaaggcagctggatcacttgagatcaggagttcgagaccaggttgaccaacatggctaaaccctgtctctacaaaaaaatataaaaattagctgagtgtgatggcgggcgtctgtaatcccagctactcgggaggctgaggcgaaagaattgcttgaacccaggaggcggagcttgcagtgagccaagatcgtaccacttcaccccagcctggatgacagagcaagaatctgtctcaaaaaaaaaaaaaaaaaaaaaaaaaaaacagttgttcattgcccaatctctttaattattatactaaattttccccccaaatttaaccttaccttttaaaagaattgccgaaataagtggtcatgttgccaacacatcctctccttctacttccaatattagtagcatttcagaattctttacttcttgaaatgtttcctctggatttcccaaaacattgggacactatagcctctatcacctacacatgctggaactatacctcacacgtgtttgtgctgttctcactgcctctgaggctaactaacgccattggaggactcgtcctattcatggatttcatccatgattcattttcctcattatatttttacctattttcagctttttgccttgttaattatgtacatttgccataatttcacaatggcattattaaaacatcagattgtccaaaggggaagctaaatggatgtcataccatttagaacagagtttctccttcaatcactgcttttatttatgaagtttagaccttagaatcgcctctgtgcaatgtgagagtcctcccctaaaactctgcaaagcttcttctgagtcacgtcatggcatgcaggagtctccaagcgggaaaggttgcttttgatggttcagccagttccatttcagtgaagggacatcacttccctaaaatgaaccccctcttggtaaacgttctccattttctagcagagtcaaaccaaaccagagagaggcacgttctgggaagtaagttctccagtgtttctaaccataaagctgggtttctgaaatccaagattactcccagcagggagcctaaatacagcctgaagctacaaaaaataagtatccctattttacctgtgatgtctataaattgtgaccacttattttcattccagagtcatactttgtgctgaaccatgaaaagcaaagctacatttaaaattttaaaccataagctattagagaagggtaaaagagtctctttgtgttaggatttcttctgtctaaaggtaagaatagcagttgccattctctgacataaatagctctcatataatacctttcagggaaaaaaattgctttaggacaaaataacagtcactactcctttttcccgtgcatgaactttggaacagaaaaataacattaacaggttattaaactgtttgtcaccaaagaaaagtagatggtatttttgtgccttggataatgttaagtgaagaaaaaaatcatcaaagggatcatctgtacttgccctgctttcaaaattactttttctcttttcaatggaattcacgactgttcttggttttcagacttgtgactttgttcattagagcaaatggtttaatttttattccaaactctagattaagtttcagagttcagcctgggagaaaggaactattgaaaaccttttctgtttccttctcttttttcttaagggagggctttggttctcagagaatatcaaattccgatgtcagttttgtaaataagtatctgttgtctccccagatcaagctgtgtttgtcttatttgtacatttatagtaaagtaatctacaagtggttccttgataaagttaacacttagttaattacccagagccttgacatgtcctataattgccacttggctaacaaacatttgatacttgtcttgggtagaatttgttgaggcctaaagaagtaagctcttgatggatggggaacaaaccaaataaatacagtattttatgttcttttaattcagggccaagtggatttggatgaagtgtttatttagtttgctggctgtttcaagatgctgtggcgtattgattccttttattactagcagccgtttaacctgacctcttccagatccagtattttaaaagccataaattttaactttacttatgagcaaaggctgaaacactgtgaaagcctttttattagtcgagctctgccattttcgatgctctggtgtcacccatggcaacaatatttagggcttcttacattagagtggctgctgggctgctggggaggggcataggcagccataaaatgaagccgtaaacatttcaagggtataagattccatgactgtgatagcagacaggtgcaagaaagaaggggcaggtctaaagacaaaagggttggggatgatcatgttaaataaacatctactttagcatctcaggtactgaaaagaatttgaaaattagaaacagaataccaggtaatcatagagcaaggtggagccagggaccaactcgagtgacccatcttgtaggtcccacactgcctaagtcattttctggtcttcatattgcacacaaaagttctctgaaaacgaagttgaaagaaagagaccttgttccagtgaacagttagcaaactagggagatgcagtatttctgtcccaaagtcccaggcacacccttaatctctgcaattgtaacaaaccaggaaatccactttttttcctaagctgggaaaatacatgcctcacatcatagactgatttgtacaaaatatagtaaaaactttccagaatgtcagtactttacttttctaagacactatataacctgcactcggaaggcaggcaactgttttgtatcaatcagcaaatcaaagccatttcatcttcaaatagcccagtgatgaaactcctgggcaggttgtctacattaaaagtacctgtttttccataaaaaagaggaagaaaaagaaattttatacatgagtttacccctgaaatggatgagtagatgagaatgccttgtagttgaagaggaagacaaaaagaaactaattctacttgtgtgtcttcctggttttaacttacacacatcagtagcttttgttcactttgttgaaaatttcccattcgttttctaattatcaaaaatgtttttttaaacaaataatttttttcaacactagccctctttttatttgatcatgtggaaaaactcttaatacagcattagggaggttatataagcaaagaatgatcatttcaccataggagaaaaatccaagatataaaaggatattgaaagaatttaaacaaaaacatcaacagaagagagatactgaatgaagagatgttcccccctttcttcactttatatttctttgcaaagaaatttaatccaaaataatatgtgattggacttggattattatttcatcttcctggtctctttcttttcattcttgataacagtgtacttgagcatccttatactacctattgccagaaactgccctagccttttaagaagccaggtactcattaattcaagtgatgtttacaagttggctcttaatatttgtctcctcttcaggtattccagtggcttaaattaatatatatatatatatttgtatgtgtgtatatatatatttatgtgtatatatatatatatgtacacacacacatatatatttaaatttcttgctgttaaattgtttccccaatcatgtttcttagattgctgaaatagaagaaactttcttaagaatttgagaaagtataaatcagggctgtaacatcaggattttatcttctttcagttttataaaaatggcccaatctcaattagatataggtcccacactgcctaagtcattgtctggtcttcatattgcacagaaaagttctctgaaaaggaagttggaggaaagagaccttgttccagtgaaaaattagcaaactggggagatgcagtattccagagaacaaaaagaaggtttgggtgttatagtaaaagttcccacccaggttcccgatcaggtctgtttatgcaaatgagagattcaaacttgcttagttctgactgatcaatacagctgagccctggttggttgatacagcaaaatcctgattggctgaggcaggtgagctatgattgattagttcaggcaaattctgaaagttccagagttaaaaaggtgtggggttttggggaacccagagtaagaaagtgtataaactctattcagcaaatggctgctccgctctatcttaaatataggcccaattagccactcagaattcatcttgaaggattggttctttcagattcacatttgttcacaatataaaaactaaacccttcagagtgtgagaatccttacactattcctatggctagagacttctgtcctagcaattcaagaagccaaactttttttgtttgtttgtttttgagacagtctcactgtgtctcccaggctggagtgcagtggtgcaaacatggctcaactgcagcctcaatctcctgggctcaagggttcctcctgcctcagcctcctgagtagctgggaccacaggcgtgcataaccatgcctggctaatttgtttttattattttgtatagacagagtctcactttattgcccaggctcaaacattcttatgaattcaagtccctaaatgcaattcaattcactaaacagcagcataatgtttagtcttttctttttctgtgaccttatttgaatcaaaatggacctgaacactttcattacccaaactatggtctgatcagtattctatatcacactcctcctattgaataacagtatgtagaatttgaaaattgttaaaaatacttatagcaaaatatacaaaaacaaaatttaacctcttaatcatttttaagtgtacagttcagtagtgttgaatacattcacattgttgtgcagccagcttttactgtaccagacatgctaataaactcccctcttccctgaagtaagccagcggcctttccacccagagcagctggtgaatttgatgatcttgggcagaatgctcccctctacccccacaggagggaaagcagctcttaccttggggaagttactcagatttctagaaaaactttctgtaaggttggctgtcatggtgtgaattaaaaggttatgtcagaggttaaactatgcaattaaatcaagaaagcagattattctagtagctgacattaacgtttgaaaagagacaggattagctgtacttagtcacatataaactgcacaaagcgaacaaaggggaaaaaaattatttcaccaagcttcccttgaaagaaaatcgttccatcttgcacctctaatttttcagcttaattctgttacttcatgaggttcattatccttttccagatttgcacacggtgactgatgctctgtgacgggttgtttttgtttttctgctttaaaaaatattccctccctccctaaataattatctgcaaattaaccttttctcttactggaatatttgttagaatagaatatagaaaatagaaatgtgtaagcaagactgtttagacaggagataaattctttgaggccacaagggtatcatttattaaatgactgctgcagtcctctaaatgggccccttttgacctgaaagagttaatgctctattgaaagtggctgggttgtccccagccttactcccttggaaggctctgacccattaatggcggtaataataataatagaaaacaatcctgctttgcttccattactctgaaactgttaatggtatcctaatgttttttattcttttagtgtaactgaaaactgacattctgctcagctaaaatttcaaatgtagtatttttttttcattaccatttttacatgccatgcaggatgctgagtgaggaataaggcagaggcttgtaattggtcttttaaatcatcataaacatttatttttccccccatggctatatctagtgccaataactcagtcatcaaatgatgggaaaaactgtttaatgatgcatcacaagctccttcctaaatttttacccagaacaaggcagggaatataaaaataagtcacattgctcaaaagttgattttaaaataagcacaaaacagttttttttttttttttgtgggagtattagcagtgaaccaagtgttcctttctttttttgatataaaccctttttagaaaagccttgtgtttttatatttttattgtaagtaataatgaaaagtaaaataggactctgcaatgtgtggggcagaactgtggcttctgttttgggaggctgacgtttgtaaaaggcaggtaatgatattacccctctgtgggactgtcaagacaaggcaaagcatttggcacagagactgtaccatgggaagttctaaataaagattagctatcattattattattattgttgttgttgttgttctgccagagcaaaacatccatcccagtttagggtactgaggcaatacccactcagagcaattgaatcctagctagggcatggtatagatataagtccctgccttgcctattgtccatgtgcattagagtgactatgtttggatccagggtcactgacttcagaggccccttattgccagtgggtgtcataaacctgtttatctggccactaaggtccttgttggtcttttcccattctctctgttcaacctcattcctatactcccaggccccatgagcactctgcagtggacacatggctgggcttgctgccccttggcaggccgatgttctccgctgtcgcccactctgtctccaggaccatctctgtttggtgctgctcatattccaaggatctatttcagcctagagtcatcattttctcctctgacttctgccactccctctgtatcttgccacatcccaccttgtttgggatgcttttgagttttgcattttgaccttcatgtagattgcttgttccttgagagcaggtgttcacaaagagatacccatgttgtcttttgatgagctgagtccacatcctgcagatgtggaggaaaagatcctcctttttaattagtagcaacatattacatgtatatagagtacactgcagctttgtgaattttttgtacatacataatttcatcttataataacaaatgatgggaaaaactatttaatgatgcatcacaagctccttcctaaatttttacccagaacaaggcagggaatataaaaatatatcacattgctcaaaagttgattttaaaataagaacaaaacagtttttttttcttttttgggggagtattagcagtgaaccaagtgaaacttatgagactggcatccctgttaacttagacaagttactttatctttgcctcaattttctcaactataaaatgaggataatattagtgtatacctcatataattacatgagttaatagatatatataagaatgtgcctggtacagagatagctgctgctatttttatcatcatcattatcatcatcaatatgatttttccattatcccacttttactgatgtagaaactgaagcccagatgagattaaataacttccttagattctaaacctttcaattccaagtccccactgaacatgcctcctatatcaaatcttgttgttaagcaccctagactgcttttagtccatcatttccttagagtcaatttacagaaaagtttctaattcacagtttgtctggaaatttctgtgaaagggaaacttaaaacaaacacagtgataaaacacaaacccttctccagaaatagataccctcttcctgggagacaggtctctctcctcctaaatgagaggcctctgttgagtagtcatgagaatacctatgggaatacctagctcttaaaagtgatatcagatttcctccaatctctctaaaatccagacaacatatttaattaatgtcattgtagataggttgtttgaacccctggtcaaccatagcaagaattgattttacctctcttttgaaagccattctatttttctaaattgtctaaccattggtagtatgtttctacttattactaatgatctgaagaatggtcctctcttcacaaaggagtcaggggtcaaggtgagcaaaccaatgtaataaaactcttcttgatgtagaagatttgtcacttgtaaaatccatgcagcaacagactggaacatgcctgtctataagctggtgtcagacacacttctcactggtgtggttagctctgtactcaccattccttcaccagcagtctgccctgttactcaagtgtccgacctgagcagaaacaactggtggtaacatggattgttatgtggatgagagattggagaatagaatatgaagtcaagactgtgagttacaatggaaagaaaacaatttcaaactagttttgcaaagataatttcttgactcctggcaactaaaatgttcagaggaacatccacaaagaaatgtagctgcacccagggtctccatgtcagcagcactctctcgtgcagttctggttcctctcttcagacttgattcttacagaaaagcaagatggctgccagaagctccaggcttagattctcccagtaaccccagtaacaaagactgctcactctaccaggcttagttctagttagccctgtgtgtgtcagtagctgtcccagagctcaccagggggaagaaatgcactgattagtcatgtctgggtcgtaggcacactgaatgagagttgaggaggcatagtacaccaaggaaagccaggatgctcattttagatagaataatgggtgccggctaggaaaaagaatggatgtcagcactcgggggagaaaagagagacagtttaggataagtggagagttgtgacactcttgctgtttctctgtgcgcttctctgaggtagagtaaagcaagtgtttccatgtaccctgacatctcagtacaacccagcaagaatttcagtacaagaaagactgatcatagagttccctgagggaaggttattaatggaagtatcaccttcttgtaaccttgtttcccgctggcaaagattcctcaggctgagttactgggaaactccagtatgctgtcagatttcacaacaacattaagtggtacttcctttccatatttgccacctcatttattttgtgtgtccccatgttattagttttactgcccattaatcattatatattaccaaatatagtaaagcatgcttacgaggagatagcaaagggtccggccatgacagtcacaatgaagccatgccaggaggaagcctaggggtagcaggcagtgccccctgtcccgtccacccagacacataaccctgagcacctcctggctcccaagtgcattaagatatgttcctgcaccctatccctcctcgtcagagaaaaacctggggaaaatagttctgttcattttgaggacagatgactaaccatgctaaaaatgtatatgaagaaattagaagaaatttgaaattgtaaaaagaaaggaagagcaagagattttattagcaatgagttccattgctgcaaaatataccactctctttccctttaatttattctatgtgtgtcttccatattattttttctctgaataccaatatcatcaagcgtttactctggtaaaaaaacttcatggctttctattgtcccctaatttgggccttgccttcttagccagatttcaaagcccttcatgcctttactttatcctttctactcatgtttatttcccaccaatctctaccacattgttttttgttactagtcactccatcctcccggtgtccccaccccccaggagacgtgtttggacttttcctcatgccttttcctctaagtggtgtgcctgtccacctcctacttctcttacctatatatcatccatcttcaaggatatgacccacatcatgcataaagtcttactcagtgacttaaagtcacactgtgctttcttttctctgacttctgcaagcctaaaatactccagcccttaactgtgctctatgtcagcattcttggtacgtggtttgcagagatacctgctggccagtgatcccaaaagtccatgaccttgtctgatttgtaattttgttgatggtgtcatgggttagtctgatggagaagagtgaaagaaactaactagttctttacttgctgtccctggcatggttattctcaggaaattgttttagcatgttacttcttcatgaaaaatatctttgcaagaaataaacaagtttatttgggctactaatagaagtaaaggagatagaagatgatttgaaaagtgataagaaatcttagaccaaaaaaagtagaagttttcaataaagagtgaaaattcagagctagtaatgaccctgtcctacaatgtatgaatagggaagcagaaatcctcttgccattctgtgggttatagagaatcctcctaatgggtgtaaattttgttcaccaaaaaaaaaatatgatgctaagcggtgacatgtactgaatatttgctgttgccaggtatcatgttcaaagttctgtatcagataatcttccaactaccccataaatgaggttctatcattatctctgttttacagataaggaaactgaggcactgagaggtaagagcctcacctagagtaacacaaatagtatatgggtggagctggggcataaaactgctatggttgagtgtgtccccaacaagttcatgtgctggaaacacagctcccagtgcagcagtgtggagataggtgggacctttgggagatgactgagtcatgaggcctctgccaccattaacccattcataaattagtggattaaaccattcatggattgatggattaatgggttattgagggagtgagttagtaatcatgagaatggtgtattataaaagctagtttggccatctgtcatgagccccctcaacgtgtgatgccctgtgctgccttgggactctgcagagagtccccaccagcaagaaggcccttaccagatgtggcccctaaaccttggcctccccagtctctagaactaaaagaaatcaatttcttttctttatacattacccattctcaggtattcagttatagcaacaaaaaacggactaagagaacccaagatgtctaatgtcagattgtgcttgtaatagcaattgctttaaagagtaaattatgagtgaatgccagagatgcaattaattagctgagtaaacaggtaacatggctaccattggaaatatgaatccagataaatccaggtgtatgtacgaacaatttattttctaaaatttggggacttgtattcccctgagatgggtccttcttgagctttaaggatctcctatacattctctggtgttattagttcatgtgtgtttatctttgctctacacatagactagaatgtctttgactaagctaggtgtttaatcttttatttctgaggcagcaaagaaaatgggaggaatttcagctcagggtttgtcagaccaggaaagcctcatatagcatctgagtagccttgccaagtcaataggatgacatttccttgtatgcactctcagggaacttaaaataagaattgaaagaaggttgagtgtttgttctgaaatttacatgagatgtaggactgaggcactgcctctcaggaatgtgaagggaaatcacaaaatacctttggaaatcccctcaattcaccatagagaatacaaaattattgtttcaaagagatagccatttcatcagtcaaacaccgatgaaatagttggcttgtgtttgaagatagtgacacattgctatagacaaaatgtttgtttcccccaaaaaatcatacattgaaatcctataccacaatatgatggtattagtaggtagggcctttgagaaattattaggtcgtgatgctggaaccctcttgaataggtttagtgctcttctaaaagaggccccagaaagctcttccacttgagaatgtggcaagaagatggccatctgtgaaccaggaagtaggtcctcaacagacactgaatctgcctgtgccttgatcttgcacttcccagcctccagaacagtggagaaatacatttctgttgtttgtaagccagtttatgaaatttcattatagctgcccaaatggactaagacaaaaattggtaccaagaagtaaaatgacactataacaaatacctaaaaatatggaaacagctttgaaactgggtaatgggtggaggctgaaagagtttttaagtgcatgcttaaaaaagcccacattgtcatgactgaacttttaaaaggtgattctggcaagggctccaaagcaaaacaaaaacaaacaaaaaaagcaacagcaacgacaaaaaacaccaacaccaccaacaccaccatcacaagaggagagctgtaaagaaagcttcgatctctgagtcttcttagatgatacccacataatcttgaatagaacgttggtagaaatatggatggtaaaggccattcttatgaggtctcagatggaaatgaggaacatgttattcatggaaactggagaaaagaccatcctcgatataaagtagcaaagaactttgctgaagtgtgttgttctggtgtattatggaaggtagaacttgtaagtgatgaaattgggtatttagctgaagctatttgtaagcaaatttctctgatttctctaaaatccagatagcgtatttaattaatgtaattgtagatagtttgtttgaacccataggcacagcctggctttttctgactgcttatagtaaaattcaagatgagaaaaatgacctaaagatggaattgtccatcaaaaaggaagcagagcttaaagacttaggtaattctcagcctatccatattgaaaagtctgaaaaagcctgtttgggaaagaatactaaggatgtggtcaaacaactgtttgataaggagattagtatggatcagccatctcagcagaagccaggagctattctccaggacaatggaagaatgactctgaaggcaattcagtgatcatcaggacaatccttcctaccaacaggcccagagtgcaagggccctggagacagagtggtgtcaaaggaggggctgctggtgccctcaggacctcagtgcatgctgcatagggcagccaaacaccactgggttctattccttgtgctgtagtgtcaaattgcttggacaccccaggtagagctccagtgggacccagtgtagcatgggtcacagaggctatccctcccaagggcacaggcagcaactttggtggcatccacacaatgccatctctgctggtgcagagagctgtagtagagccctcatgaatgggattagtttccttataaaaaaaagactcacagagagttcccttgacccttccaccatgtgaggacacaatgagaacacaggcatccatggaccaggaagcaggccctcaccagacaccaaatctgtcagcaccttgatcttgaacttcccagcctccagaactgcgagaaaattccattgttgataagccacccagtctatggtatttttgttatagcagaccacattaactcaggcacacatgaaagctataaatcttgaaacacaggaatcatactcagggtggtgagatgctcagcatgagagaggcaagcaaagacccgcagagaacaactcatttctccaaactcctgttccctcccagacacacagtccctcaagggcacactgtcattgagatggaaggtaagtgaaattgctctcattaagttattttatcctgcccatcctcccacctttttttctagttttctctcatcatgaacatacagttgaatttgggtaagatcaattgtgtgtgattagacttcactttgtacaggaaaaaaatttagtgaactgtaaagccacagaaaatgttagttatagtcacatttatcttccattcctcttaggaccaagcacagttatgagccacaaaaaatacccagtaaataattgtcaacagctgacttgattttggcttgacattttaacattagattgaaaccttgcttaaagtgtatttataaagaaattgttattcatatgaacatgaaactgaaaaacctcactttctatcagttctgtaaataactcagttattgagaattgaaatgctcttttttttcaagtacaatcggataggtataaaaaggggaaaaatacaaaaaattataaaaatagcatttaaccttaaaaaatacaggtgcccaggctatacaatatgtaaagatacattcatatatgtaccctccaagaaatcaatcaaactttgaccttttatgttatgctaatggtttttgaggaaacattaaaattctttatattatgccttattttgagagtactgtcatatacaacccacataaacatacaaaccactcaacaatcaaaagcagaagaaacatttactgttttagcaagacatacaaagagttaatggcaaaaggaaagagagggaaaaaatcaccgcaatggtctgtgtttagaatataaagcctgttaccaaggtatacaaggaggagctggaaggcaaataaaggtgttcttggcagtaggtaaaattaagactatttaaagcacacatgaggtggaaatggcagaaaacattaatattacaaagataagttaagcaaaaggaacaactaatatgcaaagaaaggcaaaatacagagatgaatgaataattatgggtagggcagtaattattaaatcattgaaagtatgtaaaagaacctaagggttgtattaacaaagaagaggaagctgtatgtgggctttgaggaagtgaagcaattgtggactgtttctccatgtaaaactttgttcagtctcacagcactgaagaaaaggggcatcccagtgttgtaagtaccctttaccttcatgttccttttttcctacaacaaatatttgtgcagtagatctctgtactgaggatagaaaaatcaataagtctaggaaaggtaggtaacattttttgatgctgtatcacaggtaggaaaatttcccacactggtccatttatttgaccctcaaatgagtattctattacttatttaaatgataaaggtagtgttttcctataagtacccacatgtctcttctggagaccaatgctgtgtacttaatttttcagttattttcttgaatgcagctttttatttgttttttgtttgttcattttgtttttttaatccagtagagtctttctaagggaggaaagaatgaaaacaaaagattaaaacaaaccagcatgctgggaatggtgttgtctgggatcctcagttgccctaccagaatctacccacagataaggttatatatgtatctttagaaatagtttaaccactaagttgaaccatggagtatattttcttatctgtaagatagaagaaaaaagaaaaacaaaaatgtcagaatatttttggggtaatgaattcactatttgttacattttggggacataatctgagttcaggaaagaaacctaaacaagacataaaattttgactatttgtttgtgaaagaaggaatttttagtaaagaaaattaaagtatatagcaatacttggcaaacatttgaacacacttgaagggccatgctcatactcataatcaaggaatttatttgttcacataatcttccgatattttctctggatagtttcactttaaaataaagtatttggagatagggtaggagagattatgcaaatgtatgaatcttaatgagaagttcattattgaacattttgatgtgaatttcaggaaacgataaaagaccctgggatttgtgagacttaaaagaaaaattccactcttggagaacttggaaattgccagtaaaagaactgagacccaaatgacagcagataatgtaaagccaaattgcattatgccctatggtaatgaataggaaacagggcactgtgataagcttggaatgatgatcaatatttggaacactgtgataggcaagaaggtaattaggcccattatgaacacagtgaacacagataacataacttgggaaattatacatttggatattatggagaattttttaaaggctaatggatttgcaatgatatcaagtaaagcatataagacattttgcctctaggaaatctacttaaaaaatcaaacatagaaaattttcagtaaatgtaatctaaaatgaaaagacaaagtgaaatatgtgggagaataaagtggtattgtgactcctacttggaatttacaataattttgtattcaaagagttttacatttattaatttcacatcacaactccccatgcagcaggaaaggcgtttctattgtgtttgtccaagttgactgctcataataaggcaaggccaaattgataataaaagcaagctatcttgacaagttctcagccttcccaggtctcatgctgtgacccctggatggcattataataatcttgatccctaatttatgatgggaaacaatccctttattttagaaggaaggattgtaaattaattaattttcactaagtgccgtgagggccattgatgttattggaatgtacaaattaatacattatttattgttaatttatcataagtatttgttaattacaaagctctagctggaagaaaaacttgccatgtatctggaagtgaatatcttccctaagataatttctcattttttaatatggatgtattggaagcaatttcatcaataatggaagatccaattactggtcttctggattaagacattcttttattgtgagatttttaatgctaaattgggaagttcaaacattgccaattaaatctcagactaattaggtgattatagcctaaggagaagggcaactaagactccactattaatctatcttatcacaatggcctctatatgtgatgaacagatgaacatatatatacctgtgtcaaaagaagaaatgtaaggcattgtttgaaaaaacaatttcaggagtttaattgttttaaaaaaatttaaggagttgtttccctttttgaataaaaagggaaagcattttttatgaagtcctttttagctgtttgtagaacgcatgatcatatttaagaattcaatgatggattgaaccaaatctaagatttccctcattgaaatgtttagaggtggtacaaaagtgactgtgacagtaatgatcaccattgctttatgagcactcacgatgtgccatgcacccttctatgcttttcttatcctcaatatgatagctgagggaactgaggcacaaagaggttattaactcaagaagtaattagcagggcagggaatgtttggatattctacagcctccttttaatccttcagtattaaccactaccctctagacagttttattctcaattattcaaatcatctgcctgtggagaagcaacagcagtgctcagctgtaaggcaagggcaggaatccaagactgagtcagagaaactgaggtccacatccaaactatcctccaggaaggaccttctgtttcatagcatgttgaagtgaggctttctataatacctggaaggctggggcagcggtttctcagcatcttaagaatcagtttcatagtggcacctctccaactaggtggtagctctctcatgggcctcttgccaccctttttatgcctacaggacacatgggcattttgcctggcacagcttaactctttagtcttggagtgtgtttgtgtatgtgtgtgtgtgtgtgtgtgtgtgtgtgtgtgtgttcattcttttaataacgctgtatttttgggaatggagggtagtaggggatgtatcggaggattgatctgtgcagaagacatgaccctgaaatttccctctactctatataggaccatgtcaagctaatccttcatttggaaacagatggaatctttaaaagcgctataacatctttttaaaaaaaaaaaaatatgtggcatttttttaatgaggccacaattttaagagaaaatttggcacctgacattaagaatgtttttattataccaccttgagaataatttttatgtgagatccttcttttagcacccttgataattgtgtgtcatctgtttcatgaatcttgtgtatgttgagctcatgtttgtgaggggaggatccgttcttctcgatcttaaagaacatggacatagaagccacaaccaatatcgcatcagctatagatgaaaatatgaagagtcatcatattttaggataacttcaatgggatcaattggctgaggttttgattttgctaaattactcacttgaaagagacctcttcttgagacccctggttttagtgaaagcctagaaaaaaaaaatgtgatttttgtaaatggtgaggctagacatagacagtgaatcttctcattttaaaagctgtaaaattttctacgcaccatcaacctaaactgaaattggtgagagtaggagtagggaagagggattgaaagtggcaatttattgtactccacacaatctttacagggagggtattttattccaagtgttttgttggaatttaacactgatgcctttcaattgacattataatcccttacacagcaggtaaccttgaccttctgtaggagccctcaaacatatgaaagacatggggatccctggagaaggtgcttgtcagagcccccagttcagtcagttcactgtacctgtaaatccttataaggactttcctgattttggttctcttctctaacatgagtccctactctacagctacattctgtgcattctccaggaataaatagaattttttttccaatcctgaaaactccagagtccacatttacaacctaaggactcaaccaccctttttgcttttaatattaccatgtattacatccaatagagttaggttgtaatattgcccaacatcagttagtacttctactttgtgacttctatttatatagagtgaattaattgccaactctattaatcttgcaaaatccatgtatccttaatgttcagtttgcttagaatgaggaacagtgtatttgtttcttcttagctatgacttcttgctgagcttcacatgagctccttttagataacgtgccttctatcttggacgatttattcactttcatgttccctggaatttattgctaaacgttgacgtgaatgcttacagtttgggctctaatgtaatctcctgaatggcaattaataaataaaagatggttactattgctgacagagaatcagggctttctcagatagttttcatcttcatgttttcactaaacttcatgtcagacatccctaggggctgatattataaaatattttctgtaaactccaaagcttttactattgcttctatacccccaaacctctgtgatgccttttgttttcttgtcagaaatcatcttattcaatttctgtttcttcaacttatcttccttcctgggaatataaaaaatatgcctctttctggatttaatagtgacatatcctcagtatttatgacttgcaagtaacacctgaaatttgtccctgaaattttttgtattttttttttgcttagtcttatctctgttgcatttattgaatatactctgttgaatttactgaatactgaattgcacttaccctacattaatagccagtagggtttataaaatctagtgtttattgtcatcctgtatattgttcaaagtgcaaagttgtctcctataagttaatgatgaaactataacgcaacatccaatttttgcagtttgcctacttgacgaggctccagggttaatctagcctaatattcttattttagaaatgaggacaatgtagggcagtttaagttgtttgaccataatcaaatagagggtgcagagcaaatacatctttagacagtaaagtacatggtacacagcagaaaagctggaactaggctgcctcggcccagctcctggtctggatgcttattaagtgtttaactttagacaagttatgtcaatgctgtgtgcctcaatttctgaatctgtaaaatggggctaaaagtagtaccagtagcacaactataaggattatagtaagttactgtgggtgaggcatttagaatagtgcttaacacagactaagcactccatgcattattagctattaccattattcattatgttgactatttttaacacgttcggatcataggtaaaggtgtgtattgctatttcacttcacataggtatatatatacatcagtgcttttttgtacttcttttgtattccttaatgctgtgtgcagctgctagtagtagtgttcatagtggcagtgataatagaagcaaaaatagcgatgatagtaataaaagatagtgccgtttattgagccttgctaggtgctagacattgaagtaggtactttacatacataattcttaataggtactcttgtctattgataaatgacacagtcgttttttcccagaaatgcaagtagacttcatgacagtagtctccttcataactggaaaggaacatgagctgtggccctggtggaaaagctttgactgtagagacaagagccctgatagaattccttctgtcttaaagataatccttgtgctgctaatatttatataacctaatcctgttattgataattgagagactagctgggggtgggaatggaggtcaaggaatggagtgggagggggcaggtagagggcaaggcaaaccgcacaaatgaaaaacattatataccagaaaagcaatgattcaaattcagttgtgctctatattttctgttttataattttatattgcattaaaaggttgccccttttctagataccaaataggaatacattcagaactatagcatcgacacagaaaagttgttttctttcttgctttgcttgcttgattgattgattaaataaatggcagttaccatacattaatagccaatagggtaaggtaaagtgtttaattagaaaaatcacagtcacttcaatgttcttttatttccatgcccagtatgttccttactaatcatatgagcaaccatggcaatgataaaagctgtcaggtgtgggagtgctaggacgatactggaagagaagctctcgtcatgttaggtgcttggtatgtttgtgtgtgtgtctgtgagtatgcatgtgtgtatgtgggtattctcacatatgtgaaatcactctcattcacatacatagtctctataaatagctacagcctttcaaattcataggtgtgtgtgtatatgcctatagacacacatgcatatacacttctgcatagagagaaatgtacctatagtcatattaaattttatcacagctttagaaaaggaaacagaggctcagagaagtcaaaccacttgttcaaggttacaaaaggtggcaaagctggagtataaccccaactcccacccacttaacaccccttttttgggatgtccagacagaaatattcttagaacaatagcattacaccacactgccccattagaagaggggtgaccttttgccctttcttttccagaatctccaagcaaagattttggtccaactctgggtttgaaaaagtccagctccttggagagtctgcagactgcagtggccgaggtcaggaagaatgaccttccctttcacaggccccggccgcacatggttcgaggccgaggctgcaatgagagctttagagcagccattgacaaatcctacgatggacctgaagaaatagaagctggtaggatgatatgcttccttaaatggcttcttcatctcattattatctgcaaatcatgggcaagaatgtgtgctcaactacagaaaaaaatgatttaaggatcacaattatatttttgatattaaaagtaattcattttcctgatatgttttgccctttggcttaatgaacatggaattggagaacacaatatgcaatttattttacagtgcaaggctaaataaatgttctccttcacttttctacaaggaccaactgtcatttacccttagggtaggagcactaagtatgcatttcttgacattctcattcgagtcattagaggcagcatcaatccaaggactccgactgcattaattgggtagaagcagttgggatattttgtactcaaaactctcttctcaccctgtttgtttcccagcatgcaggctttctgagctgatcaaggttaacaaggcagctttcagagagattagtgcttgaacacatatcaagcctttcatactaccagctaagcaaccggttgtccccactcccagcatcaagtcttgctcgaagtaaccagatttaggcagtcagatcttcaaagggcgcacgtaaccacatagaagggtagaactacagagtgctgttattcattcttttgcattttacatgttagcgtttctctgtatactaactgagtgtgcccctgaccatgggtattgattattttttctctgtacagacggtctgtctgataagagctctcactctggccaaggagctctgaattgtgagtctgcccctcaggggaattcggagctagaggacatggaaaataaagccaggaaagtcaaaaaaacgaaagagaaggagaagaaaaaggaaaagggcaaattgaaagtcaaggagaaaaagcgcaaagaggagaatgaagatccagaaaggaaaataaagaagaagggcttcggcgccatgctgaggtatgggcctgctttgaaggcaaagttggttctcattttgtctctcctggtaaaatcactcctttgtctgtactcagaaaaaagcgcacgcttttcctcgtcttcagccaaatgcatacggctctcaattctgtgctcgttctctttctgcagaggcagaggagctttttggggaaagttacagtgatgacaggacactgtcttaagtttgttgtcaaagaaaggtcaacactatgccaggcacggtggctcatgcctgtaatctcagtactttgggaggctgggaggattgcttgagcccaagagttcaagaccagcctgggcaaggtagggagaccctattctttttttcttttttcttttcttttttttttttttttttttttttttgagacagtcgcgctttgtcgcccaggctggagtgcagtggcgtgatctcggctcactgcaacctccgcctcctgggttcaagcgattcttctgccttagcctccctagtagctgagactataggcatgcaccacaacgcccagctcatttttgtatttttagtagagtggagtttcgccatgtgggccaggagtcttgaactcctgacctcaagtgatctgccttgtctgccttggcctcccaaagtgctggggttacaggcaggagaccctatttctaagaaaaaaaaaattagccaggcacagtggtgcatacctgtaatcccaagtactcaggaggctgaggccagagcatggcttgatcccagtagttcaaggctgcagtgagctatgattacaccataaaagaaaggccaatacttagtagaggcatggacaatgcctgcagtcctttgtaccaaagtgttatgaaaataaatacttcctctgacaccacagggaaagtgggaagtggggaagccctatgtgttacctctggaatacctcttttgaagcaggggagtcagggtagatgaacctcatccctctgtgactctaggtgtgcagtggccgggcctctgggcacatcacttgtcacctccagaggcactgtggtacaggggagatgtcactgggtctgggctctgatgcccaagtctggatccatgactccccacacatgagcaatggggcttcacacacattgcttagcttccctgagccttactttccttacttttaaaatgaggccagcatacttgctctactgacccagcacagttgtgagatatgatttcatatgctatacattcattgactagacggggctcaacatggcacagtcagaaaacagctttgtttcttctctccccttcaagtataaactgttgaggctgcctcttccacaccctgacatctcagctttctggctgatagctttctggtcacttttgggtaaaaaaaaaagcaacttgtttgtcgggggctaaaatatgcaatccaatataaatgaaagctttcttcctttctgcctgttggacctgaaccacaaggagcatcctatggtatggtgggaggcaggattccaccttctcctatttctcagtctttggaaccaggagacaaagacaagattcaataggataggattttacttaactggcattatctggtataatctggccatcaaggaatctttgtggctacttttgtggattttttagagtgctccttactataccagtcactaatgtaggtgattttcccactgacctatttccctaagcctctgacctcagacatatacccctgagtctccttaccccggttggtagacttcttggacagtgccagtttgagacagctctagcttaacttacagccacagcatctacctggcttattagagttcctgatctcccaccctccaaatgatgcaagtacagcttgttcccactgtaccgctcctcctcaccccaccatagagatgttccaaccagccttgcatcttcagacttctccagcacatcccacaccagctctgggcctcctcactccagaagcacacatcagactctcccaagaatgctgtcatgcatggggaagggaggaggcagtcaatttttgcaagtcacaaaataaacaggtaggaagtggggtgacaatctcctattatacaattacctccaaattccctaaggggtttacttgtagccccctcacttattttgttgggtgttacaggcagaagtacccctttctattactgtctttactcctataatttcttctcaaatcaattgatcactatacttctgtgggctgaaggtgaatgatgggagatgatggtttaggggccagtttggccacctcttatgaaacccttaggagatacctcatttaagaatgctgcgtgtatttattaccaattgttctcattttgtgatcatcagctgaaatttctacatagaaaagaaagttccatcattccatatataagtgacatttagggaatacaaataatcctcttagcagtgagccttcccgttacatttccagtgctcatgaaatgctaagcaaggttcctcatgctcaaaatcttgggagcgatgttgcccctggatgtgttatgacaagacttgctgcggtcctgctatcacctggggtgaggttaccccagcaggcctgatgtcataatagctatctgaatattaaaaaacaaaattttggccaggcatagtggcccaagcctgtaatcccagcactttgggaggccaagacgggcggatcacctgaggtcaggagttcgagaccagcttgactaacatggagaaaccccttctctactaaaaatacaaaattagccgggcgtggtggtgcatgcctataatcccagctactcgggaggctgagacaggagaatcgcttgaacctgggaggcagaggttgtggtgagccaagattgcaccattgtactcccgcctgggcaacaagagcaaaactccatctcaaaaaaaaaaaaaaattcagctaggcatagtggctcaggcatgtaatcccagcactttgagaggctgagatgggcaaatcacttgagcccaggagttataagacaagcctgaacaacatggcaaaaacccatttccataaaaaaaggaaaaaaacacaaattagctgggcatggtggcatgtgcctatagtcccagctactcaggaggctgaagtgggaggattaacttagcctgggaggtagaggatacagtgagccatgatcccttcactggactccagcctgggcaacagagtaagaccctatctcaaaaaattaaaattaaaaagaacaaaatttcagcaaattgagttctaacaattgaattgggttttattagtgattcataaattggtccacatcccatctacagaatagaagggcatttgagtgagatgagcagaaggtgtgagcttcataggcagaaaaagactgaagaaagcagaaacaaggaacaaaaaaaggattgctcatttccaacttgcattccttatagggttaaagtagagggactttatcattccagttcatgtcactggtcctcctttgattagttgctgggaatctcctatattttgggaaactgacccatttctaagttcagtttgattatgtggcatgtagcatgagtgactccattctggtttggtctggtctgttgtggcctagtgcaggagctcaaataatggcctcccatacattttattgaatatgatctatagtctagtaaatgccagattgggacagatgtcccaatagacattcgtcctgatggcctctgtagactctgtccttccagttgccattttgaattttaaacttgcccatattctagataattattaggattgccagaatttatgaactgtgagttaaccatcttgatgataatgacaacatgtaattgcaatatatttagataagaattttgtctttgaagggatggagttgagaggtgaaaattacaggctctgcctacagactttctgagttcaatcctggcttctctaattttcacttctgtaacactgagcaagttctttaacttctgttgtctcagtgtcttcatctgaaacatgagaagcataatagaattatcatttttatgagaatcatattttattagatgtaacatggttagacctgtgcctggcaagcaataaacattcaataaatgttaattattatagtaaacataataatgacccctgaaggtgtctgcatcccaacccccagtacttgtgtaaatattttgttacatgacaaaggaaaattaaggttgcgggtggaattaaggttgttgatcagctgacctgaacataaggtgattatcctgcattttccccaatatacccaatgtaatcacaaggagccttaaagtaaaagaagacaaggtgactgtggaaatgaggtacagagaaatgtagtgctgctggctttcaagatggagggaggggaccatgagccaaggaatgtaggcagcctctagaagctagaaagggcaaggaaatggattctctctggggagcactagaaaggaatgcagcctaacaactccttgaacaccttggttttagccctgttgtgttctttgaaccactgtttgttgtaatttcttacagcatcaaatcaaaaactaatatagttatcatcataattacttttactacttttatgatatcatagtaatgtataaggaagagttttttctttaaggtgttaacgaaaaacactattaaaatatttaactaaaatagtctgtaaatataaaaactgttagagcttcacatatcccattttctagaatattactaaattaaaccttaactttatattttatttcagatgatttgatttggcatgttcatacttcattgcccataatacagtgctggttcttcccttttattgtcccatatattctgtattttcatgtagtagaaatcacaggtcctggatcctttagacatttagcacctcgggctttgtttctttccacgattttagcaaagttaagatctgaaaggtggtgtttgattttatcttctgtgtaaaaatagcaactgttttccatagccttttgcatctgagtttgtgagcatattggagttactgctacatgcacattttcaacaacaaagaacacaaagctgttaccattagccaacagattttgctttaattctcatctgttgctcagatgctattgacttagtttctttcttatttaaaaaaagattgattgctttaaggttctcttggagttagatgtgtgttttaagtatgtattattttttccgttatctgcgtttctcagatgctctcctgaagatagggtattgggatgggtcatgcagttataccatgtagaatggcacctggccaagggggtgaatgaagatttaaatcctgcctccctttcctcaccaaggctggcatcatgaaaatgtgaatgccttagtggtgttcttgttcttgtttgtgaaaagctaagtgtttgcacttttctgatattagctggtccatttgtgtcaataatatgtagtagcacagtttaacttcttaatttaacctactcttgatccttttgaaaaaattacagaggatgtctttaattaatatctttatacatgttgtctaattccaatatgcttatactttgttgatttcagaattatctccttgcatgattcaagtgtgattcttatatagaccatgaattattattattattgtggaaaaatatgcagctcaagagcctaccaattttgtagtttctctgtatgctctgtgcttaaattttttcattatatgtttgagttccatacatattgtgctctttatggcactaacctgcagaaagactgttcatgcccctttcagccaaagggtgaagctccagctcctttaaaagacaagcccattgctgtcagtcctaggccaccttcctggggcctagcagatttttctaggagccaaagagaaatatcctttgacaaagaaaattttaccttgtctaaagtggaaaacccagagattagtttctgatttcttacttaataaccttgtcaatccttatgttacttaaactaaattctgtcatagatttatgttcaaatccattttttttatataatagctgctgttgtctctttttgatattataggccactcacttcaaaaacctttgaactgtcaacttattttggacactgaatggaaaggtttgatatggttcagattcccttatctacaacttttataaaatttgatcctaagaggaattatgccttgcaaactcctttttactagactaatgaagaaccaagtacaaacgctgccaataggaacttcatctttgcttttaaaatgtgtttgcccatatcatttgattagtaacatttattgaaagccttgtctttgccaagcacattcataattatttttatgctatatctattaatttattgtaatcaataattaaacttatcagttaatttattaaagccctattttgtatcaggcactgttctaggcacttgacacacagcaaccaagtcctgctttaacagcacttttcctgtcttaataaaggaaggaaggataaaaacttttgagttcattgtggtgagattaaaacaaaaacaagcagccaggcatggtggctctcgcctgtaatcccagcactttgggaggccgaggcaggcagatcacgaggtcaggagattgagaccatcctggctaacatggtgaaaccccgtctctactaaaaaatacaaaaaattagccatgcgtggtggcgggcgcctgtagtcccagctactcaggaggctgaggcaggagaatggcgtgaacctgggaggtggagcttgcagtgagccgagatagcaccactgcactctagcctgggtgagagcgagactccgtctcaaaaaaaaaaaaaaaaccaaacaacaaaacaaaaccccaagacaagcaaaatattacataaacatgtaaactatttgtaacagtggattacccagggagtgaaggggatattcactagatatttcagggacaatccagtaccccatcagctcgagggaatcaatggtcaatttacatggtgtcaagcaagacatccaggccatggctctcacggaatttacattccagtgaagggaagagaataaacaactaatccaaaataattgatacgattccaaattgtagtaggtgctatgaaaaaggtaaagcagaaagaatggtgtcatcccacccttggtgacggtctaacagcagaatagagtgcacactgcacactgcccaagctacactgaattttcagcagatacgttatcagaatttagcacactatggtactaaagccaaatcactttatgcctgcttttgttttcttttttgcaacttataaatatgggaaggttatttttaaaccaactccacatagagctataacaaaaaactaacccaaactgtgtctgttttagtacacaaaaccctaggatacctgcagtacacattctaagacaggtgggcattaatgtaaatggtgaacttggtttacaggtgattggatcaactctgttcctcctacctcatcagctggatattctttattgtttcttctcaactcagataatgcaagcatacctcaaagatagactagttcggttacatagtggagcatcagacaaagctaaatcatgaacccttgaggcaaaggtatttttaacaatctagaggcatcaactttttgttcctaagccttacagattttaaggcatatatgtttacttcattttattctaaaatatactatctattttatttaaactaggggaattctatataaagacatcctgctgtgaattattttaaaaagaacactcctacacacacatcacacctaccactaccaccacaaacaacacaccaccaaattagccaaattaacactgaacctagttaaaaatctgtcccttagaagctctgtggccttcactaccaccaaattaatgctgaacctaattaaaaatctatcccttacaagctctgtggccttcacgagtccctttgagtttcagtcacctcctcatcagcaaactaagtataataacacatcctgtccaggttgttgtaaaatttaagttaaacggtttaggtaagcaaagctgtcagtgtagtgcctaacttgatagacattacttcttatccatctatctatctatctatctatctatctatcatctatttttcattggaaagtaaaaactgtctatatatggtatgcaacatgatgttttaatatatatacacaatgtggaagggctaaaacaagctaacatatacattacctcacatacttatttctttcatggtgagaacacttaaaatctactctttttttttttttttttttgagacagagtctcactgtgtcactcaggctggagtgcagtggcgcgatcttggctcattgcaagctccgcctcctgggttcacgccattctcctacctcagcctcccaagtagctgggactacaggggcccaccaccacgcccagctaattttttgtattttttttaatagagacggggtttcaccgtgttagccaggatggtctcgatctcctgacctcatgatcgcctgcctcagcctcccaaagtgctgggaaatctactcttttagcaagtttcaagtacaagacatattgtttttaactgtagtcaccatggtgaataatagattgcttaaatttattcctcctgtctagctgaaagtttgcatcctttgaccaacatttcttcaacccctccatagcctagcctctggtgaccatcattctattctctctttccatgagttcgacttttatacacctcacatataagtgaggtcatatggtatttgtctttctgtgtctggcttatttcacttacataatgtcccccaggttcatccatgctgctgcaaatgacaagattttctactttttaatggctgaaatagtatttcttcctttctttctttctttcttttttttttttttttttttttgagacagagtctcactctgtcatccaggctggagtgcagtggtgtgatcacagctcactgcaatctccgcctcccgggttcaagtgattctcctgcctcagcctcctgagtagctggggttacaggtgcctgccaccacacccggctaatttttgtatttttagtagagacggagtttcaccatgtttgtcaggctggtttcaaattcctgacctcgtgatctgcccgccttggcctcccaaagtgctgggattacaagcttgagccaccatgcccagctggctgaatagtatttcgttgtgtgtttataccacatttctttatccattcatctgctgatgggcacttaagttgattccatgtcttggctgttgtgaatagcgctgcaattaacatgagagtgcggatatcttctcgacataccaatttcatttcctttaaatacctaatggtgatattgctggagtatatggtagttctttttaaatttttgagtaacggccacactgttttccatgatggctgtaataatttacattcccaacagtgtagaagggctcccttttcttcacatccttgccgacacttatctttcatgtttttgttaataaccattttaacaagtttgcagtgatgtctcattgtggttttaatttgcatttccctgatgattcatgatatcactgagcagtttttcatgtatttcttggctattggtatgtcttcttttaaggaatgatagacattacctcttgtcttccccctctggctccacttcagacagccaagaccgtcaaatattacctttgtctcaagcaagatacgtttggaacccactaactttttctttcagattttagattacctctaactgctgttttgtaatgtagttgggcatgatgcctattctctagcctagcataataaactacataaagaaaagaaatgacatagctaaaatcattcaatcatttatattttataagctttgggtcacccctttctcaatgtaaccatgaactgttttcaaaggttatttaatcacttggtgaaaagcaaaaccttctattgcagaatacaaatagaaagggtctcaaaaggataaaacagttttttgttttgttttgcttttctttctttctttatgtatttcagcccagagtgtgtaggtgggtttggacttggtattcttaatgcgtggctcatagttatttcatcaggctgctctgaggttgtcctgtaatacattacccataaagatacattttgacttggtttttaaattaggttagatagagactgaatacttaagtcaccagggaacatgacatctgtcatacatttctcctctttaccttgatcccataacagctgttacaggtctcatgtacaataaatgtaatgtggccgcagcctgtcattacctctttccagatagtgattgtaaaatgcctgggtatcccttcaactttatgggtatgaagggtaactgagccaatgtagccaggccaatgaaattttaacactcatttccccaaaggcaaaaggccaacaacaggctagagttaaggtgctttgcttcatgaagtagaggccggtttgaaacatgaaatttcagatgaaaaatgaaagccaaagtgggtcagagttcttaattcaacttcaagctaggtggagaaatacattgacaacagagagccttacagatcagggtaagacggctgcatacactgagactgagacaaatatatgaccatggcaaaaaatagaaatttgcatgtcgaaggccaccacccatgcagccatccattgttctccatggttatctacaattacagaggaaaagaaatcgatgctaaaccatgttggaattgagttaggctcaatttttatctctttggtaactctgaattttctctcttcagcccatcttaaattatttactttctctttcacaatgtgagccatgaatattttgtttcttcattttgttaatttgccaattttcctttgagctaaatgccctagcaattttaatttttcattcgggttggaaagagcaatgacccttttttttccattattactatcacaggcctgggcccagaatactactttttatgaccagcagtgttgagcctataatggaattgcaaagtagagagtataatatactgatattgacttgtgttaaacccagtggtgtgatcactgataatatttatatgtttatgtgtatacatccttgcttttgttggcttgcaactaagcaccagagagaagagctagaaccataatatggatagattgtgaacatgagaatgtaaaaaaatgagagagagtgctatgtgaatagggcaagtgatataaaatgatggcgatagatgcaagtatgataactaaaaagttaagtatagattaaatttagatcaagcacatttaggattgtttggttggcatttatttcttagctaaaagaggacccagagacagatgggctactcatctgatgggctgagtacaaagacagatgagctgccgtggcacccagcacacagagtttgcttaatatctgagtttaataatattttccagctgtcaagcatatctgcaaatgtttgtttatccttctgttttttgagcacatgttcatggaggggcaagggcatggatggggttaattggtatgaaaatgtacaggaaccttgttttcaaaatcatttaaaaatctgattgctgctgccatgccttcccctcctaccctatgtaatcttgattgctgtgcaactctgtttacggctgtccaaagcggtaaaatgattttgtcatacttatcacaataaaaaatgaccacatagagtgtcaaccaaaaggcttatttatttgattcaaactctcttctcctaatatgcgtgcacagctcccattaacgttaatgtgaattacaaagaacactgaagaaggatagacccctttatctcattacttttcttggataatgaggtttagatttgttaacagatcagaacagaagtccagtggataaaatattggcttaacttttaaagaaatggatatgctaaaaggaactttcataggcactaaggtagaagatacactttaataaataaacttcattagcatttgaggttaaatatgcttatttaagatgctggattaataaaatgcaaaatatttcctaatggacctatttgcatactcatattaaataactaataaaatatattaatgatagttttattcatatacatgtaaacattcctgagttcctggtgggactgtatttgcctaatttacattgttccgtgtccaggtcaatgtcatgtccttgtgggatgtttacttaatactattagataatgacatgtatagatttaataatttgcttggggggcaaatggaatccgttctttgtttagtaccttttatctgagaacttcaatgtaatttactaacatccatcttcaagatgcatgagagatgaatgtggcaaatagctttgctttgcgtataataaagaatgagacactgagaagtgaagcagcctcccgagagcctgtgaactgatagtgatacaaaaaccccttttgacttttgttcctatggtgtcagcatctaaaaatgcatggacaccaaccacgcttcagtgtatactttcttacactctgtagcacccatacttatttttgccatccgttggattttcctgacaaggcaacatcaaaccagcaatttagtaacatgagatggttcctaatgaagcaaggagacctgaatctttgaaataataactgtaactgttttcctcacagaatagaaaagaggtttcccagaacaattaaaagcagataagagatacatacattgaaaaatagataggagatatacaaatatttcattgcacattgaggactattatctcaatcctgctaaataatatccaccaggattttggagacagtccaattttgcttctccagctaactgctgatcatttctgcacagtggccctgccacaacctcagcttcaacatgtctaaaatctaattcagaatctacccatctaagtcaccagctcatcctgactctcccaattctgtttgaggcactgccaggaatcccgtgatgtccgggatgcctcccccttcccatctccacccttccgtcagtcaacaatcttgatattcacaaaatactgtctcttatatctggcccttcttttccacttccactgccaccactctaattcaatttgtcattgataactggattgttgcaataacttactaactgatttgcctgctttattcatttcttcattcctgttcattctaggcatagctaccaatcattcgtttgttcagttattagatatttaatgaatgctttccacacaaaaatgcaatgtaacgtagtagcaaagagagcagctctggaactattctacttaggctcaaatccagctctacttccttctagctgttagtctttcatcttacccactctgtgcctcagtttcctctcttgtgaaattgaaataatagcatctacctaatagagtggccccgagactaaacgagataatagatgataaatgtctggcacatagcaagttcttaaaacataatccattcatagtattctgccttgggagccgagatgtttcccagttacctagtggttctcaaagtctgtctgtaccctaggatcatctacagagcttgttatagattcctgggtttcattatcagagactctaattcattaggtttgatatgaggcctgggaatcgctgatgattgtaatgcagccagtcccagggacctctagaaaaatcatactatttagtttggcattcaatgccctctatattctcgtcccagtttgtttgtttgtttgtttgtttgttttagcgtttctctctccaactttccactctaaccagattattcactcttactctcttcactgttacccaaaacaagctttgtgaagccttaagataataccatcacttagaatgaccgtcttcccctgaggcctgccaggcttctgaaagccacctcaagccccatctcctttatgaattctttgatttgcatttctctccttcccatcaaattttttcttacagtctgagtttttccattgagtacttcctgtaggcctgcttggtttttagttttgagtttacacatctgtctcgtgcccttaatgaaattgtaaattcctctaagcagagggacttcctctgcaatgtttttctctgttttggcccctaataatcttttgctgaatgactgactggtttatatggtgtgctaattggagtagatttatttggatattaatgtgttgtgcccctttagtcattcttggtaatagtattgaaaataatgaaaacagtggaagtggttcaaaaataagaaagagggtgagctgcattgggagttaattatttttttttaatttctgcttgaagaaaaggttgaaggatgagttaactggcaatagtaactagctgttctccatttccactgaggacagtgctagagaaaatgggccaaaatcactaacgggaagaaatgaggttagatataaaaaagaagacagttcttaagcactggaatgaggtttctgaacaggttgtagaattgacctccctgaagtactttaaaaataggaaggataaatatccatctaaaatgatatgaaaaagatttgccaatcagctcattatttgaatatctattaagcactactctctgggaaaacccagaaaaaaatgtacaacatgatccttttacttaaactccgtatctaattaagatgacccataaatatgaaatcattagcagtgaaaataggatttaaaagtaagagctaaactgttaggttatcaccataattggagtttaaattcggatatgtgcccttctctacctctctactcctgaaaaacctactccaggcctttttttcaatgagtgaattttcagtgtcctctttccaacggcatttctaggtaaaatggagaaatctctgatcttttctgaaataagttattcaatactattgagcaaacaactgctaagtacacagcaagcatgttgtgataaatatgaaactaatcttttatttttttctaacatcgtctttcattcatccaacaaatattgattacctaataagtatagtcttagtacttggttgggagataccacagtgaacaagacagatgtcttttcattatactcaaaatctagtgcccacaacctttcctcaaagtgtggtagggcatataagttgtaatattaaaatgccataaaattgactaaacccctttagataaccagagcatccttgaattacataaatgatggttaaaccacttgcagtgtactcagtaaagatactgaatagtaagatgtctggatttccaaccttaattctgtaactgccttcttgaatgaaagtttttcttcatctggaagatgcatacttcttacctacctgcaatatgtgtataaattatcatcatggtcatcatgtatttggtcactgattgaaactgattacagggtagatatgtctatgggctaaaatagaatgggattggttagctggaaagtcagtttcacaaagtgaaatggcactgaattcaggaaaatagaccaagactattaacttgtcaaaatggaaaatatagcctttaaatatagtcatacacatggtgccctttggtttgaattagggtaaccaactcatcccactttgaacactgaaaatctcttccccaggaaactcctcagtttaaggaaagtgggccagtcgatcaccctattctgcatacccaattttatctgatccttcctctctcttcttccttccctcaccattctttgtttacatgccagtgtatatagtcataaaaattctctgaaaaataaaatgaaagttaaaagtaaatatttttaatgctacaaatttaaaaaccatatacaacaaatttaaaatgtatatgaaagagtggacagtataaaaggaagcttgagtgaacttttctgttatctgagtttttttgtgctttctttaacttgagctgctgtctgttctcctaaggctttcttggtattagaaaaagccacatagctctggaaattaaagtagaaatgtctcagcagagaataactaaaagcagcatcccacttgccaacaaaagaattcttaaaaatattatataattcaaaactcaaaaaagaaagagctggagggaacatcgaccagaaataatggttgcaactttgattgcagacaaacccaccagcgaacagtaaaaaccctaattctagggcttttggtatgaggttcctcccattgataggtttcttctcccccagggactgtaattttccactttaaatttgaactctagtcaatgtatagtaaaaaatcaatatcatagatttgttctgctttctttatgcctcctggaattttcaaagtatgggaatgaacagcttttatgaaaaagatggactataaaatgaaagatggaggactttgaccaatttcctagacctttgacccagaaacactataccagaccaggatgtcattgtcccctccctagctctgtcatgtctttgttattcccatactatgagggcattaaatgtcgagtgatatgacgactatcgcacttttggaaaggatctttgacaggttaactagaacttgctaccagaatatttgtcctgtgtatcctaccttttcattttaattttactttgctattttcaatacagcttctttccctatattgtgatggggagagggagaaactcacagaaaactaaagggtaatccctttagcatttaacatttatacaaacaatagttcttgcattgttaaaaacgagcaaaggtgccaaagaattattccaacaaatgcagacatggggacatggtaagtaattctcatcccctgggctgatcaaactccctttcctgagagttgcaatcctttgatcagccttctaactccacctcacccagcatcttagtgtcaacaacaagctcaggccacactttatggagaagtcatggccaggcctgattcctctagactggcattagagctagtctggatcatcttggtattttccaccatttttgtcatcacttgaaagacaagaaccacgtcttaccatttttgtgttctcctcagtacctccgcctttgccacattttcccttcctctcatatcctctcacatatatggcctcattttcaggttcctcctggtcctctgtgaactaaacacagagacagattgattttcaatagcctctcccgtgaccttggccagcttggtataaatgctttctacatctggcatctggtcacccagctacagaattcaataaaccagtagagcactgagcaaccatgcctcttaaacaaagcactacctccctagcatgtcggcttctactctggaatccgctcccgtagcattgcctagaatcctcagtcctgcatgagccccactctgaagtccatgttcttagactagagcactggcatagtagagcttgcttatttctgatgggccatctctagaacacttgattctgtctttcaaccctatacatccacagttgtaggacctttttctttgaaccttgtgtatcttatctgactttaaagtatttatctgtcatttgccttccttactgctatggtctgtgtagctggcagagtatacctggatggactgcttctagactacctggctgacctctctaagtcagcctctgtgcttttgtgtgattttcctctccatttttcatcctggttagtgggactctatctaattcccttccccagtgattctacaatgttgggcaccaaatttgctgctgttcttgccttgctcatagtgtacattcaacaatggattgctgagctaattcttgattgtgagaaatccattctggaaatagtaactaacaatcagtttttacttacagctgcttccataggctcatgtgacattcaaatgacaattaatgttttttctcctgtagttttttttcttttttgcccaaaatatttattttgaaaaactcggccgggtgtggtggctcacgcctgtaatcccagcactttgagaggccaaggcgggcagatcatttgaggtcaggagttcaagaccagcctggccaatatggtgaaactaaaaatataaaaattacccaaatgtggtggcatgcctgtaatcccagctacttgggaggctgaggcaggagaattgcttgaacccgggagatagaggttaccatgagctgagatcacgccgctgcactccagcctgggcgacagagtgagactccatcagaaagaaagaaagagagagagagaggaagggaagggagggaagggtgggggggaggaaggaaggaaggaaggaatgaaggaaggaaggaaggaaagaaggaaggaagggagactcaaatattaattctaaaagagaggaacaagtccttgaacactaccttgatcactggaatctctgctggaaggaaccctcttaattttggaaataatatgtgttagaatgtactagtgagctctgctcttcagttttgcattttaagtgttaaactctaaatctaactgtctatcatgttttattccataagagacgtatcagcacatagggaaatagtggtaggttataggatgtaatagaaattctaatagactgtttaacaataatatggcaggcagatgccattttaatcagcattgtcattaacaactatcaatagagaggataagatgttcttctctttgtgaattatgatttatggctggcacagcagtcacgctgaagtatatttattttacaatatagagacattgattaaatgcacatggcatctcaaatccagttgacattttaagtcaaaattattacagacacacagccattcatttaagctgttgctttaaaaatgtgtctcaactgattgttaatggaagaaagtctagctgggccaatatttcaacaacttgttcctttattttgctgatatacatacactgggggaaagctgcctcttttggccataccatttctggtgtataggcactaaagagaagaatactctcttaaatacatacactcagggtttctagaccactcagaaagcattctcttactagtgtaaaattattttttgttccctttccatagttctccctaccttctctgaaaatcttgctttctagcctaacaatctgcttaggaagtaggtcttaaataattgatgataactgtagctaaaacattaatatagtttagagatgatagtttttgtaatatatgttgccaatagaccagccacattaaacaataaaagtgtttgagtattgattgttgatttacaagattgaaggaaatagtaattgtgtctgagagtatattctttgattcattttcttatttatgtctttttaacctcaaaacttagatttttttaaagtttgtattatgaaataattttagacttacagtaaaagctacaaaaaatagcacaaagaatttccttataccttccgcccagattcctcagatagtaacattttttctgaattagctgtagcattctctctctctttctctctcttcctctctctctttccctctctctctctctccccccgcccatatgaatgtatatgcacaaatgcaggcatgcatgcatttttctcttaataacttaacagtggttgcaaacttgatgtctttttatccttaaatgtactttgaagctaggactatcactgtatcattttattatacttttgagataagtcaagagttggcctcaagtaaacctcaaaatagcaaaatcagaaattacaaacaaggaaggtggtaatttcaaatatgattacaagtcaagaaaaccatttttgtggggtttatcactatctaatctaaaaacataaattaagtcagtgttgactcctggtaaatgagtacagatttccaagagcgaggtgtacttctttgacaattaatgaaacttcagaagtaaacctctgtaaataggtgcaaatatccttgtgataaagcgtcagtaaccattaaatttggtgcagagtgcttgaatgaaatggtgaacaggaaaatatcctgcttgttattgttaaaattgtgctgcagaaggatccttagaaattgaataccatctctttctcagacttgttatattttccattttactgcaaatgatttattgataagactggagggaaggctggagaagccataccagtctttgatcaccttaggactttttcttttcaacacctattcatttgaaaacatattttgaaaacataaatgcacaaagataaatgtattatgaaagttatagtggattcatccaagaaatttatactttgcctagtcaggaagagtggtctggagaaacagagcatactctgccagtctttttatttacatctgttaggtagtcggggtgtattatgttggagtgaccactccaggtcaaagtcttgtgtcttgggaaagaagatgaagcacagtaatacaggttaggtgtagctggtggagggtgttgggatgcatatctgttgaggaccagcactttattaagtccccaattccctgaacattcacgccagctcttacaaaaaacaaagcagtagtatccatgtgtgttcctcatcgctggcctgtcccaaaattttatcaatgtgatgataacaacactcgtgcacatgaccacatattgctgaatttgtccatatagctaactggagatagtttgattctgggtgaaacaaacaaacaaaaatatgaaggagtagtaacgttctacagaatccttttcttccttctctgtgatgagatttaattagatagagctgctgaaatctgttctgtgcttgtgagttaaatatgtctttgaatgtctgtgccccaaatatctcccatgtaaaatataatacaactttatgaagcactttgaaactttcagccaaaagaaggaacgtgtgttgttatatcattattaacacctcttttttttttttttttttttttttgatggagtcttgctctgttgccaggctggagtgcagaggcatgatctcagctcactgcagtctccgcctcctgggttcaagtgattcccctgcctcagcctcccaagtagctgggactacaggcgcccaccaccaagcccggctaattttttgtgttttagtagagggaggggttcatcttgttggccaggatggtctcaatctcctgacctcatgatctgcccgcctcagcctcccaaagtgctgggattacaggcgtgagccaccgtgcctggcctaacacccccttttaacattgttaaaattaaacaggtagatagcactgtaagtgttttaagaatgtggatatgtcatcacttttacagcttaactgtatgctatcagggttaatggtaaagacaatgtctagaaaacaaaccttatgtttccatgttcttggagaatccacgtgcagttacacagtatttatgaagcacatgtagagctcaacttctaaggtacagtcctgagattacctaaaaattatgtacagaattttaattatgagtatgtgtatttttgtggagaaagaatccataatgtttttctaatacgcaaaggggactatgaaaagaagctaaggaccattagataatgtaatctagcctctgtagactattgatgttccctacctgacaagtggctgatgttcttattcagccctctgattctttccactaatgtagtcaacatttagccctgaaggatacaaatctctgtcatgggagtaaaaatgtaaccctctgtggaaggaataatgagacataagagtgtctatctcaacacctttcatgtctcagggacatcttcgggataaatcctggtttggagataagtgcagtgttatgtctactgcagaagggtgtttattaaagattgtcttctttctagtactctctagctagatcccatcaagtgtaaaccaaatatagccctccccaacataagaattatgtttgtttttggtgaagacttttaatgtttgtatttacccatgcttttccaggatatcgtcaatgctgaggtcttctctctgctgtcacaactcagaccaaggaaattttaagtatgtttagatactttcttgagtttcataccccaagactgtattacacaccttcttttgtcaggggctttacagtgtctaacatagctaggctgtaatatcatacctggccattaggtgttgctacgtcacacactatgctgcaaactgaaaaatgatttagtttagaatttaagaatctgtaaaataaattcttctattacttttttaaatttatacatttaacatctttaatataagtgtacttgaagtaagaagtgggtatgctaaaataaataaaatatatagataaaggttacccatataatttcagtgtgattgacaatttatgcttagcctagtagaacaacactcatttttattaaaataaaagattaatacttctttaaaaacaaggatgtcctatttgatgcaaattactgttcaagaaagtaactgaaatttcctttcttgaaagggcaggccattagagatataaatagagttgcaggttaatatatcaactttctctttaaaattagtaatgtttaaaaataaattgtttcatttccacctagatcacttcctccttcttgacactattccagctgtcatattctgtgatattgttctctcagggcattcctgttagctttctggcagctactcctagctattcatcttattaaaagttgtcattccctatacctctatacccagtcctcctctcttctaaccctcctctctctttctctgggagagaaagagagtctgtaaaccagactccacccagactctggactcataatacatgatgcttactaaacggttttcccagatggtccgtaggtaccccaaaatcaacctgtatattatagaattaactttgcttgtttatccttaccaaggctatccaataaatcaagaggatgctgtgtccttttctctcacctgtgaagaccaatccatcaattcgttaccaagttccacaaattctactctctaagaatctaaattctctctccatcttcactgcacttccttagttcaaattctcctaatttctccccaaattaaagcaatgaccttctgaatagtcttgatattctctcccagcccacttactacagtactgcccatctgatcttcacaaacatatatttgatcttctaccaaaatttttgctgtggtttcacagtttcttgaagagcttagatttctgaggtgttatacaatgttcaacctttatacttttatgctgccatagataagtacataaaattatcataatgtgccatgacagcattaaggtagtcaatgccttgggcttttcatattccctgtgactacaatgccctttccccatccttcaatccacactaaccccgtggtcaactcttagtgatgcttaaatgctgggttcaagggttctttggaagccttgctgacaacaattctctccacactcagtactgataaagatagtttactaatatcatctcattgtttattagtagtagtagtagtagtagtagtctcagagtcttcctctattgcccaggctggagtgcagtggcgtgatcataactcactgtagcctcagaccccagggctaagtgatcctcccacctcagcctcccaaatagctgggattgcaagtatgagccaccgtacccagcttcatcctattattttgagtaattagacatcctatctagtaataagataagtaattttactggtgtcactttggaggtaactggcttcagataaggttattgaatttcatagtccattatttcaatttacctacaattatcagggcaaatatatagaaggaacaaaattgaaaaacaaataaaaataaataaaacaattgtgagagcaaataaacacaaaaacatcctatcatcgtagacttcattgcctgtgtatcttaatgtgaatatcatgtactgttttatcaagctttaaatctgaggaaatggaatctgtgaaaactgcctaatttgttaatttgcatgtgaagtatactgttaccagggaagggtgaaaaacggatttggcgcatgtagtttactaactctgagaggataactggtgttagtttctgctgctgtaacaaaattgatttggcctttattatacctcctattagaaaattactgtgaaaaaccgcatactgaaaatgtgagagcgctttgtaatgaagaatacattttatgtagcaaagcaggaagcagtgacaccaagtcttaatgacactttatattctgccagtgtacttagacacaactttctcaactgcataatctaaagtaaacaaaaatcttattccattagggacacaatttgacaattgaattttttggtgaacttttggcatccattgaaagaattggctgcaaccccagagatggggttaatctttttagggcatcattgcctggaaagtggaggagatgaccaagtcaggctctaggagtaaaagcattatctctatgagctagaacgaaggagttattcaacagttatcatctctatgaccactttttattcaattgcaagagcacagaaaggatattattttactcaagaaaattggggaaaaaatttacaatcttagtatgctgaggcttgatataattaaatgattaaaaggtaattaaataattacctttgtattttaataattccctatagtcttaggtcaaatctatgtggaagaatatcacatatcctaatgctgacagtatttgctgtcacatccacccagtttggaaaagggctcttcattaggggaaataagtagtacattcttgtacagtagtaaatacttatcatgtagcaagacagaataaaaatcaatattaatcagactagacaaatgcttctagtataactgaaattctcaagccctaagccctaagtgttctcttcggtgctatttattactaaaacatttgctacttctgacaccaaatagttctgtaatgtagggtctttaacttttgatatcttagtctgatcatcagaatacccagctctatcactgtatgtgttcttagggagaatatgaaaattttatttaaagatcttcagcatatacatgactgctattttcttaccttggcatcccacaatgaagctaatggaaaggtttagcaattctatgctgttgctcatttctccctgaaactttgactattcagcccacaatatgtctacctgtatgctccactgccccacctttatgaagatatggctgtatatttcagcttttcatttttatcgctaacggggacacacctgttcctaatgctacctaagattgtgctggtctttggtacattatagaggtaggaatagtatctaactcccttatattattagtgtttactactttataggtattgaaactgttctgagttctgtacatttgttaattcatttaatcttcacaataatcctatgaagtagccactgttattatacacatttgacagatttagaagctgaaacataaaaagattgcttgcccatgggcagatagattctaaacggacagaactggtaggatttgaccccagcagtctggcgccatactcctccctttttttactctttggctcttagctagctgggcaaacttgggtaactttaagctactcaactgctcattttccttttcaaacaaagagaaagagaggaataagctccacctcatagaattgtggtgagaattaaataatacaatgaatgtaaaatacctcactgactggtacatagtaaagtattcatgttattctttttcttattactatcaagcaatcaataaaagtcagatgaaggaattaactcatggagaggcataactcagaatcactaagttgatccttccagggtccatttttattttttctgttgaaaagctcatttataaagaatggattcagtggtctagcttggcctctttcctgaaagcattacgtatagggatcaagcactcttatgctttcttcattaggctaaagaaaaagctattataacaaaaagagattgcatttctattaaagcaattttaccaccaaattagacattttaaagaatatatagaatgatacatggaatgctatcagttgtcaaaacccccaatatttccaaagcatatatgaaaataaaagtcagagagaaactcattttatcatctttcaatcctaatgccctggttttccatttattgcattatgagattgacattatatcattatctcttattgtcaccttagccttgtaagctttagatgttgctaatgttatggtaataactgctacaatttgcaattttcagttgtattagaccttgattcacttttttaactacctcatataaccatcactgatttttcttgcagataataacccccttaatggtttttataagtaaatatcagtacaaaattatcagagcaagaaaatcaatattagaaaacttcttatattaaaaataacagaaatagagtaatattaaagtaattctaaatattcaaaaatcaaatgcatgagttattttgaaactagtgttagaaatttcatgatttggaacttgctagttcactgttctttttcgattttactacactttaaaaacactgtaacctatttttaaaaagttaaaaataataatacatatgggatcaccacagagctagtgttttttagaatgttttcctgtatttcacacaaaccatctctttccttataattaaaagttgtataatattgttcttgaaggaaccatatcatatgtcttctaaaaggccagtatgttgtgtttttatttcttttggttaaatgggccctaaagatttatcagatattaggaatatgaagtggcacagcagacggtgaaatagtatatcttttctcaaactttttcctcaatgcatttctactaccaatcaaaatcctgcagtccaacctcctgtaggaaattaaatctttgctaaataaccctattggcgaagctcttctatttctcattccccctgctccttctctggcatgccattcgttcatctgataaatatttgttgagcaccaagtatgcacaggcacggggtacagtgatgaatgagatgcacttctacccacagagaacttaaaatatagtaacttgtccctgactaccttatatcactagttatttttcatgtgcttatgtcttacagagagcaaagactacaatttaaaattattttactttctgtatacctttcatctagcaagtgctcgaggcatatttagttaaatgagtgaagtagctcctattcaagagagaacagttttggggcaatgttcacccactcctaagctagaattatcacatatggtaagacattagcacatgccattcgactagcttcttagctcagacagtggatgactttcaaataagataaaatattagatcacacaccatgaagaactcttgcaaggtaactgcagcctcagtgcatctttgtccatctgggttatgactctgtgaaagtaagtgtaatgacagagttgaacagacattcagatgttaagaagcaacatgcggtaggctagagttttgagaaggaattaagggccctcctcattggagtttgcatcctcagaagattgaggaaatatgtataagaaataatcatggccgggcacagtgtctcatatctgtaatcctagcattgtgggaggcagaggcaggtggatcacctgaggtcaggagttcgagaccagcctgaccaatgtggcaaaaccccatctctactaaaaataacacaaaaattagccgggcgtgttggcacatgcctgtaatcccagctactcgggaggctgaggcaagagaatcacttgaactagtggggcggaggttgcagtgagccaagatcgccccattgcactccagcctggacaacagagcaaaacgccgtctcaaaataaataaataaataaaataaatcattaacgtaggctgggcacggtggctcacgactgtaatcccagcactttgggaggctgaggtgggtggatcacctgtggtcaggagttcgagaccagcctgaccaacatggagaaaccccgtctctactaaaaatacaaaaattagctgggcatggtggcatgtgcctgtaatcccagctactcaggaggctgagggaggagaatcgcttgaacctagaaggcggaggttgcagtgagcgaagatcacgccatggcactccagcctgggagacagagccagactccaccccaaaaaaaaaattattaaaatataaaaattttatgaaaatactagaattaatgggtgttggactcttgctagccttggcttgcaacaacagccagccctcagggctgtttgatccagtctccttgcttgggttaacccagaagacagcagggcataggctgaggcaactctagacctgactctgtagctccagggaagcccatcctgtgtgttttcattggtttattttcatttgtttgctcagaggaaagtttcagaaggcatttcttttggggctacattacagcccttttagttgtcatttaaaagagtatgatttcaatttatgacagacaatcaatcaagatttttgttttaaaatgagcctatgtgacctacagaggaagtggtgttagaggtgggacagttcttaaaactggaatttataaacatttcagctttactcccaagacagtgcggagcaagaagggttagagaaaggagaggaaggaggtagggaagagttgggtgttaatttctaaactataatgtggttccttagtcgtttctcctaaagcagacatagttttattgagggccattcatgggcaaacctagaccaaagccagtgacttctctcaaatggatgtttatttctttctctcttcctcgacggaaaagaaaaagcagaaagaacaatggggaggaataggcatgcaatgtctgatactgctttagtgttggcgaaaaaggcagcctccctccacgcccaccacaagtacatacacataaacatatacatgtgacgacatatgcacaaagacagggcaaacacaagtttacatacatgcaggaaaatgggcacacacatacaaacacacacacagacatgtgcatacaaacgttcacagatttacgtgcatataagcacacatgcacatatattccacacacacacacacacacacacacacacgtacacatacacacacactccatagatgacagatcaggtatcaatgatcctagtctcttaaacccctgagcaggcagtaggagtttcccttttcctagaaacctaagccagaagttctcctcacagcctcatctgggctagggtggaggtgtgatgttctcacaggccctttccacccatcttttctgttcttagaaaagcctgtgttgggccgggcgtggtggttcacacctgtaagcccagcactttgagaggccgaggcgggtggatcacctgaggtcaggagttcgagaccaggctggccaacatgacaaaaccccatctctactaaaaatacaaaaaattagctggacgtagtggtgggtgcctgtaatcccaggtactcaggaggctgaggcaggagaattgcttgaacccaggcagcggaggttgcggtgagccaagaatgagccattccactccagcctgggcgacagagtgagactccgtctcaaaaaaaaaaaaaaaaaaaaaaaaaaaaagaagtagagcatttatatttggccaggcacagtggctcatgcctgtaatcccagcactttcagaagctgaggtgggcagatcacaaggtcaggagttcaaaaccagtccggccaactgtgaaaccccatctcaactaaaaatacaaaaaattagcctggtgtggtggtgtgagcctgtaatcccagctactcgggaaaccgaggcaggagaatcgcgtgaagccgggaggtggaagttacagtgagccgaaatcgtgccattgtactctagccagggtgacagtgccagactcggtctcaaaaaaaagaaaaacaagaaaagcctgtgttgatatcattgtaatataaaagatagtattttctgtgggccctctgtcagtctccaactttgcttgcctttttagctaacacccttttctcacatcatctttgctactgtatagagaggtgtatatgttgtgagtgtctttctcatttataacaatccatactcgtaaactgtattcctccatatttcctgaaatggacttgaagtttaaggagaggtgttagagatggacagttccaactagttgaagatctccccaagccccttttatgggagaaaaagagaaggaaggaagggagaaaagaaaggaggtggaagaggagaagaaagaggggagggagaaagcgctctggagagaggaaagagaaacagagagaaatgaggagaaataaggagaaaccaaagaaaatatttgtggtcttctactttttgccattccctacacttttctgttcatcgccacctatcctgagtagtggcttgaggagcttttgaggggtttgagagggaggttgggaagctaagagcattcaagacggcttcccctcttctctccttcatctggattaaatgcatccagtatgaggaggagggtgcagagagctctcccttccctacctacactaaatagtagtgtccacttttcactgaaaacccacagtgtgcaaagtacctagttagggaattgatactatgtttgtctctaatcctccccacagccatatacaaggagggtattattatccacattttatatatgaggaaactgaggcttgaattagtgaggttagtgattcattccttagctgttatatagcagagcagtttttctattttatttttatttaaaagatttaatttaatgagtagtaaacagattaatagaaatgaataatagttaactcgtgaatgtggtttaagtttgtaaagtaaaacaaaacagaacagttttacttagtagaggggttttatgaaagtacatactaccccagacaaagaaaaaaggagagggactgaatctgttgggtaggtgagaggggaatgagaaaagctctgggggaaatactctatacgtacattgtctaatagggtagccactaaccacatgtggcttttgagctcttgaatgtgacaggtctgaattgaggggagctaaaagagtaaaagacacattttagtataaaaaaagaatgtaaaatatctaaacaaattttctattgcttatatattgaaattataatatattagatatattgccttaaaatattaaaattaattttacttgtttccttttacctttttaatgtgcctaatagaaaattaaaagttacatgtgtgactcacattatagaacataaatgtttatacttgattcctaaccaccctgggcttcttcctagtgtggcactcagagaggaggatatagggacacagccaattccatcagagaaattcctcttttgtttgtttatcaaatcaggtttctgatataaacttctttgagggaaagaatctacagccaaaatgcttgacaattctagtcttagaatattttccatgtaccctgaagacgtggaatgagaagaagaaacccagatacctttcttttcctcttatcactgtatcccatgcattaactagaagggccactagatctctctatgattccctctaagatggtggtgggcctgtttttttttccttgttattctggtatgtcaggagttcatcaaaggtatatttgttactgaaattttaccccttttctgtaggttgcagaaatatatttgtgaaagggaatgtcttttaagtattcctaattgatagcatggagagaaccaagttacagatggtctttattagaaattccttctcttttggaaaatgtagacctctttttcctaccccgttagcaacagtgattggaggatgattgagtggtctcttgtggaaatatgtatttacctatgtaaagatcagtttcaactcagcacattcttctttaactggtggactaacctgtaacctctaaagggtgttgacatctcttcagtttataactgtgtgtatgtgtgcatgtgctcgtgcatgtgtgcaagagtgtgctctcatgctcatatttatgtttttaacaataaatccagctgctaacttagagaaaagcttttgaagctactttgtagattttaattttcttaagaataaataataatcctggccatttgaacaacccatccccccaaaatgttagcacgtggtcacatacctgaatgtgcaagatgaattcaattcaagggtgacagaactgatcagaggaaaggtaagaacaaatgcatgctatgaaaaagccattgatttccctgacactaattgtaaccaaaaataacattgtaacctcaaagggtatttgtatgtgtttgttgtcagagggcagatataggaacccaagatagagcccagacagtttcttagttagaatatcacctctgctttttgaagtcttacaatgtttctttctctatggccttttcatttggtcctccaaaaatgagggtctgttgagtttcctctgatgagttttagttgtcctgtggaaaggaggcattctgatgtaagaaagttttgcttatcattagttgaatgcactttccatcctgcaaaatgttaatcctcagatcacaccaaagtgaaggacaaagcataagtgagaacaaactacatcaagtaattctttcctcatgtgtcttttacctaaggcagatgtgcatacttggtgatacaattgacacattcctccctcaaatgtgggtttcatacgtttctccatgatcaaaaaggaaatcattttatcttgaagttgtaagagaagcatttattttaccatccttttaaaggcaagagtatctgaaatttgagataaggaacaagcctatagtttatgcccctcccttccgttcatcctttccaaagcaccaacagttctagaggccatggggatttatatataaataagtccctctcatggaatttataatctgtgttgctttgatccaatccaaatataagcattagtagccatgccactaaataagtcaattccaaacagttatgcctgccccatctttggaacatggtgggaagtctcaggaacagacagcaaatgtctacaatgtccactggctcttgtatatctctaaggcttaccatcatgctttctgaaagtccctgctctcaggaactcactatgctcgttgtagaattgtctagcatgttgacagtctcttttctgtgtgtgtctaagtcctacatgccatgtgtatcatggtacctgtgtgttgcactgaagtgccatgagctgtagtaggaagagctttggcaccaagaggcaagagatatatgttttaaacgtggctgttccaacatgttggatcatcttgcagagccacataacactgaggtttatagagtccattttcatgctgctgataaagacatacacaagactggggaaaaaaaaaagaggttcgatggacttacagttctacgtggctggggaggcctcacaatcatggcagaaggcaaggaggagcaagtcacatcttacatggatgacagcaggcaaaaagagagagcttgtgcagggaaactcctgtttttaaaaccatcagatcttgtgagactcattcactatcatgagaacagcacaggtaagacccgcacaggtaagaaccatcagatcttgtgagactcattcactatcacgagaacagcacgggtaagaacagcacaagtaagactataattcaatcacctcccgccagttcctcccatgacacataggaattgtgatagttacaattcaagatgacatttgggtggggacacagccaaaccatatcagtagagacaaggtttcaccatgttggccaggctggtctcaaactcctgtcctcaagcgatctacgcacctcggcctcccaaagtgctgggattacaggtgtgagccaccgcatccagccaacccttctctttaattaagaatacttctctaagaaccagcctgagtaattttgggtaacttcatatgagtgagaatatatgtgatatcaggattgtgattatcataccatttgaccatgagttcccttttcatctgcaagtcaaaggatagttatttctagggcctttttcccttaaagactggaaagtctgtacttaaaatgagcaactccattcctgatttttacattggacttagaatctctgatcttatttccccaggggcaacatttatgccacttggcttgaatttcttcctctttccttctcttcatttcttcactatgtctgcctttaaataccacttaaggtaataacttgttgcacagttaccattctttatttcttctgcaagagatggtcagatcttctttctggcttccacagtctggtgaatttgggacacattcatttgttcatggcccaaacatttgctaagtgcctattatttcctgagaaatgttagttaatgagccctattccttgctcttaaggagtttattttctaatggaaaaggtaaacaaaagcaggtaattatgttacagtgcacagtaaccattaagaagagatgaacatgtgtgcaaggaccctaaatgccttagctgggtgaagaaaaatggccacttttaagaaccaagttgcaaatgtaggcctaggtgcaggattaagaccatgttcactttgctcattagccatattgtcagtatcttaaggaatacttgtggggttggctctttccttagtggaacatctttatttcttgtctactttttatttcttataaaaaaaaaaaaaaaggtaatctaacctaaccttttctaatgtaacctaacaagtgttattttttaaaagtatttttaggttctttgtgactacatttttgtctttccctagacagtggcttcctaattagataacctgtatagacaattccaaatttagcagaaattcaaccaaatacatgcttcacagtgcaaacaccagcaacacctttcagcaacacagtttggtgaagacatgcctagttgaaagatattttgtgacttgaggtttatttaagctaataagtaataataatttttggagcctgaacagatccccagttttagcatacttacatcttctttatgtctctatgtattttaagtttctaagtaactgttcatagatgtatttggaacatggtttcctagatattgtctcaattccaattcaatatttatatctgttggaaagcacatgcactggaaaaatgttttggcaactgttttcattgactgtaaatcatttattagatagagtgttgttaaagttgaaatgccaaagttgatctaccctatgctctttgactttttggttgttacagataaaaagagattactctgctgagagtactaattttacttaaaggtccttttggtttgcatattaaatatgtcattcagtctctcccaagttaaatagagtgtgccctactgttactttgaagttaaatgaagttattttctgttttggtgcataagtaaatataatcataacttactttctttttgtaaatgaggttaataagtgcttgtgtcaaaaaatagccagtttatgacattttagttcatttattttagatataattaccaaatcagtgttctacttttttcttcaaataacaaaatgctggccgggcatggtggctcatgcctgtaagcccagcagtttgggaggccaaggcgggtggatcaccaggtcaagagttcaagactagcctggtcaaggtggtgaaaccccgtctctacttttagttttaatacaaaaattagccgggcatggtggcagacacctgtaatcccagctactcgggaggctgaggcagagaattgcttcaactcaggaggcgaaggttgcagtgagctgagattgcaacagtgctctccagcctgggcaacagagtgagactccatctcaaaaaaaaaaaaaaaaaaaaaaaaaaggcttcatgaggtgtttttgtcatctgtgatggggaaagattgtagcatccaaccaaagagctataaagaagacagtgttgtacagtttatgtcttggtcttaattctaaacttcccttccaatatgtgcttatggatgttttaactcatttttcgtttgtttgtttccactttgtcatctgttcccattctttaatattactttcatttccagctaaattgttaaactccagttacatggagaatattaccatgggaaaacatcatttaatttatattctatctagttctggcaatagcagtaatacataatgtaacttctcagtgattctcatgtcataatttaactagctttgacttttactgggagtaagcaccctactctggaaaatccatttcataattttgtgtctcaatgctatcatgtagctaatcagttaattgtaattacttctgcttaattcacaagaattctgaaaggatgtataataataaaatattttatcatggaatttgtctctgataaggaagtaaccatgagaaaacctattcaagtgggaatataattctataaacctaacttccaagtaaccagtctttgttgaattatagtgaatttccagatagctttgtgtctcagaggacatgggttggagttctatagctgaaccagcattattttaggtattacatgaggaagcaaccataacaaattgaacaggtggtcctgggaaaataagtctggaaaaagtccagagattggtgggggaagggggataaaatttaactaatggtccaatgaaatgtatactaccctggataggcatatatctctggtagcctctattaacatgtaaaatttgtaaaattcgcttgaagtttactgaatatcattttgtttcaagttgtttcactgaaataatcaaacttgaagcatctcttgatgtaatgataactcaagtttatatagtatttttttgttttgaatatcagttcatcatctaagaaatatcttaagtcaaatattagtctattttaccacaaaggaaaataaaattttaatgatagtaaagttatcaacacaaaataagaagaaatagatcaaatgcagtgttattgtatcaagatttaaaaatataaaactgtgaattaattttaaaaaggagaagtttagtagctcaaatagatttacaaaaataattgacacaactcaggtagtgattgaggtggtttggccttcagtggtttacttctatgctactaaaagtgtggtctgtggactagcacctgagaattggtagaaattatctgagaacccacctcaagcttactgaattagaatttgacaattggttttaactagtttttcaaatggtccacatgtaatttaaagtgttggaggtattggcttggttaaatgtaatgttaattttagtcagtagtgcagcaacatgtctgctaagaaaaataaagtaagcatagatggagttcataatcacatggcatccagagagagataattggacttcctatcctgctgactttgttcagttacgggcgctataagttgtgctttaagaacatgcaacaaggacaccgaccgggatggtgaccaattttatatagagaataactgaagaaacaaaacatttgacctggagaagagaaaacaggagagctataattgctgtgttcaaagattccaaggcctgtcccttggaagacaggggagaaggaggcagaagtaaagcaattaatatagacaataaacaggaaaatgtatctttttaaaatctaagatgaactttgaaacaattatgtgtgtcctaaaagagatcttccttattctaagtagagagttatattgctgaatatttttaagtagagactgaaaaaccactacctagaatgaatccccctgttaaatgctctctaagctccttgtcacaaggtaacaataggagttgcattgaatctatagattgctttgggtagtatggtcattttaacattattaattctgaagatcttatacagtattattctgtataaaggtataaatgaaatagaaaaattcctaaaatctacgtagaaccacaaaagaccctgaatagtcaaagcaatcccaagcaaaaagaaaaagctggaggcatcacactgcaacttcaaaatagactacaaagctaccataaccaaagcagcatgatattagtataaaaacatacacatagaccaatggaacacaatagagaacccagaaatgagttcatatatttacagccaactgattttcaacaaaggcatcaatatacattcaggaagggacaccctctttaataaatggtgtgggaaaacttgatgtctgtgtgcagaaaaatgaaaccaggcccaaatctctcaccatatacaaaaattaactcaaaatgaattaaagacttaaaggtaagatcccaaactatgcaactacttgaggaaaccaggggaaacagttcagaatattggtctagtcaaagattttatggctaagataccaaaagcacaggcagcaaaaacaaaaatagacaaatgggattatagtttactgaaaagtttctggacagtaaaggaaacaatcaacagagtgaagaggccactccactctgggtgaaaatatttacaaactgttcatccaacaagaaactaatatccggaacacctaaggaggtcaaataactcaacagccgaaaaacaaatatccaattaaaatgtgcacaaataagctaaacagacatttctcaaaagaaggcctacaaatggccaacaattacattaaaaaatgcttgacattactaatcatcagggaaatacaaaccaaaaccacagtgagatttcatcttatccgagtttgaatggctatgatcaaaaaaataaaaaataaaaaaataaaaaatgctaaagaaaagggaactcttagacactgttggtggggatgtaaattagtagaaccattatgggaaacagtatagtggtttaaaatctatattaaaattaggactgccatgcaatccaacaatcccactactgggtatttttaaaggaaaggaatcagtatatcaaagggatacctgcacccgcatgtttaatgcatcactgttcacaatagctaagatatggaatcaaccaaaatgtccattaacagatgagtaattaaagaaaatgtggtatatatacacaatggaatactattcagccatataaagagtgaaattctgtcatttgcagcaacatggatgagcctggaggacattatgttaaacaaaataagtcaggcacagaaagataaatactgcatgttcttatgtatatgtagaagctaaaaaaaatgtttaagctcatgaaagtagagaccagaattgtggctattagaggctgggaagcatgggggaaggagagggtagggagaggttggttaacagactcaaaatcatagcttctgacagcactgttggttaaatgtggttaactacaatttattgtatatttttcaaaaacctagaggagaggattttgaatgttcccaacacgaagaaatgatgcatgtttgaaatgatggatatgctaattaccctgattttgtcattatacattatatgtgcatattaaaatatcactctgtattactcctaaatatgtacaattattacacatcaactaaaaataaaaggaaaaataggtaaataatatataaaagatacagtaaaaatacaatattataatcttatgggaccactgtcatatatgtatgtggtccctagttaatcaaaacagcattgcatatgactgtatttctccagttttaaaaattactcattgttccatctgggcatggaactgtgtctgttttatccactgtctgttgtatcctcagcctctagcacagtgtctgacagaaaatgtttctgtatgactaaagggaggaaggaatagatgggagggaagattgaattcattagtatattcaattaatatttactgattgtctttgatatgcaggcactctgataggcattaggaagatgtaagtgaacaaaacagattaatatcccgtctctacaatttaatttttctgtggattagtttcaataacctataagtagtttatacagaaggagaatgaagaacaagaatcagatgtctactagagcaacacatctttaaagaagtaaacagcttccaaatatctcagagcaaccagaccaacatgaagtatgttgaagttgacataaaatagagatttcatttctttgttttaaaattaccttgaatatgaagttaaaactcttcatgtgttataggctgatgaaaagcttagacaaattactaaaactttggagactgcaagactccaaataggagcaacatgaggtagagcagcatatgcagctgtatgaccagagaatttctgagaatttactctgatttcattgtcagtgttttatgttgtgatttctttgattacatcatggtattattagtgatgttttagtatttaatattagcactactttgacctgaaaaacgtgtcctaaaataccttattttacctgagttactgtgttctttgaaccttattccatccaggtgtcaacatttttttctcatcaccatgcatctttgattttataatgtaagtcagtgagaaaacaagattaatttaacggaaaattgctttccacaatcttttctggaatctcttttgtctgttacccaggcaatatctatattattactttgtcctcaaaagcttttaccaatttggcaacacagaatgactaaatctcttttcctttatctggcttttcattaggaaggaaactcccaaaattcatttctatcagcattatcctcaatgctaaatcttgtatgtctcaagtctgtttataataaatatcctcattatgactaaggtcgtcttacttctctgcattacttcagtttctaatgaaagcaatgcccaagtgactaagtggatgaagcccccgactgtaggaaagtgttcccatcaaatatctcctaattgccctcaatgaatcagcttcaggctcagccttatctctggcaccttccccagctttgtgttgatagccaataacatgtgctccgagcacgaaggggataaaaatggtgtgactcttagaaagccagccatagagtggagttagggagctgtttagattcttgacttcatggtcctgacatgattgattttcaccaatttgccttcagacacgctttgctatcattgcttcaaacacgtaacttcagatcctacagggaaacttgtgctccttcaattgtttctgctgccttacacataggtcctgtgttaagacatcttgtattcatcagcctccaatggtaactttaggcaagtaacataagcactttctctgaccatctgtaaaattaagtagtaactacaaagcatctgacacatttcttataaaagcacagtccagtcaccctggcctggctcacagctgtggagaacagcgtgcttgtgtctgagcctcctgacgtatgttttcttttcagtccctctgccccctgccttccttaccaccaccccccacccacaatatcttctctttctctctttaactagttctcctccaccctcaccccctatgcctgaccctactcctcacacctgctttggccccatataatacaggatgttttaatatactatgtacatggaagaaaacggaaattgaagttgccagccatgaactttcttttcttttcttctcttttaagtgggggaagagtatcatcaacagcaaggaggctattttcttagtgacagcagaaaagtggtagggggttagggaaagaacacttaagaaattagagcttccagcggatacatggtgtttgatcttttaatggtgttgctgctgggcctggtatatattttatcatgggagatggttagaaatctgagctttgaaggtgggaaatgtgtcagttggtttgtgttgtgtgtgtgtgtgtgtgtgtgtgtgtgtgtgtgttgtaacacagagtacgccacagagaccaaaagccgtggaactgttaaaagacagagacatacaggcatgtggatatggagtggatgaggcacacagacacatattaaatgagaacctactagtgacaccctgaagagagaaatgaggtaaacaggcatgatactggagggagagggatgatagatcagtgaaatgacttctatgcttcagccttccagtatcacacaggctgtgagcaactcacagactatcaacttatgacatcaactccttggcatgactttggacacagaattcatgcagtctccacctgtcccaggtagtccttgattttgtgtgtctgacttcaacccttttctatgggcattccctagaaatgcggaacatactcttcaatacctcagctaacaaatgagcatttctggttctcacccaggggtacatactgggagccaccggttttatttctgtactgtcagccttatggtctttccagtagagtttatgtatttatttgaagcttttagggcattttgccctcacttaagctaattggactatatgtgaaattgcgtgggtatagcgggggtagaatgccaaagaacaggcataaagaaaatgttctgaattctggaaatatattctaaaagctcacgtctgaaagttgggtaacgaggaattttatcttttaactcttcctcccccttcatagcatttaacttttgtttgattttcacattcaaaaagaacaattttaatgtatttttcagaactaccaacagggccagcataaccatggagctgaaaacagatggtttggttttgcaaaggagaaaaagtgatatcttttcctcacccatttgcaaggttcatggttgagatccctaaagcaaaagacagattaacaagagaaaagcatacatttagtatacattttatgtgacacaggagccttcagaagtgaagacccaaaaaaaacaaggaaccttatgtacttttatgctaagtatgacgaagtggacagccttggggaaatatgattggacaaagagggtatgatctaatggtaataaacttgggggtacttagcaagacctctttgctcagattcttctctttgtccctgtgtcttcagaaaaatggatgtctctttcttctgggtataggagatatctctcgaatgagaattttatgaccttcttcaaagaaaggtcagaaaaaacatttatgtcctgcttaaggagggtgggaggaggtcagagagaccttcctgcttctgctgtttactcaaggtgccgtattttgaggtagcatgtcctgaactccatcagttgaatgtttatatttgaagttagaacctcccccagtccatgctgctaagttcaccccctttccctatctcctcatgaccctagagaatttgaacaaaaaagggtccagtttcaaagacactgagcataagagaaagtgaagctggactgaaaccagggaatcaaataaaaatctactcccagtatattctcttcagaaaattattctctggagaaactgaatagtcatagagaaatgagctacagacactaatagtgggagctgatccaacaatacacctggctcaccagccagttatgctatagtgaggctcattaattaacaagacccacccatgtccatagaaagtctaattagccttttagtggcacatgttaacagactgaaaaataatcatggatcaccaaatatttgaggaagttctcttacatgaaagggactaaaattaaaaaaaaaaaacgatacatgaattaagaggcaatgcacaggctaggcgtggggctccagcctataattgcagctttgggaggccaaggtgggcagatcacttgagctctggagttcaagaccagactgggcaacatggtgaaaccccatttctacaaaaagagtacaaaaattagccagacatagtggtgcacatctgtagtgccagctacttgggatgctgaggtgggaggatagcttgagcccaggagtttgaggctgtagtgagctgtgggtcacaccaatgcattccagcctaggtgacagagtgagaccctgtcccaaaaaacaagcaaaccaaaaacaataaaaaagnnnnnnnnnnnnnnnnnnnnnnnnnnnnnnnnnnnnnnnnnnnnnnnnnnnnnnnnnnnnnnnnnnnnnnnnnnnnnnnnnnnnnnnnnnnnnnnnnnnnnnnnnnnnnnnnnnnnnnnnnnnnnnnnnnnnnnnnnnnnnnnnnnnnnnnnnnnnnnnnnnnnnnnnnnnnnnnnnnnnnnnnnnnnnnnnnnnnnnnnnnnnnnnnnnnnnnnnnnnnnnnnnnnnnnnnnnnnnnnnnnnnnnnnnnnnnnnnnnnnnnnnnnnnnnnnnnnnnnnnnnnnnnnnnnnnnnnnnnnnnnnnnnnnnnnnnnnnnnnnnnnnnnnnnnnnnnnnnnnnnnnnnnnnnnnnnnnnnnnnnnnnnnnnnnnnnnnnnnnnnnnnnnnnnnnnnnnnnnnnnnnnnnnnnnnnnnnnnnnnnnnnnnnnnnnnnnnnnnnnnnnnnnnnnnnnnnnnnnnnnnnnnnnnnnnnnnnnnnnnnnnnnnnnnnnnnnnnnnnnnnnnnnnnnnnnnnnnnnnnnnnnnnnnnnnnnnnnnnnnnnnnnnnnnnnnnnnnnnnnnnnnnnnnnnnnnnnnnnnnnnnnnnnnnnnnnnnnnnnnnnnnnnnnnnnnnnnnnnnnnnnnnnnnnnnnnnnnnnnnnnnnnnnnnnnnnnnnnnnnnnnnnnnnnnnnnnnnnnnnnnnnnnnnnnnnnnnnnnnnnnnnnnnnnnnnnnnnnnnnnnnnnnnnnnnnnnnnnnnnnnnnnnnnnnnnnnnnnnnnnnnnnnnnnnnnnnnnnnnnnnnnnnnnnnnnnnnnnnnnnnnnnnnnnnnnnnnnnnnnnnnnnnnnnnnnnnnnnnnnnnnnnnnnnnnnnnnnnnnnnnnnnnnnnnnnnnnnnnnnnnnnnnnnnnnnnnnnnnnnnnnnnnnnnnnnnnnnnnnnnnnnnnnnnnnnnnnnnnnnnnnnnnnnnnnnnnnnnnnnnnnnnnnnnnnnnnnnnnnnnnnnnnnnnnnnnnnnnnnnnnnnnnnnnnnnnnnnnnnnnnnnnnnnnnnnnnnnnnnnnnnnnnnnnnnnnnnnnnnnnnnnnnnnnnnnnnnnnnnnnnnnnnnnnnnnnnnnnnnnnnnnnnnnnnnnnnnnnnnnnnnnnnnnnnnnnnnnnnnnnnnnnnnnnnnnnnnnnnnnnnnnnnnnnnnnnnnnnnnnnnnnnnnnnnnnnnnnnnnnnnnnnnnnnnnnnnnnnnnnnnnnnnnnnnnnnnnnnnnnnnnnnnnnnnnnnnnnnnnnnnnnnnnnnnnnnnnnnnnnnnnnnnnnnnnnnnnnnnnnnnnnnnnnnnnnnnnnnnnnnnnnnnnnnnnnnnnnnnnnnnnnnnnnnnnnnnnnnnnnnnnnnnnnnnnnnnnnnnnnnnnnnnnnnnnnnnnnnnnnnnnnnnnnnnnnnnnnnnnnnnnnnnnnnnnnnnnnnnnnnnnnnnnnnnnnnnnnnnnnnnnnnnnnnnnnnnnnnnnnnnnnnnnnnnnnnnnnnnnnnnnnnnnnnnnnnnnnnnnnnnnnnnnnnnnnnnnnnnnnnnnnnnnnnnnnnnnnnnnnnnnnnnnnnnnnnnnnnnnnnnnnnnnnnnnnnnnnnnnnnnnnnnnnnnnnnnnnnnnnnnnnnnnnnnnnnnnnnnnnnnnnnnnnnnnnnnnnnnnnnnnnnnnnnnnnnnnnnnnnnnnnnnnnnnnnnnnnnnnnnnnnnnnnnnnnnnnnnnnnnnnnnnnnnnnnnnnnnnnnnnnnnnnnnnnnnnnnnnnnnnnnnnnnnnnnnnnnnnnnnnnnnnnnnnnnnnnnnnnnnnnnnnnnnnnnnnnnnnnnnnnnnnnnnnnnnnnnnnnnnnnnnnnnnnnnnnnnnnnnnnnnnnnnnnnnnnnnnnnnnnnnnnnnnnnnnnnnnnnnnnnaaccaaacactgcatattctcactcataggtgggaattgaacaatgagaacacatggacacaggaaggggaacatcacactctggggagtgttgtggggtagggggaggggggagggatagcattgggagatatacctaatgctaaatgacgagttaatgggtgcagcacaccagcatggcacatgtatacatatgtaactaacctgcacattgtgcacatgtaccctaaaacttaaagtataataataatttaaaaaaaaaaaattcttgcagaactgtattagctatgtatgggagtacatagagggcaagaaacatcagacagccaaatctttagctaccatgatagaagaaaacactaatgatgaaactttattacaaatggcatcataagctcattttctggaagcatgagtatcagctaaaagatgtcaacacgtttgcctcaagggagcaggcctcagaatggggtgggggaatgttgcctttagcacattttaactttcaaaattgtgaattatgtgcatgtattattttgatgaaatttttctttttcaaaattaaaaaaaatttgtattaaaaatttaggctgggcgcggtggctcatgcctgtaatcctagcaggttgggaggctgaggcaggcggaccatgaggtcaggagatcgagaccatcctggccaacatgatgaaaccctgtctctactaaaatacaaaaaattagccgggcgtggtggcgcatgcctgtagtcccagctactcgggaggctgaggcaggggaaatctcttgaactcgggaggcgaaggttgcagtgagccgagatcccgccactgcactccagcctgaacgacacagtgagactccgtctcaaaataaataaataaataaataaataaataaataaatacatttcatataaatgcagattcctggcttctcctagaaaaattaggctgcctggcccccctggagccatattccatctgacaatatggcttgcccatttagctgaagcacctgacctccagcttgtcatagtctctaccttgcctccttgcctccccacagctgaggctcaggtgttatttagtattgtgattattcagttatcttacttgtttcagggttgaggaaaaaaggaaataattttatgcctacatcaaaattgggacaatcaaagaggttccaagagggcttcatgcttcccctggcttactgtgctaaggtaccttccaggcttctatgggatttaagttttctacctaaaattcctgatgatatagtacaagctttcgttagctctgttatgagcacaaagaccatccttcatatggtcacctttttataagaagcttataaactttgtcaccctgcagctattccttctccagattactgtctccaaagacttcatttttcatttatgtgatcacacccatgtactcttgatctttgccacatttttcctgtctccacacagtcagggcctgatcaataaggaatgactatgtgttgatgacttcacagctctcacccattatccttcagttcatgcatatgggtgtcttgtctcctttttaaatagcgccattatcctaatggctaatgctcggtgggtggccttctgtaactcttgtatatttttctaccatggctgaacacagtacatttccatcttgtgtttatgcacttgggttttcttttgtaagcacattgccttccacttatttccattaaatttcatattccttattcaaaaacacttctccaaattggtcaaagtaggttttaattttcccactgctgccaaaggtgctggttacctctcttcaaattgttgtagttatcacactttataatgatactgttttatcattcaaatcattggttcagaaatgaaattatatagagtctatggccgacctctgtagaacactggtaaggggtccaactcaagatgatcagtgatccattgaaaatggtggttgtcttctttaaaaaataaaaataaaaataaaaactttgagtaaaataaccccttaaaattaagtagttatttgcctgaattaagtataacctgtaacttattgttaagtaaacatggttaagctaacctttatatgaatacccaggctgtaaaaatttatgctatttggtagtcttggaaatacaaattccaaatagcctgaaataagaagctacaatataatgggaggccagtagttaaaaaatactgccacagtagaaggggtgaagtggatcaggaagaatcctaggatactttacttagaaccctttgtacaaacagcatgaaagtaatgagattaatgaaagatttttttgtcaaatttagaagaatctgagaaacaaactgcaagttttccatttcatttgatgtcttggcaaacctactgatatgtgtgttatttgtctctgtcttcttaatatttgctaccttgccggttgcctggtgatttaggaagacgtggggagtatttgtaaacaaaggaagcttttcagaagtgggtaacagtagccagagtttgctggttggatcttccaggaagcaggagctgagaaataggagtgcaaaagttttgttgaggggcattacctggggaagataaaaaagggaggaagcaggattaggcagagagccctcaatcacagggcaaatctgctgagtcttggccagctcaacaggagctcccgaccaaagatcccctgttctaggagctcaacactgggcagaaaacagccaggtcctattgcacccactgtgctcaatcatgaccgagagctgcctcagaagagtgtggactcaagtcagaagctgaggaggatcctaaaggcagtaagtaagtaatagctacaggctgtgagctctatttgcattcctcacagctgaatgccaagttctttcttgaaggaaaagtacaagcaatatatcttcatcacttgtgcttagaacattttccttattactgaacaacaattagagatgatcttgacattctcctctccgtattctcaatgtttcagcaacatgtgcaaaatccattcttctataccaaagtcacacactcacggaagagatgaagctctcaatacctgaagtaattcccaagtgttggtgaaggagtaagacaaaaacatgcaggattagaatgggcaggagagagagcagatgggttaggaaagagaatcactgaacattgaccctaactaaatatgaaaaggaaatggcaggtaggtgatcaaagaatcaggtgggcaagagttacctaaaatatcggtttcccattcactgcacaaaatgatggcatttgcccctttggaaatggttagctcttagaactctggaaataatagagtaggttgggaattttattcctccagaataatgtctggttttgaaaaacatgcatgctctttaattctcataatactgaatcttgcctttgaattctgtcatttaagtgataaactaaagcagttagataagggagatttttattgtacactggaatagatacaaaatagtggaaagtaaaggataataataataataaaagtcttagatggtgctacaaggtgacttgaattttgagaaatcaaatcaactcaaagaggaaaattcaggtaagataaaaaatatgtatggtgatagagtgtaatcttagcattgatattgtatatgtactggctcattacccactgcatcaaagatcataatgtgtttattatatcatttaccaaatgatagccatttcctgaacaactggcctctcctgcacatccttgtgtgatgtcctttattaataaatgatgcctgtactttggggcagaaagatagaaaaagatatctgaaaagggtctacaggaaataagagagaaattggtaatctccttagcttttctcttttgcactgttacattggctgattgtctggggcatgcaaaatgtatcataggtactacaactaaatcttcaaggtaaaacccagaaaaagtgagaaagagacccaaaccaccattttatatgtaatctcacttggtgtttgtttatcctgcctctccaagctctcctggcatgagataggtctgccatggtcagatagtaagtagcatccaatttgttgtttcttacttcatcaataatttttttcaaaataaactgtggaaagaaatccacttcctagcatgatgcaaacatcactacaacacagggtttcttaaactaaatttaaaaaataaaaaaggaagtagtggttattaattatttatttgcatttaagaacttcttccataagcattttccagagataaaaatcaaagatataattaaacttcagaatgaaagctgaggtttaattaatgagtaggtaacactcagttacctaacatcttcctagtaataaaatataatattaggaaggaaatatgttagccaaaaaaggaaggaaatgtatctttttctttttctcttttttttttttttttttttttaaaaaagaggaagcaaaaggaggagagtgatattgtgtttcagggcatttaatttgaatatatcacttgatagagtgcagacttccctgagttctataacctgtagtgtaaacacacaataaacaggcaccaaaacgcacccaagccaacaccaagcagccagtgggttttggctgacataaggcctctggtttgtggggttcatctggctccccttcagctctatcccaacatatgaatgtttctttagttagatcagtagtctttatatgcctctgttatatcagaaagacctgggtttctggagcagcttataaagattggggtttaggttaaaagcacatcacaggcaaacatgtgttgaacattattctgtgtgtggagactttgaagagcctctcaggtatatgtaggatttggtattatgaggagatgaattggattcaaggtactcaatcttattgccaatctttttcaataagaaaccatctccttggtttgcacatctgtgtttgataatgtgggagaatgtctttgattagactttcagagtaatcattcaaaggcaactttctcctctgctttgccgcatctcataaagttagattttgtacattagtgaggcactgattgcatgaaaataatattggctttatgagagagtataatcttgttcaaattataactctccccgccattctcaaagtactatttttgtgtcagattctcctccactgctgcttttatgagcactttccaaaatagtattttcttttttgtttcttctcctttattgtctttttataacttttaatcatatttttatggtaccttaatagccgaggcaaagtcacaggtggccttcactaaatcatttctacttttctataatcctaatggcagtgaaagaaaagaggtctctgggttgtcccccaaaatacttgtttatatcttccgatgctatttttaatatttctaaggatcaagatctctaccttgtgttaaagtatacatactacccattttgtttggtttcctagcatttgaaaaagtatattcttgacttttctcgtttttaattattattaatacttaatagttaattacttagttcaagttatgctaaaaactaattattttataactttttggcaattagtactcttactaaattttactaattgcatatcaaaacaatgataagagcaacttctaaaaaaatctgtcttcttggttcagtcttgctggttttctcttcaaattaagtgaaattctcttgatattttttcaaaaggtgaatattttctggaataaaatacagagttgaagtgaaatcatggaaactgctgtttgaacaatggtcattaaatgttattctctctgtcaccttgctgtctccccaccacatttatgatgtgaaactaaataaatacgggtacatctttgaaaccggtgtttttgataagaccactcctttgtggagttgtatcagggaatagtctcttaatcccagttggttgcatttttttcctttttatcagtctagatagattgagcctaggtcatctcttttgggcaaggatggtgagttttcagaaaactgaaaggttgccctcaagctaggtgctggagggattttgccaactgcacctggtgctgagtgagtggtagcataagcaatttgggctggagtgagaggcgaggaagaaagccacagccaagacttgggagatttcaggaaataagaatccagctgaccaaataagaaggcccatgggcagggagcagctgggcaccaggagatccaacacaggagccactgccttggaaattggaggcagttatttcatttccggtgatgttttctgattctctatatgattttaactctagaattgctaaaggtagctctgtgagtaaggtgggttgctagcctatcaccagattattaaagtaagtgtaatgtagggcagaaacaagaaaaaaaaaaacgttggcttccagagaccagagactttgcttaaagaggtacctgacagcttctgagggatctgtttgtatacataacatcccagtgtctttctgtcaagctacctgcctcccaggtacacgcgtattgctgaggaaacacaaccaacacccactgtttcaaagaaaaccattctttttggagtagtaagctcttttataaggctgaaatagatgtggagtattttaagatgaatagtcttacatccactaaattctacccagtttactctcattacaccacaagagccttggattttctatgtgtataaagacggtatttgtcattgagcttagtgctttttgtagggtcggcatattataggtttccctcataatgataacagaatcttacatcaagtgaacatggaggactgaatatttaaaccatgtgtgaaggagggaaaaaaaacatagtagagcttttcttttcactgtacagttatggattatctttgctggctggatatttatttcagatttttgtggtttctcatgtcgtggattacagggactcttgtaaatgggtttcatatggtaactagtgaccttgaaggactcaatttttaagataattaacttcacagttctaagtcagatctatgccagtcacagaatgaaataatttctgtttagttatctgggatttcattcggttgattaatacctataggagaagagactatttgctttgatttacatctatatcaccttcaatttaatatttcacgagaaatagaaggcacgaaataaccattttggagcagatacacaggcatcaaatgaagctcttttgatgtgaggtgttggagataaacaggtagtatcaggcgtccatagccttgcgttttactcacccctcatgctttgcacctaaagtgtgctcataactttgcagccatgagccatccccttgtcattttcagcccctgacttgttcctggggctgctgattcatctgttttcattgctgtcatgaaaaccagtctgcatttcatcataaaattcagaagtgccctattatattaggaaagaataaccccccaccaatggccacatcatatggagaaagaaccaatgtttcatctttctgtttttcagaagtctcccccaaaatgttttgagacaaaaatcagaatagaatctgcttaccctcaaagcaataggttttctctaaacaatctaataaggatttgtctagactaacatcctttgggaatttatctacagatgtctttaactcgttactgtgtccagcctgtgccaccacttgggagtaacgtgttccacaaattaactataaaggaaagaaatgaagaggaccagaaggaacaaatgcacaggaaacagtgcaaatatgctcctagacaagagcaacatttgttactgtttattactacttatccagaaagcctttcttaaacatatccccagacctgcactgggcaggctaccccttttctcccccttgatagtgcattagtaccgctccatggaacaaattgtcacagaatatcaaaatatgctatctacttagctaatccctatattgcactcctgagcttagagactaggccttactcatcgtagttccatcaacatgaagcacaatttctgaaatatactggtatactcagtaaattccttaaaaaatgacctctttgtatctcaaaaactctaggttattccttggtacatagaaggaacccaatacatgctttgtcaaagaagtaaagaaaataaaattattttagaattgttgagaatcttggtgatatgactgaaaccttttgtttcatggatgacaagactggggcctggagaagtgaggtcatttgcccaccatcctgcagctagaattaaaaccaaatgcagtggtttaaagctcagtattcttttcactccaaattggtagctgcctgtaatttgctggcattgtagaaacaaaaacatagtgaaaatcaccaaaattatattttacatttataaagtgctttacagtttccaaagcattttaataaacactatctgacctccctgtggtgttatctcaagaaggttaataggggagatagtattcctctttagtatatgaggaaacagggattcagagaagctaagtgacttgcccagagtttagaattcaaatccttctttcttttttcttttcttttccttttttttttttttttttttttttgagacagggtcttgctctgttgcccaggctggagtgcagtggcagtgacatgaacgtggctcactgcagcctcgacctcctgggctcaagtgattctcccacctcagcctcctgagtagctgggaccacaggcacatgccaccatgctcagctaatttttaaaaaatcttttaaaagttcccctggtggtctagtggttaggattcggcactctcaccgccactgcccccgttcagttcccggtcagggaaccaagaaatggagcaggacgagctgcagacaaaacccctcagacagcagattaaagaaggaagaggttttttgggtgcagcacaccaacatggcacatgtatacatatgtaacaagccggcacgttgtgcgcatataccctaaaacttaaagtataataaaaaaaatgaaaaaaagtaaaaaattaaaaaaaatctttttagagctggggtctcactacgttgcccagacttttctgaactcctggactcaagtgaccctcccacctcagcctcccaaaatgttgggattataaacatgtgccaccatgagcagccaaatcctcatttcttgatgaagattccttctctgataactatcttctgatgctgtgagagtgaactgatatttccaagaaaggtgtatcccagagattacaaacagtgaccatccaaaaaatattagaactgcgcagggatctttccagagcattctaaaaatgaagcttacaatagatttgattggctgtgaagttgaaatggggagggaggtaaaccttatgcaggttgttataggatgttaatctcctgggacagaatgggaataggtaaggtgacaactttaaaacaaatcagagaattaagaacatggttaagaaatgatagatttttgtgatcggggttaaaaagagaggagccatctttgatataaaataggactttgtttaacattcttgggaagatacttctcagaatggtgcatctcacccttcccattggccaagagcgtctcttgaatatggctgacttcctggacatgcaacctgtgtagttagaagggcccatagaagtgctcaccattggattaatactttgctgttgctgtcgtgaaaggctttatcatttttgaacagtcccaatgttttcatttttcaccggacctcatgcatgacgtaccagttctggtgaagcaaatgaggctttgccaaattttttctaattaagtgggactttttcctcctttgcaagtgattattccttcaggataaaaaagttttgaaccatgatgcatttgttttataaaatgaaaaccagagaagactgcaaaggtagtaacagaaatgaaaaaataagcaaaaatgataaggccaaaattattatttttcatatctttatgatcaaatatcttttctttatgataaataatcatgttttgagaattaggatttttgaaaggatcaattaaatggccttttctgactctcgcatgttgcttcaactgtgtaaggtgagtgattgatcttttcatattgatagaatggttgtgactgaacaatcatgagagcctgctgtgggtgaagatattggttttcttccaaataatttgcatattatattagtcaattttcatactgctataaaaaaactgcccaagactgggtaatttataaaggaaagaggtttaattggctcacagttcagcatggctggggaggcctcaggagacttacaatgatggcagaaagcgaagggcaagcaaggcatcttcttcacaaggtggcaggaaggagaagtgccaagggaagggggaagagccccttataaaaaccatcagatcccatgagaactcactcactgtcacaagaaaagcatggggaaactgcccccatgatccaattacctccacctggtctctcccttgattcatggggattacggggactataattccagatgagatttgggtggggacacaaaacctaaccatatcacatatttacccagaaatttcagagtcattgtgaggttggtaagtcagtgtgacactgagcaagccactggtgccccttcttgcctaatgtctaaaaattccttttcctactgttcttcttgctgtacatcgataaaggtttatcaaactttgtgttactcctcagttctatctagggatggtgtagccaagaagttgaagaaaattgaaaagctgtttgtatattcagtatttgcattttatatattttatagcatatagtaggataatagagaaaatgttaagattatttttatttttatttatttgtttacttatttgagacagagtcttgctctgtcacccaggctggagtgcagaggaatgatcataggtcacagttatctcaaactcttgagctcaggcaatcctccacctcagcctcccctgtaaaccctaaaagtgttgggattttaggtgtgagccactgcacctggctgagattattttttaaattgatttagatagtatccttcattgagaagctctgctgagcgtacatataaaagaatatcattctggccagccgtgatggctaacgcctataaacccagcactttgggaggccgagatgggcagattacttgaggccaggagttcaacaccagcctggccaatatggtgaaaccccgtctctactaaaaatacaaaaattagtcgggtgtggtagcaggcacctgtaatcccagctactcgggaggctaaggcaggagaaccgcttaaacccaggaagcaggggttgcagtgagctgagattgcgccattatactccagcctgggcatcacagcaagactctgtctcaaaaaaaaaaaaaaaaatagaagacaaaaagaacatcattccagtaacaacaaacacaaggaaacttttggggaaaaagtttttcttcccctagattcaaactattatctattgtttctcatttgcataataattgtatgactgctttccacctctgctccactgtggtgttttctgttctagcttcttataatactgaatttggaccagcatatgtttatctgttcactcattcattaataaaacaaagtattgactacctgctattaataaatattaagcacagtgtgttgtgggaggagagaaggacattttttcctacttaatcataattagccttaaatagttccctaggagtttcgggtgtgtatgttcacactcctttggtgatgctgaagcattttgaggacatgactaggtcttacacacttcggattgggtgttgcacacagaataaagtccatgaaacttcctgagttgaattatatttggaagacaaaaataatttctgtctggcttagagacattaagaacccaaagtctatgcgttagggaagagaaacagtcgacatgggtgcagaagtgtttgtaattaagtgggtgaacttgcttagatgaatgaaaccagattatttgagcagggccaatgatgccagagaaaaagaaaaataccaatggagagtaaaataagtacacaaaatgaaagattctgaagttttggaacgaaagttttagctcaggaaatggaagaatacttgagagtttcatgagaaaaaaaataagtgatagtgatagattgtaattatgcagacttctctgaagtcaaacagagaagggagagtatgagatctgtagtggttattagaagaatgattaagagaaagactatggcttaatgtttctcttttgccaaagatgttagaaagtactcaataacattaaagcagaagaaacagcaataaaataagaaggcatagatacagtgatgtcattgaaaaagcacacagtcattgaatctttggctttggagggatctccataaccatttgtcaacatccccacgcctggctgaaccacagaatcacctggtgaactgttgaaagagattctgacattcctcacctcatatggtgaatctttcaaagatgagaaggatgtaaatttcacataagctgttcttagccctttttggtcccttaaaattaccccattcttaatttttgtctcctgagtttccataaattatctatgtattcatccagcaacttgaaattcactattttgctgttttcagaactgtatacgtgctttcttgtccaatcaccgctactcttttaaaaattgagaccttagcctggatcttctgcatctcttatgtcttctaggattactcaaagatccccacagaagttctgcagtcacatctgtgagtaccttcagtgaactctgataagattcatttgggcctagagacacaaactcataaagcggctagatgctcccttttagttttatcacctctctcaggcttcggttgcttcttaatctgttgttttgtggcttagtgtgaagatcattctcattgatagggaagatggcagcaaacagaatgcttgagtttttgttctctcttactgtcatctgctaatactataatatctgccccaaggggcgtgtgaatcattcttttccttcactctaaacatacgctaacaattccttttattgtcctctgcatttttctcaagcttgagcttattctcagatttaacccttcctgacactattcttacccagttctctcttgcattcgttttagacggtgtgctttcccacccccgtcttttgaataattcctgtttcatcagccacatgccattctttacattcctaccacctcggtggcattttaactcatctgtatagtttttagcatttatcattatcaaaattttattgttgaatgccttgcttcccccttaagacatctttcttgtcttagaccctggtcatggggccgtatcattctttcctctgaacttgtagaaatttgtgcccttccatttttgagaagtgttgtctgtggcgcagcttgctttaaattcgcaaacatttctggatcctccctagacctgtgaaatcagaatttttgaaggtagctcttgaaaatgtgataattagtaaatctataatgtttgggaattatgctgcccagcaatttcattccctgactcttacaaacaccaagcaattctctcaaggtttccatcgctttaactttgctttattggtccagagtaatagctcctctcattagtctcttcaactttcgaaagattaaattgtcagcaagttaataattcatctgttctgcttttaggacagtacaactttggaaaatcacttgaatttctctagatactactatatcttgtctccacaataataacatgaaatatataagggaaatcttatgcatgtactctggctggctaggttgccagtaatctgtttccattagagtcataccataagctttcctttttgtttcctcttttattttggactgagtgcaaagagttgggtgaacagtaatcctcagttcatggctctatcgtcatttgtctatacaaaactctttccctgtttgattttcccctttaatccttaatctatactccttttaccctctgcatgtagtgacttaagtgtttgggatatatccacaaataattagagttgttttgtgtagatatatgtaattcacagaaatggtattgtgctcaaaatatcattgttttcttttttccactcagcattgtttttaatatctctttcacacaattttgtatcctttaatcatattatatagtatgtatatggacatctgcttagcttctaagcaccctttaccgcacaatgacactaagaaacatcctcatacgtgccctgtaatggaactgaggaaatttctctggcttggaatcatgggagccatagaataaatgcattctgtccttactactgccagaaaagaataatagctaaaataggataaatgcattttttaaattttctttaatctttcccgcttgcatttcaaattcatagtattgatatctatttctatcaccaatgcacaagcattctcatttcccaaggtctccatcaatacttggtattgtctacatttctgatttttgtcatttgaatgcatatcaagttgtatttcattgtgtttttacatgaatttctctcattgctaatgagtttggacatcgttttatatggttgttaattcttatagcatctcattctgtaaattctttattgacatcatttgtcatttttgttggatttcttgttttttcttttgtttttttccttttcattatcaagttgcagtcttaatcagatttttcagtggtgtacctcataaagcagagatctttcattttatagtaatcaagtacatcatattattttcattagaggtggttatactttgggcttttaggatcttaagaaatctttttccgcctctatgtcacaaaaaatactttcctacatttccttctactgagctgatagacttacctttcacattttggtctttaatccactcacatcccactctggtttattgtgtaatagaagggtatagaaagccagctttattttttcttaatacagtgaggaaatttttccaacaccaatcacaaaacatattcattcccctgaggagtgcagtgccctggggttggggcataccgtgtcatggccaggtgcatgggctctggggctgaactgcccaggtctgaatcccaggtctgtgacacactagctttgtggcagctgctaactactgcttagcagtgctccaagtctcagtgggctgtttggaggaggaaatgagatgtcccagacacacggaaagcactgtttttgttatttatcaagttcttctgcatatatgaatctattgcagttcttcttttctccactcagtctcattggtgtcttcatttttttttcttgtgtcagtatccatgatagttctccctttctaatatgtctaatatgccttcctcattcctttccctcccttcttcactgccccaacccaggatcacatgctccgttttgcagattgacaaagttgactttgtccgtgtttgttgagttgaacgtaatttggaggaatggtataaggataagaaaaaaaaacttggaggagactaatgcgtaaagcaaatgggcgtgcaacttattaatttacagtgagacagataactgccaaacagactcaggtacttggtttttgtatctgcacattcatctctgcaggacagtatatttggaaagccatttattttagggtcaggagctcatggaatcggagaagatggtagatggaaaatctaatgtcattatgccatacctctggaatcaccccatagtagacataaatttaccttccaaacaaggcaaaagctgtactgtcacccagatctccctactcttctggacagtgctgagtacacactgacgaattcttcttgcctaatcctctctctaaccccacccttttatagctctgagcagaatacctcatttctaacacattctctattcagatttgtcaacaccattgcctaagcctaaaccatcttcctacattctagccacaccttgattcaatttctagacccagggttttatcctgccccttaaggtaacgtctttaggtaactaatctcattcagtgtcagtaggttttactcacttaactaagaggacaacaatttttccgagtttaggaagcaatttccattttgcttttctccgtgcataccacttggccacataggatcagttttacacttttatctggctacgttttactctcctctttaaagtcctctctggccaacaagctcctcccaaacacatttttttttctggttccttttatttgcctctaccccactcatcttctccacccccaggcgtggagccaatcttcttatatcttaaattagtccctatttttttggctccttcagtgtctcagagttggaaagacaaagaattgtaatctttagagtaatattttttttagattcaaacagctagacctttttctgaacctattcaaacccatttgctgtaggtaactgtctaacctatagccctgggcttgtttgcagcatcaaaattcattcccaaagattcttgctaaaagaagctggtgacaatgaaaagtagtcactgctgactcagatgttttatatcaattgtttttctgacttgacatacaaaattgagtcacagcattaaatataggtattattatacaattaatgtcagagcaaaataatagcctgctttattttgattttcatgtttccattgtacttacagctatttatttctgttgttcaatcatagcttactttgacttcatgttcaataggttctgcaacaaatttgtagttaaataacattatgtgtctcatctcaatcagtcacactgctgttagttcaggtaaacagacaataatgaagtaggcagggcaaagaatgtgtgttctgttccttggagagcatcttgagaggcataaatgaaaatgcccccagctcccttttgttatttttctataccaactgaatttggaaatgtgtaatctcctaggtagtctaacagacataacaagggcctataatcttaatcacatcagtaccttccacttatatacttgctttccacttgtcaaagcagtcaccttcattagcttgtactactagtttatgtgacataaattctgcgagattggtaagaatgaattattattgcattttggcaatgagaaaatgaagggcagaggcagattaatggcctgcctaaagttacagggtgctgaaattagaagccggcttgcctgacttctgctcttccactgtacctctacattatattcttggtgatggagctcttctctcagaaaatgctataattcccaaggaccacatttatgacagcgttagaaaggtctagaacaaccttccgtgtagatccatgtgggagaagtagtcttccaccaagtgctgcgactgggggagtcagggaggctctctgccccttgccaaagctgtgggacttcaggttcccacaggcccctctccccttgcagcagggcactggagggcggtattaaaatgctgtgttctcttcgaaatcaagcacaggaagccatcagcaacagctaaaacataactctcattatgctgtagccctgatggggccccagagactaagaaccagggaaaatcaaacagaagtcagagtatcacaaaacttccagaattgagaactgtccccagaagagcaaccacagtgggatgcctggataggaagccaaaggccataggagggtaagcagtggagaggagaggggccttacccgccaaatccataggttttccaagactgttccctttatgcactaggatctaccaaataaagagagtaagataaaggtcaacaaattgactaagacatacgaagcatttagtatagtgcccagcacagagtaaatcctcaataaatgtgagttataaatatctgcttgcaagtaagaaagcaaggcaaaggggtataattgaataagaccagacatagaaattagaactcacccttgggaaaacacacagagaaaaaccgaggagtaacacatgcctctttcttttctggagcctctgtttttgttttgttttgttttcttttctttttgagatggagtctcactctgttgcccaggctggaatgcagtggcacaatctcagctcactgcaacctccgcctcccgggttcaagcaattcttctgcctcagccttctaagtagctgggactacaggcatgcgccacaacgcctgactgactttttttttttttttttttttcgccatgttggccaggctggtcttgaactcctgacctcaagtgatccacccgcctcggcctcccaaagtgctaagattacaggcatgaaccaccgcacccagtctctggagcctcttttcctcccatctcccatgtgtagtgaacacagcgaaggcaccctgagaagccaggtggtcagaggattgacccagcgactgcatctgtcagttctaaaatgaagttgaaataaggaattcctagagatccctaagtaatcaaccatgccagagtaacaggataaagaagcatgttttgcatttgtctattgactttattccaagcgtaaaaacacttagacgtgttcaaagctaaataaacttggaacagagcttcaagactctgaagtcccatagcttagtgacttcctatatgcgcttcctagagaaccactcattttcggattctcctcctcttttttgttagtcttgacgtagataagagacctggcattccctagtgtactgtttcctttgtcccctattgttcaagcctagaaattacatctgagtcctccttgttacaggtgacaaacagcatttgttttgcattttgatgcagccacattctcaggttccagcctgccaagcaaggttggcctgggctggtaatctcccaggctttaatcctctccatcttttatttgtgtggaagctcaaggcattagtcctcttaaaaatctctaagattcattttgttcacaactcttgaatatcgtattacaaggcagggtgtgatttttattgacaattggagtatgcttaaatgaagtgtgtggatgcctcaagaggggccacaaattcccacaacacttaacatgggttctggtaacaaagacacttaacagctaggtaagaatgtcaagtggctgtgactacaataatggaggcctacaattagtttaattacaatacctactcacatgtaataatttctcaagaagcatggaaggttgctcactccactggtagtttttaagtcttttttaccccaaggcctctcttagaaaatctgctgtacagccaggtgtggtggctcacgcctgtaatcccagcactttgagaggccaaggcgagtagatcacgaggtcaggagttcaagaccagcctgggcaagatggtgaaaccccgtctctactaaaaatacaaaaattagccaggcatggtggcaggcgcctgtaatcccagctacttgggaggctaaggcaggagaattgtttgaacctaagaggcggaggttgcagtgagctgagatagtgccattgtactccagcctgggagacaagagtaaaactccgtgtcaaaaaaaaaaaaaaaaattagctgggcatggtatggtggcaggcgcctgtaatcctagctacttgggaggatgaagcagagaattgcttgaacccaggaggcagacatttcagtgagccgagattgcccaagatcgcaccactgccctccagcctgggcaacagagcgagactccgtctcagaaaaaaaaaaaagaaagaaaagaaaatctgctgtagcctggcaggtcatgatgttctttctgccacaaaacacacagcatcgaatccgtttacagacacaggcctgctgtcttccctttctctctgccctccaagtgtcacatcagggccatatccacccaaccttccttttttttttttttttttttttttctaatctacaggaaagggaaaacaccactgagattatttacaaagaaaaacccttatcttaataatagtttgcttccattaaatgtatcttctttggggacttaatctttgtgcccaggcatgttggagacaacagctggcatttatctttatggaaggaaaggcattccaagcatagcgtgttgggactcaagtcatttcttactttccttttattattcacactgatgaatttaagataggcttcagatgaataaattaataaactctgttgaagaaaaatgacacctgcctatatcgccacacatgtgaatcacagggtgccaattcagtagtgttggaaataggatctttccaattattttggagaagggtataggttacatgaccacataaagcagtcagctcttataccctgttgaagataatcagtgacaaaatcagccaaagcaaaagattatccatttatcctatctatctacccacccacccatctatccccccactcatccatccatccgtttatccatccattcatccatccatccattatccatatttatgttggctagagctctgtgggttactttaaaccaatttttttctttcctaattcaacttaggaaacattaaaattagctttacattccataagcacccatacactgatggaaagtggagacagcccatagcgctttgtttgaaggagttagaattttaaatttttcctgaataacctcaatagactaataatcaagtgttgactcaactctcaaatttgctgtgcagtgcttacatggacagaggtgaagaatttcctacttatattcgatgacaacctaatgttttgttctctcagtggttattacagcagcttatatttatgaagtgtctttttctgacgagtttaaaagattctgtaattcactgcattttacatgtggggacccagaggaatagaaatgtcacatcgtgactgagggacagagctaatgccagaacacagctctcttaacttgcagggtattgctttatcttatcatgctacctgtcagcatacagatgacactcaaatctgtctcctctcaagcctaaattcacacttttttttttctttaactgtgactgaacctcagtggacagagcagccaagatatcaggcactcaggcaccaagcatttgaattctgcaacctttgaagttgtatctctgcacctgggggcattttaggtggcctccaggccatgtgccttcccactaataactggtgatgctgtaccgccacaggtgtcagcagcaataactgggcctagcttttagttgctgccacagatgtcctaagggagcggaagctgaatcatcacacttaggtctgggaagctgtaaaaacaaaacctgtgctgaacagcccccaatatctttgtctaccaaggagtctgaactcttttaaagtttcttcttggtaaaagcagtggcttctagaaagacgacctccactctaaaatttctactgataccttcaaatagtgccttgcatcttcaagaatgattggagctgtgttaaaacttgtaaaatttgaagacatttcaaaagaatgcagtgaggacgattaaatgatttgtaaattaatcatttaggacatacaatctccaaaattgaagatgccagccttatttcgtccagagaagagaaagctaagaagaaatacaataatccattgttagtgttgtttatatgaagagtcatgctatgaagggtggtgatcagatggtctccatcctcctcttaagtgagggaaagggagtggaaggaaataggtttaaactaaagcatgcaggatttaagttagataaaagaaagaatttcctgacagtaagattcttaaactccggaatggttatcaaaagaagttttggaatctgcttatctagagaccttaaaaaacactagggattcccatctgtctaaaatggtttagaacagacagccctaaaaggttctcagaggatcggattatcttttaagattctttctagccatatgataaacaagaagattgggagtattagtaaatggccaatcagtaaacatctcaggggccaaaaccaccttggcctccagataactaatctcataatcaccagtgtaagtgggcttgttccaagatttgccaagaagattcttaagaaacccagagtttctcccagtttgttgtcctgctatttatttttgtgggatgccttttctgtgtttgagtttatgtggttaagtttctgtgtttgagtttatgtggttaagtctactgatcctttccccttttactccttttattcttttaatacccaaaccttaacaattccattgttttagttttatgtgatgatttgtaagtaaataaggatggtcactcactgtggtatttatttacgttagcaaaaatggggaagcaacctaaatgttcaacactctgggatttgccacagtaagggtgatacgtctgtgtgatgaaatgcagcagagctattaaaattcaaaagtttgaagaacatttaattacctgaagaaatactttaaatgggggacaaaatagcatacaatactatatccatggcatgattccagtggtggatctttaagaaaatagaggatataccaatactggtgggaaatatggtgttagaatgacaaaggattttgtatttccacttgaaacttttttgagtctcagttgtttgtagtatatatgaatatctgatattatcagatttaaaaagttgtaaaataggccgggtttggtggctcacacctctcatcccagcactttgggaggccgaggcaggtggatcacttgaggccaggagtttaagaccagcctggccaagatggtgaaacctcatctctactaaaactacaaaattagccgtgcatgatggtgcacacctgtaatcccagctacttgggaggctgaggcatgagaattgcttgaacccaggaggcagcgtttgcagtgagctgagatcgggccactgcactccagcctgggcaacagagcaagattccgtctcaaaaataaaagttgtaaaataaaaaattcaaataaaagaatagacaatcccctattggcaggtacaaaactaacgttatcattgtgatcttacttttaattacctctctaatatttctaaagtatttgtggaacatgagactggtaggcatgtcgtgtcctcaggcactgtgtctaccttgtaacacaaattatctacctgttctcaattcaggggagcttgggaaaacaaaaaaaaaaaaaacaccccataacgttgaagagctctcgtaactcttctctatgacttgtcttcctcctgactcagggaatgaatcaaaagttagtgtgcttcataacctgtacttcagttctttttcctggcaaaacactctaaaatgtaagttcctgtgttgttaagtttgatgggaccctgttgcatatttcaagtatagatacagctttacctactgaacacttgccctcttttctgtggctgcaagagaaattgggtgccttaaaggcagtattaaaagaatgtgcaactatctactctcaagattgtgtgaaatacattagtaatagtgtgcacagcctatgttgaaatttatcatggacaaattgtgagtgaggattttactcaacactcagttttaccattaccaaacctgctctccagcgtctagtcaccacccttattctcctaattcagacatttattttctctccctagtgtcatgggctcctaactggtctacctccacccagcatctttctcccgtgtcccattttccagtgagagccagcatgatctgtctcacaggctggcacacagctcacctccacacgtagaatgagatggaaattctttagacagcctacgggcgccttcgtgttctgattcctgtctacatgacccaccacatcttcaacttgttctccacttgtaaattctgcttcttcagtctggaactatcctgtaaaaatagagttaaagaaaaatttcttcccatttttcaagacccaggtcaagtcctctaactctatcctgtggaggcttcttcagcttaccacctcaatgctttaacctccctacattacagataatcacagtgtaattacttgtttgtatgactttttccaagtgggacaaggagctgtttaagggcttaacttttacattcttacttcctgtacaaagcatgcagtgcatcagctgagaagtagaatgtttttgttgactagatatgttaacttattaataaaatagagattatatgcttttaaaataaacaagcaataattgagctctagtcattagctagcagcaagtcagaccatggacctaacttctcttggctcatggctcctcctagagactttgtccccagagcccctccctgctggactgctcccaagaacatcttttcctcacttccccaaggacgtgccttcagagtgacctagagacccttgcaaacaagttaggggtccagagggagaaaaaggcaggagacacttagtcattttccactttgctttctagttgtcttaatgatgtagtgaaaatagtaatatgttgttttccagaagaacaactcccaaactagtcaatttttttaagtggaggtcatgataaggcaaccaagttttttatttcaccaagtaaaaacataaatgaaacccctcatctactagaaccattgtttcataaacaaaagcatatttaagtattaacagaataggaaggttgtaattgcagaacgtaggagaatcatttcaattaaacaaatgcagtgagatttttatgaagtgaagttgtacctgtttttcccacagcatggcacccatatcctggaccagttcaggataatatgcaatgtgtacctctcgaggaaggcagggatggcctgccaacagcaggcccgggaaagggcaggagtatctcccggctgctcataactgaccttatggatctaccaattgccaggaggaagacacagttcattctgtcctcttcctgatgtttctactgctaagaattgctcttggatgcagtagaggggaacctatatcttgaaagctgaatccgagctgttatttaagaatttctgaaagtatcgacagatgacagtagcacttttaacttggagaagaagagcactttaagtgcattctgtcatcttggttacttactgaaatctgttcatggtagagtgggtggtagggtgatgtttgccttggcttgacagctgtcaactgtctgtgtgtggtttgtcatttgttgcttttggcttgtgggtggtctgcagtccatatttcttgtgtatgtcatttcattcacaagtaactccaggggggcagctgtgggcaccttgctattgctgaagtgcgagcctccaccttctgtgacattgcttggcttctgttggtaccatctcccaccaatatcaaatgcttgacatccttagtcatggaccaatgtttgggtgatttttattttcataattgaaaatcatcttggaaaagtggggatctttcccatcactctattagctaagttttgttgtttcgagagagaaatgaatattcacttttaatgtctctaacatggagtcatttaaaaaataccagtgaagttacagattgctcagccttcagcctgacattgagaatcttaacacatctgtataggaaagttgtataaataaccacacacaatgaaacttgttctgtatggggcctactttctctggtggtggaattattaaatgtggcaggtagacacattcttctaagttttgaactatggtctgtagaacaaagcagcttgtgactgtgatattgtcctgaatgtttgtgtttattgactggccactgtgctgacatggaactaggaagtgggcatcagaggctgtagagttttctgatttgtgtacctatctatatattccaggattatcctccagagaaaataacctatagttagagcatcagtatttggagtttcttccttagaagatcctggagatgatatcatcatctcaaaagcttaaacttcactgtaacccagtcatttgatttggggaagagagggtttttattaagatataattcacatgccataaaattcaaccgtttgaagtgtagaatccagtggtttttaatatattcacagagttgtacaatcattataatcaacttcaggatattttatcaccctaaacaaccactaatctactttctgtcgctctacatttgtctattctatatatttaatataaatagaattatgtaccatggggtctttgcgactggcttctttcacttagcatagtgttgtcaaggttcatccatgttgtaacatgtatcagtacgtgtatccctttttattgcctaataatattctattgtgtgcataaataccacattttatttatccattcatcagttgatggacatttgggtggtttccaccttttgtctattgtaaataataatgctatgaatattcgtgtacaaattttgcatgaatatatgctttcattttcatagatatatatttaagagtggaatttctgggtatatggtgactctatgtttaactttctgaagaactgcaagaccatttgccaaagtgactgcatgtttttaccatcccaccagcagggtatgaaggctctaatttatctacatcctcacaaacatgtgttcttatctatccttgttattatagcaatcttagtagttttgaagtggttttgagtggtgtctcattgtggctttgatttgcatttctctggtgactgtgactaatgactttgaattttttctcttgtgctcattgaaaatttgtatatttcctttgaagaaatgtctatcagtttccagtcatttaactttaggacctgttttcaaatatgaataaatctaaaaggtaaataattggaaatgagaaatgtagagaaaaatgaggaaaaaatttggtttatataaagtttcctcccttttctaatattcttatctactaaatgactctgaatatttatttcttatccacactgcataaaattaaaaacatttttaaaaggccaggtttggtggctcacacttgtaatattagcacttttggaggccaaggcagaaaattacttgactccagtagttcgagagcagcctgggaaacatagtgagacttcatttctacaaaaggtccaaaaatcagccagcatagtgccatgagcctgtaagcccagctactcgggaggctgaggtgggaggatcacttgaatctaggaggtcaagcttgcagtgagctttcattgcaccactgcactccagcctgggctacagagcaagaccctgtctaactaaatgaatgatgaattatttttttaaatcattatttcctctgcttcaaaaactaaacttttagtattaaaaatgtagaggcttgcttttatttcattctgaatgaaatcctttgtcagagggacccagttgccatgtgctattcagggaaagatggtcagttctagtgctgagatatagtctaagatgcaggacctggatgtttttctcagattctttgattctccagggggaatcagaagatgaaaatcaaaccttagccctgtacatttcagaagcaaggaaaggactagtgagaacaccagctctctccactgctctgatcctaggtgtagtcactccatacctgttaactgagtaacagaaggatgcctcctaaaactgcgaaccattttatagagaagatatgtctattagaatttttcaccacagcaatggattatgggtttttttctgtgtttctattcatgcctcttccatgcattagacgagaagcaaaggcagaactattagacttcaaataaatttggcataatggttcaaaccattccaagtgaaaaggaaaaaatcaagatgaatcaaccaattaaagccatagttgaagtttattagtaaaatgtaaaggtatatcaaaaatgaatagagaggaaaatcttaattcaatgacaatatttcttatcctcagttatacttgatactttcatgctacaagaaaagttaatatctagtccttaaatacgttgttgatttttcttgatccgcaactgtgatcttgtttaaacccacttagtatccagtaaaggttgccttcattccatgtgaccacagggatggcttaccccttgctctgtttatgtagaattatgtaatgagattatcatttctgcatgctagaaagatgtagtgtttaaccatttcagatcctcctagcattaaattcatcactgatgtctattttcggtaatctcttttcttattctgtcttctataaactttccatatttacttagcttgcccagtggagagcacacaataactgtcagtagcgatcatgagagtcttgaggattggggaaaagtgcaatgagaaagccaggaggctgaaatagaggtttgaaagcaaaagagaaagagggaaatgtctaagcttttctttttcctatttaaaattaaccacattacaggaaattgaggaaaaatgaaaaaaaaaaaaagatgctctcttcttcataatcccatacaaaacaaccactttattattattattattattttgagatggaatctttctcggtagcccaggctggaatacagtggagcaatctcagctcactgcaacctctgtctcttgggtcccggttcaagcaattctcctgcctcctgagtagctgggattacaggcacaggccaccatgcccagctaatctttgtatttttagtagaaacggtttcgccatgttggccaggctggtcttgaacccctgacctcatgatccgcctgcctcagcctcccaaagtgctgggattacaggcatgagccactgcgtccggcccaaccactttaatttttatatatttctttcagtcttttattctatatattttgcctggctttatataaatcttgtttcctggttttatttaatatgatattatagctaattttttaccccgttacagtcttccacaaatccataatttttcactgctgcataatactccatcaggtggagacaacaaaatttaattagtagtctttagtatgacagagtttgaaagaactctgcttggaaataaaaaagatagattaagagtgtaaccataaaatgaaacaagccaagaaaattaagagagaaaaatttttgagcagaattccttccagtttttcaaaggttagacatgccaccatgcatgagcacaaagcacaatgaagactgagcatatatgattaagaggttagtttcataatcaaataatttaaattattatgatacatttaatgatatgtaaaattttaatagcactttatggtaattagacataaataataaattttaacataggtaaccccataatgtaattagggatgattttacataccaaacaggattctcaaagttcctctttgttctccagtactgttcttataatcgttgtcaatgtcaagtattaccctgacacttgtctcatccaatgatactggaagatatccccccaaaatgaaactttttgtatttatggataaaaattatttaacgtgcataaagtactgtgaaatacaatgtaaagaacactgagataatttggatatattcctgatttcaggtagccatagagatgaatacttcatttattcattcgctcattcattccttaagagaataataggaactaaggctaaagaagtgagtgaggggaagggtcaggaagagccctctgggtcagtgtaaatgatctgaacttgatttcagaggcaatagggagccgacagagacctttcagcaaggtttaaacacacacacatttatacatttttttagaaatgaacatgggagaagtgtggaaaagggactagagtaggagagatttgtggcaagacattgagtcagtaggagacttttggaaaatcccagagaacacaagggcctgctcaaaggcactggcagcaggatggaattgagagagagagagaacgcacatgtttgtaatttaagagattgtctctctactggaacaagctagaagggaggaggaagaggcttaaagaaaaaggtaagttatgcttttacttgaatttgagaagcctctggacagactagaggagaggtcttatttttaggtagtagactgaaacagagaaggggagaaacaagcccttttaaatgttaagaaggaagaggcagaaatgaaagcacacttgtcctgccagcagtacatttcaagaagtatagaatgctagacagtgctcagctacaacaaattgacaagaataggatccaaaaatggacacaggggtcatctgtgaccttagcaagaaaagtttaagaaagttcattgagttaaaacccagacattaataacaagtgtttactgactgttttctatgggcgggcactgttccaaggactttaccgtagattatcccatttaactttccataatcctgtgatatgttttctatcattatctccacctcacagataaaaaacaggtttggaggactgagaaacacgaggccaccagatagataataagaaacagctggggatcaaagcaggcagagtccacaagccaagcagggcctcaccacactaagtaatgggtcggaggatacttaggagttgaggaaacagtgaaaacaagtgtcgacatcccttctaagattccatgggttggacgacagaggctgggagagcagctggcccattacccacccctaggaagaatggcagatccttgagcagcgatgatgtctgaggatgggagaagcccaagcaaacaaacagtaaagtgatctaatgacgtgaggtattgggagaagttggggagggatgaagctttagtctgctggtttctgtcaagaaatctaggggtaatggtggggactttaagcaaaatcatggctgatgtgttcaagtactgcatgcaactgagagtggggtgctgtaggacatgcagtttgatagcagcataaaatccggaatcactgccatgggagatgtaaacgaaagctgtggaggaataagtaaaatcattactgagcagtcctgaggcaagagaaaataaattggaggttgtatgtaggtggctacagcattatgggtgaggtggagggtctgggggaacagctgtaaattgatgggtgtcctgaaggaaagaaagtacatgggtagatggcttcagtgagaatggagaggagtttgttgccgtgttttgttttttaaaaagactggaaaaacacgttctttaagtagtaaaatggaggcaggaaatgctgttacggcctccaagcccagagatgatataatagctaatgttaactgagcaccaaagtatgtattggaactgttctacacactttataacaagtctgtgaaatcagaaccttattagagttagctgggagaatgcacagctcctgtgtgtaaggaccaccagcaaagccaagtttcagttaccataaaaagttggaggaaaggatttagtgaaaggaaatgcaaccttagttagaaggaagagagtgggtagatgttttccctctaacaggaaaacatcagtgtttctcgtcttcacctgaacaaggtttcacctggagttcatggtaaaatacagattctgactcagagttctgattctggaaattctgattcaaagtttgagtgggccttgaactcatttttgaaataagctcctcatgatcatagaagtttgggaaacaccagtaaggggtttaaccaccagtgttagaaactgggtcagcagaagagaatgccagaaatgagggatgagagggagggaagagggaaagaaccagcacccagatgagcctaaaaggatgggagggagatccccagccctatactcaaagataagaggctccaagtctctgatctggtagaagcccacaagggactggagaccagtcctcacaccctaccaactccagtagccaagtggagtctcctggctcacatctttaacaaatgacatgagagcacacagaacatcaggtccctctaatcagttttgatatcgagaccaagtatcacatggtgtaatccaattttttttttttttttttttttttttgagacagggtttcgctcttgttccccaggctggagtgcaatggtgaggtcttggctcactgcaacctccatcttctgggttcaagtgattctcctgcctcagcctcccaagtagctgggactgcagccacgtgccaccacgcccagcttatgtttgtatttttagtagagacgtggtttcaccatgttagccaggctagtcttgaactcctgacctcaggtgatccatctgccttggcctcccaaagtgctgggattacaggcgtgagtcaccatgcccagctggtgtaatccacttttagggttaaaatatgtccttttctgaatcaccacctcaccccacaaaagcaacttatgcctgctaccagacacctaaaatcctttgcagggggaccaagggtccaccaccctctcacagttataacagacttaaaatgcaaaagccaggaagagaggatgcattgaaattccttcacagtacagtgaatccatcaatcaaccagtgtaaactactgatctcagtgccctgaacaggcaggttgaacaaagggattcgaggccattggaggcctgggtactggatacctgttgtcagccacctccctaagggaaacagaggtggaagggaaaaaagaagaaagtttcaagtaagtgtcatttttctttgttttacctcagaaggcccaaggctggcctgtttacattcagaatagaaaagccaacatgagagctgcgtactgaggtattcttactctgccagagcttacccaggcacagcttctcaggagtgcagcttcaccatgctcccagggctggaagttagcagaaaagagacatgatttttttttctttttttttttttttgagacagagtttcactcagtcgtcaggctggagtgcaatggcacgatctcagctcactgcaacctccgcctcccaggttcaagtgattctcctgcctcagcctcctgagtatttgggactacaggcgtgcaccaccacacccagctaatttttgtatttttagtagagacggggtttcactatgttggccaggatggtctcaatctcttgaccttgtgatctgcccgcctcggcctcgcaaagtgctgggattacaggtgtgagccaccatgcctggccttttttttttctttcttttttaaggagaaaagaaccgtctgtggctacttctaaagcagctgctgataggctctgattaagagttatcagtaggttccttcaaagtcttgaatcaggaagccacgaaaaaaactctgagaaaaaatatagaggggagtttgagagggctaaatactgattctcacagactttgattgaaaaattgtactgaatttgaaacacatgagcaatggttgttctcaaaggctccataattcagctacttcactacaaattcactgaactgcctctggttttgcttcaaatccctgccaccaccaaaaatgttagaggcaatcaaataccgggttataattcatggagattaatattgacaggcagacaggtccctcctctctgagtttcatgggattggcctccagtgaacctggacacttgacaactgttaggtgaaatctacatgtgcatgctgaatctttagggacgaatccagaatgtacccatgttccatgattatgatgaagtctaatattattatatttggggtttttttttaaaaaaaagcaaacatagactctgattttgaccagtatattggcaaagagaagatatgagctattattttacattgttattttaaaatataatttcataaatgacttctgtattacccacactctttagcaaaattcactaattagcaaaattggctaattctctgcttactatgtaccatcctagtaattggcaaacaaaaaaagtggcagcatcttatatctctgcattaatacaaattagcaggtattacagtgagagctcttattacttgaatacttgttcttaaaaatatatgtgtggggccaggtgcagtggctcacacttataatcccagcactttgtgaggccaaagcgggtggatcacaagttcaggagactgagaccatcttggctaatatggtgaaaccccgtgtctactaaaaatataaaaattatccaggcacagtggcacgcacctgtagtcccagctactcaggaggcagaggcaagagaattgcttgaacccagaagatggaggttgcagtgagccgagatcatgccactgcactccagcctgggcgacagaatgagactctgcctcaaaaaaaaaaaaaaatatgtatatatatgttaaaaatatatattatacataatatattatatatattatataaagaatatatattatataaagaatatatattatataatatgtaaagaatatatattatataatatgtaaagaatatatattatatattatgtaaagaatatatattatatataatatataaagaatatatattatataatatataaagaatatatattatatattatataaagaatatatattatatataatatataaagaatatataatatataatatataaagaatatatattatatataatatataaagaatatatattatatataatatataaagaatatatattatatattatataaagaatacatatatataatatataaagaatatatattatatataatatataaagaatatatattatatataatatataaagaatatatattatatataatatataaagaatatatattatatataatatataaagaatatatattatatataatatataaagaatatatattatatatattatataaagaatattatatattatataaagaatatatattatatataatatataaagaataaacatatatactatatataaagaatatacattatatatactatatataaagaatatacattatatatactatatataaagaatatatataatatataaagaatatacattatatataatatataaagaatatattatatattatataaagaatacattataatataaagaatacattatatataatataaagaatacattataatatataaagaatatatataatatataaagaatatatataatatataaagaatatatataatatataatgtatataatatctaaagaatatattatatataatatctaaagaatatatataatataaagaatatatatgatatattatatataaagaatatatattatatataaagaatatatattatatatattatatataaagaatatataatatataaagaatatatattatatatattatatataaagaatatataatatatataatatatataaagaatatataatatatataaagaatatatattatatataatatataaagaatatatattatatataatatatataaaaagaatatatgttataatatatatgtggacatttatttgcccatggtatatagtacacacaaaattcacaattttttgtcacaatgacaactgctgctcatatttgcatttcttcaatgcttgctaatcaaaatcaagtgttccataatagatctgctaattacatatgtcgttaagtagtaacttcctcaaaaggctgtgttcaaagtagataatgccaagctttggaaggtcggaaggtactgtatatttatggcttgcatatctactaatttgtctcctctagttttacccatttctgctcgtcatctttaccacttgtttgtactgttttagagtaatccttccagctagcgttaatgccagtcttcccatctccattgcttatgctctagcttcatgtccgtttcctttgaatctagtgatttcccaaccaataaaagcgaacggagagtggtatgtattggtagacaattaaattaataaacctatatctgaaaagctcagaaacatgtagacaatgtatatatttctgtttgggggaggactgcagttaatgagtaggaaaggggaattagtacaaggtctaacaagaaactagagggatgcatcaagcagaacagaaataactatgcatttccttctttaacctttcctaatcatttctctccttttccttcttgttgtttaaaactttttcagttttagactaccagaaatttgcaaagaagtagcacagttttcatatactttttacccaataattacccccaatgttaaaatagtgcgtaacgatggtacagaggaccaaaactaagaaattaacatggttacaaaactattaactaacctacaaaacttatttgaatttcaccagtttttccattaatgtcctttttctgtttcagtatctaatccaggatacaacattgcattatttgttgtaactccttggtcccctgtgctagctatgtgacagttcttccctttttccttatctttcatgaccttgttactttggaatgtagtagtgagttattttgtaaaatgtcactcaatttgggtttttcttaccatgattagattgaggttatgcatttttggcttgaatactgctgaagtgatatactcttcttaggaagtacatgatgttgatgtatcttataactagtgatgttcatcttgatcatttcattaagccatgtccgctgggtttcttcactatgaagttacgatttttccctttgtaattaatacatatcttggggaagatattttgaaactatgcaaatatcctgtttcttttcatgttttcacccacaacttttaccatccattagtggttcttgtcagtagcaatagttaccatggtgtttcaatggtgatttcctgttgcactaattccttctacattcattaattggaattcttatctaaggaagaactatactttctcccaccactaatgtctctattcgcttagttatgtcattatgagattcatggatatttattttattctaagggttataatctaggcctatcatttattttgttgctcagattattcagtattggccactgggagcattttcaggatagctcatgttccattttaacttgtccataccttttgaagaagtttcttattttttggcaccgtgaaatgctgtaagtttacctcataggttccccgccacagcccaggaatgaaccacttctccgaggaagtctggctcctttattgtagaaaccaagatctgagctctaggaatactcattgcttgagtatcattgtttctagactctctcaggaaacagaacctggaaagtttagatagatagatagatagatagatagatagatagatagatagatagatagatcgatctaaactatgtctacacatatctatatttacttccaaatctatctgtatgcacattaaaaaaccatgagtttatactgatacctccaattctaatccaataccacagtaatcattctagcctcttcctctttcattatttgtaacttctttctcatgcagtaagaaagctatctctgactatctgcaatataattatttgttcaaccctcatatattaataaattttttttcagaattgctaatccataccctagtactaagcagagtgcagtacttgtgtacatttctttttgcctttagctttgtggtattttctcaaaatacggttttctaatgatacttagttattttctttctcaagcccttcagtgtggttatgttagttatttgtaataacattagcttcacttgttatagtttgtatatctgtttgggttccctccataccttggttgattgttttaatgtacatacggtgaaattcactctgttgtatacagttctatgggttttacaagtgcaaagagtcatgcatccacagtcatgatacagaatagttccataaccccagatttccccctcacccctcaaatcactgatctggtttccatctctgtggtttcatcttcctggtatgtaatgaatggaaccagacaatatgtagccttttggatctggcttctttcattagcaaaatgtacttggtgttcataggttgccgtgtgagtagtatactgttgcatggttgtttacttccttcttctaacctaatttgtgattcttgcccatgcatctaatgtttatatttataaaattgcccactggcttgatgcttattggattgctcctttgggactctgaaactgacttgaaactatgttttttatctccccttagcacagtttacctcacttcatcttatttactgtggttacttgccacaaccatcagtcattttaacattccaaggagggttacagccaacccttaattatttttggtaagtttgacagagagagaatggataattgaaatcttcacataatctgcaagccttataatagctacttcttcttccctcaactacttaaaggtagcaaaattgactcactttaagttttatatcctttcccttcctttacttatcctctggtaggagcactaatgagtcctcaggtgaccataaaaatggaaagacagagaaaaaggggaagcacaggctgtgggtaatctacataggagataaaaagcctctgagtcactgagaattgatgacactctagtaaaatagatctgagtagggattttgtgtctttgactatttttgattcctatataatgcttggtacttgttgattcaatgatggacttatggtcagtcctaaaagtccacctaaaataatatactcctactcagaaactgccaacctcctagctctattttccttcctagctgtgtctatgtgctctccacggcaaagcctgaggttaatttgtggtatggggagaatcttaattgcattaacgcaggcatttgtaacttaacatacatggataggtatacatagtcttttgggaatctgcgaactcttagaaattataaatagaaatgtatacacatttcctgggagagagaaccatagtttccatcacacttcaaaagtgtaaagcaaacaaaattaaggcctttgaccagcaagatcatctatagaactcctgtaatgctgacatactaaccctgagagccctcatactctgtttctgggagatcttcctttgaactctagaaacattcactagactataaattccttaagagaaaatattgaacctttttttttaatctccagcacctcacattagagcctgtataataggtatttgaaaaatacttcccgaattaatttgatatttttaggctgataggatttcttagtctactgatacaataagaaatctgattagcttatgttgtttgtgagatacataatttagtttgcaggaatccacaaagctttgtcatatatcagttaattagctaataaattaccaaattcaagtgagtttatgcagtactttttttcaagtacttcttatactcacaccacatgcctttctttcctaaatccctgtaaaacctagaaatatattgccccttctcttgctacctgatagagggagagtttgactgatttggaaaagaacaatatgcagtgtgaaatcttaacaaaaacgttttatgttagtgttttaaactttggtacacagtctaaattgcaaaaactgtgtcattatttagaatggacatgttccagcttcgttaatttataaattcctatagagggctttctggaaaaacactgataatccgtatgttcagtattctaaaaaatatacttagcctgagttttggaagcctagtgtgattctacttcatctaccaagtgctacccaatctcttttacatctcgccacgctaatctcttttacatcagataatggtaccattgaaaggtaggtagcacagccccatgctgtctgtgtcatttctgacccccctgactcaacattagttgaggcctaggctagtagctaccagtcagtgaaaagctcaatgagatatacttaaggtagctacattaattaaaatgcatatatacgtacatataaatatataggtatttcagtataccaatactttgcaaactgggatcccacagcctgaatttgacccatgtagaccttatttggaagccacagagtattaatttttaaaaaacatgagccaatatttaaaaatcaaggtatttcactaaacaaatttttaatttcaaaaatatttttaatagaaatcactggctcatgtttaaaactttctctataaattcaagtttcatgataggcttttatatattctacaaatttcttttagagctctagatctgcaattctgcgatattacaaagtctggaatcgtgttttgtctttcacctgtgaaaatgttactgttaatccacatatggtcaacaaaactggcattgagctgtttttccgggagaagtgatggattcatgctgctccatccacatattcttggcaagtgcccttttgaccactggcatgtatttttaagactctctggggttgggaggagagcctgtggtaatggaaaagatccaagttaactggcccacacaggggagccaacccatgaccttgaccccattaccacagtgttctaaccaattgagctaaataattgagtaattgtttcttagcaatctgatcaaatcagatggcttataataagactctgtctgtgaacaagcgtgaggatgtcagtgaacagagagcttaggataaggggaaagttatccagtctgcaggttggttggcattttatatttggccaagtagtcaataaattggactttgtcattatggctaattgcatttctgagcaatgagaacttaccaaaaaaaaatgaaactttaattaagtagagttttttttttttttgaaggattcagatttttcagttcataattgacaacatatgtacaaacaactggggcaccgagcaggagggaaagaactttgtgctgagttgaggggttcaggtccctgtttgatcccagctacttagtgtgatagtgtgaccttaggtaggtcacttgactttctgagctttgggagggattagataaacatgatctcacagatccccctatccctaagaaactacctcttaatttttaaaccaataaaaatattttgcaacagatttcttcctaactaaaaatgaaaatggaatatttttcacagaggtagataattaaacaatatttcgaaagtatttattgaacaagcttatttttgaaatatgttggtgcttgcataaagtcagtcagtatataatatgcatatttcacacagaaatccaatacatttataaatacatagaccatagttctatatactatgtgattggttcttaatggcattttatatttcaaagcacttatgaatccccttgaaaatgttgccttcttaaataatcattgttttagatgcaagacattaatgaaattgctttggaattactattcatgaatcttctgatttgggtccattaatatggcctttgtagaactacctctcctccctctaacttgctaaatttagattaaataatttaagctcaggctttccttaccaaattgttcatttttctggttcttctttcttttctttcttactgatgtactcaaatattacttttatagaactgagataatgggtggatttattgttcttttatccaaagtgattcttccatcactggattgactggattagtgagcatgtggagctcagtaggatgggtcctggagagtgttagggttggtgtaaaatgaatgacaacagcttagtcacacttgaaaaaatatattggctcgagtttccaaataaccttccaaaatgaaaagcacaaatactgtgggtttctacagaatcaaatatgactgtaatgtttgtaaaaaggattagttattggaggtcacttcaatattaggtggggaagtttagaaatactaaaaatggggagaccagaagcattaaatccaaagccaaatacaggttgcagatgctctgggtaatggttgccagtccagccgtcatctgagtgacgctgctggtgttccctgcaccttccagagccgttcagaaacacaggctgccagtttttaatgcattatggcagattatgagacacctctgtcatctgaataaacacgtagctgggcagaagttttcaatatcagttctttatgtgataggatccaaaatttatctcatttttaaaaagagccccagagatgaggaaacactctctggtaaatttacttgattgagagtcacccacatttcttttaaaggtatgctcaccagagaccccatctggaatgttccactcagaggctcagacctctggttgatttaattatgtgcttcctaggattgtgcatttaattatatatacacaacaattcctagcaccggtttcttttgttattctgtgagaaaactggcagccattttgaactgtggaagagtattctgcatctgcaggaattactcatctgtggtattgaagaaaggaaaaattagccattggtacaggaaagggaggaagaacaaaatacacttacatagcagaatagtagtttcacagtctagtagacaagcaaataggaggctgatgctgtggacagactataaatcaatttctgatttctttggtcaaattgtaaatcatcactatgcgctaagctaccatgcatttccaggtgagagtatacaatacttttgtgattgtgtgttgtttgtaatagctctttctgaattacaggtgattagaaaaccctgttagaaatcaagttgttgttgtttaattctggatatatttgctttagtgatattatgctgctggagaatggaattatatctacttttataaaactatattaaaatcccatgggaaatctatttctatgaaaaaaaaacttgtcttttgttcaggcccctctggataaaggggaaatgttgttgatcacaatggccccgaaatgactgtcccatcacactaggtcagctccttccagataaggtgctatgggtcctggagggtgcctagaatattcatgatgtggttcaatgaatggataacaactatacttaaaataatgaattactcctcattttgcagttggtaactctgtcttgctcatagatcccaaatttctaaactcaaaggagaagctaaggaaagagggggtggttctaaacttttaagaaacgaatggagatccttgtaggcaacattcgtttgacaaatttcatagaaacttgtgacttgttggccctagaagagtcaatgttgtcttatgtagaatttcatttgagacattcaggatataaatttttttttctaagtttattggtagttgagaatcagttccattttatggcctacttttaaggtacttacacaataaaaagagatattagttaactttaacatcaaaatattgaaatctgatcccttgccttacaaactaagttagggctcatattttccaattacctctttcttcaaaagaactcttctatgaaagagtacatacaaatggaggtattattattattttattattattactttttgagacggggtttcgttcttgtcacccaggctggagtgcaatgatgctatgtcggttcactgcaacctccgcctcccaggttcaagggattcttttgcctcagcctcccaagtagctgggattacaggcacatgccaccatgcccagctaatttttgtatttttagtagaaacggggtttcaccatgttggccaggctggtcttgaactcccgcctcggcctcccaaagtgctgggattacaggcatgagccactgcgcccggcctgttatttaaaattctcttaatggtaggatgcaatctaatgtcaaagatgtgtagcgtcaaaactttagagagcaaagcaacaacttgacacatatatttatttgatactttagattaaggaggccataatttctgaaactctggaatgaaaggtctaagtatgagatagacatcatgttttttatagaagacatcttgcagattaatcatctttaaagatggctttgggtttaaatttcattcgaggaataaatttgagttctgttgaattgagacatctcagaaattaacccccaacaatttcccttattcaaaattgcttttacatttatggaaaacaaaacaaactttttaaaaatcaaagttgagagctttcaccttttaataacagtttcaaacttaatatagcttattaagaattaatataataactctttttattgtttaagcctctcttaccagctctaccatgcattaattatttttcttcttttgtatttatacaataaatgcttgacaaaaaaaaaaagctacataatttaagatttttatgacacaatggaaaagtttcttacccccaggggaaaaaacaattctatgatgttctcattgtctttccaggcaaaattttatatattagaaagaagaagaatatgaaaaaaaaaaaagctctagttatactttctgtgatgtgcagcaggtttggaatacatggaacataaaagaatattacatgagctataaagggttaatgctgtgtgttcttaattttaaatttcagataaatatgatttcagctgtgatcctacatggactaattcttttgtcactcaactaattaattcggtatgctagagaaaagatgcgaatttgggcatcaaagaagtgataattttttttgtttaatcagttataaagataagttttactcccattagactgggtctggagcccaatcattttattcttgtttagtgcagatgaattccatagaaaatgtgccctgtttctcttaacatctgaagatggaacagtaggattcaggattcctgttaaaatggtcctttgcaaggtaattataaaaaaaaaaatcatttcttcatattgtccgtttgttctccatgcataacaaggcagacaccatcatctgttcgttccgatcatggaatatatacaaattgcccatgtgttactttatgctatggaaagtaagttgtatttgatgttttatttagagactgcagatgaggcctccagcttccacagaatttttagttagcccttgttggatttattttctttgacatgagtcagttttttcctttctgggcagtttgctgagatgaccccatttgcctgtcaatggtaacttcagagctgtttcctgtggggaccatttccttctgcaggatgaatctgtggccagtgtggagcaagctggggccaactgggcctgggaagggcaagtcaaacgggcaacctcccacagttgatagaaagttcagcagtgaagtatggtttggtctcaaaacactctttcctttcctagttttcgggtttccggggcaaaggaggtagagaaaagggaaggaaagaggaagaaggggatgttgtgggcgcacaaatgcgaaggcagtatctggctattgactgaagtctgaattccagccatgtgatctgtttaaggcagtgttagggctttatgcacatgccatcagttgtgtctatttactcaaccagccttcagaaaagcccgaagatccacttaaaaatcataatcatgaaaaggaagaagacatattttctactgctttgaaataagtaaacatttaacaaaaagaaaagcttttttaactattaagaaaacataaaaaatgcaaaaagatctatttccataatgttcctgttaaatatctgtcccagaaatcgtaagcatttcatctgagtcactaaggctcttgactaccatgttttgaagccagtgaaagtgtatgaaagcaattaatcaaagttcactgcgctcctgaagagtatttcttcttctggaaagcagaggggtagaataacttaaaactcaatgacagtgaataagctttttagagtccctgtttggatctgaaaatcataccttattagtatctttatctttcttgcccactcattcacgcttatttttatttaattttaatttctggcctttttttcataagtttccctttttttccccctaacagagtgctgctttaataatctcagagtacagtttttatttgctacagaaagctcagcaaaagcaatatccagtgtctaacaaatctcttaacttttcttacaaatcgtccattcagaggctctctcttttgtttgtttggtttaaaaaatattagttattggtgatctgtgctttactttactttctggaccctctagaattatttttaacgtatctggtatttctaaatccattgcatttcctagcccctccgtatggggaaagcaaattagctcagggattcccagcagctgaatttagctagagagctgcttaaggctctccccagcagatgttttatccacttagaagttgtagaacgttataggacctccctgctttttaatcctaaaaacaaacatcaacatatttgagatctgaagattccctgattcagaatgagaaattgccatgaccaccaatttcagggccacattctagaaatgagtgacaacccagagaaaagtagctgctacatcttggctggataaaaaaggttggccttaaagagggtagcagacacagataccagtgggattaaacaggtttgttgttttcatatagcttgtcatcatcttggaaacatataaacatacccaggataaatgtctaaataacatatcaaaatttaaaaatttaattagaaaacttaatttcagggtttaaactgcctgacccagttaggattaattaggaagatttttaatattgagtttgtcgttcgttattaaagcatcaactcactcagtttctacttgtgtacacatcctacaaggcaaatccctatctacttttgcatgccatggaacggatttagagtttaaaacacagccctactgttgtgaaaagcatcctgggttttgtagcattttgcctccctctttaaaagctacaggcatagccaaggcagtgtgggggaccagaaatagaattagaatatttttccttcttaatgaagattgatgtgcaacaaacacaaatctgtttattattctatcaataatattaacataaaagtgagtaatgtccttagggacccccaaaaaggggttgggatgggaactctaattggtcaattttcactgaatttttatcagtctcattaactctcaagtacaatggaaccatgtgagataaacaagaaaagaccttcatgacacaaattttagaagcaaaagctgcggttcacaaaaccatatgagattacaatacatggaagttaatttcatcagcatatgcgtatgctaattcagaacccaatttagaatacatctgacaagagaaaccttttatagggtgaatttcagaatcaactatggaaataatagtaaagggcctatgaacttctctgcccctatattttgcttgaactatttcaaactgtgtaatttataaaatgtaaggagctatcatgcctagtttgtaagtcagctagttacagagtggacaaacaatcatccaggtccagaaaatactatgactgtgaagtttgtaggttttcacatgtgacattgttccacagatgtcagactttaatagtagcgatgactagatgttgcagttttttccaaatgcatcatagacacccaaagacgtttcctgataggagaaggagatatacagactttgtttcaaacttttcagctctctttggattcatagctaagcagctattttgaacaagagtgaatgaactttttccttgcctgactttttagttctcacaggacattgctcaggatcacttttgtatagtgtgtgcactaagaggatgtaggttggtggtaataactgcataaactgcccagtgtgatgtgggaggaaagttgtagatagacagaatgtagccaccttaagaggtgaactaaatgagagagtagacaggaaaaatgccagaggacaagctgtacatattgtaaatttgaatcattcatcagcgtatgtatgggagtctaggaggaatttgaatgtcatcattacttagaaaacccaaggaaagaaatagaaacagaagaaaatatttgctgagaaactaggagaaaactattaagaataatattaaaatctttattatatagaaaaaataggattctagggacttagtttaattgaggggttagatatttacctgacaatttatgttgttaatggttcaattctgtgtgcattggctattgtgatgtgtagtggctgctcagtaaggaatgaatggatgaatgaatgaacaaaccattatcaaattccacttttccagatggctgttcacaacccccctacctaggcaatataacaacattaaggaggtctgtgtggggggtttttctataaccctctctgaggttcttgtctaccttgggtaattcaatctttgatttcttaaattctactaagagatctcattttgtggatagaaaccatttttcttatacatgctgcatcacattaactgataaattaaatgccctggaattcctctactttctctttaccagctccataaacaagctattttcctctcctaggctgctgatctttctgagtctccttccatctaaggctaatctctccagagacactatctctatcctcctcccttatcaagaactttcatctcctatgccaatgttcatagcagccttatttacaatagccaaaagatggagacaaccccaaatgtccatcagtggatgagtggataaacaaaatatggttgtgtaactgcaatggaatattattcagccttaaaagggaatgaaattctgacacatgctgcaacaaagatgagtcctgaagaccttctactaggttaaataagccagacacaaacgaataaattttctgtgatcccacttatatgaatttcacatagaatagccaaattcatagagaaggaaagtcaaatagcagttaccaggcactggaggaaggagggagtggggagttactatatgtagagtgggtacacagtttccatttgagatcatgaaaaattctggacatgaatagtgtgatggtttctcagtgtgaatgtgcttaatgccactgaaatgtacactgaaaaatagctaaaatggtaatttttatgttacgtatattttaccttaataaagagggaaaagaaatttattcttctctgtcctccatctccgacctctcactctcttttcctttcagcaactgaaatattctatggtataagccaaattgaaaacctccatcttcagcactcgactgcacctgcagctacctccctcccagccaaccattacccagtctataatggttgtacagacacttatacttacccaccattcactcttcagatcatgcctacatggcgtctgttcacactactccgctgacccttgccaaggctatgaatgactttatgttgccaaatctaatgaacgcttttcagtcctcacctcgttgggcatctcagcagcattcccatctgttgactttgtccatcttcttgcagcattctttaaactcttttgcaaccacattctcttgactttctttctagctctcttgctgttctttctctatctctgttgtccacctgcctctcccccaacccccactcgtgtctctgatctttaagtgttacagtttttcaggacttaggcatggactcatctactggaatttcccaaagatatattacaataataatcatgttttaaattgaatcttttgatacctcttcattgactcaccatttccaaatgactatcttctcttctcaatggccacttctctagttcaagccactgtcatctttcaccgattcctgcagggatccccagtcagttaaatcactggttttaattatgttactgcttttacttgctgctttttacttcagcatcaggatggtctttttaaaatattcatcacattgtatcacttctgctcaaaacacttggttcctctgccgtttctcctccactaactctgtctcctagtttcctcacctagcttctctgcgccttgaatgactgagaaatgacctcccatcactcttagattaaaccacaagcttctctcacacctgtccccattggcttttccatctgcatcctggcggagtttcctctctcatctcccagcctctggccttcttttactgttttgaatacatcaagccttccccacacatgtcctttgcatgtgctgtttccttcaccctcaagacttttctcccactcttcacttgtctggaacttctcactcttatattctcagcttaaatctatttttttcactgaggcatttcccaggcagtcacttccctgttattgtctcttctaacatcctttacagcacttatcacaactaacaattatggatgtatacttgtttggtaactgtctcctctgttaaaatgtaaatttcatgacgatattgtgtggttttgtatgccaacataatattaacctatatcaattgcttataatttctgacagctagtggatacctaataaatattttttgaaagagagcgagtaaggaaagaagaaagatttttccatgaatctgtttcatatgacctctatagaaatgaacagagaaatggacaggtgttttaagcaaacttataattcatgaacatctaaatttacataaagcgtatgttgaaaggtgatttttccactttacaaaaaagatccatcataagattctttaaacaggcttcccaggtacatgtaaaataagattttattgattaaagccatatgtttgcacagaattttttaggaaaatatcttttatataaagtaaggttgacctctaagcaatttccttaaggcacctagcccagaattgccaactctcaaatttctaaggtaacagataatgggaggcctggaatgcagtgcatatttgaaactctagaatataaagtagtaattttagccattcagggttcgtgacttttctcacaaaaatagctaatgggaagataaacctcctcaattcctctttctatatctcagtaaaagtaagagtggctgtgaaatgatccccacaaaggctgctacagaaaggaaaacaaaggcttggaaagtcaccaagttgaatctttccccctcactctctcccccggtccactactgccactactgataattaagttgtcttattgcaaaatgaaaaagaattcagtgtgttaataaataaaatgcaattaacttctctgggtctcaatttcctcatcttaacaatgcgggagtttttgtttttgtttttaagattattgttttataatgcttttcttgggcctacccaaactttacaaaataaggtaatttgtaatcattttctctggctaataaaataaatttcacatgtatttctgcccttcttattggaaacttgaatcgaggatcatgaactttaaatcaaagcatttataatatttgtagaattgcttgatttgactgttattggcagttcttgctaagaagaaaatactttgcagaatttactttcaactaacatgttttttttcttaccaaacatattccactgtgagggaaggataatgagctattgctgaactgcagtacaagtcaaacattttagctaccagaaacaaaaataatttattgggtgtggtaataaacatcaaggtaggctaggaaatggttagttttacccttcaaaaacaagactgcttttacctcagaaatcccaaaagctgcaaatataggagaaataatatgggacatggaaaaaaaagaaaagcctgatacctgtaaagcttttggcaaaatttttgccctcatcaacctcctaaagcattatttctaccctgactccccaccgtgttgaatattttgcccaaacattactatatttaatgacattttaagcaaaagttatgtatctcaagtgatgtactgagctattaacttctcacgtaaacatacttagagtaataatgttgacccctaagactcttctgcatgggtctggaatgctaaagaatgtattcatgaaaacattatttagctatctcctgctttgtaggttaaggagaagtcttgaatgtatcaggcaaatctgaattatatttgaaagttaatgttctggccgagcacagtggctcacacctgtaatcccaacactttgggaggccgaggcaggcagatcacctgaggtcaggagttcgagaccagcctggccaacatggtgaaaccctgtctctactaaaaatacaaaaaaattagccaggcttggtggtgggcacctgtaatctcagctacttgggaggctaaggcaggagaatcgcttgaacccgagaggtggaggttgcagtgagccgagatcgcatcattgcactccaacctcagtaacaagagtgaaacaacgtctcaacaaaaaaagaaagaaagttcttatatttttgtctgtatttttctcttttccgtacttctgtaaatgatacatggatatttcttcagtgaaaaaaaaggaataaattcagaaagggaatcaggaaagagagaaaaggacaaaaaactagactgggggatgatagcattagagctgacagttggttcgccagagtcccaagactagactggctacaaccaaaaaactacagtaggagtagagagagatggagagatggcaatggagggagaaaatttaggaaagaagacttgctaattgaaatagtaagttgagaaatatgcagaatactggaagaggcttctaggaaaggcaggaccatggcacaattatgaatataagcaatgccaccttccaggtgtgatactcagagctccgacttgactaacatcctctactatgggtcaaaacacagtctaggaagctgcaaatagatgcccattgctatgggattctgaagaagacagaaacatgtgcttgttttatgattcttctattattctgattgcttacagtacaggactttcttcaaaatttatatgtcaggtcctcatgtgaggagactctgattctctgtgtgtgtgctggggcagggttgggggtatgaagccggcccatacatgtataatttgaaaaagtctaagaatcgctgggcacggtggctcacgcctgtaatcccagcactttgggaggctaaggagggcagatcagctgagttcaggagttcaagaccagcctggccaacatggtgaaaccccgtctctactaaaaatacaaaaaattagctgggcatggtggtgcatgcctgtaatcccagctacttgggaggctgaggcaggagaatcacatgaacccaggaggcagaggttgcagtgagccgagatcatgccatggcactccagcctgggcaacaagagtgaaactccatctcaaaagaacaaaaacaaaaaatctaggaatctccccaagttttttttgttttgttttgttttgttttttgtgtgtgttttgttttgtttgtttgtttgtttttgagacagagtatcactatgtcacccaggctgggctgcagtggtgccatctcggctcactgcaacctctgcctcctgtgttcaagtgattctcctgcctcagccttctgagtaactgggactacaggcatgcaccacgacgcccggctaatttttgtatttttagtagagacagggtttcactatgttggccaggctggtcttgaactcctgacctcaggtgatccacctgccttggcctcccaaagtgctgggattacaggcgtgagccaccacacccagctgcatcttctttttttatttcaaatgtgcagttttcattttcctaaaagtacaaaacatatatggtatttttgtaaagcatcataattgccactgtgcccttgtaactatatacatcccaggcactcaggaatgctcagaacatactaacccagagaaacctccctttctggggaattgtattatattttcattgtgttccagagctgactcaggaagctggggctgcattagagagtgattgtgcataaaggaaagcgtacaggcagagatcgggttctaatctcagccctgccctgactctggtgggaggtcttggtcaaggttcgacacctctcagagcttttggttcttcactggtaaaatgagagcattgaacgaggtgttcaataaggcctctcgtggcactgtcatggtgtaattccaggagtttacctttaagtgccaatgacactggagctcgggaagcctgcttaggagattgataagcttttatttacatattaatgataattctttagtttctcactctctattgcattaataggtcatcataattagtcttgaatatttgtctatctaaataataaggaaaattttcaaattatgtatgcttaggctgccccttctcccctaccttctgtcgacacatacaaagggaatcagaatctcatcacaggaggacctgacgtacacattttaaagaaagtcctggcagtagcttacatctataatcctagcactttgggaagccaaggtgggcagatcacttggggccagaagttcaagaccagtctcgccaacgtggtgaaaccccgtctctactaaaaatacaaaaattagctgggcatggtggtgtgaacctgtaatcccagctactcaggaggctgaggcacgagaatcgcttgaaccccgggtagcagagatttcagtgaacgaagatcacaccactgcacctcagtctgggtgacagagtgagacgctgtctcaaaaaaaaaaaataaaaactaaagaaagtcctacctctaagcaacctgagtaatagaagaatcacaaaacaagctgatgtttctgtctttctcagacttccataaaagcacgtgatattgtgcatgatgcatgataaatatgagtgaaaagaaggaaggaaggaaggaaagaagagagaaaagggggaatttcataatggcattatttttctgctttcattatcttattttagttccattttatgcaaaatgatcttgacttacttagaataaagaagtatgacttaatgagctcatcccataaatatcttagctctaccgcaaaaacaatgtgattattgttaacagccttctccttcacgtttcactagatttggaaagaagaaagaggataagggtggaaaggctgagcagaaaggtactctgaaacatggtggcctgagagaagaagagctggagaaaatgaaagaagagcgtgaaaggtgagcagaagtgccgagaccttcattttctttgactctatggtctgggtttaatttagatattgcaacagtcaactggagaaatttcattttaagaagtataggggttgaccgatctgaaaggaaaggtgtctgatacaaaaagaacctccctttctggaaatttttattctattttgagaagaaatttgcttcatgtttttactatatcagtgcctataattccataacacactaccacctgttttgaccataaaaatgcatattttctccatgtctttttttttccaaagaaaggtcatttggatattgatgtttagaactatccagttcccatagtctgttcctaattttagtcaggctgttgtataccttcttaattttattctgcgcaatccgtttgggtcctgtaatttgagaagtgaatgtccttcattctttaaaaagacactgtcttttattaggctatcagcaagctgaagagtatgttgcccatctgttaaagggccggcttcatttgctggaataatgctggtttgcaagagctgaattctcctgcttgaggagcttaatgttccatttggacaagaggtccttcacgtatctttgatgttaactctggcacttatcgcaagtggatgtgtaaatgtctgattttcaaacatgtaattgaatgttcatatttctcctgaaaattctttgccttcacaactaaatggagcttggagaaagactgagattatgacaaaaccagcatataattctaagcgtttgattctgacttcatcgtgtatgtactcagatttacacaacttttcacttgcttattagttacattagttcttatagtttctaaagagaccgttcttgtattgattttattactttagtatgtgtactaagaaaatcatatctattcattgtgttttctagcacagaggagtctaagagtatctactgttagcctttgacccctattttgtagtctgttcccgttgagaaggctgactttttcaatagcaaggaaaaaaagctatttagtcctttctcatttttgagaggttgataagctgagttctaaggtcactggagcagttaaaaggaaatcaagtgttttacattgttgttgactattcacctgacagagctatcctgaagacatgaaagatattctccgtcataacctaagattcagcaatcctgtaatgtaaaatgtaatccaggctgagattttaatgcatatattggcaaaggcatctatgtggggagcctacatcatagatctttgctgctcccttgacttctcttactgaggttacatcccatgcctcatcttcaggaaactgagctgttttctagaatgcagactttacatttttttgtagctcatacttacttgggacaggggaaaaaaactcttagtagctggggaactgtgtgccagctagaaaattgataacccataaaataaggtgagttgtctttaagcaagggttcatttcctttctggttttgcctttagtaggcaggtgcctgagggagccttgttcttaaaagctgagctgtaaattcacttcagctggctgtataggcttcggatccaattttcttaaaatatgtctggtcaaaatagtgaaagaactatactattagcctccacttaggccacttcccacacatgaacacataaaacacatctgataggggtttcctagagacaacattgtctcaatcatgtgctagaggaagaagttgaggagttgattttatggttgggtgctatagaattaatgaccaaaggcatttcaacagctcaggggctgagagccacggatggtggaggtggaggctgaacatctggcattgctcccaaccctggagtcctgatccttagctctccatcatctatgggaaaccaattcacaactcttaaagaactcagcgagtgtatcactcttcatgatatggcaatgaaaaaaaatagaatagagtaagaaatagtgataaaacctattatacttttctcccaatatgtttgaaatttgtttctttgacgtgattcaagccatcctgttgcttacttgtctcatcctgtcataggtatcataatagatttacattagcatatctcattttcaaaatatttaatgcacctaaataaaatatataccataaagtactggagccagcttgtaccagcttataggaaccaattgttaaactttcaagaattttgtaagctggctgataagccattggcagttcgacattggctatagtgagtatatttatagcacagtttctctgaagacctagtttaccagcacactgctacaggtctgtgacagctatctttagtgcatatccaggaggcaattatccaaagaggcaggaaaaaaaaaaccaaattcaaccacatgatttcttgtagctgagtttctcaaaatgtggtccagggaccaactacatcagaatgaatcattagaagaccttgttaaaaatgaagattcctgagccccataccagacttacagaatcagaaccttgggagttggagcccaggaatctgtgtttcatacacaagcccaaggtgattcgtcagcagtctctaaagtctgagaaccactgacttggaggagcagaatttggctataacataaaactattcttatttagtgaaaaatgatacacaggatttttttctcaaaaggactgagtggcccagtctacaaatattttccttgttcttcatgtaccttctccgaaatatcttttcttactggtacaatcttttgtaaacaaattagaaaccctagccagtgctcactcaattaagggaatatgggtcacttgcccccagcacccctcatgcacacaaaacttacaaaagcaatatcagttcattaagaaaattttggaaacataaaaagtataaaaactattaaaaccatacataactctaccataatcccataaccactactaatattttataatcttttttttatgcatatacagttggctccatatccacgtcttccacatctgtggattcaaccaaccgcagattgaaaatatttagaaaagaaatttcacaaagttcccaaaagtaaaatttaaatttgctgtgccaagtactacattgaagctatgcaaatgaagtgatgtgtaggcactgtaataggtattataagtaatctagagatgatttaaagtatatgagaggatatacataggttatatgcaaatattactccattttatatcagggagtcgatcattcacagattttgatatccacagagtgtcctagaactaatcccccatggataccaagtgacaactctctttgaacacttgatatccaaaacctgcatctataacatcttgcttttttcatagcattatatgttgaacatttttcccatgtcattaatgttttaaaatatgtcatgttgatcactgcctaatattctatgagatcaatatacgataaactatttaccttccattgtcaaacatttagtctgttcccatttttatcccttttttctttcctttaaaaaaaaaatggagacaaggtctcgcgctacgttgtacagactggtctctaattcctgagctcaagtgatcctcctgcctcagcctcccaagtgctgggtttacaggcaggagccaccatgcccagactgttgccatttttcactgtttcaaataatacttggatgaatatccaggtacaaatgtctttataagttacctcctaaatcatataatcctattgaagttttaatttccttgtaatcattttaccctaggattgatctaacctcaattctaaattttaggattttatattctctctccccattcatctaatttttttgtgctgattttcatatctcattttaagttatctacatatctaattcctgatccgaaaccattttgctgctatatatggatagtttatctatagctacatgtactgaaaaagtccaaaaagccataaaagatgagttgggttactagattagattagaggaatgcagagtctagaacagtggttctcaatgggagggggcagttttaccacaagggcatttggctatgtctggagatatttttgattgtcataactcgggaagaggggtgagcagttactgccttttactggatagaggctagaaatgtagctaaaaatcttacaatgcacaggacagctaccctcccccacaacatgaatcatccaacccaaaatgtcaatagtacagagtctgagaaacccttttataatctccaggcttcacaaagagcaaggtactctcctagacatcagaattgcattgtgtcatatttcctgtggataatgcagagaaatctagatcagatgatataaccctagaaggattattagctatttgagaatggtacccaaacattactgatgaatatcccatcaatctaagcttgcaagaataatttttttcgttaaaatttatttttaaccttggcctgctgagcatcggcgttagtgatggtgacccgttgatcagattgtggttgccacaaaacttcaggggttgacaatatgtccgatgacagaatcagcaggaacaatggactgaattaaacgtaaagaaagttaatggaaataaatgtaaagtcttgcatttaggtccaaaaatgaactacacatacacaggatgtggaaggtttgatttaataacaaatatatgaaacatttgcctgatggttttagttgagcataagtttagcatgagtcaacatgtggatatgcctgccaaaagcttaatctggtcctaagctacattactggaagttcatgtacaaaataaaggaagcaacaataattctaattttacactgcttagatcacacctggaatatcccgtgcctctctctcacacagagcatgcgggtactaaatccaagtcttattaaaaatgttgaaagacctgagaatacacagcttacagaatcaagactttgtggatttctcatgcttgaagaactgtcacatagagattagatcggttttgtagcatccattttattccgttctactttatcagtttatttgcttattcatccattcatttatttacttttttgaaaacaaattatttgctttaatatttattttcttatttatgtatttgtctcttgaagatactaatggagcattattttaagagaggtagtattcagcttaatggaagggaaaagtccttaaaattagggtgcagtatgaggcagtgagtttgttgacactgaaactgttgaataagaagctaatgaaatgattacatttagaaagcattagttcatcacataaatattggactagatcagagttgtataaatttcagtcactgatctatttcctttattgtcttaattatatttatacataatcaaataaataaaatattataaaaatcatagccatgtaagttagcttatctaattaagtacattaagccacatagcacctaaaatcttcttgtgtatctttttttttttttttttttttttttttttaaagacagagtctcactctgtcaccaggctagagtgcagtggcatgatctcggctcactgcaacctccacctcccaggttcaagcgattcttctgcctcaccctcccgagtagctgggactacaggcacgcgccaccatgcccagctaatttttgtatttttagtagagatggggtttcatcatgttggccaggatggcctcagtctcttgaaattgtgatccacctgccttggcctcccaaagtgctgggattacaggcataagccactgcacctggccttctagtgtaccttaaatgctactttgtccttagatgatctctggggttcttttcagatattccagtatgagaaatatctaaatatcttaagtatggaagcatttacttttacttttctagagcaataattattgaacttgtcatggcattggtttatggtagtgcatacaccattgttacctgagtgtataagcccaagtttcttgctcaagattgtgtggtaggattttcttaatctcaagtaagagatttctcagcttatgatgtgtcacctcctgttacaagtcaaacagtctattgcaatgaagccctgcattaaataaactcatcattttgttcatgcttcagtgagattagccataataaaagattagttccaaaggcccatattcattgctagagatatgaacccagtgttatattcaaagatgatttcttccaacatttttcaaactaaattaaattagcatttttcacacattcagattatgtaaattagcatcttgagctgaaagcaagagattgtcttaatatgtcagtaagtatatattgttgttattcaattctaagacctaagtttgtaaccttttacaaagtatgaaattaatcagaatcttggacctgtaaaataccaaactaaatagctgtattcttaataccatctcaaaaatccagtggagattggttaaaagaaaaatatgtccccctcctcatcattaatttagtattactatcctgagaaaaatatctccactgacaccaaagactgtcttccattgaagtcccatattactgaccctgaaataatacttcagtaaatgaagttttctcctaaaattgaaaaaaaaattttaataacatgagttatatactccaaaatcttccattactcttataccatatcagagtttattttgcaggaagctcatttgttgtattaattaaacattgctttcgtagatcttactagaatcttagcaggatacatgaggagatgggagaaaaaaaagatccaacctcttcagcttcagcattgaaaagtatgaaaacatatggctcttgttttcaacaactagcctgaacggaatgtctaagtgagagtgaagctaagatttaggaaagttaatcggtttcagtgtctgaattcaaggttcttagttttctttccttttgggaagccttccaagaactgcagacttctcccttgccttatcagctgagctgcttgtggcctgttccctttagtttaaatcaatacatgtgtttttgatatttggcaaaccaagatttaattatgcagctgcaagttccccacataaacgaaatgcatcttagagatataaaaacattcagaaaccatttatagtttgagaattcaagtgggtgaaaatctattcccaacctctcagcattttatttaattatggaggatttttatgttactggaaattgaaatgaaaaccagagtaaggctagagtttatccaacatttgttcatattgaaaaatgaagatgcttattagagtcgaagaaggaaaaggaaagtattacattctggaattaatattttggttgtaatctacacacatataacgctcctaaatatatacagcaacaagtgaattgatagtattttgtcattattgtacactcaaaaaaggatgtattaaagaaaccagaaggttgatttctttaatttgccaagcaattctcaataattaattatttactgaacttaataactttggcactatttaaactgttgaaaacacccatgttttggcatgattacatacacatgattaattcagcatggttttactcatcactgaatatccctatcttttgcagtagaattttctaggtcctgtggtttgggtaaaatgttggaatgattcccagttttaatagtcccaatttattattactagtgaaccctgatcagatcatgggctggattagatcccagtttttcaaaatgccccaatttatggctcccttaaaatgctggtaaaaatgtgtatttgaataaggctttggttggctaaaaaagatccagttaattacttttagatccttattagatcatcactgcatggaagttatgaaaaatcttacttggtggtgtttctcaggacaaggacatgttctctttttatgctgacagaaagaagctatcagatttctgtttttcatagtactaaccaactcagtgaatgaaaagagatctttctgtatccctgtgattactattgatgctcgtgtaaaggtaaaaatatccatctttcctagaatgagaattaaaaatatagagagagaaagaacataaacacaatggcatagtagccatacacccacactactctttatttgggggccatttttcaaaatttgcctctgatttagagaaattagggatttagacacagcccggggtgaaggtagctttaatatctttacatttatttgatctctgtaacacctatcttctcagaaatgcttgcggtcaccaacaaaacttggcacattactgtatttctatagaccagagatggaaacacctacatcctaatgccatgccagcattttttatgagccaaaatccttttatgggacttgaatcaatgttagaagtgctgtattagcaactgcttgtcagccgagctggattaatacataaaatgaatcacttgactggcatgctttccaacagtcatttaggcaaacttctatgaagtacaccagctctctacaaattgttttaaataattttaaatatttttaaagaattcatgtaccctggagtgatgtattactttatcgtatgtagttgcagggctgttggaatacattctgaaaaggaattatactgaattacctagaacgattccacagaactgtttagagtatctgacctgataaaaatgtggaaagaaattttaaatttcgctgatccaggatatttggttgtaatataaacgtattaaatacagaaatagatattcaatgtaatccataatttttttgtaattcactggattttatgccaatcagagataccagagctgtacctcagagatacaggttgaatatcccttatccaaaatgcttggaaccagaagtgtttcagactttgatttttcttttattttggcatatttgcattatgtttaccagttgagcattccaaatctgaaaatctaaaatcaggaatgttccaatgagcatttcctttgagtgtcatgtcagccctcaaaaagtttcagattttggattttcagatttgggatgctcaacctatacagataaatttactttaatggggattaaatacagcagtggcagaatttgagaagagcattttctgtgaaagctttgggggactgtaagtaggtagaaggctgtttggtgactagaatttaggaatgagagcttctgttttattattcattttcgtggcattggataagccacttttgaggatgtattcttatagtttctatttttagtaccatgaaataaaatggtaataataatacttaaaggccccagtttcctacattttgtttggataaaatgctttttaacttctaagatctttagaagaaaaaatttgcgtaaataaaagtttagtgaacccagaatattttctgtaggccggtttggggctggataatatactagtaatcttaatttgctgaaactggtctctgaaaactgtggatatatcaaacttctgtaaatcaaatattttaaaagaatttgtaagtctctcatcttctttccttatttgaacatttgttatatcctgctttgggaagctttcatgacaggccaagtgtagttaatgttcacataggttggcaaactctatatgatttgaaaggatgctcaatctattgtcttctggaatcttctcccccgtcaccacccggcctccacccgccccatacccttcacatagaaatactaacctaggcctgtgatttacaaactccaaactttgaatatgctttttctgcatttcctggacagctttttacatcagtggttctcaactttgggtgattctgaccccagtgggtatttgacaatgtctgagaacatttttagttaccatactatgggggaagtgctactggaatctagtaggtagaactcaagcatctttctcagcgtcctatactgcataggacagccccctgcaacaaagaattatctgactcatgacatgacttgtgccaaggttgagaaaccatattttagatagatagatagatataatagaaatatactacagatattttagtaagtctgtagttgaacctaaggatatgtattttgaaattatttctcaagtgattgtcatttatagccatgtttgggaccaactaatgtaggtgatggccccagagagatgcatggccaaatggaaagattacaaggcccaggagtgggttaaagatgactctgcatgaacaaacttatctgcttcaagtctcatgtgttaaatgagaaacctgtctttcagattgttgtgaaaattaaaagcaatatttacgaagcacgcactggttcagtctaggtgctgactgttattttctgacctgctttgggaattaaaaccccagataacccatacagtagcctttgggagcctagaatgctctgagacacaccatctgtgaaagttgctgaattggatcctgttatgatgaaggaggccaagttgagcggagactttgcccagctgggagtcatgccagatacttccattcaagaagcttctcctcattttttattgatcgccggttggaagttgctcctcaagcatagtgagcttggcatgagatggcagcacagtagtgtggggggtgctggctgcagccagttcttggcagccctggaaacacattcagggagaagggacacaaatggtgtgggtgactgccagcctctccaagtccacagggcgtgtgactgcagaaaacacttgtaaccactgtcattaaattcacaaaattctcatatttgcatttccattctatatattacattaagggggtggcaactccgatctgctaatatttggaatccagtctttggaggaaatgggatgaaaatgtccttttcttcccattccactctttcccagctacctgcctttgccctggagtataattacttaatgaccttacagtgcatctgaaggaaattcagattgctgtcccaaggaatctgacccctttcccaggcacaaactcctgcctttttctggtttgtgtcctttgttagcatctcatattgagagttagagaggctgaagtggtttgggctgtgcacagaagtggcacagaagcctgcttctccaagaggtcgtggaaaagccccctcaaccatattaaacaacagtaacaacaatgggctgtttagatggaagatataagtattcatgttcttggagaaacttacatagataatttctgaagttatgatttcttgaagcagagattattaaattatgacaggttggagatgaatgaatcagtgataattgctttgatcaaagtcattcctctctctcaaactttcagtggctctctattgcctactgcatacagtgcaaactctttgtcctaacacatctgactttaacctttctaatcataatttccacccctgaccaatatgacccctatactcagccaatctggaatgttcatactttttgagattaacactttccaatcactgtgccatttctagtaccatttctgctgtctggaatgctcttctgtctgagttggtccgaatgaatggaaattcaatgaaacctcgctttctccattataccttctcaaactacctaagttggaagagaattcttccattacctatcctgggtcaagttgcttgattgtggtaattttcagtttctttacctacaaaatgggtatataacatcataggaatgttgtgagaattaaataagactctgaagtgaagcattcagaatagtgccaggcacagagacagccaataaatggtgaacttactatttttcttcgtctttctttgaaagagaatgaacatgagtatcaaactgttgggtttgaagcctagctgttccctgtactagctgtgtgatggtgcatgttctgagaaaactttctgatcttgatcatttgaagaagaaaaaaaggataaaaatatctagccttcagagttcctataaaatttacataacatgaaatacttaaagtacctagaactgtgcttggcacataatagatacacattgtcattattattgttgttatttttctgcatggaatcgtagatgtttgtatttacaaacatgccttctctcccttactacctcaccatttccttggggtgaggatgatattgtaatcatttttctgtttctctcaggatctaatacattatgtttcacagaataggcactcaataagtagttgctgaataatggatgaatgaatgaacaactataaaaccgtactgattttaattttatttttcaagtgaataattgctgcaatggaactaagagcagaataggctaaatcaatggtagacaaagctatagcgtttagagatataagactttccctgggctatgaaatggtgtcaagaaatatgaggttatttgtaactggcagtaggacagtggaaatgaatcattgaagcatagtggccagtccatcaggactatcaacacttgtttccctgtggctgaaccagatcctgagagacacagccttaaagtgaatgaaatttcatccacttcacagggaaatgaaaatgctgtgggcccagagagctgttgtttgttgttgttttcaaattgggcttgtgtccccatcccctttcattgacttaaatttaatcagttgaaattagttttaagtaccatttattttaaccttttaaaatggaagatacgcctttttagggaaaattgaatttggttgtatggatgagacacactgtccttggcttattcttgtcaaatgaggatatttttgtgctgtattttgagctgattcagtcagaattcatggtgctgattgtattttgggggcaggcataaaaaactaatgtagatggaagatcatgaaaaatggcaacagccatttgtgatgtatcagatgccatcaagctactctttcaaggaggcaatagaactaaactccaagcccgtgattaggagtccatatcataattacattagagcctttgtcttgtaaaatatttctaatctatattctcctgcaattacatgtcttttcttcatgtctaagtcctaattctcttgaggcatagattgtaacttgtttcattttcttacatctcagtaaagagaagatattcagtaaagtcctggttgacttaaaagtataaaacagcattaaattttgagtaagttacttagataatttcaaaaactgacaacattttattaatcagtaggaaaagaataactatctattaaaatatcttgccaaacattcttgcttatttttgaaagtatagtggcctccttaaaaattaccttgattataatagtatgtaccagttttttaaagtaaagaacaaatgagtagatgaggaattgcttagactaatcattttttgaaataatagtggactctattattgacagcatcaacagctaattaaaaattctattagtgaagatgtaaaagatggcacatttccaatctagattgacactgaggacatagacataattgatatttgttcaataatcctaaaatgtttcacagtctctaatagaggctgtgattgccaaagaaagtttcaagtgctaaaaatatatatattctaggcacttaaagatattttcagatcaaataatgcacctttaaaaaaaagtaaaattttagctgaatgagcatcaaaggatattttagtgggttgactttgttttaaaaaaaaacacagagtcaagataatgtatggtgtgattcacatgtttttaatctggttatagtggatgtaataagaaagtcaaaagaggataatttgctagttggacttttaaattttagagaagtattttgtaatggtcacataaatgaatgcatattgaaaaaatctgcaatgaccattaaatattccactttggaaaaacaagatcatagctttaacaaaatgcttcaatattatagttcactgcttttgacaatattaaacccaaattgaatatgtttctatataggatattttcacacggcaacttaaaaacttggcataataattttcctacttttgataatcaattctgctcccaataattatagatttacctcaccaattatttcaaaggatggacagagaagtaaagccttgccgagaaaggtagtaagtgaaaccagaacattttacaaaatgttaagaaatgggcacttaattcttgaggaaacataactcatttcaccagcaaacaaaaatccaatgccaagaaaactgacattatgctaaaatattcaatgtctcaagtgtgtatacgacttaaggtaaaaatggatgcctaatatcatcagtgaccaattcatcccattgaatgaaaaatattcagaggaataagcacactctactgaagctagttgtgcaatcctcattgatcaatttgaaataaccacctacagatatcaattaccttggtccatactgctcttgctcacataagcttgactgtgcctcaattcaaagaaatttttttttaattgtgacataataaactaatatgatgtgtgaaccaacatgggaatttaagttctcaaagatatactgaaagattttgcctctgaggagaaacacattttactaaaatcatgccaattgacacaggaaatttgatgaagatctccaaatatcacagattaaacccgaaatatgtagtatgtttttacaacttttctagggcatttgaaaacatatgcaactatgtagacatgtttatgattctatttacacattcatttttacattgccctataatcagatgacacaggaaaggaattttttttcatttgaaggaatatgagaaacagtttcaagcatagactagctgaggagtagggggctttattttattactttgtgacatcctgagggcatgcttctggtatgaagaagacttagctgtctgaaagtattcctgtttgtgagaatacctttaatgctgtgaccctgggtgtgcctgcatgtgtgtgtgtctttgtgtgtgatatagttacatagatagataatatgtatataggcttaatagtgtctggtaataccctgctacatcctcttatgagcatctgataaccattccttaatgaattggaaaagtattattttagttaaatgaatgattacatactacctgttttcatgctgtgtataaaaggataccaatgaagagaattaggttcttggagaaacagggagatgttgaaaagcaatcaagaaaaatgttgggggtaaagggactggaacacctgtggggaaggcaccattcctcctcacatatgtcttcatccctgaaaatctgctaagcccttggcctgcaggtgagcagcatgcacaaaagtagatttgttaattttctgaaaagaatacagctggctggctcaaagagttaaggcaacatgataataaggctgatatcatataaactatgcccctttatggaagattgatgcattaaaaaaaatcatgtaagtatccactgtagtgcaagtactgtaatagatgctaaggactcaaggattaattttttttttaaggagaaataagatttcttggtcttcttacaaggagctcaaaactgcacttccaaccccaggtaaacatctaaaaatatattctgttggaccttcaaggccttcaggctaagggaacaactgaacctttcttttcttttcttttcttttttattttactttaagttctagggtacatgtgcacaacgtgcaggtttgttacatatgtatacatgtgccgtgttggtgtgctgcacccgttaactcgtcatttacattaggtgtatctcctaatgctatccctcccccctccccccaccccccggcaggccccagtgtgtgatgttccccaccctgtgtccatgtgttcttactgttcaattcccacctataagtgagaacatgtagtgtttggttttctgtccttgtgatagtttgctcagaatgatggtttccagcttcatccatgtccctgtaaaggacatgaactcaccctttcttatggctgcataatattctatggtgtatatgtgccacattttcttaatccagtatatcattgatggacatttgggttggttccaagtctttgctattgtgaatagtgccgcaataaacatacgtgcacatgtgtctttatagcagcatgatttataatcctttgggtatatgcccagtaatgggatggctgggtcaaatggtatttctagttctagatccttgaggaatccccacactgtcttccacaatggttgaactagtttacactcccaccaacagtgtaaaagctgaacctttattttcaggaggaatacctgagagatcaccaaagggtagagcagacttgtcatctccatactcaaaaagttgcatagtctctcccatagtttattggatgcctctctttgcatctcatcctcatggcccccagcctgatctccacaggctagagccttccttgcaagatcaatccagcccccttaacctttcactgaaacacggaaatttttctgaatctgctctgcatttagcagttgtaggcaccctgcagatggggcctcctctggaagctggccttctccgggaacccccagtggaggcctttattgtgtcccacccactttgtgtgcacttgaaaatctaacaagcatgtgttttcctaataggcagtactccttggataaactattgttaatctgtatcatcttgtattctcttgtgtctttttttcttctttcctcatttttcattttttacgttttctcatatgaaaggtcacctttacttggtcacttcagtggaatagttcccaatttcaggcctaaaagcttataagaaaaatgtgtattttgatgaattttcatacttttgatcatctggagaactaatgtaatctgttttaggtccctggacctttttccttgagatgtgctgtcacacctttgaatctgaggttaaattgaagttatatgaaatttttccacttagaggatttgggtagatatcttctgctatgattcacttttgactttttaatttttttggcctgaactcttcaataattcagcaaatattaattgagcatctaggcacatgagggaaatggcaagatgcgtaaaacacaatctagtccctgccctcaacaagttcatgattaaggagagagcagagagaccaatacacaactaattataataaagctaactatgataaatgctgaaagggggtttaaaaatgctatatgatcacagagaaggcagccatgagaaaatagtgttgtagctgggacaataggacacaccctctttatcacccagtatttccagacacttgcaatgaaatcattagattcaattataaagtacaacttaactgtgcagcaaattagaagagactttaaaaaatttaaattcttaatcccatcaataatacatgatatttttgctgctgactagagagaaatttaagactcagggaaaattttcatttaaaatctaagggattttccaagcaatcagggtgttttccattatagtttctttctctaaagctgacagaatatagtaaaaagtttagggcaaaactttctgggaaaatagcagttgagacaggcagataactttgggtcataaatttatattactgaatattctgcagatacatacaaaatttatttaaatattttaaactataaactataatcttagtagcctagaatgtttggccaaaatatttctatacttataagtgggttacaaactattcatttgtatatagtactatgtaatatatatacatacagtaatacagcactgatatggtttggctctctccccacccaaatctcatcttgaattgcagctcccacaattcccatgggtcatgggagggacccagtgggaggtatttgaatcatgggggtgggtctttcctgtgctgttctcgtgatagtgagtaagtctcacaagatctgatggttttataaagaggaggagttccctgcacaagttctctctctttgctggccaccatccatgtaagatgtgacttgttccttcttgccttccgccatgatgtgaggcccccactagccatgtaaaactgtgaatctattaaacctctttttctttataaatcactcagtcttaggtatgtcattatcagcagtgtgaaaacagactaatacaagcaccatagtaaaaaatggtggagcaaattgaactttctttacagttttgaaaaactgaagaggccaactaggatgaccaaaggtcagttttcccccatctattgacatagataaggcagaccccagactgccagaaaaaaacaagttccatattacatacaagtcacttactctttaaacttctcaagttagtaattatcccaaaacttcattaatctgcagtctcttctgaacactccactagccaggagggaaacggggaaaggggagaatcaggaagaaataagaaatgcttcccagtgccaggcacatagtagactctcagaaatgtggattaaatggatgaggtcaggtcacagctaatatttagttacttcattgtgattcctccatacctcaagggttacaggatgaaaactgcagtggagaaggatggtcttcaaatgatgtccctccctcttcaaaaaaaaatctgttcagtgaatgtggctaaagcaaattaaaggattcatatattttcgaaagatttgcggccaagagattcgaaccaaaagcatttgctgctttactctcaatcaagcagaaaattcaattaaccgtaacacacctggtcccctgagcattctggccaatccaggttatacagcattgattaaaagtatctactctctgtctagggttccaggtggaattgagaaggagctaaaagaagctgtgtttatgcttttcaagagctattagtggtgtgtgcatgtgaagactgcataagtatctctgttctctgctctctcatctcccctgtctcagatgtggataactgttactgttattcctaacaattgctatgtacgtgccagccacactcttctaatagctttagtagtattaggtcatttagcctttttcctttggggcaggtactattatatctctcatttgcaggtgacagaaaggttaaataatttgtccgtggtacaaaattagaaagtggcagagctcagtttccatcccaggctgtctggctccctacatcaccttgcttttccatttctgaaatagcagagtgttcacatatccatcaacacctgcaggtctactctgaaaaaggctttgcttcagtggaactgtctgggtgaggaggatgctgcctcccatgaagatcttaaggcagaaatataaatgtaaattttgctcattaaaaccataattaatttattgaaagtgaattgttattatttcagggatgaatgcatattggaatatgctgattattttaatgaaccaagagcctcttctgggatacttcccttgtattatttgcaagcaggtcaccgtaaattttctaagagagagaatgaatagattgctgctcattttcaagttttgccttatgaaaaatgcaaaagaggctgggtgctgtggctcacgctgtaatcccatcactttgagaggcccaggcgggcagatcataaggtcaagagatcaagaccatcctgaccaacatggtgaaaccccatctctactaaaaatacaaaaattagctggatgtggtggggcgtgcccatagtcccagctactcggggggccaaggcaggagaatcacttgaacccggagggagtgagccaaggtcatgccactacactccagcctggtaacagagcaagactccatctcaaaaaacaaaaaaaacaaaacaaaaaaaacggaaaagaaaatatgtgctgtatattgggagatgataagacgatatctttgtttaggaaagaaaggcctaacatcatctgttttagactcactattctcctctaggtggccatttcttgcactacagatgtcagctgccgggaccagtttgtgtggtgctgtgcctacacaatgcaggcacattgcaatgtctccaatataattgttatgtttaacatttagagccatttatgtgggtttcctctcctgtgttccactgtattccatttttaatctcctcaagacacacagtagaaaagctgccagaatttgttttttctcttcatatgttatagggtctgaggtttcatctttcatatttccacattgcaggaaagatgagcaatgacatattgaccaaggctgtgaatgaaaatagtgcatacctaaatacttctctttaggtctcatcatcagttccattcattcataatcagcattagtcttctattgctgctgtaacaaattaccacatacttggtatcataaaacaacataaatttattctcttaacgttttggaggccataattctgaagttagtttcactgagctagagtcaagatgtcaactgagctgattccttttgcagactcattgtcattggcttttacttggctgcctatgttcctggctcatggctccttccgccatttttaaagtgcatctctccaatctctgcttccgttgtcacttggccttctctctcagaccttgctttgtctgtttccatcatcacattattgagtgcctactgtctgccaggcactgtgctagatattggagttctatcaatagacaagtcaaacaaggacgctgcttccatgaagattccattcttgtaaacagataaataaaaaagataaaatcaagtaatgataggagtatgaagaaaataaactagagcaatgtgatagaaagatggggctgggaagaatgcctaagatgccaagattcaatctcagcgatgagccagtcacaagaagtcgatttcagacagaaagaactgcaagagctaatcaggcctgaggcaaataaagctttgtaattggagttgaataactaagggagagcgtggcataagccagagtcacagaggaggcggtgaccgagtggatagcgtcacagatcatcgtagggagcttagattttatctaagtgttaaaggaagacatgaaagtgttataagcagagaaacagttaaatatttactgtttaagagattgtctgggctgctgtttaatgactagattctccatgaagggagctatctggccacaccttgcctccctcttaaaaagtatgtttccttactgtggttacatagagcctgaataaaatctaaatcttagtcatgcaggtaattgaaggatgtttccccacatctaaaacttagacctctgcagtaccctgctaaccacaataaaaaaaatgccaattcttcccttttttccaacattttatggatccattagcaatttgcagttcccataggagataaaacaagtctcttttcaaacatgaagagatttcctatggtaattataggcaaaacctggagcaaagggccactaggtaggccaaggaatagggagccagctgagtgatggaatgccatggtcaggactgagaataggccctgaaaagaataggcttagcttaggtctgttggtcttggtgaagggacagtgagggtagatcagacagtaggctcccatggacaaacagtcattgcctatcctaacaaatgaaacatcctcattgtagttctcaaaactatgtgcaagtagcatatggtcgtctataaaagcctccttcatactccttgacacccaggtttgaactgatggccatggtagaacctttctcctcgacatccagtggagtaggaatgaggtcattcctggtagtcatcttgtgccctaactgcacaacagtctgacagaatcaccatagacacagcagacatcatctggattagcttgtcggaccttctctgatggttgctgagcggcgattgcctaaggcaaatgttggcccagccagtgctgtgtcctcagtgtgcatgcggtagagggaggaagaccagatgatgaggatgctcacctcaggcttggacccctgttaaggaagaccctatcactatccttttggaggtaggaggggaccttagtttgcagacctgacggacaagcctgtggttctttcacctgatactcatgtgtccctggtccttttcatctagcctagtgcagttctaagtacttagtaaatactcaataaatgttggaatcaaaccaaattggctgacatgccccatttcttggcatatgcctggacatgtgagaatattctatatggtttctccagaacaaagtcccatcttaagaagccaaaaatggcaagcctaataagcaccatagaaaatactgtggtttacatatgttcattgcaaccctattcacaatagggttcacgacatggaataatattcacaacatggaatcaacataaatgcccatcagtggtagactggataaagaaaatgtgatacctatacaccgtggaatactctgcagccataaaaaagaacaggatcgtgtcctttgcaaggacatggatggaaatggaggccattatccttagcaaactaacaccagaacagaaaaccaaataccacatattctcacttataagtgggaactaaatgatgagaacacatagaggggaacaacacacactggggccttttggaagatggaggataggaggagggaggggatcaggaaaaatagcttatgggtactaggcttcatacctggatgatggaataatctgtactacaaaggcccataacacagatttatctatttaacaaacctgcacttgtacccctgaacttaaaagtttttaaaaaagaaaatactgtagttgaatacaatatttttgctgacctgtttaaagccttctgcgtgagttggataggagggaaaagactgtaccctctgtgtctttttaaactctctatgatgcagagaacgtgacttttcagaatatgagtgccctatacctttgaactagatggaaacctcaggtatgaagggtctgtgtttatccctgtcctaggtatagtcatggttctatacttaaggtggtttttccgggctctgtggaagtcggtggtacttctagagcttttcatgatcccagagttcatttaatgaagactctatgtaacctggggatgagtgtccagggccttgggaagtgtggcatttagggccaagaaaacaaaggaaatagagcagcacatgctgtgtggacagccgtgatccccatgcttcagcacatttttatgtgagtcggctttgagagataaagatcaaagacttgtccaggagtgcaccagccaggtgtgaaattccaggtgacagaatggaaagaaaagaaaggtttaaagggaaaggaaaggaaatgtagttagtttccttttattctctttatttttcctgtttcctcttcaggaagtttatgtagcttacaataccccagacattcaacagaaggggttgatcctcattcttttccagataatgataagcaccgagggcctgtcgtttagttttcaggtataacccttggcagtccctagggttaaacaatgctgtgctccagaaaattttaatacagaaaacttagtttgctttctgctttggtctgtgctacaaaaagtgggcaaatataaactgggagaatataaataaaataaaggctacttcttgccacttacaaatgtcattagcaataagaataaagcacatcaacaagttacaaattttatccaaccggcagggctcccccaggggcagattcttacagctctttcttcagtgttagtttggccagcagcctagggaacatcatttaatgtcttcaacactaatgacaccttttgtagggggactgtctaggattgttataaaggaattagttgttatcagagaatatcataagcactctgtaggttgttccccgtcacatccccacctctctttggggctaattttctaaggaaagctaaaaatgtttactaagcatttctgagaaacttgtctacattatgagaatagaaattacaggaactcagtgcattagcaatgggaaaggcttaatgggtctgggaaaggtataaatttagggaaaatgtaaattgcaatagttggagagccttcaagggcagttttcttgaaatggcagtgtttagtagcaatggaaagatactcaaggatcttgccatttggcattgtaaaaaatgcaactcgtaggtaggaattgcaaatcccattagtttagaatatgaaatagactcggtgtaaaaaaaaaaaaaaaaacaacaacatttgatttggggaatgtgcttggttccaggccatgtaggatatggaagtcttttctgtggtcatcccacctagacaaagaaccagttaacttttcaggattctctagaattaggatgttctgagtccacgcctgactctcagaagcttcccaaactctactgccttgacttactttaatgagcatttaggatttagagaaaaagaacatcaacatgccctttgctccatgatctttggcaaaccatggactgtataagcacaatatccacatattggattctgcaaaccatgaagaattcaccgtgttatttgtgtgtgcacagaggaaaacataaacaaagagtcaattaatgacattaaaaaatttgcatgtcagtattatagaatgtcaaatttactgtacagaaatatatgtattatttttttatttatatcaagaaaagtgataaattatcccatcaatctagttcccttacaatgtcagatctggtttaggctgacaagaaaaatgggcggtactgaaggagatcgtttagaaaatattatagacacccagagaggaatgaggcaatggtgaaaaatattaatgcagttaaaatagttttgttgaaaaaatgaaacattgatcacaaagattgcatgtaacattgtattggctgttcagtataataattttaatactactactactactaataataataatagtaaactcacattgttcctgaccaggtacagcttgtagctttaaaactgcattgatagggaaaagctgaagaaactgagcctgttctctggaacaaaggataattatagtgacctaattgtagcttctattacaaaagcagaaatgatagccagacaaattatctctgctgtcaataaagaaagctgtacagcaggtagtttataatctcttttaatgatactacttcttttaccccagagctctccatgaaaaaccttttctgacctcgactaccattaccactatagggagcaaacctcctctttactctctgttcatctctgactctgttgtttgggttcatacagtagcaacaaagagaatttcactgcctacaacttcctagcactggccaagtcagtcagagctatgctattgtggacacattctgcatgagacaaaataaatcaagaaatagtatggaaaagtagcaaaatgttctaaggcttttgaggagtagaaaatatgaaacactaatcaataatcatttaatgaatcataaaatgcaaatgagaaaatcagaaaatatagatgcaatttataccacagataaagtgctaatattgctcctattcaaaggcctttgaaaaatcaagggggaaaatggctagcaatctgatagtaaaatcagcaaaagatatggacagctcacagaagaggaaatgaaaatggcccttaagcatatgaaaagatactcagcatcatataagaagagataggctaattaaaacttcaccgaaatatgacttctcacctatggttatcaaatttcccaaagttcgacaatgcactctgttgatgagactgtagagaaacaggcatcctcttacagtgtaggtggcaatgcaaaataaaagaaatgtggaaggaattttgtcataatctagaaaaaagtatatgtgtgtttctctttgacccagcaatcctgcttctgtgaattcctcccaaagccacagtggtaacaatatggactgacgtttgcacaagatttttcattatgacattatttgcaatagcaaaaaatcagaaatacccaaatgttcgcaaatgcatgactcgttaaataaacaaaagcatgtccacacagtagaatactatgaagcattttaaaaatgagaaagatatctaaagaaattgtagtgtctatgatttctttgctaatatggaatgttcttctgtctattactatgtaaaaaagcaaagtatagaaaaatatggacagtatgctaccttttgtgtaacaaagaaggcatctaaatatataaacatgcttgctttttttaaagaaacaaatatagttatattgcatgggatggagaagacagaaatgaaagctatatattatattttgctatatttaaattttgaaaaatatgccttacatatagcaaattaaataaaaaggaaaaaacaatccctaaaaactgaaaacaaacgaaaataaataacctaactgtgaaacaaattggttgcatagccattcaggaaaaagaattacttcaagtgacattagaatacacgttttgattatacatatttagtgtaatatattctagcaaaaaaatagagcaatgaagacatcttaaactttagtagtcaaactgttagtaattgctgtgatctgaatgtttttttcgccatccccccaactctgttccccacagcaaattcatatgttgaaacctaatcatcagcgtgatagtattaggaggtggggcctttgagaagtgaagtgctcatgaatgggattagcgtccatataaaagtggccccagaggctgggagtgtggctcacacctgtaatcccagcactttgggaggccaaggcaggttgatcgcttgacctcgggagtttgagaccatcctggccaacatggaaaaaaccccatctctacaaaaaattacgaaaattagccagatggtgtgcacctgtagtcccagctactcaggaggctgagatgggaggattgcttgagcccaggaggcagaggttgcagtgagcagagattatgcagtagcattcctgcctgggcaacagaaccagactctgtcacaaaaaataaaataaaataaaaagaggccccagagagctgcctcacctcttctgccatgtgagagatccagcaagaagtcagcaatccatcctggaagaaggccctcaccagaacccaaccatgctggcatcctgttatcagacttcccagcctccagaactttgagaaatccatttctattatttatttataaggcttccagtctattttattatagcagcttgatgggactaagacaataatattgatattatcattttaaaactatatgataaaaataattatatcagtgttaagaatcaagattttgcatttaaaggagggaggaataaatatacaatattaaaattttaaaagtaaaaattctgtaatgttaaatttgaatcagaaatattagtataaacatatgggctttttttcccccagaaatatgtatttcctaactctattcagagaaaaggctgagaaataataataacccagtggcagtgagcacgcctagggcccagattgtggtctctagatatcattccccactaaaaacaaaggggtccttggaggaatgactgcttccaaattaggaatacaagatactcaacataaacctggaactacttatttgtggtaaagcaaggaagcaatcaaaggctaaaggttaagccagaagaacgaaagagctcatacaatgcagtctcttgactaaatatggacaatatgtgcaagaaaaagtataaggaatgcaattgaataaaaatcctaaatatgttattacaaatgtgtattatatattatggacttacataaaaaaccataagtttataattatgttcacaatcccgtattcccccaaaaatgttcctaactactcgtttgtcaccattggaactatctaggacactaactcctgactctgaaaattagcagtgaaaaagaaatatttaagcatttattcagatttcccaatactaagtacatctcaccataatcaaaatgccaaaattgttgaaagattttctttgcagaagaatcccagctaatacatttttaaaatggccttcaaaaatgaccattgtgcaacccctaatgaaataattaattcagtcaaacatcatcagtgaaagaaatgattaaatgaaacattgataggggaactttacaatggagacatcagtttgtctccttagcattactaaagacaatcagatatttaggatggagaagacagagatgaaagctatataactgtacttcgttatgttaaatttagaaaaatacacatttttccaaatttttgtgtatgacacaatttgaagcgtatgtgcttcctttaaggtatttatattggtttcatagggccgccatttaacagattaccatcaacttggtgcctttactacaaatttgttctcttactgttctggagaccagaagtctgaaatcaaggtgtcagcagagttgcttctttccagaggctttgagagagaatctgttccatcttcttctgtgcttttcttggctgccagcaatcctgggtgtttcttagcttatagacacatggctccaatttctgcctctgccttcacattgccttctctggctcttctcttccgtttatgtcttctcctttataagaacatttgtcatcagatgtagagcctatatggataatccaagataatctcacaacaacatcttaaacttaattacatgtacagagacctgtatccaaataggattgcatcaacagattccagatggacatacaatttccctcgatatataagtgaggggcctgcagaactcacttatatgaaaggtctgccctccatatatgcaggttccttatcccacaagtaccatatttatccgggtttagttgaaagaaagctgtgtataagtgaacccatgtagttcaaaccctgttgtttaacggtcaactgtctgttttagggagccaccattcaacctaccagagtactcctcctcaaaaatgttgaatctaactaagcctccagctgcactgtccaatatgataaacgttagtcacgttgaaatttaattcatttaaattttaattaaaattttgtaccttagtcatactagccacatttcaagagttcagtatccatgtgtagctagcggctgctgtagtagatagctcggatatggaagatttccatttccatcatcacggaaaatcctattggaaagcactgctctagaagttactcttcataaacaagatatttggggggatggaggaataagttaaatcatttcacaagaaagtaaacagagaaatccagcacatgggaccaactacaggaagatcaacttggtttccgcaataacccaaaggcatggaaaaaataaaaagcaaaaaggaaaaagagtacagttcagtacatttaatgagacttaagagaacaccaaatgtaacgtacaagcatttttacaacctgattcaaataaatcatctggggaagacagacatttttaaggcatttgggaaaatttgtttatggagtattagatgataccaaggaataattgttaatttttaggtgaaataatggcataataaaacattcatgatattttgatatgcctttggaagtatgtagggggatttactttcaaaatgcttggtaaaaaattaatagaaaaatatatttaaaatatgacagaatcttgattttatttatttattcatttagagacagagccttgctctgttgcccaggctgggtgcaatggcacgatcttggctcactgcaacctccaccttccaggttcaagcaattctcgtgcctcagcctcccaagtagctgggattataggcatgtgccaccacaccctgctaattgttgtgtttttagtagagatggggtttcaccatgttggccaggctggtcttgaactcctgacctcaagtgatctgcccatctttgcctcccaaagtgctgggattacaggcatgagccaccatgcccagcccgaaacttgataattattgaatacagaaatgaaacgtatatgggagctcattgtgctattatcctacttttggatatctgaaagttttcattatatcaattttttttttttgagacagagtcttgcactgttgtccaggcttgagtgcagtggcgctatctctgctcaccgcaagctctgcctccccggttcttgccattctcctgcctcagcctcccgagtagctgggactataggcgtctaccaccacgctcagctaattttttgtatttttagtagagacggggtttcactatgttggccaggatggtctcgatctcctgacctcgtgatctgcccacctcggcctcccaaagtcctgggattacagacgtgagccaccgcgactggccacatcaatttttaaaatgtgatcatgtttagattatttataatctaacataaatgaaagaaacattaatgttgaagacaaacacctcaacagaattcaataattcaattcctaccatttagtaaatgttagctgtcaggcaaagtgtgtagcctctctaatctcagctgcttcttctctaaagttaagacttctgtacattatgagaactgttatataatcatgagaaaatatatcactaatattattattgatgtcagttcatctttttaggtagatgaaatactggacaggatgggctcttgtgtgttgcaaacttttctattttgaggcatttgaagggcagtcttaattacagaattttgtttttaaaccagttttatttttagctcatggatccaattgcttcttaccatctccagtgatacacctgtatggacaaccaccaccttccctcacctggcttattgtaataaccccctaactgttctccacagtttttctctcacccagaaatgcccacttcactctgttctcaacaaagcagtcagagagccctttaccatgtaagtcagagcctattacttcactgctcgcaacctctagtttgcttcccacctcactgagagtaaaaaccgaactctaccatggacctccaggccctgtttgccctaagtccctgcttcctctctggcctcctccaaattctcactccctcacactggccttgctgtttttagcacatgcctgcctcaggggctttatatctgctgtctctctacctggaacactcttctcctgttatctgtatagtttaattattttcttcttcttcaagccttttattttatattttcagtagtgcctttcctttaagtaaatttagtgcctttaaataaaattaatttatttaaactttaattaattaaaattttgtaccttggtcatactactcacacttcaagagttcagtatccatgtgtagctagtagctgctgtatttaataatatatatttaataatgtaaactcccttcaaaaactcctactacctcttcctgtttcactttcccctatactacttactaaaaacatattttttcataaagtaccaatttgtaggccagcctttgatgttgacaatacaaatcattcttattgattcataaatacctcctctaaagactagacagcttgttttacatctattacaagtttctgcattcatcattcaaaaaattttggaagtgttttggttgcttgagaaggggtgtgtttgcttaaggaatttaaatattttcccagcaattgtattctgttaatttgttataataactgcttttagataatgcatttaaaagagaattatatataactcaatttataaataatgaatctaaatttgttagtttataaaaggtataagtagtataatcagcatttttgccttttctttttgtgttttctttttaaattgagatacaggctgggcacggtggctcatgcctataatcccagcactttgggaggccaaggcaggtggatcacctgaggtcaggagttcgagaccagcctggccaatatggcaaaaccccttctctactaaaagtacaaaattagccaggcatggtgacaggcacctgtaatcccagctacacaggaggctgaggcaggagaatcacctgaacccgggcagtggaggttgcagtgagctgagatcacgccactgcactccagcctgggcaacaagagcaagactctgtgtcaaaaaaaaaaaaaaaaaaaaggtaaattgaggtataatttacataaagtgaaatgcttagctctttgaaaacagagtaatattctcttttctcttttaatgaatgtatgtcaaattacagaacatttctagcacccatggatgttccctcatactttttcccattcataggtaaaagcctgatctagaattgcttacaaatggaattatatagtatatagtaaatccttttttctgtccaacttctttcactaaggatgataattttaagattcatccctgctgttggctatttttgtagtttatttcttgttattgctgatttatcttctgttgtgtgcataaaccatagtttgattatccattctcctggtgataaacagctgaattttatgtctaatttttgctatgatgaataaagctgctactgaacactcttcgtggatttttggtaaacatatgtcgtcatttcttttttcaattcacctgaggtgaatcactgggtcctaacatcagtgaaagtctagttttgaaagaactcctagaccttttccaaaagggattatgccattttatacttccaccagcagtgtgtgaatgttctggatgctccatatcctttccaacatttgtttttgtcattcttttacactttagtaaggacatctcattgtagttttaatttgcatttccctgatgatgtatgatacatttttcatttgcctattaggcatttctagttattatttattttttcattgaatgataattacttgtttatgtctcccttgatagtaagtcagagactattttttgctagtatatagtataatgtcagtaaaatattgaataaattaatctgtcaaccaaatattagcaggaagaacactcgtgacgcattcaaggagcccgtaatctagttatggaagcagaaggtctagaaaaaatcataaaagttttttaattggttttgttttctacaaagtgacatataacagtttcatattaatagagaatttactggatgtatgagttgaagaggagacaaagaattgttaaggtcattgtggagctgtttatgaataagttaagtccttatgccagagaaaactagagttaaatatttgattaatgggacatgagtaatattaggaaaagcagttgatttaaagagaccaaataaaagttcagtgaacaataatttgaagaaaattgtcataactgagttgacaaagggatcatgagaaatcaagtttacaagaaataaagatgccttttggtacagggtatttaatgttttcaaaaacatttttattcactacaacttgtagttgttaggaaattttttatattttttaagtttttaaaattttcttggggagggtgggatgggggtgagagttgagaaactacctgttgagtattatgttcactatttgcatgatgcgttcactaaaagctcaaactttagcattatgcagtataaccatgtatacccatacctgcacatgtaccccctgtactgaaaattaagttaaatttatttttttaattatcttaaaaatatagaaaatgcaaatagcacataaggtataaaggctacctctaattccactctctagatgcaaccacttaggaattttttgtgtattcttccagacattttctatgtatatgtgaggatatatatcatataaatatttatatgtgtagtaccctcacccttacatacatcatcttctttttagtataggaatagtatgaccctatgttctacagctgcataatacttttctatattcccctgttaatgcatatttagactgtttcccatcttttactattataatagcactttgtgtgtttttctttttgatacctgggatcctttaattataataaagaaatttattccatttacatttattttcataacataaatttggtcaacttatttttttgttactttcttttttactgctatctcttttttattttctgctatatggtaaagagtttattttgtgtatttctctcctgctgaaaatttgggttttagtggtttctttgtaattatatttaatatattcaaacctctgtttcttgatgtatcaattttagacagtaactactgatgcctgctttataaagtgagaaaatgaagaagggtgaaaataaagatagggtactctctcccaaattacttccttattaacttgtgattttcattagttttttctatattttatattatcagagtttataatatttacattttttctgtaattattgttcccacagatatttagtcttagttttatatttaaatgaatgtattgcttacctccagacctgctattccacagcttcaccattatcttagtccatttttgctgctataacaaaaccctgagacagggtaatttataaagacagaaatttattttctcatagttcaagagaccgagaagtctaagatcaaggtgccatcaggttcagtgtctggtgaggccctgttgcccatagatggtgctgcctaggtttcctcatttggcagaagaacagaacaatggaatagcaaagagggaccttagctagtgctctgtagcccatttataagatgttaatcttttcacgatggcttagtcacttcccaaaaggcttagtcacttcccaaaacctcctcttaatactaccacaatggagactgtatatcaacacatgaattttgggagacattaccgccgtagcaaccatgttgaattcttcattttgatgcagttcttagtttgctgttttccattattaataagtttttcaagatgggtcaataagtaccatattccctctatgttttcaaatgtttgagagtgtttttcttttatttgtgttagaggccagcatgagtttgcctgcatttgtcgattacttgattttcctccttgagacagcacttatgcttactatatgcaataagctctaacattttcttttactgtatttaagtatgaccattaaatttatattatcttctacggaagttttttttaattttctttaaaaaaaaatctgtgctaaaatatagtattaaataacatgggcatagtggtctaaggttaccagcagcttcaattctacatgatctctcaaaatacccttttgccagatttgctgggtactctgccctggtggcttcttttctacggttttctgttttgggagagctagtctgagatcagcctacttcttagtgaagtcacctagattactggtcctattttgatgagtctgggttatataactctgctaattctgcctatcagatacaaagcaggttcatacttctcttttctcactacttcacctccatgaagttttttttttttaaggtgggagacctgctcaggggaaatatctctcttctgtctctgcctctcctccattctgaagctggatccccacaaagaattaccgtacaattccagggtcctattcctatccttagactatattaaagtttattgactgtacccctctagactccctccttattttcagtgaaatgtatacatggctggagatgcagccatatatcgactggtggtgcactccgcctttagggctgagtccaagtttcatagcaaggcatgagattatggtcgttttctaattccactgtagatagaattttcttcccaatttctcaagtgtttgttcacatagagtttcagggagggaagtagagtcacttacttgacttcatcatttattatcatctcttattagagatcctcaatctgacagatatgacagaaatactctttaaggaagattattccagagccttttaaggtatatattaaagtgggatgaggtgacataccaaaaactctcagaataatctaggccagtacagtccaatagaacgctctgcaatgatggaattagtctctatttgtgttgtccaatatagtagttactagccacatgtagttactgagcacttgaaatgtggtttgtgaaactgagaaattgatttgatatgaattatttcaaatttaattttatagggccacactcagctaatggccattatattggacggtgcagatctgggcaacataaaagtctgaacattagactgtgatgaaagaaatggaaataaaagaggatacccaagaggtgttatggagaaaagaagcagcaatgttcccatagaggaaaagagaaagaggagatttaaacaattcaaacgcagtttgctcagaagaatggggaaactggtagtaccgtcaaataaaaaagggtatcttttgaaaaataaatattttaacaggttgagttcccagtggtaaggaaacctctaagtggaaatgactataaacaagtaaaattctcaatgaattgggggtgggggtgagggtcaaagctaccaaaaaaaaaatttccttgacacttccgtcttggtctcttctgccaccatacactccttttcagagattaccttgtcctcctcaacatggagggaccctgatatatgacataataatgattgttcagagaaattactattttacctgttgaatgattaatatgaaattagttactgaaacactcactggtgcagagtatcaaagaaacggttttgtttcagaaaggaaaaatataagataaaatattgcttggcacagacgtagtacttttcatctgagattctccacgtactcagcaagtttaattaatgagaaaacctctaagaaggaagtgatgaaataaggaacacagataccagtgttctatttctgtgatttttaaaaatcaagcttagtattttcctcttccattaatgcacacaagtattgccccatgaggcagccatgagatattcatctttctgctgaatgatttctcttgaaggcatctcacttatgagggatagcaaccacacagaatcctaccccctaactttattgatgtcctttgctctatttgcaatggaaatccatccctatcatcagggtgcagcaagcattctctgataatcgagtctgcactgtctctggaaagattgttttgttgcagaatggagcaggttatcttctttatcaaaaattacttaaaacaagcatccatgaatctaggactaacaggcattgaaagggaataggcaaggccccttaacgggtaccctactgtgtaatcttcctttcatcttaattcagaatcccttggaaattcaagttgccgtatgcaaaaatataaattcttctaattacttctgtgtagggcacaggtttggcctaatcaaaagagatatgcaataatatatcctggcatttgttttcatctgttgtaacttgaggataggtgctggggttttgttttggttttggttttggtctcatgccttcttattctttttgttttgttttttgctttttgcttcccaattgaaattgcccaatttcttttctgctccttactcagaaaaataaaaaacaaaaatgttgttctgccaaaagagaaaaatacctcagaaaatcctgcgttctaaagatttttacaaatgatttgatgttttgcaaaataaaactagcttccatgtgcaaaacagctgtttttgttcgaataggggaagatactgatgggtttcagttgtttttttaactcgtcctggcctcccgtatgtctccagtcatatacagatcattcacttctagcccacagccctcttatattctctgggcccaggacatcaagtttgtcccatctattcttgactttctttagccgcctgagccagcatcgtcttatctctcctcttgtacacagtgccccttctttgtccagtgacaaggtttacactcttttctcattagtgctgaagacctcctcacaccatcaagatcaccattgtccagtaagaggctatagtgacctttccattttaatacattactgagaatttagtagagctgatttaacactttccagattaaatgtcaaattctcaaaattcagatggatttggaatccacctaagtatatttttctgcttccattcccagtagactgcacagtggcactgattagcactagcattttgtaatatcacttaaggctttagcactgtggagttctgccagtaatggtgtttaattcacttatatgtgccaattcatctctgtcaggaacctattaatttcttcactattttactctgtccctagcgcctatataatgagacacaataatccccatttgtataaccaaaaaacttagagtctcttgtaaattatccctgatcccactgcttttagtgaccagaaagcctctgtatttctttttcatatttaaatcaattttcacaagttcctttctttagaagaatacacaggaactctagggcactaaattactgaagtcgtagaaaaactagaggattttgatgagtttgttaacatgcatccctgtcccaagaaaggcttctataatatcgaaccaaagatgcactgttcccacaagcacatgccatctgtggggagggaatgtgaatgaaaacagcctctgaagctactatcagcctagtcatcagtgggcaagatatcaaaatacccatagcattgctatcaaagtaaagaccctgtaacaaataaagatcagatatataaaattaatcttcttatgctgttggcatttctgcatgctgtgatcttgagtaaacaggagaatgacagctaagagacgaggaagagttaacataaattcaagagagtatttcattgtattattatatgaaactcacatacatctttgctacctgtactgtatttttcaggattggagcaaaacatcaggagctaagggaaaagcaggcaagaggtcttcttgattatgctactggtgcaattggatcagtgtatgatatggatgatgatgaaatggaccccaattatgccagagtgaaccactttcgggaaccatgcacatcagcaaatgtctttagatctccatctccccctcgagctggaccatttggttaccctcgggatggccatccactgtctccagaaagagaccacttagagggtctctatgccaaggtcaacaagccataccatccactggttccagctgacaggtaataaacttagtgaaagataaatgtagctttaattcagtatgtttcaaatcatctctactgctgaaaccgataaaaaatgtctccttcaatcaattaaaactgaaacgagtcagtaccctagacaagtgccatcctttgaccgacctgtaagatatccaccatcaaaaataaaacaatagccaattgtaaggtggcatgaatgaatagtagtagcagagttcatgatgcaatagggagccatttttgaaggagtattgtgacagacatctcatgaagaaaactttgaacgaatattgtcctttctcctaagagaccaattgtaaaagatttattcaggaagatggcatggcacatggaggtggagagtcagaaaagagaagatgatagcttccaagtaggtgtaattgaagtgggaattacagaaagctgcagaggagcaggggcctttgaaaagtaagatgggggttttgtactcaagggaaaggtgaccctgtatagatattcatggatgatcagaggtagaaaaagaaataatcttggcaataggagtttgatgaagtagagaaagataagaggtgacaagtccacagatctttaggtttagcagctaaggagagagataataggactatctgtcagtacaattgaagtaggtagaaaacaagatgattccaaccccacctcctgccaaaagtaaaatgcttcatgtcttgaaagactgatgtaagagagttttagtcgatatacattgttaggtgacccttggaattacacatgcaaggaatgagttgactgatcttggactaatctgactagcttgacgtctggagggaggtggtggggaagaagggtagcaggcacagagggctctcattctggatgaagaaaagacttgttttccagacttcttagggtcctgacaaccacccagtccctattagtaaccagcctttgtgtgatggcatgatatattgcatatgtttaccatttacatttccccagctgggtgatattatgcactttcaattaggttggggagaggaagggaaatcatggcatttttatgcagactgtaaagtgtagcttcaaaagactgattacctttcagagcctttccaataaccaagtgggaaggaaggagcaatttttaatccttactgtcaggcatccaggttgataatattaaagaaagatggtgaagtttttctttgggacaaaatgaaaatataaatttttatgactgtgatatagccataataactaaactgctaattcaaagaattgattaagagttggatttttctccccagccttcatagaggattgaattttattgtataaataataacaccaggcatgagtctcttctcacccaaaccatagtcaatcttaccttccctaaattagataggtcttcataacaatcctctctgcgtattccacagctagaatcccaacacagagggactgtttataggaacctcttaagccagtattttccaatactaattccatggaaataaatgtgaggcattttataaaaaaggattcacaagtccaatacatatggggaattctaggaattctagggtaagccacaaggaacaggttttccttttttttttttttttttttttttttgagacggagtctcactctgtcgaccaggctggagtgcagtggtacgatcgcggctaaccgcaacctctgcctcctagttttgagcgtttctcctgcctcagcctcccgagtgagtagctgggattacagatgcctgcaaccacggctggctaatttttgaatttttagtagagacagggtttcactgtcttaaccaggctggtcttgaactcctgacctcatgatccacccacctcggcatcccaaagtgctgggatttgaggcataagccgccgggcctgggaagaacgggttttcttattgcagtctttttatgcctaatatgctgacatgcattctgagtttctaagaggaccatccaacaaccagcatgcatcatcccccaaatttttgtcacctaaagcatatgtttcccccagatctttggaacactatttaggaaactctactaactaatctatgtcgacgtgaccagaaaataagtttcttatgataatcttaactgcagccactataaaatgatatttaaaaaattattgactgcccagtccagacatatgtgtaaaagagtgttacttttggctctgacccctttatattaaaagtgatctaaagctgctttcaatagagttttcaccgctgtcctatttttggatagcagatcaaaatgtgactctttatactcagaattatctttatcctgctcttatctttaattatgcttaaagactgccctgctccttgttcttcaagtcttcaagcaagccgattttgtcctggcacatagtaagcattcactaatgttaggtattatcatcatcattgttactattattattactctcctttttcaatgaaaatctgaacttccctgatatgcctgtgcccagataagtctaagaagagttgctatggcagtttccctaatagtatccgtaagcaggaacctacaaattctaaacataccatacgtactgttagagggcaatgccattcatccattcatcttttcattccttcactcatttagtaagtatgtatttgacacctaatgtgttccaactactatagaaagctttagggaagatagagagatgattaagaaacagtcccaggccagaagaggtcataatctagtgaatagaggaccaacacatgtagaaatggatcattgcattgtcttgtaaatagaaggaaaagaagtttttcctttctaactctgcctaagctagtcaggaaagtcctccaaacagaggtgatatttgaactggctctagaaggcttagtaagacaggagcaattgcagtggaagaattgttttctttgcagaataattaagcatgcacaagagcaaagtggcctgaaagagcaggcctgttaggggagctcagaagcacccagacacggagcatgggtgggaaggaaagtgataggaaaagtggctgcaaagcaggctggggtcagtttgtgatttaatgggttgtatcttaggctgctacttattgattggtagtggctgtccagaaatctgtgttaatgaaggtcctgaggcaaggcacagtataatcccagcactttgggagtccggggtaagggggaatcacttgaggccaggagttggagaccagcctgagcaatatagcaagaccccatctctataaaatattgttctttctttttttgtgtgtttgagtctcactctgtcacccaggctggagtgcagtggcatgatgtcagctcactgcaacctctgccttctgggttcaagtgattctcatgtctccacttcccaagtagctgggactaccggcacaagccaccaacccgactaattttttgtatttttagtagagacggggttttgccacgttgaccaggctggtctcaaactcctgacttcaggtgatctgccccccttggcctcccaaaatgctgggattacaggcatgagccaccatacccggcctctacaaaagttttttttttaactatccaggtgtggtggtatgcacctgtagtccaacctactcaggaggctgaggtgggaggatggcttgagcccaggagtccaaggctgtagtgacctgttgattgtaccactgtactccaccctgggtgacagagaaagatcctgtctcaaaacaaaaaagaaaggttctgaagttatgcctgaataagggtatttttcctggactccagaatgatgcgtggtagcaagtgtgtagtgggttttgatgtatttgccaatcccgtagacaatgggagccactgaagcgtcataattggggaatgagctgatggatttgtgttttgggaaaatagctcttccaacttgatggcagacaaagaagaagatggttagactaagagacagagtaagagatgattacagtagtaaatgaggacaggagcttgaaataagagagtggcattggagacaggagagtataagaagcagcccaaaactttaacttaaaacaaagacaaagatgtttagcagatatcacagacatgaggctttcaaatgcttcagagagctcagtggaataaggactaaaaagagggctttagatttggccactaaaaggtcatcagttaatttagagagaacagttttagtagctaagtaggaccagagggagaattataatgagaagagaattgattaagaggtgagaacttaaggagtgagctcttggtgacaaagagagagcagagttatagaatggaaaagttgcagctttgaagttccttctgtgacagtatttcagagctaacaagagaattcagagactgtctagagtgaccttctcatatgattactgcagaaactggggcccagagaagatgagtgacttgcccaaggtcacacagcatggaatcaggactttatcctagatctctgtgttctacagtcttcttttccctaccccacactatgatatagacccacactctcatttcctgcttgacgaatgtattagtccattctcgcactgctataatgagatacctgtgactgggtaatttacaaagaaaagaggtttaattggctcacagttctgcaggctgtccaggaagcatgatgctggcatcagctcagcttctcaggaggcatccacaaactttcaatcgtggcagaaggcaaaggggaagcaggcaggtcttacatggcaggggcaggagcaagacagagaggagggaggtgctacacacttctaaacggccggatctcacgagaactcactcaccattacaaaaacagtaccagtggggaaatccacccccatgatccaatcatctcccaccaggccccacttccaacactggggattacaatttgacatgaaatttaggcagggacacagatccaaaccatattaaggaaattagtacctggataagtaaagaagcatccatctgggctcccaacatataatggcagattaaatcatgggtatgggaatgaagctgatatgggtccagtccacttccaaatactgctgcatgagctgcatgacttatccaagatgccattttttattttcatgcatttaattcaacaaatacttattgagtatccactaagggtcagggcctgagttcagtactggactcaccagggaactgggaggaagatgactatgctgccttcattatggatattaggatccaatggcaatacaaagacctaaacatgcagtgagaacacagtgtggaaagtgcagccgaagagtaagtgcagggtactgtttggggccaggcagcaagggtgaaaacagaggggagaggaagcatgatgtgttagggggactgaaagactctcagtaaaatagaaacctggtgggaggggtaaatggaaagagagaacatgggatggcctcagagctgaccaaaggcagatgagagaggttggccggccttgacgaagagtttggactctatcctgagggaggtggggcagggtttgggttggagaagagctcgctgaggggaagaactcactgagggttttaacgtgagatataatcctggaattcaataggctgtttaatagcataggcggtttatcctcatctacttatttgtaaaagggaagattataatatagccttgcatcctgtgatggttaaatatgattttacattttgcatttttttctatctccatatgaaacataccctatttgtccatatatctctgtcacataggaacagatcgtgtgtatgtggtccatagtagctttctaatagaggcgacttcggtctcatacctacttgcttctcaaaggttggccctgaaccttcagtccatcttagaaaaaaaaaattgccttataaaagattcatctataaatgacagtggttaaaaaaaaatttctaccaccaggacagagacacgtgactggattttcacaatgctggttcttccaggatttgaacgtagcatgggttaaatcctgccctcaaagcctgacaattactcaggtttacaatgtgttagttttccaccgcaatgccagcattgaaagggctcccagagtgtatgaacatgaaaactttatgtctggatgaggacaaaacagttccaaatagggggctagaaggtatatgtggcacacagcacaaatgcagttttgcattagtttgtgtgacaatttgacattcatttctagaggttgccaaatgggtttgattgcacacagtatcagtaaaagaaaaaaattgctttcgggtgttaacctctaaaaatatgggcatttgtttctaactgatatatactaatttaccctactaatatattacatagaagacatataccaaatagagaaattaattttaaaatgagactttaacaaattgtaacatgagtagtggttctgatattttcttcctccctcaaatggggtttatacagcccattttggagaccactggtctcagcttcaggcttcagggtggtagggacctatcctgcttttgctcacctgtctcctcagttcctggggcagtctgtcctcaataaatatttttggaataatgaatgaatggtttaacaggatctttcttttttttcttgagatggagcttcactcttgttgcccaggctggagtgcaatggcacgatcttggctcactgcaacctccacctcctggattcaagcgattcccttgcctcagcctcccgagtagctgggattacccatgtgtaccaccaaacccagctaattttttgtatttttagtagagacggggtttcaccattttggccaggctggtcttgaactcctgacctcatgatctgcccacctgggcctcccaaagtgctaggattatgggcgtgagccaccgcacccggctgatttaacagtatcttaaagttggctagcaccttcagtggtcaagcctcacgtcccactcatcagaggcatcttctccatgaactgcctcatgaatgtcacctaactcacattggcatacttcagtgacaaaattcatgaggcatcctttttcttttagatcactctagttgatgtagaaatgcccactttttacccacccaaacactgtctccgtgtagcttttaccagggatcttgggttgagctacctggacacagcatctaagcctcattaacagccttttaggtatttaaagtgactgctatgaccaccttcactaacaaacatttatgaactctaaacatatggccaggctctgtgcttagcactggccttaagaaggatgtagaaaacacagcaaatgaccttgagaagtttcttgtataatcatttcttcggcataaactcccccagctgttttagccccttcttaaattataattcacaccttcagccctcttggcagccatttggggaatgtgtacactaaagtctattgagtttatgattgctttgttgggcatggcatgcagaactgggtaccatatttcagatatggtcagaaaatcacagaagtcagtgggactctgggtatcctttgattttaatcctttacacttattaatgtggcctaagcttttatgtccattgtcattattagcttatattgcactttttaactaaatgtttggtttttttcacttaagttgctatcaaacaagattccccaataaatttacaaaatcctttattggtacaataactttttaaaatgtgggatagtctctttatccaagttgaatatttacttgttagggttagcccattgttgtagccaataaagatattttaaagtatggatttttgtactccaatgtatttgttattccctagattttaccagcctcatatttaatcattgtgggctcctccatgtcattgataagatcgttgatcaatgtcaaatacaatcccagcactcatcactcgagacctccattaatcaacactctttgggatcttcagttagctattaatctagtctgctattatctagtctgcattttccagttcatctgaacttatcttagtgataacgaggtacaccatgtttgtgaaaatccattgatttaccactctggtaaccctaacaagaaaaggaattacggttgggtgccgtggctcaagcctgtaatcccagcactttgggaggccgaggcgggtagatcacctgaggtcaggagttcgagaccagcctgaccaacatggagaaaccccatctctactaaaaatacaaaattagctgggcgtggtggcccatgcctgtaatcccagctacttgggaggctgaggcaggagaatcacttgaacccgggaggcgcaggttgcagtcagccaagattgtgccattgcactccagcctgggcaacaagagcgaaactccatctcaaaaaaaaaaaaaaaaaaaaagtgtgggaaactatttgctcttgatgaatcttagagaccgcttttttttttgttgtttggagacagggtttccctcttgttgcccaggctagaatgcagtggcgcgatctcagctcactgctacctccacctcccaggttcaagtgattctcctgcctcagcctcccgagtagctgggattacaggtgcccgccaccacgcccagctaattttttgtatttttagtagaggcagggtttcatcgtgttggccaggctggtctcgaactcctgacctcaggtgatccacccgcctaggcctcccaaagcgctgggattacaggcataagccaccgcgcctggccccctttatttttcctctttctaattttcgtaaataatgtgtccatttagacttaattatgcaaaataacactttctgtgagctgatgtaataccaggcacttagaggcacttagtatttgcttactaaatacttacttagtaactgatatatggcagctgtaaaattgaagtggcagacagcgcacagctcctgaatgctccagttaagcagcttttgttttccagcatgtatccactaattttgcagaaaacttttattgagcatctgttgtgttccagaggtcacacaaagaagtttagaagcaatctgactctcaaggaactcagtctgatagccaaaactatctcataaacaaataattacaatataatatgttccattagaatagaggtgtatgtgggatatgttgtaaaaatcatgaaattgttaagtgcattcagtgtgagaaagacctgagactatagatttatctttccagggccttggttcaaatgtattaatttttcaaagcctgatttctcactgtaaaatgaagacatgagtatatctgctcttgtctggtttattcgtggattaaatgaaatcatttcagtgttaggctcaataaatgtcaactatatttaggaagattattggactatatattatcagactgtattacatattattggtatatatattgagaagattattgaactaaatataactattgaggaaggttattgattgtatctagctgttgaccatttaaaataataggtttgggaacctgttggagtccatctgttccagggtcccatatttagtggttaattcctagctccagcctcaactcctgccagtgtattgcaatcatcagaaagaaaaagtagaaacagaaaagcaagtgaggagatgaaaggcaagaaaacttaaaaaatttaagtgcagattctttttttttttttttttttttttttgaggtggagtctcgcactgttgcctgggctggagtgcaatggcatgatctcggctcactgcaacctccgcctcccaggttcaagtaattctcctgcctcagcctcctgagtagctgggattacaggcgcctgccaccacatccggctaatttttttgtatttttagcagagacagggtttcattatgttggccaggctggtctcgaactcctgacctcaggtgatccgcccgcctcggcctcccaaagtgctgggattacaggcatgagccactgcacccagcccaacaggcagattctgttagatcagtcatatcatctgcataagtgaagagagcattcattacacactgagctactttggcaattgtttgttacaaaccataactcattagatatccctaagctcatcatcggaactgaggcaatatcctaccatgtcacttgattgtccatttggttctgagtcaggcttaacaatcatccacagaacagactagtccaatttctatgggtcccagaagagctgtcaataacaacagtgtcaagtcagatcctgtttgactgtaaacaacagaaaactcagctgatacacatgtgtctcgcccattaaggaatttagatggccttttttcctcttcctctcttgcctttcccagtggcaaagcctcttcttcatgttgcatcatgattccaagatggccgtagccactctaagtttcatgtccaccttccagggagaaaggagaaaggggcaaatggccaatggaatgtgctagtcaagttcatccctttgaaaagattccccagtagactccaacaacttctcattggcaaaaaatgtattaaaagatttactctagtggcaaaaaggtgttgaaaatagaatttcaactttccagtaaacaaagtcaagagagaagtgagtagtgagtggcttttagggcgacactctatggaatccaccacaaatagattacctttagatgtcttttctcttttttttcagttccctttaataatgcaaaagttatagattcatagtatatagtactttcgtcaaatatattcttattaactccctgtgagaggctatccttattatgtagaccctcttttatagctaaggcagaaatatttcagcctgaacaacttgttttacattttttatttttaatttttgtgattatgtaataggtatatatatatatatatatatgtatttatgggatgcatgagatattttgatacaggcatacaatgcataataatcacatcatggaaaatgggatctccatcccttaagcatttaccctttgtgttgcaaacaatccaattatactcttttaggtatttttaaatgtacaattaaattaatattgactagagtcaccctgttgtgctatcaaatactaggtcttgcttattctttctaactatttctttgtacccattaaccatccccacctcccttccaccgctctgtctaaataactcctagaggcaactgggggacatacattcctaattttcatgaccactgaaaaagcatgtgctttgggaatgctaaaataagggcaatgagggatagaaaaagcattaacaggaagctttgtagctgtgtgaacagctggatgtgaacatatcttgtatcactggggcaatgtaggatagttgatatctctttgtcacgacagtttgttaatttcagagattcagcatttcattgagccatagcattgtcatgtacagctcatacctctgttggtgtttgtccccagtctctttctctctagtgagttttccagttaattttattttagtttaatagcattttgtctgtcacctctgactcatgacttcgtgtggctgtgtgtagggacttgaacagtgaatacagtagattacttagagatttgtttttagtttttacaagtgaacaaaagtgatcacatttcaatgtgggaatcccagtgataaatgccatttccgtagagagttaactcatcaattgaacaaagcaatcagattttttttcttagaacatattaccatcaatttttaagtgacttttaaacaataatgagaaatctcttaatgaaagaatctctgtgaccagataaatgctaatagtaactgatataccattaactctactttcctccatcccatctctttaaaacttgatgttctcattaatttttttcccgtcgtctgagagccctacccttgggactatactagttatatctgcctaaattgtcagtgtccaggggtgacagatgtagacaatctcctcctttattatgcatgagctaggcaaagagggtttgtactcagtgaccatccattttcaaggccccttccccccatcctcaaccactgggggtaaatgggcatgtttgaggaatgtttgccaaagggttaccctgatttattaaagctgtcatttaagcatttaagcattgaccgggatgcttttcaaacaaatgacctgatccttaggatatattcatctaactaattctgtttactaagaagaggttggaaggtatatgcagaatttcttcacttcgacataaaataacacaaagagaatggcacagaacccagagtttcttgccctccagagagatgcagctgacaatctggaataataacagtgttatgctatgatatgataagggtgagccagagatgcttgaatgcagatctggctccttgaaggaatccatattatgacctaaagaagaactagaaactgagtgggtataagggcatgcacaaaggcccacagagaaaacatggtacgtttaggaaaccacatatattagaagagctggagtgtagagtgtaagtcagggccagctggaggccagagatgaaagttagcacaggccatgttgttaaaggccagataatctaagataaaacatttagactttagcccaaggcaatggggaacgcttaaagtagggttggcatgttcagatgtgtgctttagaaagatgacagaaatcctgtggagtaggaatctatttcaccgatgaaaaactagaggctctgagaaattatgaaacttacctatggtgacacagataataagtcggcagagctaaggtttcaacccaagtcttactccaaaactcatgcatgagcttccagccatgctaaggtttttcaaacttcatgttacaccctattagtacctcttaaaatcaatgtagtgtgatcaatgaatatttgttaatagaatataaaggaaaaagaaagagcattacatatactgtaagtaattaagcattgttttgtatttttgttgcagttgtacatgtatgtaaaatgtggacatagggtatgtgtatagctgagtattggcacatgatgcaaaatgcatttctcagagtagattgcagtcaaaaatgttggaaactactaagcatgtgcaaatagcatgcatgctgctgctgacctgccagatatttctcccttcctccctttctccctcatttattcattcattaactgattcattcatcccattaaaaaaattatatgtatgttttgtgcaaagcaccctactcaaggctgcggggtacaaaagtatatcagaagccttgggctttgacctacttctctgtagtagtgctagatttgtgtggatctgccacacttactccaggcctcttgtgacctgtgctttgcattaatctcttaggctaagccacataccttttcattatacaatctttgctgatgctaaggacagattccaaagtgccctccttataatttttgtatttaatgcaaagtgtaatcaagaataggccattgttaggtcaattgcttttctgtatttatcttttcaaacaataaataatcagtgggatgaaaaagggccggaaaagatagttttaatggtatactcataattatccaacattttaaggagacgttttaatatttatatgctgtgaaatatcctctcttctggaaagctgactgaggattggtatgaacccatccagaaatggaattcaggagccattgttttgcacagacttcagtcaatcctgagcaagcactctggattttcccaaacttggccgttactcagcctctcactctccaaattgtcaagacttctgtataccacactaagaaggatattctcttccatgtagatgcagaagattttctatgtcaagttcagtagggggcctaggctcaagccatgctcattcttagaggaaaacctgacaggatatccatatactatgccctctactgatttattcacgaaaaaccaagccccaaaaatgccagtcaggtcacacgcacacttaacaccaagagcttaaggtgtagtcacatcttacagggaaggttagtctttaaagtcaaacacaagataagaatagctcacagtcaaaattacccttgaaaatcccttaaactaccctttaagcaaagtgtgtatgatattatatacaacatttatattaattagtatttatttacactgtggtttaagagccaggagatagaacaaaggaagacaataaaggaaaatctgtatagaagagacagcttagcagttaaggccatagattctaaagccaaaccttcttgatttaaaacctggctctgccactcagtatagttgtgtggctttgcggaaattattaccatctctctggctcagtttccacatctgtaaaatgagcataatcgtagtacctacatcagagtgttattacaaggatttgcattaatctcttaggctaagccacataccttttcattatacaatctttgctgatgctaagaacagattccaaaggacagattacatatatgagttcatatatgtaaacagaaaaacagcagctggcagttaataagcaccatttaagtttaagctaatgtaatatatgctgatatgtgagcatttacaccattttgtcattaagattgcgattcattccctgttagtgaactttgaagttgggtagggaattacaaaatgttcttaattctcaactttagtagattttttttttccatttggatgacagttcttatcaaataacttcatatatttgtctttacattttctgtaaccatatagttataattattatatagtcatagttatatatagttatatagttatttttaactttttattttgaaatttttctagagtcagaagttgcagataaaatattgagaagttccttgtacccttcacccaattttctccagtggttacatcttacataatcgtagtacaatatcaaaaccaggaatttgacattggtacaatgcatgtgcatagttctgtgccattttgtcacacaggtagatccacgtaaccatttttgcagtcaagatatagaactattttcatcaccacaaagacatccctcatactactcctttacagtcacacatctttccccatccctaactcttggcaatccctcatctgttttctgtccataattctgtcatttctagaatgttacctaaatggaatcacataaatggggtagcatgtgaccttttgaagcatgtggcttttttcacaccctggagatccatccaagttttgtgggtatcactagttcatttcttcttacttctgagtagtaacccatgtatggatgcactatttgcttaatcatattggatatggttaacccatggtatggatgtaccattgcttaatcatgctatggatgtaccatttgcttaatcattcatctgttcctggatattttggttgtttccagtttatggctattacaaacagagttgctataaacagtcacctacatgcttttgtgtgaacatatgttgtatgtcttccattcttatctgtatgctttttatttccttttcttgcctcattgtgctggctagaacctccagtactatgttgagccacagtggtaaaaatgaactttcttgacattttcctgaaagaaaacattccttctcactgttgagtgtactgttagctataagttttttgtagctgtctttatcaagttgaagaagtttctcttcattcctggttttctgagaggttttatcataaatgagcatgaattttgtcaaatgctttttccacttcagttcatatgatcttgtgatttttttttgtttaggctgttaacatgttggtttacattgatcacttttcaaacattgaacctgccttgcatttctagaataaaactaatttattatagtatataattatttctagtcatagtatataattaaatgtagtcatagtatgtaactattttatatatttttaattgtattaaatataatcatttaataaatactcagttaaatataatttaataaatattaaattgaataatcaatttaatattgtattatgaaataatttatcataaatttaataaatttaataaatcgtttaataattatatatatttaattcatttgctaatatttattgctgtcttcattgaatgtgtaaggaaagtattacctccccttctttttctggaaaggattgtgtagaactcatgttaatttttctttaaacatttgttagaattttccagtgaaatcatctgggcctggagagttcttttttatgaggtttttaattatgaattcaatgtccttgataactgtaacgctattcaaattatatcatgttgtatgagttgtgggagtgtttacttttctaggagttggtccattttaagttatcaaatgtatgtgtgtagaattgtttgttgtattcccttattttcctattgatctgatattgttagtatcttattgatctgcatattctgtagtgatatcctctgtttcattcctgatatttataatttttattttctcctttttttgtcaatcttgtagattttaggctatgttttcatgtatcttaaatctacagatgttttgagccaaacaatacactgtaattactgtttatatggtaagcatttattttaactgttgctttttctctttgttcctttctgaatatctgtgtttcccagaatacttttccttttttccttaattatttcctttagtatttttgtaatgtggcaaattctctgtttttatttgttttaaaacagttttatttcatctttatttttaaggatattttctctaggtatgtaattgccagtgatttttttcttcttttaatatattaaagatatcattccattgttttctaactttcaatgtttttatcaaagtttgttgtcagacaacttactcctttgaagatacaggttgaacattccaaatctgaaaatccataatcctaaattttctgaaatctgaaactttttgagcactgacattatgttcaaatgaaatgctcattggagcactttggattttggatttttagatttggaatgctcaaacaataagtatataatgcaaatattctaaaatccaaacacatccaaaatccagaacacttctggtcccagacttttcagataagggatactcaacctgtaatgtatcatttttctttgactgccttaaattttttcctttttgtcttggttttcagcagttttactgtgatgtgtctgtgagcgtgtgttggcagggaggtatgtttaaacctgattaggatttgcagagcttcttaaatctgtgctttagtgttcttcatcatctttgaaaaattctcagctggtcacacctcttcagaattgtttctgttccctcctgctcctcttcctctcctcttcttcctcttgtcttcctcctcgtcttccattttcttctgtctttctctctctctcccttccttctgggatccaataaagcaaaaatatttgacctttctgtacatgcgtcttgctctctgttcgtttctggttttctctctgtgatgcagtctggtttttgagttctctgtcttctgatttactactcttgcctgtgtgctgtgtccagtcttctattaaacccttctgttgagcacttaattttagttattgtaattttcagttttaggtgtctatttgtttgttttaccctgagatgctacttctctgatgaaattctccatcatattatcttttttcttgaataaattaattgcagttattttaagaaccatgtctaataatgtcactatctgaataatgtcactatctgaactgtgggtctgttcatattgtttgattttcttcttcactttagtcatttggtcttatctcctggtatgcatatttttgatcaaatgctagacacagtccttgaaaagctgtagaaatctcaggctgatgatacctttcttcagagaagatgtatttaataatatgtcccattaagggacacattgccttaatgcagtctttgattgagatcactagaagctggattttagttatgtgaggggtagtgtattagtttactcttactcctagagggtaacctttctgtgattctaactgagagtctgtgttgtttacgagtcccttcttccttagcaggttctcaactccaattcctatcttcccatccctgtgagaatgtcagaatctctgctcagcctccaagtctctttgccactgcactctgctcattttcttagcatttgattctgtgccacttgtgaattagcaaatgacttggagagaaaaaacgccacagaatattgggctcagttcagtgtgcttacctacctaccttttagaatcagtcttggcctcccaagtcctagctgtcttgggagttctccaatgccttcaagtagtttttaggtttccttttttttaagcttatccagcttttttgattattctcatgagagtaagaatgcaacaaattcttccaccatcgccaaaaatagaaacccttatcttttttttaatgttaagtgttgacaacaatatatggttaacagacttcgttgttagaaggataaaaagaaattaatatatatgaaagtaacatgaatagggcctggtacatgatagacacttttaaattactttcaatttgaatttgaatatacagtgattttggaaacactgaaaaggttagtgattagcattacatttttgcctgttgatctttcttgttgaggccctacagtcactgttgtgctcctgggccttggtcttatgaaccttccatcagtcacattcctgaaggctgcctcttcccatcagtctccctctcagagacctgttggccctcctcaccatttcagtgaccacgtttagcaacaggaaggatgggtttgcttccttctctcgtggctcatgtctcagtgttcaccacagaaaatagctaatctggtggtggtcaacttcagacctttgtctcgtttgttttcctgaatgtttgccactgctttgcactcactgcagccttgttccagcttctttctcctggcagtgaggccagtgttggtgaaagatggcatggatcttacaaatttgtacttatgtgagtgaaaactgagaaatgccgagaaagacaggcagaactagatctaagtgtttcagaaactaggaacattacagtaccagaagacttggatgtgcttaattccagtttagaatctggaaaacaacttttttgagtctctgcaatttccaagtctcaaaactaattcactagaaaacatttaaaatgtaaagcaatagacttcagtagtaattttcagatcatttgagtctaaatgcagctttgaggatatgcagttcgtaaatttcctactgggtcattttttttctgagagggtatttctctaaactatatcagataaaggatgcccagaatttgctcagatgtgagtttcaggatctagaaacacaatatgaggattatcaagactaaggatgttgatagtgatgatgatgatgatgatgatgatgatgatgatgatgatgatagtcaatagtagtatttattgtatatttaatatatgcccagcattgaggtactttacatgcaatatgatgtctcttgagcaacatttaactttctattgattacttctcttgaggttatcatctttctcctagtggtcattaacatagagtttgaagctgggcataaatcctaggtataaatcctaactccacagctgctgtgatctttgtccatacaatgtaacatctttgagcctctctttgcctccagaatgaaggtgataccgtatctcataaaattcacagaggcctgaatgagttaatgcatggcaaacctgaagcacagtgactggttcttcctattgtgtgatcagcaagttgtagccatttttttcctcacttttctaccactattggttgaagtgccctttatttgacccgtcaaatagaggatctggagaataaaaaaatctaacaatgtaagaagaggaggctacagaaaccactgatgatgtattctgtaccagcttagcctccagtccagggcttaggaaacaaggttctttaacagtcatttgatttccataacattcattaaattaatgaatctccattcaacagatatttattgagtgagatttagacacagtccttactttcatggaacttaagacctacaggaggagacaaatattaaatgtgtagttataagtagagtgtcataaacatatttgacactgtggaggatcaagaaagaagtcactgagaaagcgacatttaagtcgagactcaaagagtgagtagccatgagaatttgggtgctgaaagaggcatgaaaggcactctgggcagaggagcagcatgggggatgccctgatgtggaaaggaacttggcatgtgtgaagaagtgaaagaaggtcctcttaccaacaccaagcaagaggataaagagcagaggcttagtaaatggatgagtcagtctgcctggcgcctttcttcccttcattgaaccaagaggtattccctagcacggactgccatgtagaaaaggtcccctattatttcagcaccacatttcagcttacccatggttctccagctgtccagggacatgcaccctctacctcccagagacctaacctatttccctatcacttattttcagggctatgaggtgccttattaatgtgataaatgtttgctccttggtcaacttttagtggtcctagataattgttctcaaatttgagcacgcatcagaatcacctggagaacttgttaaaccacagaaaccttggactgcacccacagagtttctgattcaataggtctggggtgggaccctacaatttgcatttctaacaagctgccgaatgatactcatgctgctggcctgggttctgtcggtggtgaatcattagtttaaggtgtctttcttctttcagcagtttaatagtcatcatcagttccttaactgaaagagaaatgctcaggcagggcttaaaggaagaaatactaaaatcaaaagtagactttatgagtaagtgtgacaatggcctaatggaatggacttctttgtaagcatgacttaccttatacatctgtgttcccagtgcttagcacatagcgggtaccaaatacatatttgaaggaatcacataatggatctagcttagtgactaaagaaatgggttttgtgcattagtctttggaaagctctcatgattcctttcaggttgaaagacgttctgggagaataaattattgtcattctcttggaatacagccctagaaattgcagagtcaagatatgcttgtattttaagtacttacttggattaaaagccaaattgctaacaggattacaaaatgccaagtttgctgagtctcaaattgtttatgcgcatgtttggttcaaatttctttcatcaatcagtacatttctgtttctaattacagtcttaatgttttttttgacacctgcacatgcattcttagtctaaaccagcttcagtaatttgcacagatataatataactgaaatgaggctcttaaccaccagtgtgtcacctataccacgtgtctgaggaattcagaggtgctgcacctcagttcacattgtgattttgaaaacagcctgctatttttcccattttcatgcccacaatgttgtaaacattttaataaacactaacacttttcctcattccaggcacatggagttctagtagatgatgcaacatgattttcgttgtgattttttatttatgtttattcttggaatctctgtacttggataaaagaagaagacagatgaccaagattaccataattgtccagaatataatgtatgcaatctggaagtttattactaccaccgatcaaattgattgcagactcttagtctagtcccagaagtttggggctggttttgatgtgagccattcatcaaatctcagacgtgactcacgcagtggctcatgggtcaaagccttccacgtattgtaatgaaccaacctgaacaattctgtacccagtttttagtttggattgtgcccctatctgacacctgtaaaattgtgagttccctgtgggctctaataatcagagtcctagttagagaaaaagtcatctcagcatcaactgacaattattttttttgccctcaatatccttccctgcccccttatttggtttgaactgactcacctaattggggtcaaccactgaaaaaaaatgtgttgctgattttgtcatttctgaatgcctagaactaaggaatatcttggcaatgacattgcttagtcttccttacacataaggagagtttgaacaatggatccaaattatcattgcaagagtgcactcagttaggggaactcagctgaggtgaggaacacgtccacgagtttcccctgtgggcatccagagtagccatggcctggccaggcactgccttgcggcccttccaaaggtggcagaatgatgttagtgttaacatttcactgcacattaattctttaaaaaaaaaaaaaaaaaaaaacctgtcatttaattttaaatgctaatatgcatatggttaattaagaagccaaaattggctataagctcagtgagctctgagaacggggagagagatcattacacttctgctcatggttagctatttgtgaaccaactgataatgtgcaaaattaagatttcgtaagtggcattttaaatgaatggttaatggctgaagattaattaaacagtcagagttgctgaagaaaagctgttaaaaattatgtttataggccagtcacttgcacgctgagactgaaatcctgaaagattgtggcctgtttactgggagagcattttaacaaagcagcctcctcgaggaaggaaagccagccacccttccccacataccatgcagctgttgcagtagccttagggactttgctttggagtaaaagcagccgagtaggaaaatggactagaaaagtgttttattgaagggatcttcactaaaaccttcatcccaggtaaccaggcagattttatttcctacctgcctgccacagagttctgagttagagtagtcagaacccatgggatttttaagaaagtactccataattctctaaaagagacaaagaattgcagtatattgttttcaacctgtagtggatacttcttaagtctgaaactgccagccctcttggtggtggaaacatggattctgtacatctggctctatcctaggttggttccttggaaaaaggtttgcctttgtatttaccactgtgcattgtgcataggaggtaccatactgtaaaaatagttgtaaaatttgttgtcagagcttacctgaataaatattggataaatcaatgaatgaatgagctacctaaaagttggttagtagactaggaaacgctctttttaaattcctttccatccatccaacaaatgaccaccctacttctctcgtagactgggtattaatgtgtggtctcagcctctgggaccacacaatctagtgggggagtcacaggcctgtcaacaagtaagttgcagccacagttaagcacagctagagcagccagagaggggggttaggaatctttgggtgcagggtagtcagaagtatattttgctatcacttgtaaggaagtttattctacctattgaaaaaatattagcatttatggaaaggctcttcactaaaacctttctctaaaattatatttcattaagaatatacactagtaaatatggtagttcattcagttcaatctcctgcttctaggcagaagacccaaatcacacaggccagatagttgtgtctgttgtttaaaagttccctaggaatggagatcctgcagcctcccttggtggcctgttgcagggtttaatcacccttctaatcaaggagttaatcctatttcctcttctctacccttctttgggttagtggaacctgtaaaaacacccatgagacccctcggaagccttaaggaattagtgagtcaacactgggctactctgggttcagcagtgtgcctggtaatggtgagactctgtactgcacgataacaatgacatgacttcgttacatctcaaatcaaaagttttcttcctggtctaaagaaaggaagagttgtttatgttagcatgttttagatgttgttttattacattttaatctatatgtttagttaattacacgtttgacctaatgtcatataactcagaagccaaattgcagtgttttgatttaaaatgaaatcagtaattattaaaaacaactaacactaaatagtgagaatccactattgctagacacttgctaattactttgcatgtgtcatttaatcctcctgacaatctgatctagtggtactattagtattcccaaggtacaaacgaggatattgagttgtagagagggtaaggaactggcgcgatattatcaggtgagccaggatttgtacgcctgaataaagagcctagacgtttaaccactgtgctatgctgactattcatttttaaaaattattttgctttctataaaactcgatttcattatctgaattcttttttcccctatgtgtgtaaagtccaaatttataaactttccttgtgggaagtaatagcattctgatgaataatagtccccaggtcaacggcagctcttgccgcaattactggcagttgagtggcaaatacattctactttaagaaaggcagtagcagttcactttagaaaaactgataattcaaagcttttccattctggtgaaaattttcttagcaaaagctaagaaaataggtactgatgggagaaaacctgccccattgaaggaatgggataaaaacctcctgtttgcagatgccagaagcatctggagaacagtgatgtccaataattgcagctaaaagctgcattaattgaccagtgataggttgaaagctgcctccaaccaggatccctaacactctggtgctttttcataagcagagtgagaggcaggaggtggtcagcttccatggggttctccatacagaaagggagcagctgtgacagagaagtgtatttctacagaagaaagtttagcgtttcaaacggatgcattcaaatcacctggggatcttgttaaaatgcagattttgatgccaggggtctgggatggggcctgagttgtgcatttctaataagctcccaggtgacactcacgctgctggtccagggaccacactgtgcttagcaagggtttagactagaggaaggcagtgctgaattgttattgattttaaaaaccattttaaataaacatgcagcaaatctttttataaccttccaaaatttcagctgtcatttcctcatatcggtgagatttgtgagaaatcccattcctctgcaggtcagaatattgttggtgctgttagccctgtttcctggaagagagggtatgacattttttgggtcttttttatattttaactgctgctgtctgcattagtgtccatgctttgacctcttgctgcacccagagaaatctcttgcaccttagtaatatgctgtgtctccacagttgaataagcatgaatttgaatttctttcctcaagtgctgctacgaacctgccaagaaaagttttattaatacaactaagtaatccatttttcccagtgtaccccattcacttaagagtttcaatggctgtgtttattccatcatttcggttaaagctaattatgctaaaaagatgtactttaccctaatatgtgtggcttggtttttgttttgttttgtttttgtttttgagacgaagtctcgctcttgttgcccaggctggagtgcagtggcgcaatctcggctcactgcaatctccacctcccaggttcaagcgattcttctgcctcagcctcctgagtagctgggattccaggcacccaccaccacacctggctaatttttgtgtttttagtagagacagggtttcaccatgttggccaggctggtctttaactcctcacctcaggtgatccgcccaccttggcctaccaaagtgctgggatcacaggcgtgagccacaacgcccaaccaggcttggtattattttaactgaatgctgctgtcttaatgtctctgataaagtatatcatctccattgatctgcatcataaacaagcacaaaggtttctagaatatatctttttggtcattttgtttgaataccaatattttaaattacgtgacctttttttgaccaacagcagcaaaaaagttgtcaccacaagagccatttgtaatggtcaaaagagaaaacagaaatgtttccgtggggcttggtttgcagatctgtgtgtttattaattctgtgaaatgccattgaattacaataaataggaagatgttctcaatgggactttcttctccatgtaggaaacattcaaaatctagaacagaagcaccacccagcttggtgtcacaacagtggggctgtttgacttcagagcaactctatccaatagagatataatacaaaccacatatgtaatttaaatatttcaataacctcgtctttaaaagttgaattaattttataatatattttatttaactcaatatatgcaaaatatattttcaagatttgttcacaataattattctagagctattgtacattacttttttcatggtggaatgaagccaagcatatctcaatttggactagccacaattttgagtgttcagtaatcagaagtggctattggctgccatattagacagcattagaaccccttcaacatacttccagtgggagctgatgcctcagttggaagttttctacacactggagtccagggcagcgaaagaccctcccatttcatggtagttcctgaagcagaaaacattttcttatgttaaacctgaactgccactaaacaagcaccattgtctcttctcttgtgaagtttatagactagggtaagaaaaagacatataaacaatccattcctgcttcagggaacagacacatttgtcagccctagcttttcaatatctagaaaaatgttccccacattaggtgccagatgctgcacagtaaggtaacctccaagtgggctgagctagaccaggcctaggtctgctttcatcccagttctttcttgctttgcccgaaaggaaggcaaaaacaatgatctagcttagcttacaaggcttctttttcctttagacataggagaatggaggctggtcttcagatatggaatatgtgtaatccctccacagaaggcttcgacaacaactaactcaggcacatgtgagaccaaactcacagtataataccagtgcgattctcatttagctacaaacttttccttccttaccaatagatatttcactattgtagccaggaatcctgagaggcagtgccttacagcagagccttctctttccctgggctatactctccttctcagtaaaccaatcatccctcaagaagtcgtgcctgtaaaagatgatgtaacaacagatgtagtcttcactttattaatttgcatttatcaccacaagcttttcttcatgactattgctgctgttttatacctgtgacatctcagtatagagaatgttatccacctcattgctcaagccagaatctgggagtctttcttgaggcttctgccttccctgaaccacacaactgacctctttctgaggaagaggtaggggaatgggtagcactggttctcacgtctctgcactgcattttcacggtgagcatcaggtacttctcactgttgggtccagtgttcctcaaacttttatttgatccattgtgctttccctctggcatgctgcagtcatctggacaaggcctcaagctccctacatgcatttcctttaacaaatgcctctcaaaatatatgtctatatggctctcttcttgctaaagcccttccgtcctcccaattttctgaggagaccaaccttagctgcatgattcaataccattgtactagtgaccacagtaccatttttcccctctatctttttttttttttcttaatgaagccctgtgtgttattcaggattcaactcaaacatcccatcccttagtgatcctctctgagctttctgtgtagacttctagcacagaatgatcacagtgtgttggaattgactgttaacttgtttgtttcctctatcaaatcttgaagcaggcatgatgttttcaatcctggcatagttcctaaagcattgggtagtcaataaatatgtatcgaatgaatgaatgaatccaagggactctacccttagctacatgacttcaaggtgacacgagcttattggacatactcttggactgaccaacccccaaactataacttgtcttgcctcctagtcagcacggcttccttctgattgccctctccttctgaatcatgatgccatgattctttggttttagtgatcccacatgtttctcctggtctttggttctcaccactgggcaaggtattcttcctgttcttcagcaggaggaagcacttcctactaaagtatccttagatgaaggacttctccagggcacagcaggtgactttttcaccccatccagtctctgcttcagaagcttcttaaggggaacaaggttgtttgtactgtccagaaactatagtcagcctaatcttggctgatacctcaagaggaaaggctctacttggcaattacctttttgtaaatctcttcctcacaccctatatttgacatagactcctggtattgctctctaaccatttctactgttacatcccagagaacgttgcattagcaaaatttagaagttagcatcaaatagaagtcctctagttattctcgaatttgcttcccccattttaaaaagcttgaccattacttgcttgcctccagtatcaagacacatctgccattgtctataatttctcaaccatgctgactacgcatccacgagtataccttccagctctttcagtaccttgaatataatttgtaagtaccagtaagcagggtgactttaaagaatcctggatcatgcattttctttcttcctcccactatccttttctttttggcctctctcctgctttccattgatggagatgtcaggtgagtcacttaatgtctgtgtgcatctttcctcacctacagacacacagggtggaactaagtgatctcagcattttttttccagttccaaaattatatggttctgcaattctttaatggaagcaaaataggagttcaggttgctctgccttttctctggcactgttaccatgtcaaagcatcccctcccagcagtgccctagcctttctcattcctcttcaaagtagctttcacaattaaatctttaatgtcattatcatttgtttcacaaccctcttagctcctgttgaactcggcttttctgactgtcttcagacctcttcaccaatttctttgttaaccacagtgcccatgtatccactgtcagatgactccctctgctcacccctgcaggagtatttaagcttaaccccagatttcaggagttagagcatttctcctgaatctccctaaactcgcatcagatctcttttgtccattcaggttgtcctgtctagataatgagaatttaagttataagatttgtaaggatcatggaataaaggcatacaggcaggtcactatcagcatttccagggcaaccctgtctcccacttagatcctctggcttagaaactactgaagatctgtaaaacgtaatgaggtttcaaacagatgtggccactgcccctaggagttggataggatcctctgtgagacagggcagagaaagtcatgtttgactctattaggaaaaattctatggagtttacaatagaatcatagggaagctcttaaacagcaccctggcccattacagacaagtagacatggaaggatactttaaaacaaagtgtgttttcaagtgtttcacgtgtgtttcaagtttaaaacaaagtgagttttcaagcccaggaatgatgtgaatcagacatcagaagggagaatcaattcttgcagtctgatgtttgacaagttgcaagttgtgacctcgttcataccctttaattcagtgactggcagtgttggtcagctgtgtctttttaagtggatccatgttgaagtttgttgtccaggtgagtttcaaatactgggagtaacctgaaaagtcttgggcacagtttcctagatgtattgtagatccataggtagacacatggcttaacatcttccattcagttttatgtaaccagtaccactttttcatattgatatatctatatgtctttttctatatctagatgtcttttcttaagttaaatgcattggcttaaaaaagaaagacactatcagtgcaaactcacttttctttttttttttttttttttttttctgagacagagtttcactcttgttgcccaggctatagtgcagtggcgcaatctcggctcactgcaacctctgcctcccaagttcaagcatttctcctgcctcagcctcctgagtagctgggattacaggcatgcgccaccacgcctggctaatttcttgtacttttagtagagatggggtttcatcatgttagccaggctggtctcaaactcctgacctcaggtgatccacctgccttggcctcccaaagtgctgggattagaagcatgagccaccacgcccggccctcatttttattttctaaactaaaaaacagtaacctgagatactcactagaaaataccttggccattaattggtcagaactgtaactttcaaagtaacctattgtctgtttacatgccacatgacatgaaactctattttaatcaggaccgtcacagataatttctgcaataacatatatctagggatggttttcaaatggagttgtcatgttgtgtttagcagacaggagattctctattgttgtcaggccctctttacaaaagcatcagtaacccagtgatcctagagaagcagggcttaccactcagcttacttagaataaaaaagagcaaggctggtttctgtctgcacgtagtgtgtttgagggctcttttgtttagctgggcttccttgtagccaacaatgcttttacagtcttggaattggatttcattctcctgtactggtttttgaaaagtgtaaatagtttaatgcatattgttattctctgaaggtaacataggatgcataaaaccgtatacatctgaattgtctcctcgaccaatgaagtcatggaaagtcaagaaaaattaaaccgtctctggatttatacacactctccctttctctctctctgacacacacatgtgcacacacacacactttctctttagtgcctttcaaagttgtcctagttttcttacaattagcacccaagacatactttttcaataattagtaaaaaaaagttaatttttgtccattgttaaaacagtgaaattttctttttagagtacataggggccatcatactgagttttatgataataaatactattttgtatcatataaatatgcaatgatatataacatataataatttatatcattaaagaggggctgaaaaaaattgttggcttctacatgtttgttcctctcaagacttctcctcttaaattcccaaagaataatacttctttattcttaaaactcactttatgctcaattcccagaaacagaagccaaatagggtaaaacaagatgcccagtaatggttcttacagttctcaggttctgtagtacaccatttgaagctatgtagtcttcaaccttgagtgtatataacagagggaaaggcaagctctagacatccattccagtcctaggattctgtggttctgagaagtgagaagggagacaaatgagagtatgggaagttgtatagagggggggaacagacagaaaggaacagaacaatgagtagtcacttggattacagaaggaatggcaatggaggaccaataaataagtgaatgaataaatgaatgaatgaatgaatggaaagaaaagtaagtataaggaagagaatgaccaaaaatagaagttgaagtggtccatttgagctagaagcttggcaattttacaaattctagcaacttcttaagaagctctaaaaagaaagttctgggttaggaagtttctcataatagttttcccactatccagtccccatattgtcttccaccataaacatctgccatgataattctccactgctagacctcagaagactctccctttcccattaataaaaaggggactgatttcataaatttagcatattacgcattgcagcattctgcctttcatatcataggttaatttttcatggatcgttatgaaaaatataaacaaacttaaaattctatttatgattcagacaaccaacaaagtaatgagattctgtgttatggtagctgtcacatcttgtctcagcccattgtgtctaaatgttaactctcttattaagctccattaaagggttttacaataccaaattgtttatacactgctggttttctgctgcctgacagtagggcacgtttcactcattaatatgggtgatatcttacattgttggaaagagctgaaataaaaataaacaggaaggtggcatgtactaactgaaatgcttctttcttctatgtttcccaatataaggttatatatatgtgtgtgtgtgtgtgtgtgtgtgtgtatgtatatatatatatatatatatatatacacacacacgtatataaaaccctaaatatatatatatatatatataaccttaaatatatatattttatatttttttaacttgcagttcaacctgttgtcttacgaaaggggagatattcttttctttgttacgtttaaatgaacttcaccctgagctaccaaattatacttttgcaagcttgatcttcaacctcacttatgtccccatgacaacctttcttgccatgtgaaatttagagtaactcatattggtaggtttcattatgggtcataaagcactgtcatatacatgttcttatttcatcttcaccacaacccggtaataagggaagatagagatgctgaatctggtagaagagaaagctttcctaaaactactcagttaaaaaatacaggcaccaagtttctgtcccactgtggttagttcagttctaatgctacttgccttctttttatatttttattatttaaagatatacttttattttcttaattttctctgagtattctatattaaatttaatagcaaaaagctaaggaagaaaaaaataaaattgctaattattccacgatttaattggctattattaactttttagagtattttcatccagtgtttcttctggttttttgtttgtttctgtgtttatcactgcatataaaatatatcatttgtgcatgcatatagtgctcacacacacatatagtatttacatgcatatacacatttgagtattttgcctttttacaatgatactgtgatattttcctgtgtcaattaatctctttgaaaccatcgcttttaaggttgcatgataactgtatcttaatttatgtaacctttcccttaatgatggacatttgggatgtttcagagttttcagtgttataaattaccctctgataagcacctttataaaatattttgctacacagcttgaattatttccttaggattcctggaatggaaatgatgaatcaaaggcttgaaacatattgccaacaattttcttgaaaaattgaaggaaataatgcttccaccagtaatgcagaaaatagctaatttcaccccattcctgacaactttgagtatcatcactttccttcctttaccctttactaatttgattcatgaaaaatagtactgtatcattttacattgaacttcttagcttactagtgaggttaagcatttttatagaagctcacgcctgttccaaattaccactagaagttttcagctcgcctcagccgtgagtcattaccaggaggaatagttttttgaatcaacttctgtttcctccctcaacaaatctatgtatatttatcaagacgtatttggatgcaggcttttatctccctcttgacaaaaatgaatgattatgcacccaggtcttttatgcactgaactaagctatatctacttggaccttgttttaattgactcacccttcccctaatagaatagcgtccctttgaataggcagtattagaaaaataagagcctcacagtagattgtgaaagaaatgtcacatcagaatctggacattgctatgacaacccaggccccgtctatcaccactcccatcagcatgtgttgcaaaggaaacccctttgcagtgtttaatctgagaattttaatattaaatacatatttgacattgaaagctcacaccttatttgctattgtcaggcttgtttgatagacagctaactcggtctctttttatagtcaatttctgaaatgaaactataaattttgaagctgggcttcatcatcgcagagagcaaagcttttctagcctattgttgaaatgtcacattttataggatttatgtggtccagattcaggaagatcatttgccaagcacttaaggctggttttgctgccctttgcttttctcctccctgcaaatacatatggtggcagggggagagccattagaaaagaaaaattatgaagaagaacttacttgattcaatacaaatgtcagcctaagaaagaaaaagtcctgcacatttagtgtgaggagcgttgactccagaagcctgctctttggtgataggcatactgtttgcttctgcaaatgaagtgggcatcatatttgttgtgatagtcagtgaaagcctctgatttggtgcagcagtttgaatttatgctcataatacaagttctctccaatatgcttccaggattccttttgaaactccatgatatgacaagctctgtgatttggtcatattccatttagcttgttttattgctgttaattttacacaggaaaatagattatctgaaacttgtgatcacagtcgctgtcaagtggtcaaaaatgaagaaaaccaccagacagtgtcagatttattaaatgctctaggagtacaaaattaatgcagttctttgtctttgaaaggttcagtgtccacaagctggatttatcctaatggacaagcagtggaaagaacagtcgtcaattagctatctctttagccagactacacgttgtcggaatgcatgtagggtgagccaccagtgcacctaggcagacctccaatttgttcattttgactgtaagtgacttaatttaacattttttctaagaaatacattaggtagaatggtgaagtttcctttttttcatttttttcttaaaagaatcaccggtgaaaagccacagtaagtaggcttctcactccatttgttttcaatcaccacccttaatgcataaatttctgagtagcctgttactcttccaagccctaaactgtagcagtgaatgtggattggaaagttctggtgctgtatccactgggtctatgttgggtttgaacatgttttatatgcatagcatgattattcctgtgctagatgatcttacctgtggccctttgttttctgggttttttgtttgtttttttgtttgtttgtttgtttgttttagcaggaatgaattttgcattaccctcttatgagttacagtgtgcaaaatactttgaaagtaaagttttggttcccacatgaaccatttctcttttacacagcaatcatttatcacttataagtgttaatcacttattaacagtaatttcatctgctgaagaatttatcccctaatcatgtgattttgtttcttcatgtgtgtatgtgtatgcgtgtgtgtatatttacagcattgacattttgtattcaaaaatattaacttctcaccttggtattctggtagtgtaatgaaaacatctgttacttgtgtatggcaatgatgtttttacatctatttatatttgtgggtagattccaaattgattctatgtgaagatgcacttcaaacaaaattcagtaactacatgtctggctttgggtttttcaaactgtggggtttcaaccctgaacatgaagccctgatgcaggacttaatcctgaactctgcaaacgtttccttttgcacttcaacctccagtcccactttatataacatggaatattcttctggttattatgtaattcattatctaaaatatgttgtgagcagataagcacaaggactctgaatgtggcttgtatatttttacagcaactctgtgaatattctctttggtgcagagtggagatgtgtgtggaagcattcctcctgaattttttatagactctctccctttgccactctagttgctgtctcccacaaaatttgagtcatacctcaactgtacaaatcctcctttgatgttcagttgccctgaagtgtgcagttgtggaatatgtctaaatgtctcctgtgaagagattggaggcgttggttttaacaaaagcaataaaatgattacagctgaaaagcatgctggaggtaaacagacgtctgtccttgttgctgaaccattgctctgttaaaaaaaaaaataagcacatgatttagcctctctttgttgctcttgtgtctaggaaagtcaaaaggaaggaatttgatttttattgtccccaagatttcagtatagagtcagccctacagtatgagaaacaatatcttgcttatcgccctgaattaccattgtccaactgtgagagcatttgcaagaaggtgagagtgtttgtgaaatagacagaaagggaaatcatgtgcttggataaagctttttggtttctttagtgaagtttctgaattttcttctctaaccttggcacaaaggccaacactctacatgcagtaggcacttagtaaatttattttggtgatgggtgattggtctttagtaccatcaacatcccaacccagggctagccttggagaaggacacggagcaaggagaggtttaattggggaagccccactccacctcatccaaccttctaccaggacatcaaggtcctcatgatctgtagctttccctcctggcattacctcttgtccacaaagtattaattcacgtgcaatgaatggtgtctatggctacctagcactgtctgtacttcagcgaagagtaaagccttgaagtaaactgaggctgaatttctggcatcagcctggaggcaatgggtggtcactaggggcgcccccattaccctgaaaacctgtctgtgtgtctctcctccctagtccgtaatttcctttactaggcccaaccagtttctcctgaaaatattaatgagagcacttcaaaatgtaggttgttgaattttaaattaacctagagcatcacattgagtgggttttcatggttttctacattgtctgctggatggacttcctgggcagcaagcatatcttattcctaacgtcatagtctattcgcttttacccagagccgggcttcatttaacaataaggagatgttttcgattttaccgtatgtggaatgtaacatttgcatttggcagttctccctttagtcctgctcaagatttcagctacctcggcagagtgctagaaagcgatatgcttattagaaaactttattaatcagagtagagtgctatttggcagccagattctaatgaggatgaggagctaaatttaattcaaagctaaaggtcagcaaatggtgctagcctaccttttttaaagtgtgtgagcttggacgttctcacagtttccggacagtttcatctagaaatgtgcatgctatatttagtatgaaaaagcatggaaaagttttctaataacaccatttcagcacacatatattccatgagcattaataagccaagcacattactgcttggctagacaattcttataggagctgatggcactgagatgttatagcaattgccagccgaaaacaggaggccataagaacatgttacaatggaaagaatttcaaaaacttgtagacgtttctttaaacaatgaactgtctgtggaatatgtgtaaatggcagagtcactctcacaaagtcatgaaggatatatttgtggtgttcagcttatgtccctaggaaagaaaaataggaaaaagaaagttctccaggcagtagatgaaggtggtgttgagcggttttggcccttgcacatggcctccctatccttaaatggcaccatcatttcctcccttctccttcccacttctccttcattgcacactttcttattatcacctcccacaaaaactcatttattgaacacatcctaggtgagggccctgtgccaaagtctacagaagacacaagaatgattaaattcctcctatcacttagccactattgggggactagacaaagactcaaaatgtataaaacctatgaatgatcaccatgccacaaagcagaaggtaagggccataatgtaagtacaaagcactgagggaattccaatgtagaaaagactgctttcctccaggaagggttcatggaatagcctgtgcttaggaaaaaatgcacctgaattcatctatttttctccagcttcgtgaccattacctaggccagtctaccatcacccctcacctgcctttctgcaacaacctctattctgtcttccacagaaaagccagagatgtattctaaaacttttagttagatcatattacttcctggcttaaaatctcctaatgtccactcattttactcagagtcaaatccaaagatctgtccaagtcctgtaaagcccatatgatctcagttttgcctgtctgttcaacctcatcacttgccactttgttccatgagcattaagctccagccatatgcaattttttttttttttttttttttttgagatggagtcttgctctgtcacccagcctggagtgcactggtgcaatctcagcccactgcaacctctgcctcccaggttcaagcgattctcctgcctcagcctcccgagtagctgggattataggtgccctccaccatgcccagctaattttttgtattttttagtagagatggggtttcaccatgttgaccaggtttttcatgaactcctggcctcagatgatccacccgcctcggcctcccagagtgctgggattataggcatgagccactgtgcccggctgtgtactttctttctcctgcattaattgattacactcattccctcattagggctttggctctagctgttttctccagaatactcttcatggagattcttctggatgattcctacttgtaattcagaccttagattaaaagaaagaggactttcttgactattcaatctaaagtagccacctagtcactgtcttctcatcatattgtattttaagtgactggtggcactgaccacggcttgatatttctcttcattggtttgtgtattgtttcatccccatcctcaccaccagtcaaatgtaaggcccatgtggttaaggaccttatatatcttgtattcctcctatatccccaggacctgtaacagttgattatgaatagtgggtgctcaataaatatttgcaaaatgattgtaagagtcttgaaggatttcacaggtagagagttgttccttagttcatgtggtaggccctgccactggtaaaacagcctgaacaggacctagtagctccgtgctctcaacaccttctgttcttgtggtggaaggcagacatggagaagtgagaattgatagataatgaagttgatacattcagggggtgatcattgctacaaaggaaacaagcaggctaaccaggtagagattgtcttgaagggtctacagataaaactgccagaggaggcacctctgacaagggagaatatgccttgagaacgtggaggcagagtgttttaggtggaagacccaccaatgacagactcctggggctgtgacaagcttaggctatcaaggaacaggggagagtgagaaagaatctctctgtgagcacaggagaagaataggtcagcaaggaggtggagagggaaacaggccagttcagtgacgggagggccatgtagaccctggggaatggtttgagaattaggctaaacgtgatgacaaggcagtggatgtttttaaacaattgatatgatcttaattatattgtttttaaaaggaggggcaagaattactggtggaagaggcagtgtggtcaaaggcatagagcagggtgtgggtgaaactgaggataagtttagggaacgatcagagcttcactggagactggactgcaagtggaaggaaagcaggaggctggggtggtgtcgacaatggaaagagagcaaagaggttattgtcacagggaattccatgagcagagttgcatctttggaaggctaatgtgggaatgtattagaatgaaggagtcaggagcggagagactagctgccatgctgctatgaaccgggctcgtggaagaaggaatgcaggggaggccacagtgctagaggctcatcattacaaccaactgaatgtaagatgcatgggagaaacgaagccaacaataatatcaaataatgtcatagtagagcccagtagtcattgtgcaccaggcactattctaattgctttaaataaaaactcactttgctcctcaaaactaccctacttggttttactctcattatccttatttcagagataaggaggttacacaactactctaagatagggagatggaaagtggcagaaccagaacccaagcaatctggctccagagcctgggctctaatgctgatcattattcccatctctaatgagcacagagaaacaattacgagtccagaaaataggagggaaagaagatttcaatggaaatgtgagaaggttgtttctggacaagttgagtgtaagacattggctcatttcaagttcaagtgtggagcaagggtgagcatggcttttggagctcccatgagatgttgcagctagagaggtgtgtcctcatgcaggcgggctctgttgaggacctgccccatgcgagccactccggggatcatatgttgaatagatggacaagtaaatatatgaaatgcgagggaataggataatcaaagtgctgggagtaaatagtatccccaagagtgaaaatatagacaaggagcctttagactccaaagtttagagaatccttttagagaatagcgaaagagacagtgaaagaaacagacaattagattggagcagtaggaaggcaacaaagaagagagacttgccacaagggttgctctgccatatctagtccagcagaggttagggagagttttgctgggcagttttagcagtggtgaaggtacaaaccggattgtcatctgcccaaaagaaagggtggcagatggcaaaaggagacggcagaggattgttttttaaagtttagtgaaaggagaaggaaaagagagagacaggaggcaatagcttgaagggggagggggcggttaggggctactggacagtaatacatcacaaaggacccctagttgctccagagagagaaggaggaacaacatctttggggcctccccaggcgggggtggggggcattgtatatccacacctgtgctgacaagggcagtgggggcctgatttgcatagcagcaggataaaaaccagcctctggcaccactggattcttccctggtagaaactctcccagggtaggcacattagataagagctacttggattaattcggtgacaccatcttttagaatgagggtagaaagtactgacgtcaccatgcggctgattttagagaaacaatctatttctccactgacaaggatttgtggcagtcagcagctgttttatttctttttttttaaagctccctccacccctttcttcagacttctctggacttacatctgtcctcccagctgtgagcggctgaattccagggtgcaaaaccaagggagacaagtaggaggggcatacaaataatgattacatgctgcttcagtgtaaatctcggttcattgtgtgtccatgggcacatgccttcaaattcaagtgcatgcctctctctctgcctttcagtatctgtctgtaaaccttgatgggattaagcatatgttttaataaatattttgtttgctgtattcccattaatattcatagggaatggaacactttgggttttgtgatttctaataaacattgatggtgttgctagtctgtactgagcattcagtatgctccatcaaaatggcagctctaattaggttccttgaattagctaatggattttgagaaagatagcttagaaagctcttacagctgtccaagatattcctgccatggcagaaagacaaaaggcccctggaagctacagacttcagagctttagaaatgcagctgacagttaaaaagataaattacattcatattttgccagtgaaagtcctaatactgaattaatgttattcctgtagtgagtatccattaagcagctcattttattataaggatgcattttgaccattagctctttttctttcctcgctctccctcccctctctcctttttctccctccaattccctagatattttggacacggtattaaaaagcatctttgaagaagaggaaatgattccctttttttcaagttataaatttagaagctctcttagatatacaataggtattcagtttttttaaaaatgccaaagtaaatatataaagaaataacatagtgattcaatttaaaccttgaggcttatattttatgtagaattggaaggggggaagcttctagctagggggcagttggcttgtttacacttggaaaagagattatttgttagaaactatctcgaataaaacatgttacctcctttcatcttaatatggaatgtacaacataacacaacgccattccacatgttcctcgcctgtacttcctaagaacacagtcctgtaacaaatgaggaactaatgacatctgagtgactacacttaatgctacaaatggggggaaaaataccacggacaatattaaaagttcatggcaaatagcagaattcgggaaacaaggacagtcacccaaaagctccttttattagttggatatgtcagtactcattaattctgtaactgtgttcagcataactttttgctttcagtttattcatttgtaaaactaatacctggtacctttcatctgaaaagttacattcctctaggaacacaacaaatcctctagggaaatgtttcctgggtcattaactctcaaatgtccaaattctgttttcctccgtgagcctctgtagcccctctgcttttccagtcctgcctgccttttggccttttttcttctcattagtgtctttaccaaacaaggggctgggcaaggaaaagaatgtgaaactcgtgtcaattaattggggtattatttacagctctgggaaagcacttgttgggaaagaagctaaagttgttggtttaaatgagatttttttcaaaatcatctgtagtttttatttttcatgctcttccaaacctcctgtttctgcagataattgagagctgactaaaagactgttgctaataaagctgttggaacgaagcaaggaatcagaaagcatagtgttgacggaacatatagattacagatcagacagctgctttacctcagtatgatataaataaaatggaaaagcattgttatgtgaagtgccagaaaaaaagatactcaattattccccacacatgacttcaccatgatgggtaaaaggcataattgacatcatgtttattgaaaaaactagcaactgtcacactgtcgagaggctactgagagctggaggaagggcatttttttattcgttttcactgtgggttatttatagagttcaattgtcagcagcagagtgcctaattttccttcttctttgatattcgacaactcattcactgttcagatcaagaagacagctgcaaattgctccatggcagatactcaggcattgccattacctcgcctgaatggggcaatggctatttattaattaagattctctgcctactttcccttaaagtgccagtgggaaaagtctttgtcaacccataatgggtctagtttcatttgttttgttttgttttgtttcattttaactttttgctgtctgatttggcagccagacccagattcctaatgggaaatttatcattatattgctgatgcatcgtgcttcatcaccagatgatgttactagtcaaacaagagctctggttatggaaaatgatcagttttcaaactgaaagaaagtttcaatgtcccatttcccccatctccagtggccctctggcacgttagccaacaagtagggagattgaaatagagaacttttgccaatgattttatcaaccatttagcctgcactgtatgcacacacaagaaatcatcaaatctaagtacaagaaaagctcagagaggtcagctagttccttccataggttgtgatatatggggttacagagagctagcgtctcccagagttctcttgatatgaagcagaactctgaggatggtggtgctggccctacttgcaattcttcagtgggtctgcatcatcccctttagaaagattggtggatggggctgttaaggtcctaccagctgtatttcccagtttctccacacattccccacacttgtgcggtgcctgactgtgtgccctttcatgtggccactccatttcaagtggtgttccttccagctggcatgcccagccaccctctctttatccttgtctcttctctaataggcctttcctgacctccccaagccaagttaacaccctctgctctgagctactgctggagttcatcatacttcatgatacttcctcttaataattgccacattgcactgtcattatttatttatatctgtgtctccccaactagactgtgaaatccctgagggtcaagtcggggtcttaatcacctttgcatccctaaggccacagcaatatttatgaataagtaaagcttaaataaatgtacacatcagaaatttttcagagggttattggagagcttttgaaagcacttgaggatttaggtctgctaccagtttattattttctattctgttttgaagagaaagccagcattcccctagcaaggatttataagaatctgagcatgttttaaaaacaactgaaacaatccataggagatggtaatgtcagctgtctgctattctgtacacccctaatgttggaaggtcagtagaaggccctagggttagcagagctcactttgcatctaggctaatgagagctgtgggatcttcttggattgaatgccctttgggagctaagtagatgctaacttttgatgcaatctgcatcagtccattctagcactaatatgaagaaatacctgaggctgggtaatgtataaacagaagaggtcgagttggctcacggttccacgggctgtacgggaaacatggcagcatctgcctctggggaggcctcagggagcttttacttagaggggaaggcaaaggggaagcaggcacatcttatgcgtctggagcaggaggaagagagtgggttgggtgggtgaaggtaggggaggaaaggcgctacacacttaaacaaccagatctcataataactcagtcactggcacaagaacagtaccaaggggatggtcctaaaccatgatccaatcacctcccaccaggccccacctccagcattggggattacgattcaacatgagatttgagtggggacacagagacaaaccgtaccacgagttgagaatctatttggattaattgttatgaccttattcaaaaatctcagagtagcatatggacgtaaaaggaatgaaaagaatgtaggtgatatcagaacatgttcataaattcttggacctagacctaattgctttatgctaatcatattagaatactgcatatataattctatgtttattacatagcacgatttaacaccatatgtgatcattaagattggcctcatggtcacttacctatgtgacccaagcatcccttctgggcatttggagaatgtatatcctttaacagtagaaaagtaaggactcgttcacttgtcacatatatttagaacactttgactcttaacaccgagggtcgagctcctaatcacaatctttagcttctttcaattgaaaaatgttttctccttttttaaaacactcttttcctttgtcactgttattattttcccaataccctccattggggaagaaaaacaaaagcattgttgtgtaagtaagaaactgctgtattaatctactgacgttttgttatatttttcacttttcactatgcactatcctgactgttctcttctaactgacataatcctctaaattaaaaaaaatacaagctaccatccgtgcactaaattatttagagtgtccttatttttccttaaaattgtgtggtccattaaaacttactttcttattatctgtaaggaaaggttaggtacccagctgttgggaatcagtggcctttgatggtattccaggatctcttgggagaagagggaacttctatgttgtgtcctctgaggaagaaggaatgtcatggaggcctaggaaattcccaaggtttcatggcctgcagcccacaaaggcttatttttcccagagttgaccctgaaagtttaatccccatataaatgtcagatatgtattcttaaaactcaactgtgtttgatttaagcctaaaagataataattttatctttgcagttcctgcagttgttggtgagaatttctttgagaaggcatgagtgtgtgcgtattagtgttatcattaatttgttcaagtaccatctaaacaacattttatttctccttaaactgtcttttgttcagttcaagaaggtgaacgataattaaaataatacaagttttgtaggtttcctctatttacctttttaatcaatattttgctaattttgttttggaccgtcgagtcctttgagaaaacctatagtattccaagtggagtcatgtcttaaacaaggttagtttctaaagtcattacatgagacaaaaattgtgtattgacaaaattaatcttgggaaacactttaggacagtggtccccaacctttttggcaccagggactggtttcctggaagacaatttttccacagggcggggggtgttgggggttggggaacacagggccaggcactagattctcataaggaccatgcaacctacatcccttgcatgcgtggttcaccatagggttcgtgctcctataagaatctaatgcagccactgatctgacaggaggcagagctcaggcagtaatgctcacctgtgtaagctcaccggtttctaataggccatggactggtaccagtttatggcctgggggttggtgacctctgctttaggaggatactatattggactctgcctatgatctctcactgaacccactcactgctgtttctttagcactgcattagatggctcttcccttggttgagcatcagctgaagtagttggcttgcatatacaaggccatgttgtacaagtaatatacatccttaaacgctgaaatgatgttcagcacagcataaaacttacattaggaaaggtgcctaggaactgacactgaccaaaggaaatcaactcagttcatgttcagggacatatgttcgttaaatggaatgtccaatggaatcactatcactacttaaattgctattctgcccccaagcctctgtttgtgtctaagctcagatatttggtgtatcaattaaatgcagctgggatgcagtatcactatactccagccatgttagaacagctatatctatatgaattataatatagactatggcttatttatcattttttaacagaagacacaatggatgcacagttgcaaattgatccaaatctatttttctttgcatgtatgtatgcttgttttgcaaagatgtagagtagaaagaaagggataatattgctgccatccagtgtgaacttttcaactatattttaaaatctttcttttttaagaaaccaaaattatcgtattaaacacttgataagtttcttctgtgacacccacatactgtatgttgttaataaaattgacaaaatgccttgagacaatatgtatcacacacttacacataactttgaagtgtccagtatttgtgtaaattacttaaggctcaaaaatattgcactgggggctgggtgcagtggcttacagtggctcacacctataatcccagtgctttaggaggccgagacaggaggatagcttgagctcaggagttcgaggttacaatcagctattatcacaccatgtactccagcctgggcaacagtataagactctgcctctaaatatacatatatatgtgtgtatatatatatacgtatatatatatacacacatatatatggcatatatatgtatatatatacatatatatacacacacacacatatatatggcactgtgttggaagaactgtattagaatactattcaaaatataaataactcaaatgggtattttatgactgatggcaaaactgacttctaaaatttgaacacagtcaggaggtcattgtacagtattagaataaggcagttatttgttactggcttattatggtgaactgaagccataaataataactggcatgttgttgaattttgagttacactgtcggggtcactcctaaggtatttctccctttgtgagaaatggagatacagaagcagaatgttctgattagaagccagccttgcattgccccaagtgataaagagcaaaggtagagcaatgccttttatcagaagaggagatgacattgatctggtgacgattctcagtcacaacaatcaatcacataggaggaagttgccttcgtgaatcaatggattactttcagtggtaaatggtagctgtggttcatggtgtgtgtgaaagagcttaccatttcaaaattgccaagggaagtgggcctttatttcttttttatatatatatactttaagttttagggtacatgtgcacaacgtgcaggttagttacatatgtatacatgtgccatgttcgtgtgctgcacccgttaactcgtcatttaacattaggtgtatctcctaatgctatccctccccactccccccaccccacaacaggccccagtgtgtgatgttccccttcctgtgtccatgtgttctcattgttcaattcccacctatgagcgagaacgtgcggtgtttagttttctgtcctggcaatagtttgctgagaattatggtttccagcttcatccatgtccctacaaaggacatgaattcatcattttttatggctgcatagtattctgtggtgtatatgtgccacattttcttaatccagtctatcattgttggacatttggcttggttccaagtctttgctattgtgaagtgctgtaataaacatacgtgtgcatgtgtctttatagcagcatgatttataatccttcaggtatatacccagtaatgggatggctgggtcaaatggtatttctagttctagatccctgaggaatcgccacactgacttccacaatgcttgaactagtttacagtcccaccaacagtataaaagtgttcctatttctccacatcctctccagcacctgttgtttcctgactttttagtgatcgccattctaactggtgtgagatggtatctcattgtggtttttgatttgcatttctctgatggccagtgatgatgaccattttttcatgtgtcttttggctgaataaatgtcttttgagaagtgtctgttcatatccttcgcccactttttgatggggttgtttttttcttgtaaatgtgttggagttcattgtagattctggatattagacctttgtcagatgagtagattgcaaaaatttcctcccattctgtaggttgcctgttcactctgatggtagtttcttttgctgtgcagaagctctttagtttaattagatcccatttgtcaatgttggcttttgttgccattgcttttggtgttttagacatgaagtccttgcccctgcctatgtcctgaatggtattgcctaggttttcttctagggtttctatggttttaagtcttaacatttaagtctttaatccatcttgaattaatttttgtataaggtgtaaggaagggatccagtttcagctttctccatatggctagccagttttcccagcaccatttattaaatagggaattgtttccccatttcttgtttttgtcaggtttgtgaaagatcagatggttgtagatatgcagcattatttctgagggttctgttctgttctattggtctatatctctgttttggtaccagtaccatactgttttgtttactgtagccttgtagcatagtttgaagtcaggtagtgtgatgcctccagctttgttctttttgcttaggattgacttggcaatgcgggctcttttttggttccggcctttgtttctttatgctccaccactatggcttgattcattgggtcaaggtccagcccagggttaagatttccaagacaagtcttcgagctataggagtcaaaggatcagtttaccaagctagggatggaaatactaagacaaggatctcaaaggaggcagatgctgaaagcaggacacatattgagaaagacaaaaggtcagcctcaggttgccatggtgaggtcgggagcccagataagccaagccaagttgtcagattgttgcatccaggtcaaaatgccacaggcagcatcaggatggctggggggaggaccgcagttcaggattatagtctgagctgatgtattattgtgattttcaggtttcctctaccttatgaccctaacttgcatgttaacctctctggaccagtttctcaggttgcccacaggatcctgacataaggatgagtaattttgttgaacccttgaaaattcatgcaaagacacacttttcaaagttttatgttagtgtagagcatagtttttcatcagattctgctgccgttttatgtgacattaaatactctcttaagatgctgaagcattgtttcctcacctactaagaggtatcatgtcagagataatggacagaagaagcccttagaaataaaagcagattttacatttggaaggtttgtgttgtctgtttaatattattcaccctttccctaaattcattattcttaacatagaatattataggcaattatagtaaacaaagaccccttaatttagagtagagtaattgttttaatcaacaagataacttaaatctggtagaaattaaatgtccatataagctaagacatagtcttgttatttggggggaatcttttggcaaaaataatttgaaatgggggctaccttcattaatagtgacagtaaatttgggaagaaattagaaagaagtatccccaaagttgtccatggatagtcagctatcagtcctaaaatttcaccgggctaaacagtgaaaaatcttatttgtcaatgcacctttgaaaaaaatagagatgctttataagaaatgggaaacggggaaaatagaggatttacacaatcataactttacctggatatttacactggataattttcagagctgttctagacttaaatgtcatttgaagaatgctatggaattaagttccttaaaaagcaattatttattattaaattagtatatatgggcacactatataaatgtattttcattatgagatgttaaatctggagagtatgagtgtaagtggtgttgggggtgtagtttctttaaatcttaaatgctcttcaattaagaatcctaaatgcatgtacaagagtctctcaaagttttatttgacagaaatctttattaccaactgaaaataaataatacttatgtccatgactatctgtcttcagctgaatattcttttccagaatcttttcttgggatttgagaaaaattagcaaaataagcgtgcatatagcctgtttaattatattatagttatgttattgagagtgtgaatgccatagaatctcaggtgttttagaagttctgttcccactatggaaaaaaaaatctgccctgttttctaagacagaactatggtactgttaagttttaagtttaaaaataaagctgggatgatttttagcttcttacatgccaaaagacaaaaacaaagaacactccccctgtggaagaagtcaggaaaataatagtatcttggcgttcttaaagggtaccaaggtgtttttctttattccatgtctttaaaccctttttgagaaaaccattgaaattccacccttttgtgagtatacaaaaattaacaccatacttacataattaacaatcttaaaggaagcatcaaaataacattttatagtaacttcataaaaaattaaagactctgtaaaacactaaactcaaaaacactccctatcctactcactgttgttgacacgcatacatccaatttaaagggttttattcagagagttcgtaaggattatcacctccagataggaatattcctgttaaagttacaggctataaaagccatttcttttcatttatttatttatttatttatttatttatttatttatttatttttgaggcagagtcttgctctgttgcccagcctggagtacagtggcatgatctcagctcactgcaacctctgcctcctgagttcaagtgattatcctgcctcagcctccctagtagctgggattacaggtgcatgccaccataccagctaatttttttttgtatttttagtagagatggggtttcaccatgttggccaggctagtctcgaactcctgacctcaggtgatctgcccacctcagcctcccaagtgctgggattacaggcgtgagccacctcacctgaccttataaagaccatttcttaactgcatcatcaaatctggacaccaggctggtacccacaaataagggcagtgctcaccaaaggccaacacctctccttccaaatgaagagctacatcttgaggctgtatgaaaacaacacgaaaacagaaacagctgtttgaaatcaactatatacaactgaatcctggttaggatgcatatatttacatagatgcccacttatacatatgtaatcacagataattcccaggtcccacagtggccagggtttggtggtagtgaccacctccctctcattcagttagtggtgaacttccccagcagttctgtctgcctctcaatcctggtcctgatccagaatgtgtctttcatgtaggatctttgtcatatgttgattctcctttgcaccccattccgttttataccagctctctacataagcctgttagagatataatattaattgcccagaaatctcagcctgcagtggctccaacatcattttttaatgaatacggacttcattgcatgtatttctattactttggttacttctatttttattgcaaagatctgtgcaaataaaagaatatcaaaaggtacggctataaatgtgctctgctaaattccctctgccttgaaatgcctgtgaaccgcagccacagaatgcctgctgcattttaatgcctttcttgcgaggcaacatgatatagtagaaacagcgctggttgggagtcacacaaatcctggcccaccattcaccagttgtgttccttaacgtctctgagcctcagtgtgctcgtgtgtaaaatgtcaacaacaatgtcatcttcacagatttgactgaggcttaaatgagatgaggtatgtaaagcacaaatgttgtctttaggacatcataggagcttgataaatgttaatttttttcagcctgcagcagtcataggaggagatgaaggcatgcacagatgaacactcattttaaaaagtactacagttgaggtcatttttaaggctagattccaaatgccttagtgtgatgtttatgacatgtgggaatttgttgctgtaggtggccatgaagaaaatgacatggtttctgaaatccattacaactttaagctctgtccagctctaaagtgttataagaaagggcctgtttaatgatacatctgcctttaaaggcataagcaatgtaatttatttttaaaatcattacaatatacatcatgttattatactgcttgaattaatttcacataaaattccagcacatcgaaagtgtaagactgtcattgatcacctatatagggatacagctgtaatagaaactttttgtaaggatggccagggctttacttcattcagtgaataaataattaggaaagcctaattgttaaactaacaatgtggagatgaggttattgacacttttactagttttatatggtttcaatagtatttgaattacatcatgatctgatgtcacttctgaagctatttctagaatcagtgctgctaaattccatgaagcaaggaatatagaacaaacgacatataaatagggaaggaaaatgggaatcctcagaaagtaaatcctgtaggctagccttcacttccattcttgttcagtatcttgctagaggacccagtctctaaaacataaaatgagatgaaggaagggaagtaggttggaaggcagtaagccatagtggaagagcagtctttgaaatgagaaaacacttgttaatcatctatttgctaggagcttcatattcttcatctttattgagcagaataataaatccatcagtattttttgaggttttaagatattgacagcacctgtcacacaggaattgtaaataaactcatgtacaattcctatagattagtagtggctttctgaggttctaggctaaaagaattctgagaattctttcccaattacagcattgagaaagaatgctctaattgattcgtgatgtctgctgtggacagagagtggagtaagtaaaagtatatatagatatatttgctatataagtgttcaataaattataaccattatgatgattgccactatcacaaaggtgtatgtccctctaaaatttgctaagtttctacatcttcagtgcaatatggaatcaattaattgctttggttataatagtggcgtatattatttttattaatttggtggtaagcatatgtgtattatctgctgagaagagctacaaatcagaaattggaatttgctgtccctaatcttaccaccttaaatacctatttaggaaaagtctgataccatttctaaaagtagaatgagggttgagaggaaaaaagaagagatgatattgagacatcgtcccaggttaccacaaaaggtttgcacagtgttccatattttaaaaaaatattcacacaagggagaagatacagcatgttttgcacttagatggtccatgactttctgggctgttttcctgttttttctcttgggccagatttcttttctgggtaaatagccatgctcctgtcagccacaggggactttctgaatcctgaacagctgattttgtattcctgccccattcccttatttgagaacagcaatctgatcaaacccatatttttaaatttatgcatttataggcatatggaagaatagtttacagtctcagtacaattttttttttccaccacaaatggaagaaaagtgtgttcttaaaaaacagtgctttatcagtttcttttttttttttctttattactgatgacttcattctacttgaattcaaggcttcagtttctttggggtaaactaatagattatgtatgcgatgtttgcaccatgttgattgaactcatctggtgagtttgaacgcagctcatgaatttccgtaatcgacagaagcctgtgcgttggatacagacaccatggtcatctcgtattactcaagagctagggaagctgttgaaaatagactgtgctgcttttcctgcctgcccatggttcagaaaagcttatcaagacttttaatttgttcttactatctttttcaagtgctcaaagaaaactttttttaagtatagtaaagaaagagaattagaactattatgagagtttcaacatacatattgaaaaaaaaaaaaaaaagaaagaaaggtacgtgattcccaagggtttgtcttttctgaaccaaaggcatcagctgctgagtgtctgtcgagcacccaggaagcccagaaccctgtgcgaactgtcagggagcagccacaagacagaggtacatcatccagtttgcaattaacttaccatctagtttgagaagaatgcttttcctccaaaaggtgtttactcaccatttttttttttttttttttttgtaatttacaaacacagttgtaaaatattttttaaaaatagatgacctctttctgttgcttttaggtacctcatattatcagatatctcatttaaacttggaacccaactgtaatatttggggttctttttgacatgcaaagctcttcacgctggggctctacctacctttccaagcctcacttgtccctcttctctttgatcctcctatatttctttaaaatactcacacaagagagaagatacagcatgttttacacttagttcatgactttctggacttttttcctgtgtttattccccaaatgctacagtagtgatcctcacatacccgtgaaacataagtgtcatgattgataagatgttatcaattgagttaaagtaccaaaatttgtaagtgatatgcttctgtcattattagagtaaattcaaaatacccccaaactatggctgggtgtaatggctcatgcctgtaatcctagcactttgggaggccaaggcaggcagatcacttgaggtcaggagtactagaccagcctggccaacatggtgaaacctcgtctctactaaacacacacacacacacacacacacacacacacacacacaaagaatttgctgggcgtggtggcaggcgcctgtaatctcagctattttggatgctgagacaggagaatcgcttgaacgcaggaggcagaggttgcagtgagccaagatcgcaccactgcactctaccctgggtgacagagtaagactctgactaaaaaaaaaaaaaaaaacaggccaggcgtggtggctcacgcctgtaatcccagtactttgggaggccgaggcgagtggatcacctgaggtcaggagttcaagaccagccagatcaatgtggtgaaatcctgtctctactaaaaatacaaaaattagccaggtgtggtggtatgcacctgtagtcctagctactggagaggctgagacaggagaattgcttgaacctaggaggcagagggtgcagtgagccaagatagtgccatagcactccagcctgggccacagagcaagactccatctcaaaaaaaaaaaagaactttaaagtcaccagaactcacttttattcgaatttgctttgtaaatgagagtggaaagggaacatacaccatacacctggtatgtgtgtaaggcaggacaaaagaagttgaggaccagtgcttaaccaaagtgatcgacttgcatgtctctaaagcaagatgctttctcattgctttactttgcactcactgcccttccctctacctggaatatcctcctctcacttgtctagctgttgagcacctttgtatccttcagggctcagctgaagtgtcacctcctccatggagccttctgtgattttcttcaatggccctgctctcaccttgtcaaagtttaagcactctgcgttcccatgaccccatgcaaatctctgtaagagcacaagtcataatggactgtagtcttatgtatccctctctgtcccctacctcccagactatttgtttttgcaggtaaggactgtgaagtgttcctttttccattcccagattttaacgtctggtgcaatggggcactcagttatgcctcaaatgaaccagataagtagaatggctgttcagatctgcctgtcattcttttgctccctagccctgtataatatcatgtgatactggttccactaaaataactacaataacctaatctaagctacaagggaggtgctagctgagcagtttggggttgggcagatgagttactggaaaagctataattcataagaggaaatactggctaaagtacagagagaagaacttggattagcacgttctactctacaccagcttcccccaccttaaaaaaaaaaaaaactttcttactgttttgttttgtttttttactgtcaccttttttacacgtgtcctaactgtacccatatattgacatgtatcccatccccaacccccactcccaaagttcatgagcctcatggaaatgaatgctaacatattccagccctgtctcatatccagccttcaggtcaaacaactggagctttgtcccaaattagcaatacttattgagaaaatgagatatccatattaaaatgtgacaaaactctgtgtgtgtgattataagaaaaaagtggtgggccttttaattgctctaaaaggtaaagactctatcttaccttctcattcaaaaggcatttattcatcccaagtcagacatttgacccttggaactaaaggtaggcacgtaaagaccactttttgttcatatttatgactgatttcaccattttcctggcatatttgaattacattattgaatcttccaaatttagatgtcaactcctttaacaagaagatccaaaagtgatttcaaagatgatgtacactgtgtgaatctgattatttgtctatatcctgtagtggccgtcctacgggtggaagcactgaccgtatccagaagttgcggaaagagtattatcaggctcggagggaaggtttccctttatatgaagacgacgaaggaagagcaaggccatctgagtatgacctactctgggtaagcgcatgcatgatttcaatcgttgaattcatgttttctaagaatgtttagagcagaagaacacggtcaagaatgttctgtacataccagattctatttaggtttcttgggcttcatagacaggaacattacccaaaccacaggcatattctcccacagaagctgtttatggaaatcaaacgccgtgaacgtgcagtagttcattctgattgctctcatacttcctgttatatgccaactggtttgggggaagcagaagttagctactttaaagagggcaagggatctttgtcaccatccactgagctttgattcttgcaacacaagccatctctcctttggaaaatggtgattagaagtaaatttcaaaagggttattgtcagagatgtcagttgtttgtttattggatctgagcacttcacattctgctgatcttaccggcatactaggatggatttgttttgagataagggcagtttttgtattagaggattctttttgctcaatcctttgacattcagggaacagaaaagaatacagtgaccactgaagaaaaactcattgggttttttcagagtggcacgattcactctcttgttttcaagaagcaagtctgtgcctacaagatgtacttaactcttcagcatctacaaaaatgcccaggaagaggatgcttagaattgcatgaaatgtgcatgcacatcagatacatagaacagtggctgacatagagctggtgctcagtaattgttagttcttgttactggcattattatcagagcagagctgaacatggtaatagcagtgtccttgctggggttcagttctcactcaccctctaatgatttctgccttctactgcgccttttagagctgctctgagaaccaggtaggggactctgttatccccggtgcccatgaaagacaccggctcctttgaaaggcagatctgttaaggcaggtttcctttcctgagtttcacactcaggtttatgctcataaggtcagagtggggagaatagagtctggcgactgagctgattccctctagttcttacatctgtgtggggggcctgtcatgcgttcatctctacactggggtgtgaaaatcagtttcacgatccaccactgttgggcagagcaaccgaaactgctgagcccagaagattgcacctgtataatggagttccaaaacactaatcagaagtgcacagtgcagatgggcgatctcaaggccaagtggcttcagcctctttggagagaggcagcctgagactatggatcggaacaaacagctatttattggttttattatagatgttaggattaaacagaatgacacctagagtgatgggaaaacttgtctcttagcttctctgtagcagaagagaaagatttccacagaataacagattagataacaattcactcagtttcaaacttgatcgagatcgatttactgcctctgacaagagatgtgagctacttgttaggtaaggctcagctccctcgataagccaaacaagcaataaaataaaggaaagtcatttccactgtacccaaaacagaacaccgtgtccagcgcattgaaaagtgctctatctcaaaaccactatgaattcctatgagcaaaataagacaaataattttagacaaagtagtcctggttgttttgaccttattttatatgatttccttacatcaagctgaaaggatgaaggtgcttaactttcaagagacttgaagtttcctctgaccctcaccaaacctgagctagataactatacccttgggtgctcccttttttaatgattctatttttatgccaagtaaacgtgtaaccagaccatctagtgagtaaagaagtatctctagtttaatttgtgtttcccatgctccggtgtgttgagctctgccaaaagtgactgattttatgtttcccagacaatcggggtctgaggcttcccaaagggatgcttgggaaatgcactgccgtaaaacacgagtgttctttgtgactgcctgagatactccaagccagggattagaatctcagcatcctttcctctcctctccccacgccaaggaaaaacactagtgttttgtattaaggcaggtttcctttcctgagtgtcttttgttcagcgtaggcctgagaaattacactgttgtcttgccacttttggagagatctaggaaagcaagttaagaaagttaacatttcattcctgtcaagcggccagacccaacaaggcagcttttatgagactgtggttcctagaaaggcaggtctttagcatcatcaccagggcactagctaaaatcagatcacagtcgcgtgaaggggaagaatgggcccaggagagaccctcaagggatgcgccacgtggtcatcaaggattctgatccacaattctgaaaataggacattgacttcaatcccttgagtaaacacgaaagcggtccaacttctctagcaaaaccactgtggaccagcatcatcagaaatattgttatgaacttagaactcccccaagtccagagtctctggttgaaaggcccgatgagtgttttctggagtcattctatactggggaacttctgaactatcgagaaggaaattacaaagataagttacctaacaactactcgtaaacccatttcaaaataggctagcaagaatgaaagtatgctcactgaagtcttcaaagccaaaataatgagaataatcacttgaaagtttattagggtctatgaatattttaaaatatatatataaatatatatgactaatactttttctttggctggccctggactttctagatcttctcagaccaacttgtatgtagttctctaccactattgcacctgcccagtggcctgaagtctaagctttctcttactcctccctagggttctcacttggtttcatgcctgtcttctctcccctctcccttatcccctcccctctcccctctcccctctcccctctctcttctctcttccctcttccctcttcccctctcccctttttcctcccttctcctctcccctgactcctattacattttaacaaatatttgctaaatcttagtgtagaccaggtgctgataacaagaatatgacattacttccaccttggaggaactcaggatccagccaggaatagatctaagcccaaacaaaatggaacaataatatatgtgataaatgctgtagtatagagaggtattagcttctatatgtactgagagagagtagttcattctgctggaggtgcatagttggagacagagtgctaggaaaactatagagacattttgggagttgcctcagctgacatactttgttctttttttttttcatactttgttcttttattctcaaatttgttggatttttttccccttttgcaaaagatctcctgatttattcgctttgttttaaaataaatgaatacttctgagggctctgttctgttccattggtctatatctctgttttggtaccagtaccatgctgttttggttactgtagccttgtagtatagtttgaagtcaggtagcatgatgcctccagctttgttcttttgtcttaggattgacttggcaatgcgggctcttttttggttccatatgaactttaaagtagtttttttccaattctgtgaagaaagtcattggtagcttgatggggatggcattgaatctataaattaccttgggcagtatggccattttcacgatattgattcttcctacccatgagcatggaatgttcttccatttgtttgtatcctcttttatttcattgagcagtggtttgtagttctccttgaagaggtccttcacatctcttgtaagttggattcctaggtattttattctctttgaagcaattgtgaatgggagttcactcatgatttggctctctgtttgtctgttattggtgtataagaatgcttgtgatttttgcacattgattttatatcctgagactttgctgaagttgcctatcagcttaagaagattttgggctgaaacgatgccacatatctacaaccatctgatctttcacaaacctaacaaaaacaagaaatggggaaataattccctatttaataaatggtgctgggaaaactggccagccatatggagaaggctgaaaatggatcccttccttacaccttatacaaaaattaattcaagatggattaaagacttaaatgttagtcctaaaaccataaaaaccctagaagaaaacctaggcaataccattcaggacataggcaggggcaaggacttcatgtctaaaacaccaaaagcaatggcaacaaaagccaacattgacaaatgggatctaattaaactaaagagcttctgcacagcaaaagaaactaccatcagagtgaacaggcaacctacagaatgggagaaaatttttgcaatctactcatctgacaaagagctaatatccagaatctacaatgaactccaacacatttacaagaaaaaaacaaccccatcaaaaagtgggtgaaggatatgaacagacacttctcaaaagaagacatttatgcagccaaaagacacatgaaaaaatggtcatcatcacttgccatcagagaaatgccaatcaaaaccacaatgagatgccatctcacaccagttagaatggcgatcattaaaaagtcaggaaacaacaggtgctggaaaggatgtggagaaataggaacacttttacactgttggtgggactgtaaaccagttcaagcattgtggaagtcagtgtggcgattcctcagggatctagaactagaaataccatttgacccagccatcccattactgggtatatacccaaaggattataaatcatgctgctataaagacacatgcacgcgtatgtttattgtggcactattcacaatagcaaagacttggaaccaagccaaatgtccaacaatgatagactggattaagaaaatgtggcacatatacaccatggaaaactatgcagccataaaaaatgatgagttcatgtcgtttgtagggacatggatgaagctggaaaccatcattctcagcaaactatcgcaaggacagaaaaccaaacaccgcatgttctcacccgtaggtgggaattgaacaatgagaacacatggacacaggaaggggaacatgacacactggggcctgttgtggggtggggggagtggggagggatagcattaggagatatacctaatgttaaatgacgagttgctgggtgcagcacacgaacatggcacatgtatacatatgtaacaaacctgcacgctgtgcacgtgtaccctaaaacttaaataataaaaaaataaaataaaataaaataaatgaatacacacacactgtaaggtttgtaaatatggacttgagaccttaaaatcttttcagctgttctgttgtgtaactgttttcccgtcttagctctgaaaagctgtaaagaacaagttgaaagaacttcagtggctgcaagtaaaacagtctggtgagtttttataggcccaattaagtaagcaagatatactagctgtgaagtgttaatatttgccagaggaaaacataatacctgttatctgctggtattttattttttgtaaaacttaagatagtcctctgacaacgggctgcttttttcttagcagataaagctgatctgcttatttaacagcagcatgaatatcctgtaaataattttagcaatgagatgcctctgaagttttctaaaaatattagtgcctttattattgtctttttcaagagctgaatagcagtatcattatccccccgcccaacctttttaaaaaaaaattctttggctaaattagaagaaagtttatttataaaagaggtttgtagacacatggttgggaagggagtacatttgtttatatatggaaaaaaaagtgggagttaaaacatcttaaactagcatgatatacctgttaccactgtcattaaaaacatggtgctggccgggcacagtggctcacgcctgtaaccccagcactttgggaggctgaggaaggtggatcatgaggtcaagagattgagactaacctggccaacatggtgaaaccctgtctttactaaaaatacaaaaattagctgggtgtggtggtgcacacctgtagtcccagctacttgggaggctgaggcaggaaaatcacttgaacccgggaggcggaagttgcagtgagctgagatcgcaccactgccctctagcctggtgacagagtgagactctgtctcaaaaaaaacaaaaacaaaaattgtgctatatctctctggcacaggggttggctcaggtagatcatagttggaacaatgagatggttgggtgaataaatgtaaacatctgaaagatttgttcattctgttgtgaagatggtctagaagccaacttgaagaaacgtacttggccgctgatttggatgacaagagacaaatctggtgaattccacacttggaggaaagagaaaacacaatgctgagatcatgctaaccatcttaaggaaaggatttaagatggaatgtgcaatagccaaagaagtataaaagccatcagaaggtttttcataaacaccaggagaaaagaggacaagtgccatcaatggtccaataccagagtggagatttctatgtattttccttgtctcctccttaaaagcatctgataaaaactaagtacattgatgaacaattctggtttaggcaatagctcttatattccaaagaacagagacctaaatcaaactgacctgattcataaaggaaattttgttgacttatttaaaagaagtccataaccatatcttgacttcaggcaaagctggatccaactcctccagacaggccattaggagtctcttttttcatctgtcagctttgctattctctctgcaggcaccattctcaaggggctacctgaggtagaaagacagccatctgcagctctaacacaacaactctgaaggaggagatagtctctctgtagatcaggaaacatcctggagtggatgttcagcacaattctcagtagcgctgattgattcagcctggatcacgtgtccacttctgaaccaaccttcatggccagacaggtgcagtattttttttttttttttttttttttttttttttttttgagacagagtcttgctctgtcacgcaggctggagtgcagtggcacgatctctgctcactgcaagctccacctccggggttcacggcattctcctgcctcagcctcccaagtaactgggactacaggcacccaccaccacgcccggctaattttttgtatttttagtagagacggggtttcaccgtgttagccagaatggtctcgatctcctgacctcgtgatctgcctgcctcggcctcccaaagtgctgggattacaggcttgagccaccgcacccggccacaatattcttatagactaaaactaggccacaagaccacccctggaactagacagtgaagtcaagtccacccagactccataaataaggataggtgaagagagagtcctcaaaggaaaatcaaggtgctgttaacagggaaagagaatgtagatggtaggcacaattacaaactgtctacgacaacttcgagttctaataatgatataaactttcttcatcttcttagatttccagggaaagagaaagaaaagccttccctttgtgtattctcctgtttatcgttagaaagaatagatctattatcaaacttaaatttgctgccattatttgttatgtaaaaggagaaagaaaattcactttgtctattggttcagcatctttgaactatcccaggaacccagatgatgtcactgaattattcatgagaaattatcagacctctggaatttatttatataggcaaatgacattttagttcacctcggacctagcaattcaccccagaacgatctgagtacagattgtctcagcaatactctggggacaaatctgatccataaaggttgtagggatagtgaaagaggagggaacaattcaccccaggagaagcagtagaattatttgaaaggactaaagttgctctctttctttacatagagttgctctgtttatatcttcatggattattgtcttgtgacaagcacatagtctgttcttaaaacctttagaaggtgagatggggtaaagaattagagccattaaatgtttgtatccaggccaggaggggtggcccatgcttgtaatttcagcactttgggaggccgagatgagaggatcacttgagcccaagagttggagaccagcctgggcaacatagtcaaacctttctctatgaaaaataccaaaattatgggggtgtggtggcatgcatctgtggtcccagctacatgagaggctgagacaggaggactgcttgagtccaggaggtcaaggctgcagagagccataatcatgccactgcattccagctcgggcaacagagcaagaccctttctccaagaaaaaaaaaaaaaaaaagtatgtgtccatagactcctgcagttgggctgctgccacacgatgggcaatcccttctcagttgatgaaccttcttgagctctatcccaatggttccctcccagtggctgactttatcaacacatcttttgatttccaaaaacagtggaactgaggattggaagcaataccaaggcagagaaaaaaagagagaaaaaaccatgtctatacattgcgtgggttttagaaaggcctgaagttttattgaacttgatactggtgaaacatcaatgccactggaagagttgagattttgctcacttagatttcagcaagtagtaaaacaaaaagaaaaaaaattgagaaaagaagaggacaaaataaactgaatttttttttttttttggttagtggctttggcccttttatatttcagtgtgtctttcacaggaatttgttgacatataagctatatgggagaagatctggactatacaacatgtgagtgaatttctagcctttaaatatagcataaatcatttttgaaaggaagcaacatgtttacaggcagtccccaacatagaaataaactgttccagaagtccatttagaagctggcaatttagaactaggaattgatttttcccatagggaaaaaatatatatatattgtttgttaggatcccaaaccagcctacaaaaacccactaaaatccagtaaccttgtactaatcacagaacaataaccttgaagcagaaacagggagctatctaaccccctcccttcttttctggacacatttttttgggatactctctgggcccttcccatctaccggtctttaagtctgttgctccagattccctgaccattaattcccctacctccgcatcatggcaccccacttaagcccactcctcccctaaagcattcaggcattcagttacttctctgccctgtccctcaacagagttaccattctcagtacagatagtctcagcaatactctgggggacaaatctgatccataaaggttgtagggatagtgaaggaggagggaacaggagaggggctaatggaatgtactcccaaacagtagtgttagagctattcctgatgctctgttgctactacactagcctctggattctccagcgcttctgtttccacgtatggagcccaagcttacacagagctccctgtctgacactgcctgtgggcagtgacctgatcccaagagtggatccgatttctccagcaaactggccctttctccaaaggaagccttttgtttctgggtctgccctctgtggcccaagggccagtcgctacaactaacatgggccaggatgcctcagctctgcttaaaaatctgccctgataagatagctcttctaaactactcctgtccactcatcctgtcttttgaaacacacagatgtccagagttttagaactagtaatttagcagatatgggaagcattttagcacaggagactctgaagctaggctgcctgagttcacatccaggctgtacccattactcactaggtaaatttgggcaatttattttacctgtctcctttaaaagtgagagaatagtactgtctccttgaagtactatgacacacacatgattacatgtaaagtacttagaatagtgtctaaacatgtaggaagtgtcaataaacaagaatttttaaatggtacacatatcaagttttgaaataacacattcaattggccagacaacccttctatcttagttattattggagctccttagcctcttcggttattccagagcccttggacattatatagcacacaaagccttgagggtggccttcacatcctgctccctctggttaccactgagatgcccagggtcacttcaggtggtaactgtcaagcttggtcatcaggcacttttagcaaattccattggtccaaaggtcaatatctatttccctctctcccacacacatacttttccttcaaaagtacattcctttcatccctgaccctgggggcacacctaatctctttaatgagcttatgctaaaatcaaagaccagaagaaagttgacttctagcagcttctgcctgcagctctgcaaaaaaccctgaagcaaagaaataccagggtccagttaagcgcttaaaataggagggtgagatacaaagagaatatatacaaattatttactcaataaattatactacaaccagatcgttaataaaaatggcatcatttactcagtgctgactctgccttatataagctattccatatactagctctgtgaggtagatatctttaatccagttttatagatgagaaaacaaaggttccaagaccttgcctcatggccacacaatcattagcaaagctgatttccaaatctctactgactcccggtgaaaagagaaaggaaagctcctatggctggtgttgagatacttcttaatataagatgtttgaaagaaagaaaatgtgtgaatattcatctataagcactatgaaaactgtcttctatctttgttgaactactcttgaattatcactcttaatttgtttttgaacccaataatattgaaccaaaatcaaagtgtggtgttgttttatcagtcctctttcaaagtctaaatgaaatcattctttttatgctgtaatcaaataagttacccatctctggctcaaacccaaacctaaatagcaaagagcagaaaaaggaagttcaggaacacatgatttttccatagtatgtcaaaaaaccctatgctatacttccattagagtgaaaaaaagaactctttctgcttttaatgagcaattaattccagtccaggatgtcgagtttagaataggttaacttcccccaaaccacagccgtttgtgttggatcatggttaaaaccccaaattccaacttctacaataataacattcttttcttctactgcaatgggagaaatgaccattttatgtaacataagaaaacctatagcagaaacccctatgaattccagatttcttaaactgttctcaaagctgtttaaaatcagttgggtacattttattttagcagtgcttaaatgttctaaaataaactttgggtactaaattaaaaagtgaagatgtctggagtcgaagatatgaatatctatctaactggtatttatagcacatgtatcacttaaatttgacaacaattaaaactccacataagccatgtttgtgttcagatcctgtggcctgggatgtcccctcacacagcttcctgactataaccaaccaatcaggtcactacagcggccatcttgttctttcagtttaaggaaatttttgactgagagtcgttctgagatttaacatcatttggttcttattaagtagtaactagtctggtgttgtgatgggaaaaagaaaattcacagaaagcttacctctgaaaggaagacagaaagcacacttgaatcaaagaaaaccctaaaatgagaatgatcactacagtaatattggaattgccattctccacaagaaaaatgaccacttttgaatacgattgtaacgacacatactaacgtctatgactttccagccctcctgtgaatctcattaatgtctttgtatttcattctgagccttgaaatcacagtgctaaattttcggagtgtttatgaaagagtgcaaaagttgataccactgaattttagcgaggctaacaggaaaacttcccatttactttagtaaatgatctaagaagaaagaatataatgttgctgttataaaccactgagaaatagtctcttttctactttccagataaggcttctgtgaagcagtggagtatttagattttatctccatgaagcttccttcaaatgatcattccgtgtcatctctcactcacagacatagctccattccctaagcagcaaagtcaaagttgcacatgagagaaacgtattttctgcaattttccattccttcgttggtttttttcattcagtgaatactcagcaatttatgaatgcctaggaaaatgtacatcgagcctgacagttgtatcatcaacacttacctacaaggaaagaaaacttgtttggtgtatgtgtgtatctttaagcctgtgtgtgtgcataaagttgtgtgatttgaagtttctcctttacagaaacagaaggaaatgttgtatgagaaagacaatccccatcatgacctggtgtcttttctttaatgaaccttctggcccactctatagtattagatacccccaaaccatgtggagacacctccttttttctcttttgttttcccatgatcactaattggcagagccacagcttgtttctcagtagcaaatttattttagttttaagtttttatatctatcatctactttttttccttctttttttttttttagtatgaaccaagtttcctgttttctatgcaattccctttgcagtaatttcccagatttcaattgccaggcgtgcttcagcagcaatgtacaatatgtgtatgtggttataagggaatcagagactctcatttcagaggaggaaatcgtgctctcacaattaatgtgaatgatagcaggaagcaatctttaaagtagtacttgaattgatgatcagaaaaaaacaaaacagaacaaatcgctatgggctttaggaggttgtggctttcgtgtggttccagaactatgttgccttttcccaatttaagaaaatggatagctttctcctttctatgtatggatatatatatataaggttaaaaaatctaatccctaaatacatgatgatgcggggaacagatgacaggcaaacaggaaagaactgacattttttatcaagcattcaaattttcccctttgttggttcataagaaaatttgagtaccttcccatttagaaacttaagagtttcctagctttcttaaagattttatctgcaaaataagaagaaaacctgttaatatcctatcatcaattaaggaaaagaatagtcattttcacgtatgttctgtcactttggccccaggattggagaacagaatttcaaaatgtgtggttccttagtcatgcattcatttattaattaatgtggtagacctttactcagtggcaaccttttgccagacatttacttgactctgaggaatcgaaagtgaataaggggttcatgtctgctgggaaaggcagacaggaaacataatttcaaatataatgagatatttaggagtagttatgcaggaataaattgataagcgaatgcataggaaagagagactaaccaagaattaacgagatagatttgcttttatccctgtgaagttttcccttgtgtgttcagtcttcccttttgtctgcatttagggctgtctgtccgcctccaaagtaagctactaaatctaaacaattgccctttgtaatttcaaaacaaatgtaaagtggcttttatcatatgtttcatgatgatacttttctttatgcccaacctctccttttgaggatctgagcatttctgcatcacactgtcccaattaccaaccaagatcagcccgagagagtagattttctaacaactgtgtgtcacaacttattagatgataataccatcaattagttggtcactcttatcatttctaaatgattttgcataggatatatcaaagggcatagcaggtagtcaaggtgggtattggtacagtttttgtttcacatccaatgcaggaacacacacacttacgtttggtcatgatgtaaattataagtcttcctatgagttatgattttaggaggctgaaaaactctggtttagaatttaagtttcatatctgcttatttactgtttcacttataagaacccacatggtgctatttcacattaggaactaaaaaagacatttttaaataaacattattaataaatcttatctgaaacacataatgaatggcacatagtttgcttttcttgtttatatctacatatcaatacagatagatacatatggatagaaatataaagatacagacacaatttgcatatatttaaatgaattttagtttaatagtcaatgatttatgaaactcttaaataaacatattgcaagaagttacaactacagccagaaatatgtggatatacttggcatactccaggctttctttattctcctgaaaattacttcttttattttatatttaacaagtttttatgtttttattatttttcttacagttcttttttttttttttactttaaggtttgagggtacatgcgaaggtttgttacataggtaaactcatgtcacgggggtttgttggacagattatttcatcacccaggagttaagcccagtacccaacagttaccttttctgctcctctccctcccccgaccttccaccctcaaatagaccccagtgtctgttgtttctttctttgttttcctaagtgctcatcatttagctcccacttttaagtgagaacatacagtacttggttttctgttcctgcattagtttgttgagggtaatggcctccagctccatccatgtttgtttgcacaaaagacatgatctcattcttttttacggctgcatagtattccatgctgtatatgtgccacgttatctttatccaatctgttattggtggagatttaggttgattccatgtctttactattgtgaatagtgctgcaataaacatttgcgtgcatgtgtctttatggtagaatgatttctattcctttgggtatatacccagtaatgagattgttgtttgaaatggtggttctgcttttagcttcttgagaaatcaccatactgctttccacaatggttgaactaatttacactctcaccaacagtgtatgagtgttcccttttctccacaactttgccagcatctattacttttttattttttaataatagccattctgatgggtgtgagatggtatcgcgatattgagttttttttaatgtgcttgttggctgcatgtatgtctttttttgaaaagtatctattcatgtcctttttaatggggttgtttttctcttgtaaatttaagtaagttccttatagatgctggatattaaacatttgtcagatgcatagtttgcaaatattttctcccattctgtaggttgtatgtttactctgttgatagcttcttttgctgtgcagaagctcttaagtttatttagatctcatttgtcaatttttgctttcgttgtgattgcttttgctgtctttgtcatgaaacctttgactgttcctatgtccaggatggtattgcctgggttgtcctccagggtttttgtagttttgggttttacatttaagtctttaatccattttgagttgatgatttttgtatataaggaaggggtctggcttcagtcttctgcatatggctagctagttatcccagcaccatttattgaagagggagtcttttctccattgctcgtttttgtcagctttatgaaagatcaggtggtcataggtgtgcacccttatttctgggctctctcttctgttccattggtctgtgtgcctggttttgtaccagtaccatgctgttttggttaccatggccctgtagtatagtttgaagttaggtaacatgatacctcctgctttgttatttttgcttatgattgcctttgctatttggtctctttttggttccatatgaatggtaaaatggatctgtaaattccatatggatctgtaaattgctttggccagtatggccattttaatgatactgattcttcctattcatgagcatggaatgtttttccatttgtttgtgtcatctctgattcctttgtaattgtaattgtaatctgttttgtaattctcattgtagagatctttcacctccctggttagctgtatttctaggtattttattcttttggtggcagttgtgaatgggattgcctttctgatttggctctcatcttagctgttgttggcataaaggaatgctagtgatttttgtaccctgattttgtatcctgaaactttgctgcagtttatcagctgaaggagcttttgggttgagactatagggttctctaggtataaaatcatatcgtctgcaaacagagatagtttgacttcctctctatttggatgccctttctttctttcttttgcttgattgctctggctgggacttccaatactctgttgatcaggagtggtgagagagagcattcttgtcttgtgacagatttcaagagaaatgcttccagtttttgcccatttagtataatattggttgtatgtttgtcatagatggctcttattattttgaggtatattccttcagtacctagtttattgagagtttttaacatgaaggggtactgaattttatcataaaccttttctgcgtctattgagataatcatgtggtttttgtctttagttctgtttatgtgatgaatcacatttattgattttcatacgtcgaatcaaccttgcatctcaaggatgaagcctacttgataatgatggataagctttttgatgtgctgctgggttctgtttgcaagtattttgttgaggatttttgcatcagtgttcatcaaggatattggctttaagctttgttgttgttgtgtctctgcctagttttagtatcagaatgatgccagcctcatagaatgaggtggggaggagtttctcttgggagggtatatgtgtccaggaatctacccatctcttctaggttttctagtttgtgtacatagaggtgttcatagtagcttctgatggttatttttatttctgtggggtcagtgctaatattaccttcatcatttgtaattgtgtttatttggatcttctcctttttcttctttattagtctagctaccagcctatctatcttactaatttttttcaaaaaaacaacttctggaatcattgatcttgtgactggtttttcatgtctcaatttccttcatgtcagctctgatttttgttatttcttatcttctgctagctttggggttgattcgttcttgcttctctgattctttcagttgtgatgtttgttagtttgttaatttgagatctttctgacttttggatgtgagcagttattgctgtgaatttcccttttaacactgccttagctgtgttccagagattctggtatgttgtgttttgttctcattagttttaaagaactttttgatttctgccttaacttcattatttgccaagaagtcactcaggagcatgttgtttaatatccatctaattgcaagtttttgagtgatgtcttagtcttgagttgtatttttattgcgctgtggtctgagagtgtgtttgttatgattttggttgttttgcatttgctgaggattgattcatatcccattatgtggacagttttacagtatgtgccatgtggtgatgagaagaatgtatattctgttgtttttgggtggagagttgtatagagccctgtcagttccatttggtccagtgttgagttcaggtcctgaatatctttgtaaattttctgcctcgatgatctaataatgtcagtggagtgtaggagtctcctactattattgtgtgggagtctatgtgtctttgtaggtctctaagaacttgctttatgaatctggctgctactgtactgggtttatatatatttaggatagttaggccttgttgaattgaaccctttaccattatgtaatgcccgtctttatcttatctttttgatctttgttggtttgaagtctgttttgtgttaaattaggattgcagcctctactgttttctgttttctatttgcttggtagattttcctctgtccctttattttgagcctacaggtgtcatttcatgtgaaatgggtctcttgaagacagctgtcattcggtcttacttttttatacagcttaccattctgtgcctttttaagtgaggcatttagcctgtttacattcaaggttaatattgatatgtgtggatttgatcctgtcatcatgttttagctggttattatgttggcttgtttgtggggttgctttatagtgacactggtctgtatgtttaagtgtgtttttgtgttagctggtagcagtcttccctttctatatttaaagcttctttcaagatttcttgtaaggcaggtctggtcgtagtgaattccctcaacgtttgcttatctgaaaaggatcttatttctcctttgcttaggaaccttagtttagtttagctggatataaaattcttggttgaagatttttttctttcagacacttgaatataggctgccaaactcttctggcttgtaggatttcagccgagaggtctgccattagcctcgatggtgttccctttgtgggtgacctgtcctttctctctagctgcttttaacattctttctttcatttcaaccttggaaaatctgatgattgtgtgtcttggggatgattttcttatgtagaatcttgcaggagttatctgtatttcctgagtttgaccgttggcctgtctagcaaggttggggaagttttcatggacaatatcctgaaatacgttttccaagttgtttgctttctccccctccctttcagggataactgatttggtctcttttcataatcccatactttccagaggttttgttcattttttaaattgttttttctctacttttgtctgactgtcttatttcaagaatcagtcttcaagctctgagattctttcctgatctttgtttattctgctgttaatacttgtgattgcattgtgaaattcttgtattgtgttattcagctctgtcagacccattatgttctttttttggactggctatttcatccttcagctcctctatcactttgttgtgattcttacattccttgaattgggtattgccatcctactgaatctcgatgatcttcattcctatccatattctgaattctatttgtgtcattctagccaattcaacctggttaagaactcttgttagagagctgatgaggttgtttggaggacatatggtactctggccatttgagttactggagttcttttgttgcttctttcttatctttacatgtgggtgttccatttactgcagtgtagattgagtacagtcagtagacttcttttctggatgttttcactggactaaggctttgtgcagggtctttatttgaagctgacttcttatctctggtttcagaggtgggtatgttagcagggcatttttggtgttgaagctttggggtgtgatccagtaggtggcacttaggcttattagtcagttggtagactcttgcttggttttgtggcttcccctgtgtttcctcatcattgcagctatgttccctctcaatgctctgaaagtttgggttctctcccctttcagtgctggctgtagataatggcttggcactcctggactgcccactgctgctctggagagatctcagtgtttttgttcctcccctaacttagaggcaaaaaaggaagggaccttagtagtgattgtggccaagggtcttttgtttgtttgtgtcccgaagcctctgctccagagagatgcaggtcagtaatccctcagtgcaatcagcccaggatggggagggtctgtgctgcaagcccaagccagggattccttgtctggtgataagtagtggtggatatgtgggaaacatgggagatggactgtcctcctctccttgggtcgactacagcttgttggaggtgtgataaagcacttgggttctttgctccttcatcagtctaagggtagcaagggtggttccactgcagaggcagtggcagagaggctttcagttgctcctggaggctctctgtccagggagttgccgagttgctactggctcaatagctcgggccgggggtggctggaggcttaggcctggaagacaacaagtttttatcataaattaatacatgctctaaaatgcttaggtaattggtaaaagtgttaaaatgaaaatgtaaattattcattatctgaccacccaagaaatgaacactgtttatgctttggagtattttctttctatacacacacacacacatatgcataacatgtagtaattaaattgggaaccttctgaatatactatatttaagtcatatttttttactttgttatattttgaaaatttctcatgacattaaacaatcttcaaaactgtgaatttaatgtttaatgcatagtattttctagaaaggatattaagtaattggttaatcactttaccattattggacgtttaagttgtattcattgtttcttatcataagtaatgaaatagcaattagccttacaaataagcatttgtattattagttctttatcataaatcaatataagatactaattatctagtatgaggcgatgaaatttatttaaaatttggcacatattactcatctttcctatgaaagttgttaagtttatattcttgccagcagcatattcattaatacactgaacaaatattaatggtctgttttatacagcttttagagcaaccctattaaaattgagtgtttgtatttttcctagtattaccaatttgatggcaaatatcaattatgttgttttcatttcttaattacaactgagaataaacatttcataggtttattggccatgtatatttcttctttttatgaattttttattttttctattacaatgtttgcctctgtcactcctaacttgttaaagttcttgatgtggaaagaatattaagcctttactgtcaaatttcattcagggttttttttctaacttcgtcaatagactctttaactttgtgataccttagagcttaaggacttttatttttgtgtaaacaaacctgggatattgactagttttttcacataccatttaaacatctatcaagatgattatatgattttttttctttttctattaatgtgagagttcatatgaatagactctaatgttgaatagcccttgcagttctgaaaaaataagtctacacttacatgctgtctgttttgtcctttagagagacctgggcatggattgctaatatttcatttgtgattttgtatcttatttgtaagtgaaattgataagtacgtttgtttttttgtttgtttgtttctaactttagctgttttatacagaagggttacattacctttgccaaatgatctggctagcttttcatctgtttctatgctttgtaacaatgtctataatgtaggaattatctctttgtaaagattttaaataactcatccataaaaatatctaacttgatcctctttcctgggtaattctttgacacctttttcagcttttctgatagatacagatatttggaaaaggagattatttttttcctttactgaattttggaaatctgccttttctgtaaaattatatctctttgagatttttaagtttttagtgtattttatctttaccaaataatatatttaataattattttttgttttcatttatttttacttcattatttttacatttatttttacttaattattgtttccttaaaaacaaatgaaacctattttttgaattattcagctatttaattttgcttttgaacttagtttaggtatacttctggaagtgataataagctaatgttctttttttttctaagtattctaaaatattaaagactttatttttcctttgatcaagaatgatttatatgatctttaaatcaaggaattaggttttttatttaagtttttattattaatgtatggttttaagctctgtagtcaaggacagcgacgtctcccatttttgcctggtggcatttattaaaagttggcataatatatggtaactattgtcgttaaaaaaaattaaattaattaaaatcaaaataatgatttttctgtaaatatgtattctctaataaatacttactgagtgcctatagtattatattccaggcaccatgaaggtgctggaggatagcaaagagcacaacagacaaaaatatcttggcttgtggtactggcacactagtagatgataaatatatgcataccatatttccttaaatatgagtcagcaccgattattatacacacaataaatttttactaacagcttttcaagaggagaacaaaaaagaggaaaccatcatattaaatgtaaacttttccattaaaagacatttcaattttacaaatatttaggtatgagaaatgtgtttcttactattgagaaaatatggtaaaacaatcttattaattatattgtttttgatattgtaaatacttatttgtcactttttatctgttaaacacagatattaggttaaaattcccatatactatttggttctgagggctttcagtatcccttttttcttaggtctatcacttattataaaagttgaattgtgccatttgattcattctgaggctttttcttccaaagaaatgtttaactcatttctatctgttatgataactgggattcttgtcctttctgtcatcttgttttaggcttcctgttttatatacccttttctgttttcttacccccgtgtactatatgtgtgtgtgtgtgtgtatatatatatatatatttatatatatatatatttttgagatggagtctcgctctgttgcccaggatgcagtgcagtggtgcaatctcggctcactgcaacctccgcctcccaggttctagcaattctttgcctcggcctcctgagtagctgggattacaggcgcccaccaccatgcccaactaatttttgtctttttaatagagacggggtttcaccatcttggccaggctggtcgtaccatattttctttgatgatttttagtaatttcagtcatactggctttataaatattatttagcctattttctctatcagtcaacatcaaaaataaataatcttttgagtaccttacatgttaaagaaacaaagtaacgtgactgtgttatcaaaactttcctttatactttttaacctgtggtatttaatatacagttgtgtttctaaagaaggtgtatatttttaaaatatttttaatgtgacatagatcctactatctagggattatatgcagtgtttaatgccagtccttccttgctatgacagctccattgctcagttctttattttgattcatctctctgataaccttttttttttttttttttgagtaattttagttcaggaagaataggcagtatatttttaaatccttaaaatctgatgataatattctttatatataaatctaaatacttcttataaggatgtctggtggtttgaagtttgaagtacgtaacaaatttttttttacctcaatgacttgactgcttcccaaggtttttttcctgaaaattctattatctttaggtttttaatattgatgaaggagaaatctgaggcttatctaacttttctttctctaagtaacttgttttctctatctggatcttaggggcttctttattcacgatattccaatgttttacctacatttgtcagggttttggtctctgcattcattttgccaagccttttttgtgttctttttattgatggcttcatgttggtttctgctgttttcttgcttgaaagcaccttaaatgaggtgattgaagtctccttgattctcatcaccttacatctgaagatttgtagaagagtcccctcaaacctcaacatcaggactgtctgatattaactacacctcctgtttagaagttcagcagctgagaggacaggagtggagccaaaaccctcaacaatacttggaggagaactttgcatctgcttagttttgcaggtgcttttgctgaaatcactggataaggggagagctttctatgccctgacttctttttggcccagccgtctcgtcctctattgcctgtggctgtgtctgcccttcaccttcatactattgcccatctaattagaagagagagcactttctatcttttagattttttccgctgttacagctacttggagaatccaagactttccaggtgtgctgttcagaatgctgccacttccaacataacaaaaagccccatgttaatctcatcagtctcataacctctcctccagcctcacccttctaatgaaaggcttagcctcctctgcctgctccccaggagggttggttttgagctggcaccatgccctcctttccgcccaacccatggcactatttccaatacatactcctcaatgactcacactggtgcaagtttcacctgttttatatgcggttggtcatttcagccagaatctgggagatcagtagtaaattgtctatgctcacattgccatttttattcagaatttgatacccatcaaaacacttaaacctcgccagaataagagatttcttagtgatgaaccatggcaagaaccaggacagttttattgcctcacaaaggctattttcttagctgcaactttcttattcacacacagtaaagcaatgcctagctcatggtatgactggaaaatactagggcttttttcccctcctacatggttaactcctaattttcctttaaatggtcctgaaaacaagagacatggtatgtaaaacttccaaattggtttccttaccactccaagagtggggtctctggaaaatatagtaacaaagctggttttctagtcacatgtcaccataacttcagtagggctaagctggaaaggccaaagaaattcggaggattaagaggtttttttgtttttgtttttacattgaagatgtaaaaaataattacaatataatgctgggtgttatgtatgcacagttacctatgaacacaaaaaggtttaattttttctgtcaacgtgcattgttgtaattattaaagataaaaaacaaagttcctgctataaacataggggtattggttgcatgactttattagctcctagactgaggtctattgtgcggatgctaatctaataacagaatcatatttataatacagtaggaaattctctctgcaggttcagaacagtacacatgagacccagcattatcgaaggcttatcctttctcacactgaactaatactcacccttcattttggtgacaagtccagctcaatgagaatctcgacaaagggcctgactctctccccttccagccccttcgctacagcagatatgattacttggattctgcctatgggtccacgttgtgtacccagtcccgggaaggtgcaagaaaatctgatcctttttcaaaaatcatcttagaatcgaaccagtcttactctgattttcatgacacccccaccctgcccttgcttctcgcagggtctggggctccatgtccttatcagtatcagacttccactgaggctgctgtctccagtacccccagaacactaggattatagtttctactggaattccctaaactacattgctcatccatttcaactagacccaactgcttgacaactggtcatggacaatcttgaacatagattctgtttcacagtttgtcctaatctctttcttctcagatccatctttttatccctgtccctctgtgtacccatagtcacatctgggtgtctgtggtgggattgtggatgtgcacttctacccactgtaagcagctatcacaggtctggcccactcaactgctcccctgatatctgtagtgacagaaccttgccttcaaaatcaaaagatacaaaggtgattccagtattgccaggtagagttttacaaagagtacttgcctttgtggcccctttttctaaaattttggtaagcagatatacccagaagtatgccagccagaaagtctgcagcagctctggggcctcagtaacataagcacaactctaacttgatagcaagctcaaccttgatctccaactgctcgtctgctgtttatggcacttactgcctggccacgttttcatttttgacttggaaacaacaaggcagatgccacattccataccactaccttttttagttctagtgaagaaaataatgtaagatggtgaattaattgacatgaaaaaaaattaaatgtacaagattaccacttctgcttagtgctttgtctttagtaattattgcatttttgtatagttaacgcttaaggtatgcaatggccaaagcacaattttattgcctttagtttgctgtttagaaatggcctctgggggtggaagggagtagaggagaccaatctttatcaataatgggtagtaattttaaaatcatttaaaatgatttttgtactcacatatgttcaaaccccctttccaggtaaattctatgtggggacacaagtggtcactgagataccacttggcttttagacagtgaagaagtcaaatgagaggtttgcaggtataaataaaatagcacaagtgtagaagcatcatcagacacagcaagtgtaactataatgaaagttaccttgaacaaatcagttcccaggatagcattcatttcttattgttaaatatgcttgatgcagtgaagtatggcttccagaaagataatggagcagataattaaacactctatttggaaacacaaacacagacacatacacactgcagggagtgtgggttagcacaaatcttgtcagtacaacctaatgaccttctgtagaccaggcctttgacaaggggaaaaaaatagaaaaagtcattttttttactgcagtaaggattttttataaaaattctgtggtacgtgaccaacatcagtaaaagagaaaagagcttagctcttacttcttttatataagtggactatggttcgaggttgatgataaatcactaatgtttgagtttcagttggctacagcatactaagtagtcttttctgtggtgacaagtgacaaggggcagttaaagatgtggctacctcaagttctcctctgccatagaaaacctcccagaggtcaaccattagacccctactgtttctatgtcagtagtgtaaggccaggcaaaggcaataaccttcatcagggtctgtctcaacctcccctgcagcctcctttcattcttcgtatccgatgatgccattatcatagagagtacatacctgataaatgcttgttgaattgggcagcattgtttctaggtctctctcaggaaaaggaggaggatcaagacataccatattcatcttaggagtaacacagaagtttccccagatacaaggtccaattctctctactgtaaagcctagtcctcatctcactacatttttcaattagctgatgacacctacatgatgcatcagagatggatagatggattggctgcttttgagaagttactcatggtccatcatgcatcaggattcttactcatccacagtcccctgcaaacagccagctattatagtcagcagccaatggtctatgtgagtgatccagaagctaggttagacagcatcccattggtcttcctggtaagaggttgtgctcacatttcatacatctgtacagtcacagtagcccctcatgaagccttctccagctgctccagcctcatctccctctccctgtcagcacttccagtctacaccaggaagtaaaacttaaccacatcctacctggtaccagcaaacaacttatttaagaagtcatgcacatttgagccctacgttgtgcccaacctcatgctgagtactttgctgcccctcaacaaatgtttgaattcttgatggcccagatgggtaactgaggcagaaacatctatgagtctccaaagggaaagcacatataaattgagacctgtgctgtattctcatctccagcctcttctcttcgtgtcagacatgacacaatcttttttttttttttgaaacagagtcttgctctgttgccaggctggagtgcagtggcacagtctctgctcactgctacctctacctcccaggttcaagcgattcttctgcctcagcctcccaagtagttgggattacagacatgtgccaccacacccagctaatttttgtatttttagtagagacagggtttgaccatgttggccaggatggtctcaatctcttgacctcgtgatcagcccacctcagcctcccaaagtgctgtgattacaggcgtgagccaccgtgcctggccaacacaatcttaaatactcaacaagctagcctaacgaggaatgccagcaaataggtcattgctaacatctcttttggtgtctttgacaatgttccaagtggctacctaacatgctggcaattatgcctatagggtgagtacctcatttaagtatttttgtagattaagtcaatctatgtttatgaattttgaaataatggatatggctatggtggcatgaccctacttgagcattaaaaaaaaaaattaacttccaacatattttaatgcaaatgttacctttgtaagtggatgacctgaaaagaaagtgtttccatagtaacctaagggaacacataactgtttatcagaacttctccaggaaaagagcttggcatggactggggatctgctttgatgtctgctgaaagaaaatagctgacagcattgtgtgagaaaatggttagaagatcccactttatttgtagttaatttagaaaataaactttcataatgaactgctgaaatacacacttgaaacaaccagatgatccatcaggatattttttaaaatgtaatttgtcgggtgtgacaaccaagtcatcagtttaagagaaacagattagggaagagatcttacagcaggtctttgccaccatttcactcattttttttctgtactctgtgttcttctgtaggaatcactaggcctttcagagctcttagatttttttttctttgcttactttttttcctttttaacttcagaaaacgttatgtaaaagctgccctttgggaattgagactctacattgtgaggctatcaccaaaaagaaacctattgattgattatacttcactttctttactgacacggctgtttgagttagtagctttttggacgtgccattaggtagaaatgagtttgacatccacaagccactatctggttatctgctggttattttccctttttcttatggatgtaatatctacttaaagaaaagctgatctacgagggttttcttttttcattttttaaggttcatttgagtagagaacagatgcatacagttttgagaagtatttctttgaagcgcctttttagagtcagctcactgacaggtccatgcccgtgggctctggtgtggacttagagcaattacccacctggtctccatctggtagcatgaacgaaaaatcataacagatcatagagaaactataccaactgccaccttggtataggcaggcaaagaaaggtgccacccaacaatgctgtgaagagtaagaaatgctatccgtagggtatgcacattcccaccacaagatgcaaaagagtggcacacaggagcatgtggaaaggaaataatatgcacatctaaccttacagctgcaactcgtgaaatagtaaaccaaaagttctctccgccacatttatgtttctagtgaagtttggagaaaacgtattatcctaatatgcttgagacctgtcttttgctacccactaccacccacaacagggttaaacaagacttgaggacttttaggtgaggagtagatgccaacatcataaggatgttgatgtaatttacatgtaatgccactttgtagtcagttcaattgtagcaaaaataagggttttatggttgctggaaaataatttaaatgtttgttgattcgttattgtctttttgtttttattttctccttttctgctttgtctgctttcttccagaatacagcgtgctctgattagtacaatagctaagggttcagaatctattactacaactgccagagatttgccctcttcgggtaacacccttccatcctgaggagctagagaatccgagattcagagaggggcaaaatgtctctggcgtgtgtgtggttagcagggtaagagctaacttggattcctttctttcataatcccctacaaagtgttgcacatgcttccactgaggactaaagcaatgaaaaatatcttcctggattggccacacagatactcatgctggacgattcaagaagatgaaatggggaagaaagaaacgatgactctagaggcatgacccacctggataagaattgttgtaaaggaattatgtagtgcaggaccattagaaaatgccagagtgggaggtgagtgaaagatgagatgtcaaaggagaggggttgtgatctgaaaggtaagatttcaatatctgtatgtagactgtgacctttgcaaaagactttatggaaaagccaacaagagcctaaacgtgattgctgtggaagaactgaagtgcatactctctgcaagaagatataatattgtaaattcacttgctttttcttcttccaacgtatggaagggactcaggtttttttcaccataatttatactaattagtctttccacttaaatcaagaggggaactgcaaatgtggccattgatggtctgctcctcattagagacaattaagagttagaggaacaaaaacacatcataggattaatgatgagaaaagccacccagagagagaaacatgaagcaggaaatgatcttattgagctggacaaaggaaactgatagcctgcaagatcagaggctcttggagctgaggtctaaacagtctaaagaagaatcgcctgggcatgcaagccttcccctgctgtattctcatctgtatttttcatatctcctgtcatattgcatttattaagaaatgttcttgctctctaaatccaattcattagtttccctccatggataagagggatggcattactgctgagagaaaaataagtactaagctaatcagccttggtaaattccagtcttgcatgttattgtcattgaagctttatgtagcattcagacagggcaccgagacacaggagagagactggatatgaaatgtcctaacaccactctcagacccctgctgcttatatcattttatcgtcttccaaagagagagggaggagattagggaacatttaattgccttataaactgattgacaaattggtgatctgatgcatatggatgatctttttagtgaaatggttcagaagctgctaacagatcatcaggaaccatgatttgcacgctctccgcagagttattacagagaagtggaaggatgggttgattatttattatctttccttctttctgttttttttttccttgaatgttttcttcacctccagggaaatgcattctagcagcgtgaacaccgctattaatcaacacttgtagcaataatcagtgagtgaaaaatggtgaccagaatctgcgaatgcgctggcataactgtcttctgagtgttcctttgtgatcatgccttggcattcgaacatggataatttatacaaaattaatgttgacaccttctgaggtgcaaagattcatagaagcagtgcttacttcttcatccgttaaaaaacgaagagaaattgtttctggtcatgatgagtcatattttagaggctttaaaaatatacttgatattgtcatgtttctttgtgttatgtttagtcacctagtcccatcatttttgaacacaggtgtcataaaaggcaaaactgttataagttctttgtttcagttttctcagacttactccagaaggggtgtggaaaataatcaagaattttaaaatagctcaagccccaatatccttctcaaagccaactattgttattggcagtgcttgggggggaaatggttcagagttgctggagtggcaaaacactgttacaagccacaccttacatagggcagttgtctaaattaatagtgcaacatttggctagtgatgcaattatacacaatcaaactattttgaaatttggttgccactctcattccacaaagctacatattaattcacaccatcctgtgatcaggagggcaaaatctgaggtgccaacacactggaaatttcccttaaacttcgctaagttaggatgagtttgcctggagcctaaggaagatcactaaggcatcagaccacatctttaaaaagtgtgatagaccaggactcataggagcatatgacaccagccccttctctgcgaatcattcctgtcattaaaatcaatgcaacttaattaaagcaaattatagatagatacatctataaataagatattaaagtgtgctgctgaatatgataattgctgcatatttagcaatcagtgtgtgtgttctgcttttgccaggaggaattcctttcagtggaatcaatggagctttattaaaaaccatccaaattagagggagaaatgatgagtgttataataacacaaaatcactgtttcaactttcattgcaaagaaaagaaagcaaaatatggccatccctcttttttcactcaaggaaaatattagacatattttctttaagatgtggatgttttgaatttataaattttaatttttgtattctcttctcccaaaggaaggcagaaggaaaataatgatcataaataaaacaatttagcagtgagactggtaggaggaacaccccagtgcccagataagctgttttataccgtgatgacagaagacaaataatgaagttcatattctgtacagaacttgaagatggcttattttattctcctatccaccagattttcttgtatgtgaaaattttcatgggttaattcaaaataatgaatttggaaaataaaaatccattttcttacccctatacctttattcataacaattacacttgaggcaaagtatattttttcaggctaattttaaaatacaaattttaaaaagtttttttatcatcgagtttaaacatcagtaacaggaaacataagtgttcattaaataatgaaatcacccctgtgtaaccagaattattctcaaatttataaaaataaatactaaacttacaaaaagacatagattttaacattcaatggttttgggggttttttgtttgtttgtttgttttttgagacagggtcttgctttgtcacccaggctagagtgcaggggtgcaaacaggtcactgcagcctcaacctccggggctcaagcaatccttccacctcggcctcccaagtatctggaactacaggcccacgccaccacatggggctaatcgttcagtgttttaagagatgaagaaaatcactaggcagccagccacctctaatagagtctagtaaaagcatttacaaagacttcccattctgggttactctgtgcattaatgttttgtctttgagaaggaaaagagataaaagaaaaagtgaaaaagccaaaaaaaaaaaaaagggacaagaagagacatgcatgtttaggaaagtggtttataactattatttcacttgatcaaataaatgttgatttgttgaatattttcaagggactggtcctggtgctaggaaagaaaacaaagtccctgttctcatagagtttatgtttgtgaaaagagatagacaataaacaagtaaagagtaaatatcaggccatgataatgaccaggaagaaatatcaagctgggctaaggggctgggcaagcatgctgttttctacaaagtggtcggagaaggctaagggagcaagatgcttgggaagctggaggagcagagaggagagtgagtgagaaggagaatggacggaggccagagaggtgggaggatcagaactgtggagtcttatggagtccactttttttttttggagacagagtcttactgtgtcgcctaggctagagtgctaaagtgtagtggcatgatctcagctcactgcaacctccacctcctgggttcaagctattctcctgcctcagcctcccaagaaactgggattacaggtgcccgcaaccacacccggttaatttttgtattgttagcagaaacagggtttcaccatgttggccaagctggtcttgaactcctgacctcaagtgatccacccacgttggcctcccaaagtgctggaattacaggcttgagccactgcacccagcctaaccattcttacccatagtggttatttctaattttctaagatgcatagatgatgatacgtattcctcatgcttagaaaagagtaaaaacgattggcattggtctagcttgctatgtttttctcatggcctagctctagagagtgattttcaggagagatggccaattatttcattccagactgccaaaaccagaggctattatattcacaaatttgttcaaaatcgggacacatgagtttccagtctacagaggggtgtatacagagtaaaatggagttcttttttgcatctctcttagctctacatctactgtgtagacatattgcccccataatcaaatctgctctgcccctttctcatgtttccaccagaggataccatggcttattcccacctgcgaactctgcatgaatggaaagaggaagtaacaacagccactaatcatgtacatcacagacatctaagcccggtctttcctttaacacacactccgtccttgtgcagctgtgccttagagttggccccagtcaataggtagggagggagcagagtggtggtactcagactctttatttggttcctttctccatgccaaaagaagatgtcataggacatttcaaaactaaaccatccttagagatgtgtactaacagcagtttgcaactctgttatgggatacacaaaacagcagggccactgttcttcattgtaatctgcatgtgaatattctagttcaaactccacacagtaataataccattaatatgatatttgtttgtagcataagaaatatatttccttctgaaaatattgatgtaatgggtctctttaaatcacagtatttaaataatagcccacttaaagaacaaggtattggaagacattatccagtaaaaggtttctcttccctatgaggcagtgagttcattctgccacctttataatttcctcttcctgtgcaaagtggctctgtgctctctgctttgctgcaattcctcaggcaatagccaagctctcccattgtgaggatccctgatttcaataactcacagaaattagtaattagaaacacattaaagtgttggatcatttttcttaggggctttactagtagagaattgtaccccaaatttcatttcctggtgttttctcctttctggttataaacatgccaatggtgctgtattgcattcacctggggtaggattgagacgtaatcaaggtgagcctaataaaaatgtggcagcaggcctaatgaaaattggaatggatctaaaaaccttgaataagctcactctcttttcataggttcttgcagtttggttttcttgagtatctgagaaatggcagggagtggggtcctttacaggtattagctatgagcaggtatttgaattctgattgagaattgtgaggtggaacaagcgtgtggtgtctcttagctgagttgtgtgctattggaaatgatggaggctgaattgactttgattttttaagaaatgattcgattaacttttgaaccacctgctcctgtgtccccaggaatatcgtgaaataggctctattcctgttctttccacagcattgcattctcctgctcccactcatttgagttttgccgctctgtgaattatggtatttgatctctgctcctaaggaaagatgattctacccactctttggatgggttgttccccacggttgaccctcaaattgaaagtgatgtttcccttgtgaatgttgtaaatttaaactcagggatcatcacctgatcagtaactcacttgtgggttgttagtgtaatttatgcactgttgcttgtctgcaaagtaaaagtgagtttctcatgacccttgaggaagatactcggagagacctgtccctaaactatattgggccaatgaacaaattcaggaatgtaactctctctacttccttccaagtgacttggattaatgttggtgctattttccataccaaaacccaattacaagatggaagattttcagtaattgggccctttggatctgaaacatctcaggtcagtgcccctggggatagccttcagtaggaagagttctggggcttcaaacagaaggtaaatctgatttatagatggacatggcattacatctgtcacaaatacattatgaattggcgttgtacattttctaacatataaatcaactccccctgggaaattatccttcatcctaatggattataccataagaagttctttgcaatattcatcctaaattttcacttttcttaatttcattacattgatgagtagagatccttatatattcttttgcctacctcttagggatgttaagagtattaggctaatgcttgtaaatcacctcacaattctccaactgagcccactaaagcaatgcaaaacagtactagataataaataggtgttgcttctgctcaacattcatgctatactggggcataatgaatagacccttaagtaagtagataaacattcttctccttaaagatgggaaatcatataaatggcactcaaccagaatttcaattgcttagctgccaaagttgggatttggcttctttgcatagaaataatcatggcaagtgttggtttctttttctttttttctctggttctcctgtctgctgaccccttgctacatgatgcttccccttcagactctgtacctttgtttctctggaagaactgcacttaggtgagcatctctctgaacacagacactgaggatgctttcagacttgaaaacacaatgaaggggccttccaccagtcggcagggctaaatctgggagttgcactcatttaggaaaacccatcaatggaccgatagcaaaatggctgaggtcagtagttggagatggactcactctctacctgcgcacacaacctgttgtaccctgggaaggaagccagctgtcattctctcctcatccagtcactagaactacacacacatggtcctggcatttatatgtgatcccaaactgttcaataatgtaataaaatgcatatttcatatttgcactgttaaatgcctaaatcacaaatactgtttcttgatttcattcagtagaattaatgttgccacatgaattagagcattgcattcagttgctaatagcaccttgaggtaacccagctaggataatccaagtctgttttctgtgggtagttgaggattacgtgtttctctgcttgcctatgttatgtctctccttcaagattacttttttcatttagttgatgctttattcttttaatcatttattgagcatgtgttagataagaagtattacaaagatgaataaagcaggattatttgtcctcaaagcactgatgatccaacagagaaggaaaaacaaaaacacaaaccatctccttataacagtctaggtaagtattatttacaaagacatactgaaggctctcagaaaataaaaagagaatagttctgtctgacaggcttcccagaggacctggtgatggaagagagggggagaggaaaaagcttgaaccaacgtaaggaaatgtgagagtttacagggatgaaggatggtgatactgatgaggatgacaatgatgactgtagattgtgaaaggcttggatgccatgctcaagaattagacttctctaggcattgtttctgtaaacaacaataagatggtcacgtgtgtgtcacacacacacacacacacacatgcatatcatccttctaaatgtgtcatattattccagccactcatcttgtatacatatagtgtaaaaaaagacactttcataagagaaagtaagagttctctctctataattccctctctttctgtctatctgtctctcctttctctctcgtcactctctttcccaataccgttttcggaatagtatcggtgaagaagcttccattagctctgtaagccagatctgctcagggggctcatggaaatgaactctacagggcagggaagaaatcctctccaagtgtttttgtttttttattttgttttgttttttaaccaatagaaaggtcagattcaatgtaactgcaatagtaagaatgaatatttactgacatgtagtagactatgtgtgagatgtactatgtgatttatatgcatcatatcatttaatgctcataacagtcatctgagtgggtattactaatcgcatttacagatgagagaaatgaggctcaaaagttaacttacccaagatcacaaagtcagtaagtggtagagccagaattcaaacccaaccactatggcacactgtgtgcaggcctgagaccactgcctctgggtgttcaattagagactcttcatgcagtttccagttagaattaattaatgctggaatcagacacgcattaggagtgatggtgcttttaggattgtctgacctaccctccctgccgtgtcattctctttgagtgaaatagtcttatgaggaattcacaacacctgcctttgtcctggtcagggtagtgttgcagattgagtcagatgatgtctgagaacatgctttgatcattgcaaaaccctgtatgaatatagtatctgacaatatatcactcatttaatatgtatgtaggaactagacagcaagcacattttaaaaacaggacaggtagtttgaaaatcggtttaaccttttaggtatcatcctctagagcaggtatgtgcacagcccctccaaggccgtggtcaggggcccatcagcatccaagcttcaaagccagccattgctggtcactctatcctttccccagtgcctgccagactgttcacgaagtagcagcccagctgtcacaactgatgaccagctgttttttattttaacaatggctactaaaacccacactgaagtatcctttgtattatttcctcagtagtttagatatccggttctgaagctttgatcagatcactgaacacagttctccagacccgaaccccacccctcccccaggtcattgcacagagcaaacgtgttctgctcaagtggcatcctcagatctccactaggtggacttcacagagcagccaagtacggttagatgtgactcaggtgaagttttttcaaagccctcttagccaaagaagtatgaggctttgatgtagcctttcactagttcgaaagtaactcaggaacagaggggaaaagactcagcagttctctcctaatatccaaactttcctcattttagtatcactactcagcttgcagggaagtctgggagagggttcctagaaacccaactaaccacggactctgtgtcctccacagcatgtgagttgtgcggcaccgtcatgctacatccatgtcttggctcatgtgagacacttgggctgattttttgttgttgttgttgttgcttgctgtatatttgcataattttatatcccgagcagagttcttgattttgcaagagcataataaaaaaaaaaaacactgtgaattggcaggtttgaggttatgatttgcagctggtctatcacttcctcttcctggaagctgcagcttaaagtattttacaattatcatatttcacgggacctgggcctatatttgcatctgctcatcttttggttttcttttttaaaaaatactctcttttcacattttttggtggcaaaattgtccaacacattcattttatgtatttttctcttctgggtataaattcatatggttcaatgctattgaaatcaaaacattcaatgcaatgagcccttcggacaggtttttgagactgaaaacaatgacaaagcaaattctacccagggttgcagtaatatttctaaccagcctcctttgtccattgtcattattttgattaaaaaggtgtgtagaagccacggtggattttcaggatgcaaaaatcattgcagaaacttcctctattagtgcaaattattagacgatggaaatggtacttgagcagcaagaatgacattaattatgcgaaaagcagtcatatctggcagttggcaagcatgcattattcttcaacaatcttccatgggtttgtgttcagccagcattagaaatctaaaagcttttaattttggcaaagttttcacaggacttgcacttccagcttctagataaaagataatttggaaggaaattatgttggtgaaattgaagaattcagtaatgagttctgtgtagatgaatcaatgctcaattaaatgattatatcaaatctacctttaaatgttgacttaaaataatcatattttaaagacattgaaagtaagatgctatatatacatgtaatcagaagagcaaagtctgtgttaccatgctggtagaggaatgaagtattctgattgatccatgaatttgattaatggaaagaaatttaggacaggaattacctgtacgctaagatttagagtagactgccataatctagcttgttttcatagtttccattctcttttgcagcttttctctgtttctctgggtttttttctctttccctgtctacacccctttttccaggctcccttctctgtttgagagttttaatgctcacagaaactttgttttttttttttttttttgagacagagtttcgctcttgttgcccaggctggaatgcaatggcgtgatcttggttcactaaaacctctacctcctggcttcaagcaattctcctgtctcagcctcccaagtagctggaattacaagcatgtaccaccacgcccagataatttttgtatttttagtagagacggggttttgccatgttggccaggctggtctcaaattcctggcctcaagtgattgcccgcctcagcctcccaaagtgctgggattacaggcgtgagccaccgtgcccggcctatttttttttatctactactttatccacctgtttttttcccttcgtggcaatgagtacagccaatcagagcaatattctttgtttcattcattcagtcaatcagcatttactaagcccctgccaagtttatggcactaacctgatgataggcagagctaccaaaactgaagaaacagatatcctgccataggcaaaaaagcacatgtttggctggccagacacggtggctcacacctgtaatcccagcactttgggaggccgaggtgggtggatcacttgagatcaggagttccaggccagcgtgaccaacatggtgaaacctcatctttactaaaaatataaaattagctaggcatgatggttcatgcctataatctcagctactcgggaagctgaggcaggagaatagcttgaacccaggaggcggaggttgcagtaagctgagatcacgccactgcactccagcctgggcaacaagagtgaaactccgtctccaaaaaaaaaaaaaaaaaaaaaaaaaaaaagtatatgtttgggatccataaaatttttaataagatcaataagatcattgagcatgcataagaaggacaagataaacctggaaagttaggttgctatgggttactaaaggccttgcataccagactaagaggctgagttttttttctctagttaacaggaaactattcagtagtttgtgtttgtgtgtgtgtgtgtgtgtgtgtgtgtgtgtgtgtgtatgtatgtatgtatgtgtgcttatttggtttggttttccaaaccaggttttgacataagaacatcagttttcagaaggttatcccttcagttcttcctttctcctcaacttcattcatcttcctagaacttgaactcagctgctgcagtcatcacaaaataacttggttaatataaatttgaggaaaatgcctgtctgattccagcatgaatggtaggacaggtctgataatgttgtgactccagtaaacactgcataatgacatagccattccatccaacagtagttgtgtgctcagtaattcatcttattgtatacggttcctctcctagtccactgttactctgagcttataggaatctttcctcacgctaagcagttacataatttagattccaaatggtttcgatttatactccagatctgagttcaaatctaaattgttagactatttatagtttattttttattttgtaaggaatatgaaaagccaggactgtgtaaacaaaagaaatgtggcagtcttaataaggcataaccataaaacagatgtcatgagggtaaagctcccttgaaaacattttgatagtatgttttctctgatttaacaggtttggaccaaaaatctagcatggaatctgattcattctttctgttaacttccactgcgtagatgtctgagacatctatttcattggctcagtaaatattaatgaacggactgatacaaagatgatatgccaggccttgagaatgcaatggtgccaaaaggaggcattgtgttagcactcaggaagcttacaatctgagatcttaggtaaaccaaattaatagactgataccatgtatgaataactgaaaaaaaaactgtacataaaccaggctatttttataacacatatctccttattaggaaacacttttgctataccaaaaaattagaatatatacaaatattaatgcctccagctataagaaataaatattactaggcctttggagttcagtgatatggctaagaagaccacaaaccactgagaatacttgcagacagtcacagactattttacacgtcccatcgcatcaccaccatgggttcatttgaactttccagtccttcatctcagttcttcatttaggaaacagagtgacagtaattatgtgatcactgccaacatacgagcagcattgtcgggggagaaatgttgctttggggtcagacacatctcagttcaaatcctggctttgccactgtgtgacccttaggcaagtctcttgatgatctctgaactttcatttcctcatgtgtgaaatgaggcagagatggaaatggtagcacgattgcaactcatgatactgatagtggagtgttctagagagtcctttcttttggtaattgtaaatggaagtgaccagaacttgccaactggctgaaatagatacaaaatattcagcttttccaaatgtttcttttttctatgtttggtctttataaatggaagtatacctaaaatatgctagagagcttggtcaaggaatatgctttatagagtttatcagctaaaagggatagtataagaaataatatgaactagtatatcatttaagaattgaacatattttgagggttagcattgtctgttttggggtgagtgaataacactgtcacagagtgtacaataaaacaaaacagcaaggagtaaatgactcatggaatacatccatgaaacagaaactgaatttagtaagtactagatattagcatctagtgattgatgtcactaagattacatcaaattcctgtgtactctgctcctggagaatacaagacaggtgacagatttcttaggaaatgcttttcctaatgccttttttttttcttttcatcagacctttgtcttttttcaagtatgagtttactttttagccagtgttacaatatctctatttgtaggtagacagatgggggataggaaatgaggaatgatgtctggctctttaattaaagacacagagccagagtttgctcttcaagcttgttggcaaggcacatacgcacacgtgcacatacacacacatacacacacaaagtgcatctgatagatgaagccaaatttgtaaaattgtatccacaatcatagtttctatggtaactgtatcttaggcccagacacaaacagagctggcaggagatgtctgattttattttctgctaagacaatcataacagagacagttcaggttattaagatgccatagcccagtgtacatgcagctagtacttggatggtgctaccataagatttcatgcttaaatcccaataaatactttataatttcataatttgcaggttgcttttctctgtcattctgctataaaatcatcatgtgcctgcacacagttactatattaatgaggtgttagtggtcaacataaatgtggaaatgatgcaagataacttttataaatgtgcacaggttagaagggacttccaggatgtctgttttaaccctgacatgttgcaaggaaggaaaatgtaggcacagtgtggttaaaagacttatccaagagttacttttaaaatattttatttgctgtattttttaaactagcagatgttctagactagtctataagctgaatacccagttatttcacaaaattactgaaatcaaattgtggaaaacaaacacttcagaaacaatagtttgaatgagtgtgtgttctttcgcctctctggatggcatatttgtaaatacgtagctcaggcatattataccacatattgctgaagatgaataattaaacatcctattttgatgagtttcattttgtttaaatagagcatttcccttagttcccctagaaacatatagcattttagcaaaagtcttaatattagaagatgctgaaagccaagtttataacttttagaagtttttattgtgttgattcctttaaacatcttccagccaaatctgtaactaggtaagagcaatggaattagaagaaagcttttggaaatgtggaacacttctccaaaatatctgtcatgataccaacttgaaatgaaaggcacatttcctaaaatggcatctaaatttttatactttgcatcttaatcttatgatgtgtctggcagcatgaaactcatttttttgtaatggatctaagtaagacatatttgtaaatgaggatgttatatataggtgaataagccgtattgcaactttgcttggcctctccatcacagcagctttttaatttcctcaggaaaattggcttagaggacataaattacaagattggcaaaaaatgtgtcctaacctatagaaactggaaaacatgttaattttgaattgtttccgcttttcatcagcagacatttgcagaaaaatcttgtgtaatttattcttttattttcaatgaattgttaaaaaatgtttgaaaaggcattatatcttctcctctgccattaatctacaaatggggaatattgggaggttaaatggcctctttaggatattgctttatgaaactgctgattctagcaatgccaggctagaaatacatactaatttaaggaaccatgaatgtaagcagcaagctctttgcttttgtaaagaaaagactaatagctttattttaacaaggctcctaacaccccagccggcagcaggcattgagtgaatgaaactgggagaactcccatggactaaaagcaccttaattcaacattccttccaaacaccaagccctcctgataggcttgtcacaggctgtcataatccagccaaagagggtcaccacgtgcaaggcgcaccaaggtatgagcgctttaaattgttttgaataagctctctgaagtttcacttcctgagctatatcagtaaaggaaagataaatatgccccaaatccaggcgtaagttctaacgttacactgttgtgtaaaaggctagatttctgttatggcttaagtcaagattgtttctgtcagacatatatttaggtcactacattaaaaagaaaaaaaaaacctgcatgataccaagtaagataaagggatttaaaaaaaattaattggattgaagctgctgaccttatttttttgtgatgaggaaaattacctaataaggagttcttcaagcaggaatatttctgagccttgttgagcacagagaaaaatgagaagtgagcttataaatgcctgtgtctcttttctctccctcactccctcttcaagtcatcttacttcctaaggacttaaccacaacttcttaaaattggcttccctttagcaaccctctatctgcaatttcctatcctctatttgcagctcttgtaagaatatttgtacccaacacactaatctatattgccaccatttctaaccgagtattaaaaattgatcaaattataggagattacatgaattatgatttctccatataatgggatattatatagccattaaaaatcatgttttaaaatatatccaatagcatacaaaattgtcaataataaacagatgagaaaacagctctatatgccattaaaatatgtatgtgtttataaatgttaacagaggtcattttggggtggttttccacaataatcatttaatggagaaaaaaatgattaaatctgtttttttggataatggaacagaaatgtatccccaccattttcattaactaacattgtatccctgagggagaggactttttctcatctctatgtcttatggtacttcacatgttactctacctaggagacactaatacatgtttacatatttgaaagtattaatcccattccataagcatgacagcataagacagtacaatcagtgtttatttattagaaaactagaaaggttttcagcaccagagagtctggctttctctccccatcaatccaccgaaatcactctcaataaaccaccaatcaccatctcattgccgattccaaacaatatttttgcagactttatagtggtctctgttcagttgtagagagcaacatccactgtagcttaagaaagaataaatttattataccatagtaatgagcttatagaaccataagggatgttaaagaaaaaacttcttggataagctttcaggaatgatttttccaagccacactccagaactgagctactgggggagctgttgctatttctatgtaggaagttttagactgcagagccacacaatgctcatatcaggagccaccatgattaggaagatgccacaatcagaaagccacctctcctgccaccaattctaagaccaactataaaagttacatttcactccccaaactagcaatgttacagctgctaaagctgccacaggaaaaccaagcatacctctcatttagtcagtcttgccataataaacagcggaagtatggccactgcctcaattctattttccaaatgttatggcctaacttaaatcatgccagtacattggctgcaagggaatccagagaaaggtagtttttagctttccaggctctggaattgaaggtgacactctacaagaagggtggattgggtgaagtgcactaacacacagtccctgtcttactgaagcttttcactgttttggcactgtggaacactcccttcatggaattcttttcttggtttctacaataaaacattttcctggttttcttctgaaccaactactttttctcagacttcctcctgggttcagtgtttttggcctgccctttaaatgatggtgttcctaagaatagtattagtgttcctctctcttctcatttgtcttttcttttatttggtccctacagactcttcctgggcattcttttccaagctttctggtaccatctgtatgctgaacgtttcccaatactacatctctagtccagacttctctaagttgcaaaccattatactcaacgatcagacatctccattgacatgtctcaagtcagtttaacatgtctagatattccctcctcccacctctactccaaaatctgtccttcatttattcctgttttggtgagtattaccaaaaccatgtagttgctgagctcagaaacttgggcattattctaaatacctcactccctttaatccacagtcaatcctattgctcttacctctttgaaatcctaatgacactctcttgtcttcatcctttgaaaaaccctcaggtttatgctcttacaatctctggctcagaccttcgctgaactctccaagttatggtaagaataatcttaaaaactataaattcccaggagataaaatacaagaaaatctagatgacctagggtttgatggtgatttttttgatataagaccaaaggcatgatctgtgaaagataaaattaatacgttgaactttattaaaattaaaaaatgttgctctgtggaagacactgccaagagaatgaggagagaagctacagattgggagaaaaacgtttgcaaaacacacatctgataatgaagtatccaaaatacagaaagaaatcttaaaactcaacaagaaaacaacctaaataaaaaaatgggccaaagacctcaatggatccctcaccaaagaagcaaagaagatatacatatggcaaataagactgtgaaaagatgttctacatcacatgtcatcaaggaaatggcaaaacagcaatgagatatgactacacacctattagaatggctacaattgggaacactgaccacaccaaatgctgacaaggaagtggaacacggggaactctcattcaccaggaactctcatttgttgaattctggtgggaattcaaaatggtatcactactttagaagacaatttggtggtttcttgcgaaactaaacatagtctcaccatatgatccagcaatcgccttccttagtatttacccaaaggagttgaaaactgacatccacacaaaaacctgcacataaatgtttacgtctttattcataattgccaaaatttggaggcaactaagatgtattttagtaggtgaatgactaaataaactgtgctacatctggaccctggaatattacttagccttggaaagaaatgagctatcaagccatgaaaaagcatggagcaaacttaaatgcatatgaccaagtaaaagaagccaatctgaaaagactgcgtactgtgtgataccaactatatgacactctggaattgactatgaaaagagtaaaaagatcattggttaccaggacctgggggaaggagtgatgaataggcagagcacttaagatgtttagggccatgaaaattctctgtatggtacagaaatgatgaatacatgccattatacatttgtccaaacccatagaatgagtaacacctagagagagccctaatgtaaactatgggctatgagtgattataatgtgtcaatgtaagttaatgagttgtaacagttgtagcacactggtgggcatgcgggtaatgaaggaggttatgcatgtgtaggggtgggactatatggaaatctgtatgccgcctaaatttttttgtgaacctaaaactgctctaaaaactagtttctttttaaaaattgcagtggtggtggtaacagcaatagccacagtaggagcaacagtagtatagttgctagttagtagtattcttttcttcataccttgtttctacctttgcaaaatcttcaaattccctgaagacacagtgctttcgatatgcctccatggtttttcacttttgtgctctttacttgaatggcttatcctactactcctacacccttctgccccagaaaaactcctcctcatccatattcaggtttgagatgacgcttcaacacccgtatgacgctgtcttcaactctcccaggtggactttggaatttcttcctgcggactcccactgcctccttcctcagacttccacagtgatctcattgtaccacaattgtttgcaggcctgtttccatgaggagacccgctggatttcttcattgctttgaatacagtgaatgactgcattaatgatgttgcagtatcaatggagaaacatacaaagatatacacaattagtgaaggacagaataatttcttatgtgcaagcttgctgcctatcttttgaagactggcccaagttctggtacttccatgaagtttttcctgacacctccaggcctcacctgtgctactgctgataacatcctgaatggcacttgaaaatacattatcctatttcattctttggttatttcagtttgaatgctgttttcccaacaagacagaaaatcccttaagaataaggatcaccttacatttcatacaatcttatatgctgttgggtatatttcataggtgtgtgtatgtatactatatataaatacatatatgtatatacatgcaaatatacaaatatatgcatatttatatgtatatatgtatattttatgtatatttgaatattttatatgtatatttgtatgtatatatgtatatttgtatgtatatatacataatcatgttataaatacatataattatgtgtgtgtgtgtgtgtgtatatatatatgtgtatatatatatatatatatatacacacacacacacacacacacacacataatctgttcctcgaggcaccagaacagtaacaggcatgtggtctcctcaaggcaacagaatactgactgctattatcattatgccaggacagttctggataacggtgctgaaactattaacttggaattttatagctacaagaaaaagttcagttggaatatccagagctatactatggatacataagcatagtgattttccaacaatcacaattaataaccttcagcatagtattgatatttgcaggaattctctttccataagaaatagtttaaaaacacaagaaagcaaaccttaggtaggaatgggtgaggacaatgtttctgtccttcacttcttccttttcttttttttttttttatcccctgtctgtcaccatccttgcctctggttttggtagaaagttcagaaatttaaaccaaggcttttatcctactgcagagaattctcaatctctctgtctgtgattgctttaaagatgtgaagtcttcgtccctacctacgtagtagctcactggactcttgccctctcagataaccccagtgtctcctgttccacctattgatgaaatataaagaggttttataggacacactctaaaggtcctcccacaataattaaacaccaagaatagtctttcttaatctaagtgcaagtgtatacttgttttgcaacatctctccccatatccccaaccccatatacacagtctgcacaagctgggatggaatggtagttttatggagagccgggacttttggtaagaagaaaataacttccaggtggttgattaccgcctagaaaaattttccctactgaccttgacactgttagttccttcctgtgcttactggcaaaatctcttccttcccacctgatagtccaagttttctatttactccttccatgcccatgtgtgagggatatccaagagcaaaaggaagcacatgagtggtccatgtgataccaagtgtgttgaggtgaacaggtggggaatcaatcagtaatcaagtacttttaaatacgtgttacgtgttcatcctgtttttagttggcatgatagctacagaacaatgagatacaatatcttttcattaagaaaccaacacacagtattaaaaacctactggggccagtcactgccctttaggatttcagaggctgatggaaaagactccaagagaggtaaacacaggacgtacagaggaagggacaaaaacagtaaagaccaacactagatagaaaacagttcatcacttatgggtggccattcgtaagagagagaactgaggttcagggtggtcggggggcatcatggatgctgtggagtagacagttgattgtcagcaacccttgttagtaaagaaaggttttatagaaaaggtgcttttatttatttgtttatttatttatttattttgagacaaagtctcactatgtcagccaaactggagtgcagtggcgtgatgtgggctcactgcaacctctgcctcccgggttcaagtgattctcctgcctcagcctcctgagtaactgggactacaggcgtgcaccaccacacccggctaatttttgtattttcagcagagatggggtttcactatgttggccagtctggtctcagactccagacctcaggcaatccacccgcctcttgacctccgaacaaagtgctgggattgcaggcatgagccaccgaacccagccagaaacggtgcttttaaaaatatggtcttttcacagccaagaagagctataatggcgtgaaaactaaatgtaacatactggatgggatccagggacagaaaaatagcattagttaaaaatctaaataaactatagactttagttaacaataatgtatcaatatggattaattgtaagaaatgtgccatactaacgttagctagcgataagagggaaactgggtacaggatgtatgggaagtctctatactacctgttcaatgtttctgtaaacctaaaactattctaaaaactaaagtcggttttaaaaaaagaagaagaagaagaagaaaatagtctagcatcctacagaatattcctggcatggggacatgagggagtcagtttgacagtgacccttttttgaaagaagtgactttgttgttaaatgccatgtttgtggcttgatcatcaattcctatagcaatgtggagttcttgcttgcttttccatggttgatttttggcaggcagtaacagcatttgtgcactgattataatttcgagatgcattgtcagtaaccaaggtgtataatggatcttcatctctaattacttttctctccacaggtgcctggaaggggtccagatgggaatgcacacaacctccgctttgaagggatggagaggcagtacgcatccttacccaggtagatcacggagaggtctcccatctccagctcacctacaaatgaagtctttagagaagtctacatgaaatagaaattctggctttgaaatagggaatatgttataattttgccttgctgccgtctgctgtagccctagttccatcttcacaaatgtgctaataattgaaacacttgtgggttatttttaaggggagaaaatagtatatcattgcaattgaacgtgtcagcaagaacattggatactaaatggaaatcctaagccattgctataaaactggtatcgaacatcccgcaccaagcttagagacaatcaaatagtaaatcctctgtcctaggagttacgcacgaggaatggcgggccagtcttaagcttggagtttcatgtgggtgttaagaagcaggaaagaaatgtgaacttaggaaggtgttctttgcctgatttagaatctgaccttgttctcaaggcaataagcaaatattgctgagaggcacagacccaacgggggaaagaaacaactgcatgggaaaagtttgctgggccaccctggcctgacatgatccactcatactgtaactcaacacccttgaaaatgagatacaattctcaaaacttgtgctgttattggtgagatgaagaggaattttagtttgctatcagtagcacatgacaaagaaacagcttttccaagagtacatgcagtccagctacgattggagttaggtgaggtgagagtatgagaattaatgcatccaaaagagaaacaaagtaaggttaatgccacgcagaaagttgcagtgttttcaaatattgccttttaaaggggtgggggaaagaccccaagcagagtttttttatcaaaactgagctgttaaagtgccaactcagagatggagtgactgtttgacattgtatgttgactgtacctctgtgtgattttacaaaacgaacaccctgaacattacaatgggcaaagccaaagtgaccatctgcttttataaatagtatgttattttcaaaagtaataaaatctgaaatctagcagagaagctgttttgtcctgattaggcaggacacccaaaatacaatattttaaaacttttataaagttatattttatttatcttcctgttttcttttctttaatagatgttgtctaataagtttttcttatttgtgattagcttcctgtttctattttccttggcttagtacaactggccctcagtatctatgggtttcacatccatggattcgatcaatctcagatcgaaaatatccaagaaaacaaagacagtcacaatggtactgattatgtacaaactttttttccatgtcattattccctaaacagcacagtataacaactatttgcatagtctttacattgtactcagtattataagtaatctagggatgatataacgtgtatgggaagatgtgcataggttatatactaatacgattccattttatatcaaggacttgagcatctgtggattctggtatctgaggtcaggggctggggtgcgggaggtgcagtcctggaaccattcccccaaggaatggggaatcatccccaagggacaagttacattttgtttcattttaaaaatggaggtagtttccaaaaatttgttttacatataagatttccggctttcactgttgaagtatatggaaattgtggttaaggcagatggaaaatagaatgttcttatgagagggagcaaaaaaaggaaaactggaaacagtttaaaatcttcctgaccaatctgcactcagagtgcagaaatggagtgtttgggtacaattcagaggcacagaaatagcatttaaaattctataaatttcactcattcattcattcattcaccttgtatctggtgatcacctagtatgtaccaggccctgagaatatggaaactggaggcacagtcccagtccatcctcaggactctactgttagcaaaggagtcaagcaaatcagccttttacagtagtacaaccaatgcttctgtttgtaattattaaagtcttctgaatttccaactcttgtttattttcgctaatccccgaaatactcactcatggctgactctaaacaagtatattttaggattaaacactgtggtgggggttttctgtcaaagataatacatttatgctgtttatggctctttatgaatgtatgaattgacaaaatcccgccagccccagaataaaactgtagctgaaagggaagcatctcaaactggaaataattctggcaaaaagttcactcacccacgtacacaatggtaagagcaattagttgcatgtgcaaacagacctttgcagctacctggcaaccagaggcagccatggtggagaataaatagggctcagataaatgcaagggggacccctggcagtggcttttaaatggggatgctgcatcccaacatctaaagaggagatgcaaagctccctcccaggcattgcaccctggtccatgggtggggggctccaaattaaactaatgagatgcagaaagcagaggccagagacgtactgctggcttctgaaaaggtatgcagatgctgctctgagtgccagtgacatttaccctggttttcttgtctttccccctggagattttgctgtccacttaattgaatcacgccagctccaccgctgtctccttttgccaggagagtgaggcgagcacatctcggtaggcaccggatccctcttcatcacagaggccgggagctttgaaatatttatggagttaaatttttaattaaaaacaggaataaatccatctgtaggaagtcggtggccaaccttatggagaacttaatatgctactgactgattgggttcctatgttgtttgtgcaatgcttcacagtagtttttaggaacaattcaataacattgatttctatgccaaatttggagccatcgacacagagagaaaatgctccacagcacatggagtaggtgaggagctctggtcaagtgctttcatggaactcggtcatctttaaagcaggcccatgcagcccactgccaggctaaatgacatttcacgaaataaagccagagcgctggccagcacaggaaaaagacaattcccagcacttggtagttatgaggttgcctaaggctaagggctaagccatgttaagtgttattgttaagcaatgttaaatctcctgcctcctaagaaaaatgactttacttcttttctcctgagggtgctgttttggaaagcggagtgtggttgtaatacaacctcgttagtaaacaccagacctgtaccagggccaatgttttaccagcctcaacagcccccagttttcttggtagtaaacagaatgaaatcagcattcctttattcttgcctgacaccctaggtgagtagggaagtggctgtttcctaggctgctatgatgtgcgaacatcaacgtatgtgtttttgcaaacggctcctttttcactccagcctgccagccgctcgcaattctcccaggtcccattctgatttcgcaggcctccttgtggtcagtcccttcagcactgaactctccactcttcccatctcaagcctccatcattcccacctggcccatccctggccccatgggatcccattatccccctctctgcagatggctctgtgcatcggcgcatgatattgctcttccggacttagaatcaagtgtggagtcctagggagtgagcaaaaggcactgcagctcttctgtggtcctacatgcgtgggcggcaaaaggttgctggagagactcgtaaaactgcattcatgggttccactacaagattcacattatgcagcaccagctgggtcccttgctgccgtccagctttttttgtagtcatgttgtcaactcccctgactatcccacagtggccattccaaccctttctactcccgttaagttctacgaagatgactaaactccccaagcccagtctctggaggtgatctcacttcctttgctttatgaccttgaggcattcaacgttagcccctcaacttctgctcctgcagctcagagtcctgcatcttagctcacacacgcttcccaaggggatgcactgagggcctgagctcggagtcaggccatgattatagccccagtttcatcacttaccacctgtgtggccttgggcagtgatggaattgcttcaggctctgttttctaatctgcaaattggggatgatattagagcctcggtaatagtgccggtatgagtattaaatacaataatacaagcaaaaccctcagcgaagagcctgtgtagtgcattgaaggattttttattgttagctctttttttattttatctcaggggaagaaatgtgccttcctgtaatgaggcaaacccacacaccagagctcattttccctggcttcttggggaccttgagccaccaactaccctctctcggcagcatctttaatccttttggcgttgctttcctccccctgcctactatcatagatgcacaacttcaggggcacagtttgccaggatcccccactgtgtggagaagaggaagcagcacctgcatggggatatgctgggggaactcactgaagctgaaggattcgccgactcaggaaagaccagtggtctggatggtcaagtgcaagagaacatagcaatctactgtgatctgagtgataagctgagctaatggacatgatagtagacagcagtgctatggagagggggtttataacagatacagcatgctgacttggctctaggcaagaggccagggctcctgtccagcaagacttgggtgcaggagtaggcattgctccagtggtagaggccatacccagggcgagttaaccaggaaggtggagcatgatgctctagctcccagggcagacatggcatgacagcagcaccctattcgcaggtgggagagatccagagatactgctaagatactcctattatctcaggaccgggcagtgctgaacatgcaactaccagacttatacctgagcaggactcgtgtggcaggtctaccccattaaattgactcttgtatgtcagagaaaaacaaagacccttggctcaaccctccttttcccacatttcctaagaaaaagtgggctatacctgttggttctatttccactcaacccactcacactgtagcctcttgccccaggcttctgcccacaccactgatacttccaccagactctgcttcccgccttttgctccacatggattctctctgtgccgtctcctccattcctgccaattcaatgcccgtctctatgatgattccaaaagtacctgcctaacattcatgtcccactcttgtgaccccgtttgatatactcctccttctgcctccaagacgcctccaagtccccctgccaaaacccatgccatcttcctttgctcttcttcttttaaacttccatagcatttacttagcaccttcccagtgccctaaaaacaccctgaattggattattctccactgcccctttccaccccattgaaatataaattccttgaaataagagactttgttttatacccatcatttgttacacccagaacctaacataaggccatgtatacagtagagtcttaatacattgctatacagatgagaatagtttttttggtttttgttttgtttcctctacccaggtggaggcctaagtatgggctccaccactggagcaatacctactcctgcacccaagtgttgctggatggtctgatctcatctgttgcccacgttggagtacagtggtacaatctcagctcactgcaacgtctgcctcccaggctcaagcattttccatcctcagcctccagagtagctgggactacaggcacgcaccacgatgcccagctaaattttgcatttttttgtaaagacaaggttttgccaagttgcccaggctggtctcgaactcctgagcttaaacaatcagcttgcctcagcctcccaaagtgccgggattataggcatgagccactatacctagccaagaatagattttctttatatacaaggaagttatgggaaagaaatcccccaaagcttttttgacagttggttttagattgctgttttgcaatataagaaatgatttttcatgaggatgtatcttttctctgaaatcaatagaagtccagactttttttttttttttttttgagacagagtctcactctgttgcccaggctggagtgcagtggtgtgatctcggctcaccgcaacctccgcctcccaagttcaagcgattctcctgcctcagcctcccaagtagctaggattacaggcacgcaccaccatgcccggctaatttttgtatttttagtagagacgaggtttcaccatgttggccagggtggtcttgaacttctgacctcaagtgatccacccgtcttggcctcccaaagtgctaggattacaggcgtgagccaccgcacccagcccagatttctaaatagttcatccctagtgagcacttactatgtacaagacacagttctaaatgctttgcatctcctgactgacaatgctcacagcaaccctgtgactcagcagcaacctgataattatccccatttcatagggaaggtcacacgcagagagaggttaaataaacttgcccaagtccaacagctaaaatgtggcagagctgggtttttaacccaaacagtctggctgcgagtttgttcattttaaccaccttgactaaggttatgaagctcagagtttaatccatactctgcacctatcatattctgttatttgctcacctgtttgtatttcttactaaaatataagtgcctttaaggacagggactgtgtcttcttcatctttgtatatgacacagaacattcctaatatacaggttaagtaatgcctttcaactgtctctgtaatgctgtcataaaaatcaattcttttttccgttcccttgggccctttgtttgaaatatgaacagtttagtgtgtaattgctagatgaacattaagcaatatactttgcctaccaaaaagagaatcctgttttgttagaacactcctgagagttgaaaaaacagtgtctgcaaattggtactgtagttccttaagattagaaataatatctccctggaagaaaaaaggtgacagtaaatttcctggtggagtgctgcatgagcagtcctgtggagagaaagactccctttcctgaggctgatgagggacaaaggcctgcttgggccacgttcgcctccagtccttgatgtttctgtaatccatgttacataagttacttgggagaaaaaaaggtctctctgaatatctcaagcagctttcaacttggctgcgcaatgggaagcaatatactggagctgagtgtggatagaaagagcaactttagaaggagcaagcagctaatgcttgcttcctaggaacccataatgaatttgctttctaagtacattcccggtgtttccgcattgggtacgattgtgttcgtttcagaagaaatacgccataagagcatgcttccactttaatgtttcagttggttcattttattggtctcagtcttctcgtctacttatgcccatcaggaagagtccaatcacaagtgcgcaggtaactttgaaacttgcaacaagcatgctgtctactatctttggttatcccaaaagtattttgtctgggtgtcctcaacatccttttctgtcatttacctcacttcttaaagatgctctccctctcagatttctcttgttctcttctacaatgaacttctgcttcattcactgttactgaattttcctttgccggcattgcactattttattgtgctcactaagtcactggcggtgacattcaagttctgcagatttccagcaatgccacagtactgggcattggctgaagctaatctagatagtaatccaaagagttcaatgaaaagttgagaatcagaacattaggtaaacaggtgtgtgagtgcttgtctgggtgtgggtagaggtttgactgtctgggtctgtaaaagctgacaaagtctccatgctgcccaacttctctgtacaacaagtacttctctgtgcgacaaggccagcttgtcaaataagatgcttcatgagcatatatgtactgctccccgcagtcatgccggcggttggaatgttctaccagagtttgagggtgtcacacttcatttattaatagacactgtgaatcatggccagtggctttgacacttccctggtggtgcaaccctatccgaagaaccttcctcactgtgaaaagctaccttgcagtgtttgtccctaagattgctgctctgactttgcaggaatactaagatgagctgaagaacttgtctaggtcatatcttccacatctgcatatgacggggtttactgccttttgaaaatcagtgaagctcttttaccccaccaaattaagctttttcatcctttctcttaaggttccctgtgctgaaaatctagtctctacttccccttcccagtaggatcagctgtctgtttgaatggccccctgataccacctcagtcttaaggccaaggacaaaatgatgaattagcagcgatttaattctttgtgagattaagatgtctccattgtcaactcaaacttcctgaaaatgcagaaagccccagcatgtaatatcactttaagatgccaaacagctgagaacagggggttaatgctactgccacctcatttttatgtcacttagttcctcagataaaagtccattttaatcaaacttttcatcatttcctcgtagccaatatatccttgatgccagttagaatatttgatattaattattcagtcaaaggcctccattatgagtttagttagaatattagtgatttaaaacatgttaagactcatacagtagtgatgtccccaaagtagttttaactgaatcttgatgaaccacatacattaaattctataggttttttactttttccctcattttccatagaaaattccaaactgctacacatttgttggctaagtactcttttgagaggaagagtatgtgcctgctctttcgagagtgccaaatctgacattaccttggacatgaaatctattaagcttggtaagctgacttgcatgttttccctcctgcacatattaaagggaattttagcatttatttcctacttctccagccaaaagaaaagaaggttgttttgtgcctaggcatctgcttagagtattgctctatatctcatttctcataatctttggtagttcttgatgttttcctatcttattgccattccaccatctgcctcctaatgctcattgccctggaattatggtggtgattttcttgataatgctgtaccgttttgcatgatgcacactgtctttctgcacctacctcctcctgtcttctctgactccagccatttgcactgtcccttgattcaagttcctgggtttgctgtgtataggtatcttagtatcaacctactatagacagagacattatgaataaatgaagtgtattaatttattataacatctgatttgtatgtttgtgaggcctgtgctttatgattatttaaaatgacattatatcactgaaatacataaccatcttggataaaaagttagtgcctcaccaaatgcatgaatacatgatattattcaacaggagtaattaacagtaaaatcactagtcttattttccatttttatataccaagatctgcatgcaaattgtttcaaagatgtcatgtttattcctaaactagttgattgtatttaaatagaaaataaaactaagaacaatcaaggcaagggagaggttgtaaaacctattgcgtgccttctatgtctgtacgttttgcatgccttgtctcattttatcctcactgtccagctggctaggagtcatatgatgctcctttaataaaagaaaaaaatgtatccttgaagtcacagaatcagaatcagaattcaaacccaggactctctggtttccaaggcctttttaatttcacttgaccccacatgactaacattggcaagtcaaggagaggttggaatgcttacatcatctgttttcataagtaatgtgagttcatgagatgggagatatcttagaccatatgaagaatagcccatgttcattgtgaacatcttttaaggttccagagaaaatagaaaatgtcaaaacctacgggttgtaaaaaaaaaaaagtaataaaatacaagaaaatagtagggaatttatgggaaataaagaaaaacacttttgaatcacacactttttcttcttttatcactgtaagttttcccaaagtagaaacaagatacctgccttttccttacaattaccctgttcctgttgggaacatacatagagatgtgagtggcgccccctagggctgcacagaccatgtgcatggaccaggtccccagcccctagattgcactctgcaccactcctccacagaacactcagaacaaggcaaggggaaggagttaacatttgttgagcccgtattgtgctccaagaactctggcaagtactttaaatatgtcacctcatttatttcctgtaacaatcctgatataaatattatcatccctattttatggatgaagaaactgagactgggagatgcaaacaggtgtggctaagattgcacacagaactagtgacaggttttggagtcagttcagtattttctgcatctgaaatttctgggctttctgcagcatcaaggtgtctggtactaggctggttgtaaacaggtaggagagacacattacgtgaccatcctttcctgaggcagccctcactgctctgatcccaccctaaatcactgcagtgtatattaaaatgagcatttcaatggataaaccccttataggctttcagaatgactaagaacagcaaccactgaatcacagaactcctcttagcaaattcaaacacccacttccttccagccaaaatattttaaatggtgcgtttttgcttaaagactgcctctgtgttatgctagtgagttaaatatatatacatataaaccagttggttccacttcagcaatttttgtagccaggaaactattgttggttctttcacagtgtagttctggcacatccttaggggacatggctgagacgcaaatgccagacaactgcggaagcatcgcttctactgactctgctgcttcaagtccagagaagagagctttggcagtcagttactatggtggtgccacccgagcccatctgtgccctggatctcatgtgacacaggccccacgacctcgatcattctgccaagaaacaccttggtccagctccattatttccagcaaaggcaaacatttgtggtacaaatgtgagaggggttggtacaaaaacagcagcctccagaacgtgttcctgcttctattccaagtctctcattaagcctagacagaagtgaccagggcttgtctcaccagagggttgccccactctgcaatcagaactgacccttatggccgaacatggaatgacatgttaaataggtaggaacctggcaattctcacgcgccattctccaccaacagtacgctctgggacatcattagtaccctttcaacttggtcattgcttgaaagtgaagacagagtggtgactgcccagataagacttctgcccactaactgcttacatgtggctgaggcaaacacagacccttttccagaaatgatagtgtctgacagcccgggttttacaaggcactggaaagatctataattgttacagcagaggtttaagatggaaaataagcatgttgagctatttggagaaggaatttgccacagtgaagtttttttcctggaaacagtcatataaaatcaggatggagttggtatcaagcttcttggtcactttccattgatatgtcggtgcctttgacaatttatgttaaatgtgcaacaaacacccttttacagctttgtccaacatcaaaatcaggtccatatataagacagtttctagccagtgttttataggagtgatttctggatgtggtatctgtaatgtggccaagataatgtgaagactctgccttctgtgggtcggttatagacaagtcacttatgttaccatcttgtcaacaacttgaattcctcagtttgtcctttttctggttacttctttcttatccaattttttaaaaaatgaaacagttcagtcagagcaatgtgtgcaacttattagcctgaacagatgagctaggaaagtcatctactctccatattcctgcatttaacaactatttattcatgacctactaagtgcaatacactctgtaggccctgaggatagcgtgataagccccatagacacagtttctgtcctgtgaagtttatactctagtggagaagatagtaattcagcagtcacaaagaaaacataaaattgtaactctgcccattacaaaaaaaaaaaaaaaaaggagagatatgtgatccaagaaaatagaatgtgaaattgcaccaaatcaagaagggagggagacatgagttatgatctgaaggaggtttaagacaataaataaggaatattccagaaagagaacagcacacgcagaggccttgtgtaggagaacacgtaatgaacagactgaaagaaaggtgtgtgactggaacaaagactgtgggagttgagcaggaaagggaggtagcagtcagaccatgagtggtcaagtgaaggacatctgaacttactcaaagactagaaacctttgcggggttttaagcagaaagatgatatggttggatttgtgatccagaatgtttgtctagctgcaaggtagagaattgttaggagagatgctggagtgaagcagaccagttagaggattttgctgtcattccagggacagatgttgatagtatgtaccagggtgatggtgatgaaagcagaatcggagagaagtgggaggagctgatgaaccttgatgatggattgcatgtgggggtttgaagggtaagtgaagccaggtgttaagaatggatccacacacagcagcatgggtgctggtcccacttcccaggagacaaggcaaagagaggactaggtttggcagggagagatcatggttaagctttgggacatgttagatttgaggtacctttcagacttccaaaaggagaccactgaaatgtgccctagagatgtctcgacatggatgggaattgcaatggctgatccaggatattaagcaaatgtgtattcatgaaaactgagcaaaagaccccagggcatatcaggggtgatgatgtaataaaccacagagtcgcatactcagaaagtacaaataaaggcaggtcgacagtgcagactgcaaaaacctgggcatccttctgtggctgtgacatgccttcactgcttagatcgacagcaaaggcttatctatcactgtctttgtaatttcattctggaaataatatttttctcaagtaggaagaattggtgacttaatgtcatctggcattctgtgactaagcgtagctctgactccatgaagcataaggatgagggtaagaagaaacagtggaaactgttttgatatctgtactgagcttataaaacagaataaatttgttcagaaatatgcactaaaatattaaagggtaaagaggaacaagtatccaatttactctcaaatggctcaggaagtatcagtgtgtatatttaataatatgtatgtatgtatagagagagaaagagggaggatagagaggaagggaacagaatggaaaaaaataatgaatgggacaaaatgtaaagaattgatgaatttggataaagaatatagaacattccttgtttttttttttttttttttttttttgagatggagtcttgctctgtcgcccaggatggagtgcagtggcacgatctcggctcactgcaagctccgcctcccaggttcacaccattctcctgcctcagcctcccaagtagctgggactacaggtgcctgccaccatgcccggttaatttttttttttttttttttgtatttttagtggagacagggtttcaccatgttagccaggatggtctcgatctcctgacctcatgatccacccgcctcggcctcccaaagtgctgggattacaggcatgagccaccgcgcccggcctgtactagtgttgtactagcaataacagtaacaaggaatagtggacattctcataattttccagtatcaattcaaaagtttaaaaagtcctcattttggtgtcctaggcagggcttctccccacccccgagaagaagactctgagacagggatttgagagcaagtgattttatttgagaagcgatcccaggaagcattggaagcggagtgaggaagggaaaggaagaaagccagtacagagcacattaatgaacagattaccactgcaggcaagagggaaggagggctggggtcttctggagatggtagggaagacactcacaccttgccccacctgggggcaagcatgttgaggtacttaacttttggtcccatttgtcattggttaagggttgttcctaagatatcaactccccagcacttcttcctgtccagtgcactggtaacagaagcctcaagccaggcagcacagatgcttggataaggaccgtagtggacagaagtgctgcagtgatgggggtgtgggggcagtctgctgccacaactaaggaagtgtgaaggctcagggttcaaagcagatcagttgtggttgcctttcgtgagagaaaacatatgagattagtaagatgccccagacaatcctgatgccttcactttattattggagtaggtgctctgtgaattggtcatgtcttgtacggaacacaatgaatgccaatagcaccaacagagcaacccaagagaataactctagaagaagatacttccagtttctctttgtttcactcaaatatgcaatacatcaaaatgatgtaaggtctttgacaagttcattttctgtcaagcccatgctcagaacatcactgaaatacagcagcacctctgggacactcctgggattaggaaagcctctggaaaaattaaacttggtactgagttgcctgactcaaaaatgcccattaatgaacaatgatggtttgagtgtgtgctgtggctttacctaggatcgtggctatacacacaggcgaggtaaagttctacatggatttcaacatgtcatctttgcttcaattatgaacaataaaaacttggccaaactcagggattcgtcagatggccctggtcgtgtgtcttccatggtctccacagtctcaccttagcctcaggccttcatgctaagacactagcgctgtatctatgaagcctgtaaaactggatcagtcacatccagttcaattaagatgcttaggctcaccttcttagaacaaaaagtatgtgtcataagtcaaacaggctacaggataaattcctagcatgtaattaccaggtcaaagaatgtgaatatttttaaagtttctgatgtatattgccagattgacctccaaaaaggttgtaccaatttacacccccaccagcactgactataaatcatttttgaaaacctatgtcaatttaataggttaaaaagtaacgattatgatcacaaactgttttaatttgtaattcgtttactctcagcgaggtttaatttttctcatgtttattagaatcctttttttttttagtttgttgtagcttatctgtttgcatgtcatttctgtctaggtgtttatctctgtcttcttgatttcctagagcccttcatatattaagggcattaacactttgacatatttaaaattattttagtttaacttaagctatcttcacggtaatataaatctataatttttatatgttaaatctttcatcttttgccttataattttttgcttttatatgcaaaaggttatctctcattatgaaatatccatactttcttctaattatttgattattttggcacttctacagcaggaatgctttgaacatccatgtcattttaagtagtaatgtgattttgtaatatagtttcaagcaatatcaactgactgtgatattgttataactaaaaaacacatggtggtctagacacccatgctgaatggctttagacaaatattgtggaagatgtctgtgtagttcattggcacatgtcaaccagaatcaatttacatcttgctctcactgatattatgccctatgtcaggatactaagtgtcctgaagcattctgacctgtgttcttggaatgtgatacaacaccaggtattcagtgttctgggaatagtcaagatcatccaattgggcttttttctcaaaatggtacttcttcttgcaaaatatatgctcttctccttgatgctctgccagctgctggaagcctctgccatgttagcaaggcatgcctgttgaactgacacacacacccctcatctcctagagcatgccttcctgtgttcctcagatctaggtgatcagaactctaagcatgctcctcagagaaaccatgtataacattgggagttgccttttaatttctatgataaaaagatgcagttttgctggaaggagacttgtcctgagattgtgtgtcaatttggctaagccgaaaggaactatgagaggagcggttcttaatctgggatctgtgcatatctaaattgacagtgattagtttcaagggaccctcaaattctctgaagttacatgccagtttatgaataatattttgtacatattcctgggggaaagggtgagtgagaattttgtaacccaataaaatgaaaactgactgaattaagggattcactgtaaacccttcttaaaggggtcattttttaaatcctcacattatagttcctatgtgactggtattttcttcacagaatagcaatgccttcacagagattatttcattcgtaaaaacttatgagaagaaaatacccatacagtagtttattgtgtgaagggtatcttcaatatcagagtgaatttaatagttttcgcaagaaaccttattatggtctaactttcagctccacacagcacagtgtgtatatatatttccattctggatgctgccttttggtctgcttttaaagagaacaaaaccttcccagcatagaaatcccacaaagcaggttgaatggcatcaaactcatcctcctcgcccccacccattgcaccacaatgtgaaatacagaacctggttaagctttagagaccagacgtatgtgttcacccgtgctacctaaagaaggatttacacattctgctatcttcccagctttggaaaaataacatcctgttctcatccgcagaaagtagagagggagaggaggcactcgtgagaataagcagacaacaaccttcatcacagccaaaagtactatgctgatcccaccataaattatagcagcataaaaccacaggaaatccaaaggaagtaaaatattaatattaaaccatagccactccaccatatataatttagataaataatccattttctatatgtaggatattggaatatagctgttcgtctgccactagcaacagttgatatttgaaaagcatagagactttagctgctggtggagggcaaatgtgttttattcattcttattcttaacagccaaatgtcctcaaataaaatactgatcaatggctaaaaatttaaaggccgctatatctttgtctcataatatggatttgtggcctaatctagccctttcttgacctttttgcctaatggtgggatattaataagcgaaagatggttacataaaacatcctctgcatgtgaaattttttttacatatgagtaacttcaggtggctgaagatggaatgagctaacctgaaagtaacaagctgctcactgtcttggccaaattaggcttaatgctgaaaggcattcttacttaagaagtcaagaaggccgggggtcaagccgtcaggccacggagtgcagctgttggaccaccttttgcagtctccaagggagcaagcaaagaaaatccagcaaagaaaatatctcaaagaatcaacagggagagtaaaacaaaaataaccagatgtcccagaagactctgttggtattatgaagaaggctagagcaggactaacagggtttggcttttatcaaccttactaataaaagtcacttggctctccatcgagaagagcagttggtacaatatggaaaggttttaaagaccattaatttcttgaaatgaaacagctggccttattggctattaaataatgagccagattctccccagtgcctaagtcactctctggcagtaaattaggcatttagggaggcacattaactctttaagaagattagagttcgatttagtgcactttatgcataggaagaaagttacagggaatctggctgaagctgggcagagaaaagatggagacaaggtagactcagatgaaagaaactaaacacatgatttgtgttaactgggcagctcaggtgagcatgggaaattggagcagtcgagctgtggagttattttgtttattgttctgaagttctatgagcatgaaggtagagagttgagtcttcatttattgattcattcattcagtaaacttttacataaatactactatatagccagcactgaggaagtattcttccataaaacacagttcttatctctagggattttcagtctctggtaccttgggaagagagtagaagaatgacaaattatagattatttcagtcaagtagaataagtgctaaaattttatatgcataaatggaatttgaagaagtggcaagatgtgtagcactttatacaacacgctagggactttgactctacccagaaggcctcaggcccttgaaggtgtttaaagaaagaaatggtttaatcagatttgcactgtagagaaagccccttgataatttcatggaaaataaattggagagacaggccgggtgcggtggtgcacgcctgtaatcccagcactttgggaggccaaggcaggcggattgcctgagctcaggagtttgagaccaccccaaacaacatggtgaaacctcatctctactaaaatacaaaaaattagccgggcatagtggtgggcacctgtagtcccagttactcgggaggctgagggaggagaattgcttgaacccagaaggtggaggttgcagtgagctgagatcatgccattgcactccagcctggacaacagagggagaaccccatctcctaaataaataaattggagagacaagactacaatcaggaagggcattgtgaaactgtttatgtggtccctacaaaagatgctgaaagcctgaaatgaggacataagtgggtgtattagtccattttcatgctgctaataaaataatacccaagactgggtaatttataaaggaaagaggtttaattgactcacagttcagcatggctagggaggcctcaggaaacttacagtcatggtagaggggaagcaaacagatccttcttcacatggcagcagcaagaagtgaagagcgaagcaggagaaaagccccttataaaaccatcagatctcatgagaactcactcactatcacaagaacagcacggaggtaaccacccccatgattcgactacctcccaccggttccctaccatgacgtggggattatggaaactatagttcaagatgagatttgggtggggacatacaaccaagccatatcagtggggaagggcaggaagggaagagaggcctgtgaaggagctgagctgacctgtttgatgcctgattagatgtgggcatcaagagaaagactggtgccagagaaaactctggagccaggctggaacaactgggtggctggaggtgccattctcctcatagatgaggaaggatgggtgtaaggctgggtggaaaggcagagtggtgacaattctgggctccagagcatggttccaatggatggcacatagagaactcaaagtcatccatggcaaccacctcatgagatttgaaaagtatgtatgaaaaggaaactgagattttaagactacataattcctagaatttaaactgaatccttggaagagtattttgctttgtttgatttttgtgccaaaggaaaagatttcaaagatgcaggtgcctccaaactgaggttctatcattgatcaccatcaagagtattaaattgatgggaaacaaactggaaatagtcatctctttaaaaagccaacttttttttacaaggaatatctatagttaataaaacatcgatcattgatatgaatatcaggaaatttatactctttgtgagaagtagaaaactgcacaggttgcagactagacaagttaacagttctttctctgtcggcacttaaaatccataccgtggcttctctctatggtatggagtgaaacgtgccaacaaattgacttagatgatgtcagtatctgaaaatatggaagaaattatatattggaggaaaaagaagaaatccttatatattaaaaggtgttgacagcttcaccgcagaatagcaaaaatgtccttaaagataaaacacttatttcaaaattttagaaaccacaattacagttttatatactatgtgcagcaaaagtcatttttagaaagaacattgaaatcaaagtttactaaaccagtaaccttgtggcaacttcctggtgagaacctcattcttcaggaatgtgaaaagcataaaattaaaagagtcgaaagtttgtagattgcctaaacataatttaccacaggcagacaacgaacaagacaaaacatgtcacttaatattatttgcaagtcaagatgtcatcctggtgccagttgcatcatggtttcaggaagagatttccaggtagatggccatgaactatgccatctatgctacgccatctgtgtggctatgcccatgtaagcattgttatccacgggctgcagctggacgtgtctgttaacaggtttccaccatacaccatagtgacaatggctcctctagaataattccggaaagatctataccaacagcgcttgtttgtgtcatttctagcagtaaaacccccgttttctagcatttacaggaatcaataaagactcactgacttagcactccagtgggggggcaacttcacttcattgtaacatgctgcctgaacatttagcaggagacaaagcccttcccttcacagttaaagagttcaaaaatgagaattcctgggctaagatgcatgtgagaatatcttattcttttctgtgttgacaaggagatggggaaagaaggtaaggagacatggggacttatagaagctgcaatggggaagtcactgaggagtaaaaaaaaaaaaaaaaaaagaaagaaagaaagaagtcataccaaagacagaatttacagactagaagcctacaagctgtggcttcatctgtcctccacagaaaggttcatcgtatcctttgtcagggacccatctcataagctcccttactggatgaggagagaaagccattgctctagcaaagcaaggcatgatccacatcaagatacattatatacacatttaaatagacacacacacacacacacacacacacacacacgcgtacactatatataaaaatatattttcatgtaaggtatatatatattatacacacacatatatatcatatatatacaatatagatagatacacatacacactgtttttagtgcagtttcaggttcacaccaaattttagaggaaggtacacagatttctcataaacctgccacctcaacacatgcgtaacttccctcattaccaacattcccaactgcagtggtaaaactgttacatctgatgaccctgcattgacacatcataatcacccaaagcccatagtttacattagcgctctctcggtgttgttcattctgtgggtttggacaagtgtataatgacatgtatgtatcattatagtatcatgcaaagtgtttttactgccctaaaaatcttaagtgctcttcctagtcataccccactccacaccattacccctagctactattgatctttttgctgtcttcatagttctaacttttagtatgtcatatgcttggaatcacacagtatgtagccttttcagattggcttctttcactttataatatgcatttaagtttcctccatgctttttcatggcttgatagctcatttctttctaaggctgaataatattccagtgtttggttgtggcacagttgattcattcacctactaaaggacatcttggttgcctccaggttttgaccattatgaataaagatgctgtaaacgtgtatgggcaggttttcttgtggacataagttttcagctcttttgggtaaataccaaggaacatgattgctggatcaagtggcgagacaatgtttagttttgcaggaaagcaccaaactatcttccaaagtggctgtaccattttgaattcccacaagcaatgagtgagagttcctgttgctccacatccttgtcagcatttggtgttgtcagtatttctaattgtggccatcctaataggtatgtagtagtatttcattgttgttttaatttgcatttccttgatgacgtatgatgcagagtatcttttcatatactgatttgccatgtgtatatcttctttgatgaggtgtctgttaaggtctttggcccattttgtaattgagtttgttttcttactgttgagttttcacattctatgtatattttgataacagtcctttaacagatgtgtcttttgcaaatattttctgccaattggtggcttttttttttttcatggattgtgactttgatgtatctaaaaagtcatcaccatgcccaaggtcatctaggttttctcctattttatcttctaggagttttatggtttcacattttaaatttagatctgtgagtcattttgagttaatttttgtgaagggcataaggtctgtgtctagattcattttttgcatgtggatgtccagttgttccagcatcctttgttgaaaagacgatctcttctccattgtattgcctttggtgctttgtcaaaggtcagttgactatgctaaaatgggtctacttccggacttcctattctgttccattgatctctttgtctattctttcaccaataccacagtgtcatgattagtgtagctttatagtaaatcttaaagttggctattatcggttctctaagtttattcttctccttcaatatttggtttactcttcttggtcttttccctctgcatataaactttagaatcagtttgtaaatatccaaaaaagactttctctgtttttgattgggattgcattgaatctgtagatcaagttgggaagaactgacatcttgagagtattgagtcttccatccataaacatggaatgtctctccatttatttaggtcttctttgatttctttcatcagaatttcgtaattttccttagatgttataaatattttgttagctttatacctaagtatttcatttttgaggggggcttatataaatggtattgtgtttctaattttaattgcacttgttcattaccagtgtatacgaaaatgattgacttttgtatattaattttgtcttctgcaaccttgctataattgcttattaattccaggagggttttttgtgtgtgtgtcagttctttcagattttctacctagatgatcatgtcacctgcaaatgaagacagtttttttttctttccaatctgtataccttctatttctttttcttgtcttagtgcattaactaggacttgagtatattttttagtatcctgtttgctgtttcaaaaaccaaccaaatgaaaacaatgtccatcagggccaagagaagcaagtgcttgaggaaaatattttccttcattttttaaccttaaaagtgtggtaggaaatgggaaaatactttaaataattcagaggatttgatgcactgcgggtgataggtgaattataaaagagaaagcaaatgtacatggattttatattcaaatcccatatgggccaaactacagaacaaaaaataaaaagcaaagactgaaagagtacatgggtaacatgtatttaactatttctcaaggatagcttaaaaatgaattacgcttggcaatgtttttttcttttcctgtgatgacaaagacagtaggaatatttttttaaagggatcttcacttaggttaacagtgtctccaagagtgttcaagtctccctgctctcatcagatggttcaatgcagttggtttttaaagctaccaaagtaacttcctgagtatttggcctgtcttgtggattgattcagaactacccattgctttccaaagaaagttgtttccgtattttatgaactcttctataacatttatttctggaacattgataagaatactgctgatggaaagcagtttaggctgcaggcatatacctaatttttctgctttgttggagtaaatatggagctcgcctcactggattggctctgtatcagtgtgtatccactctttagctacttgtagcctgtctctcaccagggatattcacaagggccctgctcattggcccctgagcaactactcttccactgataagctgcaacatctgccccaggaattgatttccccacagactccactcctctcactatcctctctttacattgacagtgttacgagtgcattagatcaggtaagcttctgtgtgtcaattccaaataacaatgtggtaactagagtttcattaatatcatgtcatccaaagcaagaggtttatatcccttgtcaataccatgaccatgcacatttaaagaacaagatcccccccaaaaaagaaagaccgttctcttgcacatgtttgtgacatttaagaagttacgacagacacatctataaccctacaatcaccttggcacctgtacagaaagctatagttaaattattggcgaagtacacaagcaaatgaaggtatatctactatgaaacataaataaaacatgtatccttacaagataaagtaatataagccagaatcataagaatgaatgataaaaatagaatcatgagaaaaaatggtatcaaggtattggtggtgtcaaaatggactggcccaaagccaacctttcaagctgaccatgatatatccagattttgctatcacataataattagtgatttaactgtatgaagtcaaaatctatgtcattattatatagattcttgcactgacacatcacgtcaaattatcttactttttctgttttttaaatgaattttaaactcatcttcccaatcagaaaaaaataagcttttcccaaccagaaagaataaggtaagggccgtctcttaaccttttctgcattctgcattctctgcagtacctagctagatagtaggtatttggtaaatatttgctttcaaaaaatgattataatgagctgttttaataaagtgtatccattgtaagaacacacgtaacataatgaacaaataattagcaaaacgtaaaaatgtaaatattcccataaaacagctttttgaagctgtaagaaaatatatttctcttcctagcattctaattgtttatttttgtgggccctgaagtctcttttcaaaaaagaaatgagaacggttgagcatctggattttgggaatcaaaatggtcgggggtggaggtgaggaatgtccgagttaaagaattaatagaaaaccctgagtggcccatttaaggaagaaaaaaggctattgtggcatcatcagcttttcctggctctctcatcctcatcctcatcctcagagatgaggtctcccctgtgacccagaggtacctttccagtatcagtttgagaattctaataaacaagctgaaggagcagagtccccaaaggggtgtctgtgccgacagggaaggcagctgcggttatgaaccagcacacaccagaggccggcaagctattgggactttgtgtgagtgggtgacagttttaatttcactccccagcagacgtggtatccagccagcagtacttcaaaccaattttgcaaatcacattttgtggctgaaaattggtttactgcactcgtcccattttggaggccaaccttgcctgatttaaggtggcgcctttgttgaggggggacagttaaaggattcccttttctctaattgaaacgacagcatattctttcacagattaatttcaactacctatgtttatatcctttaatcaggattataaaaacagcacagataattttctgcactattcttttttaatttttgagggagtaataatagccagttggctcttgacacgtattgccttatatagcagttttattccaagcaccctaccttggactgtgtatcattgtattcttaattatttttaaacttgattttttctcatatttaagtaacgggggaataaagtctaagtcatagatttcactgacattccttctgtgaacttaaagatgatacttgcataaagagatttgtcccttggattatatctcacactgaaataagggccttcttactggaagaaatatttcttaaaaatgagtacttgcaagaagtgttcatctgtgaacttttaccaattagaaatggctccatacttaagactctttaataatgtctcttaagcagcattttagctcatttttataacacattcaggtttggtgatttatattaaacattaaatgtaataaatttaggtcttttttcaagtatgacgcacagcatctctgaatcacccatttcagcagagggcccctggaaggtccaatctctcgctatcattcatgcttataataaaacgggcttctccggtctcttccttgacatcggtaataatgggaatgacatgtgagtggtgacactgtaacaggagggcatgttgatattgcttcatggctgggactgagtgtccatgaccggagggtgggctgagaacacacatcaacaacttgctgtctcaaatctgcaccaaaagctatactaatgcctattttttaactatacaaaaattcaaggagtaagtttcagtgccttaaaaaaggtggctttgtatgtcttactctatatgactgcaggttttaaaagaattaatcacgaagaattgaacttggaaacatgaatggatctcttaatgatagtcatataagagagattttaaatcttcctctgtttcaaccattctaccaatggttgctgcattcttcacttggtgagtcatgagaaggcacgagacactaaaatgccttggaaaaaaagctgctctccttgatgaaacaataattagaatagccttctttagaactatcatgagaaatttcactataaattattctatttcatagtgacagtgacttacaatataaagtaagttttgactgcaatctgagtataaaataccaggatacttttgggaatatgtatctttaattcagaaaatgctcacatttcaagtatttgaataagattaagcattaactaatgctttcattaagatacctaagcatttatacccaaaagaaagggaattggtatatcaaagagatatctgccctcccacgtttattccagcactgttcacaatagccaagatttggaatctacctaagtgtctatcaacaaataaatggataaagagaatgtggggtggggagatatatatagatatatatagatatatatagatatagatagatatagatagatagatatagatatatagatagatatagatagatagatagatcctgtcatttatatccctgtcatatacgtgtgtgtgtgtacgtgtgtgtacgtgtgtatgtatgtatatataaatatatataaaagtatatataaatatataaatatatataaatatatataaatatatatgacaggatcttattctttttatggctgaatattcccacatggtgcacaaggatgcagaaacatagaataaataagatctagtatgtgacagcacaacagggtaactacagccaataatttagtatatatttttaaataactaaaacagtggaatcggaatgttcctaacacaaaggaatgataaatgcttgaggtggtggatacctcaattaccctgatacgatcattacacattgtatgtctgtatccaaacatcacatgtaccctataaatagatacatctactagtaaaaactaaaaatcaaaatttttaaaaagatacctaaatcatctaaaaactgtaattattttcttagaataaaaagatggtggaagtaggcataactccaattttcaggcacatgaaggttattgcctctgtggcaacgtttgtggatgggtttggagatggtccacagagcctggcagcagcttggttcccttggttcccagatggggagcctggtcctgctgtcttcatttctggttgacacttggaaatgactagatgaggagtcatgcattagccaacccaaatccatccctcatgcaatcagtcctcaatctcaaatgggcagtttctactggcctagaacttggggtacctttcctgtagaaatgatgcactatgcagtgagcaggttgcaaggcttgcacaaatctacttagctcatgtaagtgaagtaccgtccatgtgaaaatcatcttaaaaatatggttgctgtgggacatcggctaacacacctgccctggtgtgggcattctctacagttaatagactctggataattcctatcgtcttgcctttacgtactagagtctcataaaaaatgagaaataacgaacggaaacagaatgaagaaacattgcttttaagaataccattacaatgctggtaattaaagcagaaaaaaataaaattaagtaatcatgtttcatctattttaataattgtgcttgagaaaaagcaggttcaatcagagaaggatgaggaagtagctggaagctgtgtttgaggttctcaaggaggcatctggccactctccatgttgatgactttgattcctttgggaattttttttaaattctctagactagattattgccttttcctcaaatatttttggcagtgaaacacagaacaaatggaaccaagagcaacaaggaaggttattgttttttttttttttcctacgtgtctagggaagagtgagagaggcagggaaaggagattgggagctagtaaaggaagtggcattgcctccgataaaagtaactgaggagtttattagtgacacttatagggaagtggcctgctcaattcccttgccaactgatgcaggtgagggaaaaaaaagaagggatgaggaagagatatctgagcctacagttccctgtgacagctggggaaaagggcaccgaattcaggacagctcggtcattgaactggccattctcagagtagcagggaatgggtgcttatggcaggtggggggaagggtgtaaatatataacctaattgtatagaaatataagttaattgttacaaaagtgtatggaattggttgttcttgatttagggagattcaggttgttcttgatccaggacagaaaatgtgcaatacatgctctccgtggattcttttgtgaaatgaaaattagagcatagcaagtggttttgagtcttcatttaacaagtacgcaggcactgcctgtgttatcagcttgaaagtctgctaagaatggatgggagaaacagagcagttcacatttgctctttgaactcagagaactgatctgagtgcatggcaatgatgatggaaggaattaggaaacgctggaaatcatatgcaaagaaattagtcatctctctcctcctaagctctgtgtgtgtgtgtgtgtgtgtgtgtgtgtgtgcgcgcacgcgcgtgtgagagagagagagagatgcacatactactctggattgccttgagaatagacatcatgatggtggtggtggtgatgaagaggatgaaagcagctgatagtcattgactgctcattgtgtgctaggcgctgttctaagcatgttatgtgtattcactcatttaatcctcaccacatccctattatgttggttccattatttatctatttcacagttgaagagtttcttaccaaattttaatccaatagtcccaaatgcaaccaaaatgaatcataccttttgtaaaatgatcttaaaaccatactcatttggacgaattggaacaaccattttgatacatagcaaaagatgctacggaggtctgccacaatctttaatctatttccttttcctgtcttacatccccctcttccacctcacctccagttctactggcctatcttctaactctgtctacacaacctgtgcctgtcacttccaaactgcccctcataaattgtaaaacagaaaggaaggggaggattttacacattctccttcattttgctgggaatttataaagagccatgttacccatgataactctaagacactacagggcattttcaaatattttatcttggaaacttgattttcgaagtatttaggaaaatgcttcaaagtcaaaaattacaagcagttaatcacaattggaaataattctttgtagatctgcactccaatatggtagccgcaacaacatggggctatcagacatttaaatgtgtctgaattatgatgtgctttaaatgtaaaatgcacaccaggtcccaagacttaatgccaaaagcaaaagaatattaaatataaattatttttatatggattacttgttgacattatcatactttggatatattgggttaagtaaaataaattattaaaattagttttacttttgaatgtggatacaagaaagttttaaattatgtatgcgaggccggacacgatagctcatgcttacaatcccagcactttaggaggccgaggcaggccgatcacctgacgtcaggagttcgagaccaggctggccaacatagcgaaaccccatccctactaaaaatacaaaaattagccgggtgtggtggcgggtgcctgtaatcccagctactcgggaggctgaggcaggagaatcgcttgaacccgggaggcagaggttgcagtgagccaagattgcaccactgcactgtagcctgggcaacagagcaaaactccatctcaaaaataaataaataaaaataaataaataaatgatatatgtggcttgcattattttctcctggggcagcaatgctgtagactctcaaagaggctccatctataaatggtgatggtagcttctgttgaaccaccctgctgaaagtttgaagagctcatgttcagcctgagccttcttttttggaaaacacttttttccccttagattgtacataataccaggcacacctggatttctggataattgcacccacaagtggctacatgcagacacaattaggtgcttgcaacttgttgaaggcacaggtgtctaattgcgcccacaaatgaccgtttgacaggcaccactcattgtgcacacccgctgattatgggcagaaaatggcaccaaccaaaatggaggcctggatagtggaggcgtgaaaatagatccttcgtaaccccacagccttggaatgattgctcactcctttctggcttagtcttttttgtggaatgcctgcctaggtgtttatggcaagaggcatatttggaatgcacaggctgggagatgaaaatgtgtatgccctatcccacaaagtaaatgctgtcttgggcttttaagtgaattggggctaacaaaatccacactgtcaacctgagtagccttagagtggattccaccctgctggggctggctgtttataatggctaaaaatgatggagtgtgagagaatccccagggaccctttggtaaatagtagtttttaaagggttaatccaacctaatgaatcatttaatggggatgagaaggccaggatggtagcctccggaagaatcggcaggcatttatttaaatgggatcagttagggagggagcaggccagctgtgtggcagggactgttggtgcaggtcacttctccaggcagggagtaattgatatccccagctctcctaacagctgaaacaacaaagcgggacatggaaacatgttcacttacacagatttcaatgtccaaaggaaatgtgggggacacttaggccctgcctcttcaggttttagggctttgaaggtggggaatcaggagtcagctgtttctcccccaccacatttcaggaagggctttgaactggatttcggtagctttgcgggctcttgcagaaagaaagccttgtcagcactgtggatgataagtatccaccctctggccacagcaggtctggtggtcacgggaacccacatcttacattcaacagagcagcctacgtccacaataaaccaacagtccaggcattggtttctgagctttcagaaggccaatgtgaggaaattcaaaacacaacagcttgacttggtttttccagggcagaaaaaagattttctcctaatgagggatggctttcatagtgtgtatttatttgcaatataagtaagttcatgatttacccatcttgacaaattctctgtcttggatcttcacatccctttgtgtccgctctttatttatgatgatagccgcctattcttgaatggcaatgctgttgtaataaatctccataaaaagccaattctcagttcaagttactgcaggctgaatatgaggaagacagtcagaaaacacatattgattgtcctcttttagagactccgtgacaggctcagctcagaacttctttcattttgactggactgcagctcaacctaatgtcaacttaccataattcttttatgtggaaggctattattccattatgattttctctcttgtcacctagtatccagaaagggttctgttgggaagagattactggagaatattcttcatctcagatatttcgttccttatggtctggcctgacctttccttgtttattttagaaaggcagtggaaaatgttctgtctcctgtttttagccatctttatacatagccttaagatatacaaaattatatacatattagatatatttttatatacatatatataatttctttgggagtttggcataaggataaaattatttggatttcataatttcatacattctaagtcacaattttcctatacttgacacattgcctagtatttgatgccctgttattggagacaatttagcactgacacagactagcatggcgtaatagttttcttttgtacaaaggccattgcaaaatttcagtctggggccaaacatccctgtagttattttttttaatgtttcataagttgtaaacgttgataccaagtatgtggtgggtgttataaggctttgccctttgtccatttcaaatttttcgtaacaacctgcacggtgaatttctcgagtctttcttccaagagcaaagagtctccatgccaacacatccactttcatcctttggccttaacaagtaagcttcacattggcgtgtgttaagagtcacattgataaccacagttgaccagaagacctacattactatcaggtaccttgaggagtctagtctctgatgctaatatagaaatcataggtctcaaagagctaatgcggtatttgaatgagtcattgcatcttgaaaaatcacagaagtcactggtcatgaggcaaattgtttccatttcttcgtaagccacaattatatttgcggtgtagattcggttttgcttcttagcatttttatgaagaagctacttaatggaaaaggattcagaaggcctattcttaaaactcttaatgaccacaatcagcagtagaatatatcagatttatatctgatggttgactattgtactatccatatttagtaaatcactgctctaatgttctcaataataataccgtggccatcagaaatagtttatactcttttccaaattcctgacatgtaagaaacgcagtaatactaaaagcttctggtacctcattgtgttggcattgaccttaccttctctctgtggctttccctttccctaatgtaggtagagctgctgtatttcaggcaagcactcaggtattgggctattttagttgggtttttgctttttattgatttggagttttaaaatcttcttctaccacgaactctacccctgacaaacggtgagaaaataaatagaattgctagtcttcatcacacggaaaagagctagtgagctatttcgtttcctccctttttctgcccccttctcttttcccagcttcccatttatagccctgctttgcagagacagcaacagatactctagaagcaggatgaacatgagagtggatttacaacatggaaagcaaaggccatgcattcctaaagggcagggaaggccttaagggcagggctttgacttttcaccactgcctcctctgcctagcacctgcatgcagtgggcattcaactaatatttaaggcagaacaggaaggaaaggcaaaaacttgggaagaaatatacaactgaggagaaaatttccagacatttcactgtgaaggtgtcagaaaagacagttctctattttcagccatactaagtggacattctacttgtattattctgtgaattttctaattgagtcatgaaaattctttcattgaaagcacattcttttttagtactttgtatttttcctcataaaaaagatttcctctaacataaatgcataaagcaatagaaaatcatgattgagatgacatggcatgttttccacatttcaattttcaatactttgtatctatcccagagaattctttccacagcacacttttcttatttttgttattcatccagacctgaattttttaatacattcagcaatttttatcaaacatgagtgattggagtttttccagacaagtaatgtttttttttcaagtgtgagattttgtgtgcgtgcatgtgtgtgtgcgtgtgcatatcttctgtagagttatagaaagctcagttttaaaaggtggccaaaaaaatgaatcaatgaataaagtggaattaagagtcacccgtaaccttgatgctagtggtggtacagatgtgtacatttgtaaaacctcatggaactgaacagttaaaattgatacatttattgtatatacattatacttcaataaaatttttaattaaagaaaataaaagctcatcttcatctgggctttacttgctagtccatgtcatggcggagcttcagttcttaggaaatcttccattgctatggcccttgctgttccctggcaaactccaactctcagggatctctacaatgccctggctttcaaaagcacaggagagaacccaagcaagcctggctgctttgtgctgctccttagaaacgaatttccatgttcttgggccacagaatagtctgccattcaaataagcatctctggctgggcatggtggctcatgcccataatcccagcacaccaggaggctgaggcaggtggatcctttgaatccaggagtttcagaccagtctgggtaacatggcaaaaccccatttctacaaaaaatacagatattaactgagcatattggtgcatgtctgtggtctcagctactcaggaggctgagataggaggatctcttgagcccgggaggtcgaggcagctgtagtaagctgtgatcgcaccactgccctgcagcctgggtggtgaagcgagaccctgtctcaatcaatcaatcaatcaatcaaatcctgagccatatcactctttttatcaaatcactatgccacaggatgagattaaatctcaccacaggatctcaccaaaatcaggctctccaaacctctgttcccacagcaactccagatccagtcccatctcaaatgctgtctctaaacagagagatgcagacagagatgaggaactcatcaaggtgcatgtttctgtgtctggaagtaggagcaggctggaagagatgggcacagtggaagtcattttggtaccttcctttttatttactcccttgggtctgagcaggcaagacttgtcttggcatgttttctatttatacaactaattgcaaattaattgcaccctcacattgtcgtctctattggagaattgctagaggactcgagttagggatgattcactttctcagaagtagactaacataattgcatatgtagttactaaagttagttataggcacagatatctgagcctaaaggaagtttgtcaggaaccaaaaatctatcagacaccctcctacactccatgcctctcctatttccctgtccactaacatctttagcacagctgaaagagggagttcttctaggtcttttgcttttcattttctctaccctggaaatgttgaaagctgtatcaagctgaagaagcataagctgcaacaaagcttttctcccccaaggtggtttccaaagtgaatgaccactggctctttctaagtattttatcctctagtacttacattcatacctattggtatgaatataccaacacatgaatgtacacatggacaataggtaaacattattgttctctctacatattattccgatgctttatttatccaatacaggaaaagaaatctattggtagatgtaactgaattgaaaagtccaaggacagacttatcttcaggttcagctacccaagatctcataaaaggctgtcagcacttggcttctttctccccatctctcgactgttttcttcattgttggctttgctctcaggcacgctcttccaccatggtggcaagatggctgcccacagcatcaggcttacttccccctcttctcagctactccacaaaagagggatcctctcattttaacattttccacagaagtcctaggatcatctcaggttgcttttatcgcggtatgtttttaaccatacacaatcactgtgcccgaggggatggaacgttctgatggtccaggcctgggtcacatgcccctctggagtccagagtggagtcattccacctgaaccacatggactgagagtgggcatggaatgattcccaaaagaacagaaggctgtcaccaggataaagtaggacagatgctagactggcaaaaacagcaactttcttccactgtctcaactcggatcacaagggaagaaggaaagataggatcaaggatgaaggagaaaagtagaagctgttgccacatattcacaagaagtaggatgagtaccaaatccctaaaaaatgttctgtcaaaccagtacaccaaaccctctctgcttccggtctgcttgtcatttgacccacaggcttcaagaatacttcctcaagtaaatatagtccagtgattcatccatcagataatcccatataaaggaaaaagacaagagagacaagaattatgtctgttttgagaccaggatggtctcttggctgttgcccaacttcctttgggtttggctgcatctgtccctcactttagagctccacgtgtcattgtgtttgtctttccctgagaatgtgaataatcccaagtctaagtcatccagcatttctcagagaggtgacatcaatgtagacccaccaaggagtagcagttagacatctagaatataactaggacaagacaaaaaaactgtttagagagagtgtacattttagtgtattttgtataagttttttcaatgaacatagtccatacattttgggaaagtggtaataacttgcttcatttccatctggaggaagcagatttttggaggagaaataagcctctaaacatatttgaatatttgaaagactgagaaaagcacatgagaagttatggaatcaagaataaataaaaagttggggcaggaataataataactgcctaccattatcagtcacttaccacacccatgcaccatgctgagtgctttacagactttctcatttaaccctcctagctactcagtggaagcaaataaccattactatcccaatttgacagaggaagaaacagactgtcttacagaggaaacattcgttcattggaaacccagaactgttgttcctaacctccctgatgtctcatattttgatgctcattgcaagatctgtgttgatggacaggattgctgagctcaaggttggctggaacctaaacacagacatacaaggagggaatcaggagggaccccagtcagatgagataaaaagagaaggtctggtggttcaggtcactgaagaaaaggaagctgtccggtttggataaaaattcaatgtcctcacaggcagaggagagcaaagcctgagaaagaatctcataaaagacaaaggcaaaggttctgttggcatcaggatggtccagcagggaacgaagacacccaggcatggacattaagattcaaggctaggatctcatttaatggtcacacctagacaaagtggaaggataatcctaccagtgatgatgtcttacagtgtgtaactgggctttgtcagttacacagtgctttttcatacttccctaattttatcttctcccagcaggcctaggagcttgcttagtatcataattcccacttccgagtgaagaaaataaacacagagaagtttctcattcaaagccaatggcagagctggaacttgaacccaggtgttttgcctcagagcccagtgctcttgtttactatagtgggctgagcgtaacatcaaggttgacttgttcattggaattgctgtacgccttgggagcttggtcattaggcaacaagcaagatgccagtcactgggagagaaagggatgaggctgaaactcaaatgagtacccatttaaagaaaagaaaaccccttctttcccacaacaggaatctccagcgaacatccactaataaactttatattgggtgcctaccatgagccaggcactggagagtgaacggtgaactcggtaatagtccttaccatcacagagctcacagttcgttggagacaccagaaaacaggtgattaaatacaatggttattgattccatagaggcagaatgtttcccatacaactataatgcctgcgttatatttaaggtttttcatgatcttatatatcttaccatataaatctaaatcaatcataacgtatatttctgagatgattactcagttagctcataggaggggcatctgattcagaagtaaaggatcaggaagaagcggcatctggaacaagtacagatggccaaatcaagaacctttctcttggcctctgagctacttgcccaaaccgaactctgtcttcaaggttcccttaatgcagtccccttgtcagaagccacacctgcagcagatgccccatggcactgactcagccttgagcagaagcactgtgttttgtctttcatctcattgcccagctaggtgcaacctggatagacattgtggcccataccttttttatatactttatatttgggtttttaattgttgtcaccatcaccaaccaaggagtaagatggccctctgggtcagagtaacattagaagttttgtccatccagttttagaactacagaggaaagaggagagcattatttttttaagagtaagcatttgatttctgaaagcaattctgattgcctatccctgacaaatgaattgttccccagaagccatttctttctaccagaaaaaatactagagaacaacaagtaaatttaaatttagttatttttccccaccttgattgtccatgttattattgtttaaatggtggtgatgaaggtaattaactttttaattcattttttggttgtagttgatgcattttttaaaaccccaactgagtgagtgccacaattacaaatggctctaagactgctaaaatttcaatgggtatttttcagcttctggttttgccaaattttagttcactaaaccacacttaaattaatttgctaagtagaaaattccccaatgggatgttagtgaaggataagtatgttgtaaataaaacaattaaagggctagttcacacctcatcaaattgcttaacaacctgataccagttaactacatacattcctcataaactgcatggaacatggaacaaggaggtaaattagagtcccccttttctgaagtgggacgcaattacccttaaactgaggtccagtattacggtggcgagaggtggggtagaaatgccacagtatgaccttgttggctgtggaaatatctgcataatgctgtcaatagggattgcaaattctgatccagaaatcccgttaggcagagcaagttccccttcctaattgtagcctcatagacacaagagtaatataagatcatggattcattttatcccaacattcctccaatgtgctgtcacccatatcatttcatccactcttatgagaagaaaagcacatattactttacagatggagaaaccaatgcacagataagtgaagaggcccagtcagggtcacacttgcagagggcaggctgaagggcagcaacgtgagctgagttcatcttggcctggagcctgtgtggtttctggcagggccatgaaattataacccctgtcaactcattggaggccacctacacaaatgccttcattttacagagttgaagataaggcctgagaaagtaaagtgacttgtctgaaacttcctgggatatgacccagtgtccggagctcctatccgaggtcccttctcacttctgcagcagtcgcttgcctggagttatttagggataatttattttttaagatgtaaatgtgaaccaggtaaggtgatggaaattttagtctgcctctcaggacacttcccctctttaaagtggggaattgggatggcacacacctattagcagaggatgcaaactgaacacaatgatgtggaaatctagagagcaagatttattcacatgggtcagggaccatgtgaataaacccaaatagctataggggcacatgggaaatgtcagtgagagaagcaggtgggagcagagcctaaagaggacaaagtcccttcctcaagagcatagcttcacttgaccatgacctccaaggaaggcaagtcctgagattaaagaaaagcaggaaaactgaatttttatgtgaaagcccttgactttgaagtgtcagcaactggctgaaaattttttaaacagtgtgttggggatgggagtgtataaaaatgagcctacagattgcaacctctgttagaggatttcctaccctgacatatcagtgtagagtaggacatttagggtccataccactcagccataaagtttggatttgtttacaaatgtatttgcttgttcattcaaggtctttggacaatcaccttatactccacatagaagatccaattttatttttattttttaaagactgagtgtgacttcgaactcagaaaatattgagggcctcagtatgattggtccttttgtttgtttattcacttttaaaattcagtttccatcacaaccctgcaaggggaggaaaggcagtcccaatattcccattttacacatgaggttattgaggctcaggaagggtattttcatgaagtgcctcgcacaattcaagcccagtcttcaccctctgagttgcacactctctcccagtgcactgatgcacccagagatccctcagaactgaaaactgtgggagcacctgcccaccatagaggacaaatgaacctagttccagaacaggtgggcaggttttgaagcctcaggtccataaagcaaaggcagagcctggaattccatctctctgaagttcaaaaaccagctggcatggggcaaacggtaaataacattttattgggtaatggctctttagttttaaatcacttcagcatttacttttaattaatttctttaaattagacgactcatacttgtaaatatttgcttttctatgataagcttttatttaaattattaaagctgcagcttcgtgactgattttaagaattgaggttgccgctatactaatgatagaaggcatgtgattaaaaacaaggaaaccatttcacattggtatataaaccaacaccaaatatggctggagcaaagcagcactcaaacaaatagaagagagggtgaacttacagttttctttgatttgttcaaggaataaatcaataaatcagggagttagagaacaatgtaggatgaaataacatctaaaggagctcactcacaataaaaccttgtcttgctctctcttttctaaaagcactcatcaatggccctggacccacatactagtttgctaaaaggagtgagagtaggtcatgggaggggggttatggagaggctcaggacagtgagtaactgtacaagaacatttgagacaaaaaaaaaagaagaagtaatgatgagagcagagtaattgcatagccctcatcagtttgggttattataagccttgatgtgctagctgctccattttaccagcatcaaaggcaagtatggaacccacagaaggtaggctgacaggctggattacagcaaaaggagaaatgacaaaggatactctaatttcaataaaagaagatttgaatgtaaaaggtttgtaattacattaataaccagtctttaccaaccatgtaatgatcagccagagtaagaagagaccaaggcaggatgggggaaattcaccacaagtcatcaatacctaagaacctgttaataacttttattatttgttgaaaatcatcttgacaacacagttcagtaacctttgtgctataaatccatttcatctgcaaaaatgaaagctgaatagaatgtgatattatatagaatctctcatgctgatgctatctccaaagtgctctgccaaataatgagctggattctggatgggagggctgtggggggccaacagcagatacttgtgtatgcctaccaggcccagcttggggctttggaaccagcttagcatagactgaaatgaaggctgaaagttacccttcaccctttactgaaaattatcatggggtgcttagattctacatcaaaattaatagagagaagccaaaagcacttccatttattatctggtggaaactggggaatggatcccattgctttggtgctgggtatgggggagaatgttagaataatcatccccaaaatgtatgtaatcatgtttgtggccaaatagggtaccgtaatccaaataaaccccaggtggcactctgggaccaagctatgcctccttcctgccctccctgcaattgagaggggtaccaaaaagcccagggcactattgagagaaggatgagggaagcccttttcacaggaagctggcatggagatgagatagtcagaattgggaggtactaatgtcaaatccttcctacccagaagcaaactcggcactcctcatttttacattggtccctgatccatttatcttttgactaccttatcccaattaaactacaaatgtgctcatttctttttttttttaatttttattataggttcagggagtacatgggtaagttggttacctacgtgtattacataatgctgaggcttggattacaaatgaatgtgtcttccaaatagcgagcataaataggtggtttttcagccctcactctctactcttgtagtccccagagcctattgttctcatctttgtttgtgtgtactcaatgtttagctcccacttaaaaatgaaaacaagtgacatttggttttctatctctacattagttcacttagggcactggcctctggctgcatccatgttgcttcaaaggacatgatttagttctttttttatggctgcatgatattccatggtgtatatgtaccacattttctttatccagtccagagttgatgggcacctgggttgattctatgtctttgctattgtgaatagcattgtaataaacaaagaggtacgtgtgtctttttggttgaatgatttatttacctttgggtatacactcagtagtggaattgctggattgaatggtagttcagtcttctttgagaaatctccagattgctctccacagtggctggattaacttacattcccaccagcagtgtatgagtattcccctttctctgcagcctcaccagcatctgtcgtttttagactttataacaaaagccattctgactgtgtgagttaagggacaggtcacttgccttgaagggaaaccccataaggctagtagcggactttcagcacaaaccttaaaaaccagaagagactgggggcttgtttacagcatccttaaagaaaagaaattccaaccaagaatttcgtatcctgccaaactaagcttctaactgatggagaaataaaatccttttcagccagagaaatgcaaagggaccactagacctgccttaaaaagggaatgttaaacatggaaacaaaagaatgatgcctgccaccacaaaaacacacttaagtacgtggcccacagaccctttaaagcaactacacaatcaagtccacataacaattagctaacgccacaatgacaagatcaaatcctcacatatcaatattaaccttgaatttaaatgggctaaacactcccgtttaaaaggcagagagtgataagttagataaagaaacaagactcagctgtctgctgtcttcaagggaccccctcttacacacaacaacacctataggttcaaagtaaaggaatggcgaaagatgtatcttgcaaatggaaaacagaaaggagcaggggttgctaatcttctatcagataaaacagactttgaatgaacaaccatcagaaaggacaaaaaaaaaaagcattccataatgataaaaggttcaatacaacaagaacacttaactatcttaaatacatatactcccaacattggagcactcagattcataaaaataaattcttagagacctacaaagaaacttagccacacaataatagtgggagacttcaacaccccactcacagcattagttgtttgctattgaggcagaaaactaggaaagatattctggacttaaactccatacttgacctattggacctaataggcatctacaaaatactttacccaacaaccacagaatatgcattcttctcatctgcacagggaacatacctaagatcggccacgtgcttggccataaagcaaatctgaatacatttttaaaaatctaaacatgccaactgcactcttggaccacactgcaataaaaacagaaatcaataccaagaggatctgtcaaaaccacacaattacatggaaattaaacaacttgctcctgaatgacttttaggtaaagaatgaaattaaggcagaaatcaaaaaattctttgaaactaatgagaacagagacacaagataccagaatctttgagataaagctaaagcagtgttaagaggaaagtttgtagcactaaatgcctacatcaagaagttagaaagatctcaaattaacaacctaatatcacacctacaggaattagaaaaacaagaacaaaaccaaccccaaagctagcagaagaaaagaaataaccaaaattagagcagaactgaaccaaatggagacatgctcatttctttcaacagaaagtgaacccagaggttcatgaatatgttatataaacctcacttagtattataaatttagggggaatagattaccagatgtaaaaattttttaaaggctcatggtagatcttacattgaggcacatgcaaaaagctcttaccaattaggttatcagtatttaaatttcatagcactacatctaaaaagtctaatgttcacacagttcccaaaagactgaattcacctgtctccagaagttgtattatcatgccagtggtctcactgcctgatgagtatagaagccaataacatggcaccaacatttgagaaaaggaagtctttattgcaagaccagacagcaaggaaaaaggagttgggctcaaatctgcatccccagtttgctgtctggggcaagttttgaggtgtcagagggcaagggaaaagatttaggaatgttggttttgtagagtctcattggagagcttcaatttcgaccatttacattaaggtatgttgaggcagattttagccctggatttttcaggccaacagactcttcacttctgaaagagtttctgcattcaggttccagtcacgtatgaatcttcttggttctgtagggaggaatcgttggttctgggtgttgttagaggtcaaagctttctctcttgcacatgcctgggctgcccgacttacagttttggctctattttacctacatggtaactttattctgttatcaacagagtaggcccagtttgggctggtcctatggttacagtattaccatgctttcatccgagagtgtgatgtcctcaaaatttcttcaaagttggtaagcaactggctatagaattcagctgtccttcagagtcacatgcactgatgctacagttctgcactgctgacctgcccttctctgaagctgaaccacaacttttcctgcctgtctttgaatcctaatatactattactattggaatggtccattggaaaagggatttgagcctaaatcaagactgcagcatgaaagtggacagccatgaatagctaagagaatatttgctagaacccgatgtatgactggagcagggatgagagagaagtctagatttctagtgggctaactgcacgaatcatgacattctccaaagagaccgttggaggagcagcaggtttagggagaggtgattggtttaattttgtactcataaggttgaggtgcctagggaacctccaagtagagctttcccacaggtaatccacatcacccccatgttcctaatcctactgaataaaaatcacactctttgttgttggtggtgttgttgttaactcagttggttttcttttctcaggtttagtcttttaagttctaggatacatgtgcaggacgtgcaagtttgtaacacaggtaaacgtgtgctatggtgggttgctgtgcctatcaacccatcacctcggtattaacccctgcatgcattagctgtttatcctgatgctgcccctcccactgccaccccgacaggtcccagtgtgtgttgttcccctctctgtatccatgtgttctcattgttcagttcttacctgtaagtgagaatatacggtgtttggttttctgttcctgcatcagtttgccgaggctaatggcttccagctccatccacgtccctgcaaaggacatgatctcattcctttttatggctgcatagtattccatggtgtatatgtaccacattttctttatccagtctgtcattgatgggcatttgagttgattccatgtctttgcaattgtgaatagtgctgcagtgaacatacatgtgcatatatcttcatgagagaatgatttatattcctttgggtatatacccaataatgagattgctgggtcaaatggtatttctggttgtgggtctttgaggaattgccactgtcttctacaatggttaaactaatttagattgccaacaacagtgtgaaaacgttgctttttctccacagcctcgctggcatctgttgtttcttgactttttaataatcaccattctgactggcataagatggtatctcattgtggttttgatttgtatttctctaacaatcaatgacgttgaccttttttctcatatgtttattgaccacataaatgtcttgttttgagaagtgtctgttcatgtccttcccccactttttaatgggattttttttcctgtaaatttatttaagttccttatagattctggatattagacctttgtcagatgaatagactgcaaaatttttctcccattctgtaggctgtctgctcattctgatgatagtttcttttgctgtggagaagctctttagtttaattagatcccatttgccaatttttgcttttgtggcaattgctttcgatgttttcatcatgaaatctttgcctgtgcctatgtcctgagtggtgttgcctagattttcttctagggtttttatagttttgggttttacatttaggtctttaatccatcttgagttaatttttatgtaaggtataaggaaggggtccagtttaaattttctgcatatggctagccagttttcccagcacatttattaaataggtttctagtaggctaattgcatgaatcttctagatggggtcttctagatatagaatcatgtcatctgcaaacagagacagtctgacttcctttctcctatttaaataccctttatttctttctcttgcctcattgccctggccagaacatccaatactgtgttgaataggagtggtgagagggggcatccttgtcttgtgccagttttcaaggggaatgcttccagcttttccccattcagtatgatattggctgtgggtttgtgatatatggcttttattattttgaggtatgttccattaatacttagtttattgagagttttgaacatgaaagaatgttgaattttatcaaaggccttttctgcatctattgagataatcatgtgatttttgtcttcagttctatttgtgtgatgaattacatttattgatttgcatatgttgaaccagccttacatccccgggataaagctgacttgattgtggtgcataagctttttgatgtgtcgctggatttggtttgccagtattttaatgaggatttttgcattgacgttcatcagggatattggcctgaagtttcctctttttgttgcatctctggcaggttttgatattaggatgatgctagcctcataaaattagttagggagaagtcccttcttttcaattgtttgaagtagttttagaaaaaatggtatcagctcctctttgtacctgtggtagaattcagctataaatccatttggtcctgggccttttttggttggtaggctatttattactgcctcaatttcagagcccattggtctattcagggattcaccttcctgattcagtcttgggagggttatgtgtccaggaatttatccatttcttctaaattttctagtttatttgcatagagctgtttatagcattctgatggttgtttgtatttctgtggggtcagtggtgttatcccctttatcattttatattgtttctatttgagtcttcttttcttctttattagtctagctagtggtctattttaataattttttcaataaaccagctcttggattcattgattttttttgaaaggtttttcatgtctctatttccttcagttctggtcagatcttcattatttcttgccttcttctagctttgggcttgtttgctcttagttctccagttcttttaattgtgatgttagggtgtcaatttgagatctttctagctttttggtgtgggcattagtgctataaatttccctcttaacactgctttatctgcatcccagaaattctgctgtgttatctctttgttctcagaggtttcaaagaacttcttgatttctgccttaatttcattatttacgcaggagttattcaggagcaggttgttcaatttccatgcagttgtgtggttttgaatgagtttcttaatcttgagttctaagttggttgtgctgtggtctctgttatgatttcaattcttttgcatttgctgaggcatgtcttacttccagttatgtgatcaattttagagtaagtgccatgtgtcaccaaaaagaatgtatattctgttgttttggggtggagagttctgtagatatctatcagatacacttgatccagatccaagttcgagtcctgaatatccttgttaattttctgtctccatgatctgtctaatattgacaatgggttgttaaagtctcctactattatcatgtgggagtccaagtctctttgtaggtctctaagaacctgttttatgaatctgggtgctcctgtattgggtgcatatatatttaagatagttagctcttcttgttgaatcgatccctttaccattatgtaatactcttctttgtcttttttatctttcttggcttaaagtctgttttgtcagaaaccagaattgcaacccctgcttttttctgctttctatttgcctggtaaattttcctccatccctttattttgagcctgtgtgtgtccttgtgcatgagatgggtcttttgaatacagaatacaatgggtcttgactctatgctgcttgccattctgtgtcttttaattggggcatttagcccattttcagttaaggttaatattgttatgtgtgaatttgatcctatcatcatgatgctagctggttattttgcagacctgttgatgcagttgcttcacagtgtcattggtctgtgtatttcagtgtgcttttgcagtggctggtaccagtttttcctttccatatttagtgcttccttcaggagctcttgcaaggcaggcttgctggtgacaaattccctcagcatttgcttgtctggaaaggattttatttctcctttgcttatgaagcttagtttagctggatatgatatcctgggttggaaattcttttcttttagaatattgaatattggcccccagtctcctctggcttgtagggtgtattagtccattttcacactgctgttaaagacatacccaagactgggcaatttacaaaagaaagaagtttaatggacttacagttccatgtggctagggaagcctcacaatcgtggtgggaggcaaggaggagcaagtcatgtcttacatagatggcagcaggcaaagagagagagcttatgcggaaactcccattattaaaaccatcatatcttatgagacttattcactatcatgagaacagcatgggaaagacttgcccccattattcaattacctcctactgggtccctcgcacaacacttgggaattcaagatgagatttgggtggggacacagccaaaccatatcatagggtttctgctgacaagtctgctcttagtctgagaggcgttcttttgtaggtgacctggcccttctctctggctgctcttaacattttttccttcattttgactttggagaatctgatgattatgtgtcttggggttgatcttctcagggagtatcttaccggtgttctctggatttcctgaatttaagtgttgtcctgtcttgttaggttggggaagttctcctggatgatgtcctgaagtatgttttccaacgtggttctgttttcgctgtctctttcaggtaccctaattagtcataggttcagtcttttcacataatcccatagttctcagggaatttgttcattccttttcattctgttttctctaatattgtctgcctgtcttatttcagcaagatagtcttcaagctctgaaattccttcctcctcttggtcaattgagctattgatacttgtggttgcactgtgaagttcttgtgatgtgtttttcagctccatcgggcatttttgttcatctctaaactggttattctggttaacagctcttgggattttttatcatggttcttagcttctttgcattgggttagaacatgcttctttagctcagtgaagtttgttattacccaccttctgaagcctacttctatcaattcatccatcccagcctctgcccagttctgtgctcttgctggagaggtgttacaatcgtttggaggaaaagaggcactctggctttttaagttttcatcgtctttttgttgttgttgttgattctcatcttcatgagtttatctagcttcgatctttgaggctgctggcctttggatggggtttttatggggttttttgttggtagtggtggtggtgctattgttgttgcttccttttagttgtgtgtgtgtgttttgttttgttgttttttgtttgtttgtttgttttaacagtcaggcccctcttctgtaggggtcctctccagaccctattcacctgggtttctcctgcacctggaagtatcaccagtggaggctaccgaatagcaaagatggctgcctgctccctcctgtaggatctctgtcccagaggggcatcgacctgatgccagcaggaatgctcctgtataaggtgtttgggaacctctgttggagggtctcacccagtcaggaggcacgggaactgggacctgcttaatgaagtgctctggctgccccttggcgaagggagtgtgctgcactgggaggaatcccacttgtccagactgcccggattcctcagagccagcagcaggaagactacatctgctgatccatggagatcacagccgcccctcctctcaggagctcagtcccagcgagatcagagttctgtccctaaaatcctggctggagttgcttaaattcctgcagggaagacccagttggtgaggagggatggatcagggtccagcctaaagaggcagtctggccacgatccgccacagctgctgtgctgcactgtggggaattcctcctgggtccaaaccatctagtctccctggcgccagcaggggaaaaatggcagactggagccacagtgatgacagccacccctccccacaggaactcagtaatcttaagcagtctgcagccaagtggccaccaagaatctacacagctctgttcttgggacccagggctctgatggcatgggctcacgagtgggatctcctgatccatgggttacacggaaccatgggaaaagcatggtttcccagatgaagtagcacagtcactcactgcctcccttggctggaggtgggagcttcccttgccccatgtggctcccaggtgggctgtcacaccaccctgcttttccttgctctccatgggtcatgccacccacctagtcagtcccaatgaaagaacctggatacctcagtagctggtgcagaattcacttgccatttttttcttctcagtgggagcctccgaccacagctgtttctagttggccatcttggcccctccccaccaaaatcacactctttaatccttcctatgctgcccctggtatttaagacccttcatgatcaggctccagataccctctctagaccaaccttctgcttcttacttgcctgctcttgacaagccagcatcagaggaatgtctctgtttccagaacactttccaaggctgttagctctgtatctttcctcctgttgtttatctcttcagatgctcaggataactgacttatatttatattccaggttatttgcagagcaggtaacacgtcttacaaacccccatagccacagggattccttaaagctgggtgccagctccacctgcatcagaatcacctgggcccttgagagaaatgtaggctcccagacccctttcagaccttttcctggggttgcaaccccagaatctgtgttattcaataaagactcaattgattcttagtgatgccaacgttcaaggtactagacctggaacacagggtcttccaaacggaaccgcacaaatatctgtttgattttcataaagggcaccaagaaactttgctttccttaagaaaggcacctcaaggtctctgaatgaaacttcccacatggaatgttgtttgtgctctttctgcaagcaccatcagcagtttcagcttcttgggccgctaacagccaaagtacccattggaaaaaaaaaaaaagaagtctctttttagtgcattagatcctgttttttagaaatgtgtttccaaatataaaccaatttctttcacccggtgccagcaggcaccatgtgagcagatgagaagcaagtgaggtcagagactgcatggtctaacttagtggtcaggcatgcagcctctgggtctgtctgtctgcctgggcttgaactgggctctgccactaccagtgtgactttgatcacattatttaacctctctgcttctcggtttcctcatctgaaagccagggataataataatgcctacctggtaacattgttatgaggaataaatccgtcaaatggaggaaacatttaggatggaaactaacttgctgtaggcacttgggaacatgctgctgtgctcagcaggcttatgaatctttgcaattctaaacccaatgtttgaagctggttactgagcccatcaagtagagtggcactcttccctgcacttacatttctgcttctgaatttcagagtaagacaattgccgtggcaggattctcctgtgtcttaatgaaatcatgacatggaggccctctcccccaacacccatacacacacacacacacacacacacacacacacacacacacacacacacagaggcatgaagatggaagtgtttaagtctccttcgttgtactccttgcccttggtgaagagggattctaataatctaatgatcataggtagtttacatcaaaatcttcctattgcacaggctttagaaattaatgggaggggaaaggggtcaggtaaagatgtggccatgatgcataaatatctactgcaaaaattgcatgtgctactctaacatatatatgtaatctaaaatagttagggaaaagcagacttcaggaacagtatattttgcccctagagtgttctgtctccaggtagcaccttgggcaggtaactgtgtagtggtttttcctaaggggcaggaggaaatcaggaccttacactgttgaacctgttagcccccaaagtctgaccttggaattgaaccattgtctgctacatgattatcagacgaaatccacagtgtttagatactgaaattctaggaccacagttacaatagaaagagagagagatgatttaaggggcctatcaagttaggatgatttgttcctttggttgccattctctttaaacaaagcctgttctgtggataaacagaccatggggtaatgatatgcaggtatcgttcaaatggattgcatgactgttttttgtggccgcgcaggatagcttctgccttccccaagatttccctctctatgttgttctcagttatcttttctaattgttctcagcacccactttaaaaacctctcatcccctcataaaggaaattattttagcaggaccatttttaggaccatctgataggatgaaacactcttaaggaccattttccagataatgtctgctgaactgtcatacagaatccaaaactcattgcacatgcagtttgttaataactcaattcttgtatttgtggtcattgtttaaaaaaaaagaaggaattaaatatgagcaaccaaaattatacttgtttaaactgtttgagaaatgtctttgagcactcagtcactatcctttctccttcattttctgtacaaacatttccttggtgtgtatgagggccacaagcatctgctgctgcacactccacccattccagttctttggaaagaacaagacccccctcttctcataacacaatgggaaatgtgagtgatgaaagcggatttttttccataatcatttctataatataggccatcaaatgatcattatattttatgattccgtaaaatctgccgaaatcaaagctatgtaatatacgttgcagagggctctgctaatccttgccaaccacattcgtgcctggaccgaggaggaaggtctggtaactggaaacctgacactaaaggaattctaagcacagactaaaagcatctctgtgcacatagcatgggcgactcaagtatattagtttgtgctgattttttttaaagctttgcagtatttgtagaagaaccagagaagaaagcaccgaccccagctcagccactaaataatctatgtgtggcatgctcaagaatagcatggctctgccagatgtcgactttctgccaacgggtacaggcacctctcttagacagctcacaggagttttacatcatgttacttcctgccgttcaaaccccaaatttggccacagtcaattattaccaaaaaaggaaacccataaaggctactttggaagttaaaaaattagctttgttttggctgctaatcacacacatagtattttatagaaattaagaacaagattctaccctttggaaggttttctgtaagtgaaaaacccaatgcatatgcctaagccggacattcacacctctgctcataaattcttcatggtttttatactttctgctgcatatcttatttcttcacatactaaactcaccccctttcaaaacaaactatcttctagttgctgatgtgtctccaacttagttgtttttcccctctgtgactcttcaacttcatctatccttccacatcctaaaaggagctcatcagatgagatactgtaggagttcttacactctgccttgagacatgtagaggaagtgtgctcagttctgtattgcaagaatctgtcactgatatttgaagacaggattacaaatgatttcttttaataaattatagcagactcaagttttccccttcaataatgtcactcccactcatttgaattcccttgttctttcctggatggaaggaaagggtgttgagttacagcaggtggcagagaagtttgcataattctggattctgcctctcctgggtatgagtagcttatatgaaaatcatccatcacgtctgttctcagggagaaaagcttgggaggcactgggacagagggaacaggacaccaccttgacctcgggttcgtgttcatcagccctcaagcccaggtaccacacttgtaactatggtcatcacacctgggtttgacattgtctccctaagaccctgtgtttgaaatcctgtgtactgtactttgaaatacataaagatgttcctagattattgcatttatgacagagacaaagaaaatttctttgctgtaccatcataaaaatagtagttaactgacccttgaataaatacgcttagcctgtacctagtaagcccagtttccagttaatcttgagtcaagagagctctcaatttcctcagcaccagttagtcatgctgagctcactgggaagtcagagaaattgaatcccagtgtaagatttattgagcacctattgtatttcaagtactctgtagggcaacagagataagacagtataatcttgttcttggcaaacaagacaaataaaataacctctaccctgataaaatttacagtcattctgtgttggacccaatacaaccctttattcagcccaccatccctcctacttccttccttcttcagaatttagaaatcagtctcacctcaaccaccatcaatccctggctcccaaagaaagcccactttctcctcttttcccctaccttcctccagcccctacccacattcaaccttttatagttactgtatgtgtgtgggttttctctttactttaaactctcttgaacaaattcaacatacatttgtagagcacctgtgatgtgcaaagccctgtgttaagctcgaagggagatagttagatatgtaagactcagttccttccttcaagatgcttgtactccatgcagtatacaaccagccacaaggcagggtgaaagacagatgaggtgagaatgaccagctgtggcagagacagaggagagagattttctttgcaattgagggtggtggtgtagacataggaggattcaaaattgctcatgccccttcatctgttccagtaagtacagccacctcattcctagcaagaggtttgctattaattttgtccttccagtattgagccctttccctatacagaattgttttagcaaatgtaggaagatgtctttcatccttgcgtaaactgaaggtagtcagcacccagagctggctatctgaccagcttagtctctgatttccagccccccttttgcttaatgaaaaatactgacatactgacatggcaaaaagaagaaatccttatgtaaacaaagtgatgcttattgcttctttacatgtaaataacatatatctttgtcgtgttcagacttaatggttaactttctttattgcgtgcatctatgtgattgaaaactgcatgcctgagatagttcctatcagttttccaagcaaaatctgaatccttctggcctctggaaatgagcctaatccgaaataaaataagcaataatttcaaaatgtaggtattttcatgacagccccctctacgagttgtaaagaaaacaaatatgggcttgtttctctttccttaagtaaatatggtttctgagtaaaatttttaaattgaaagtttttaaagaaaaacagtaacatatacaaacaaaactcaagaagtcacatgaaaaatgaaaggtcttaaaatactgatacatttgttatgcggattcttgttttaatcagaatctcctaaggaagctgcccctggattcctcagggttggctcaaagcacacagcatccgacaccgtgatgagcattgctggggccccagaatggattggttttgggctttcctacaaacactaaatttcacacaaataaagagactatgaaaagagaaactcacgattaacaaaactaaaattttagctgccttttcttcctctaagttctgtagttgatgaggaggggcttattttccctgtttcaaaattcttcttgagacagagtctctttctgttgcacaagatggagtgtagcggcacaatctcagctcactgcaacctctgcctaccaggttcaagcaattctcctgccttagcctcccgagtagctgggattataggcatgcaccaccacgcccagctaacttttgtaattttagtagacagggtttcaccaggctggtctcaaactcctgacctcaagtgatccacccaccttggcctcctaaagtgctggaattacaggcatgagccaccgcccccggccaaaattagtttttttaataatttaaaataatacacacataatagtcaggagaacttagaagttgttctgacaaaagtctgtaggaaattctgttatgaacaaaatgttgttataaacaacagctacacaccatcccccaaaataaagaaaaattcttctagcactctttgaaccttaaacagtgttttagtaggccaactcattgtttttcttctctctgaaaaattaaaaatgctaactgttatgatgagttccacagaaaaagacaatttccatgacttcatttcttgacaaagaacagctacctctcttgctttctgccacatacaagcaaactcccagacataaaacctcccctcagaggaagcaatatgggaccacaaaagtatcttgaggtctgccctatctgcccacgggaagcctccccctcactgtgagctgtgagcactggctgcctgggaggagcaaggtgtgggagaagagatagcgactgtccccccatgtgctcgccgactgtactgtcacaacctctcagggtggcttctgccctgtcaccacttgatctggattctctctccaaaaatttaaaaaaacaaggcgtgcctgtcttttataatgctctgttttaagagagagaaatctccagggagagaacaggaccctaaaagtccaaggcctggaattcttcctttctctctttccattttaaacaggaagcattcatgctaagagagtccggagggagggctggttgtatgttcatttgaaggcaaataatgtttgtgtgttgcaaatgtcagtgatttatcctaagggcttaaaatgagtgcagaaaaaccacatgtttcacttcatgcagagaaatatcttcagtggattttgagagaaagtacaggttaagaaaaattttttgagtgtatcggatatctccaacatgaaccaaaaggaaatgaaaatgagcatggtgaggtggaggagagagacttaaagaattcttatgataaaagatataccgaaggctggaagttttctaaatcaaaaatgaaattctaaagaaagggaaaggtgaaatccagagcctttatttcccatggctagagtgacagattatccatttgtgctccatttgtcatgggcgatttaaaatacagcaaagcaaactgcactgaataatagcagctgatgctataataacttgtacacaaacaatttaattttttatctgaaaactctaactaaattaccccaagctcaaggatctttcattattatacatagccaaattaagacaaaaaagtagagagaattctattgttcatccttatagatttgttcacaagctgctttctacatgcaccgagctgggagcttgtcaaatcttcattgatttgagcaacttacagagctgttttaacatccacctccacagattacagggtgattctgaccctcattgacagtgcttgattaaccacagacactgtattctcacagccctgtcatttctttcaagtgtcctagcagtgtgtctgacattggggagctttcccttaattattgttgttgtttttcttttttaaaaattataaaagggggagtggcaaaaaaatgggaaggatctggggatggtggtggtggtgaatgtgtgcacagaaggtttatgagattttaagagctgcaaacagaactcatctgtttaaccccaggctagataaaatgcagtcatctgcacattgtttagaggcacactgcttctgttatggcaaacggatcagaagatgcttgttttctttagtgagagatccagacagggccactttctgttagtgtctattcttaccctggatgtttctgtgtgccttacccattacaaggtacaacttacagctggtttggcatttccctattctgctactggactggtgctacttcctggctttgtggtagagttgattactttatatcaaagctttaggtgtgggctgggtgcagtggctcacgcctgtaatctcagtactttgggatgccgagccaggcagatcacctaaggtcaggagattgagaccagcctggccaacataatgaaacccatctctacaaaaaaaaatacaaaacttagtcaggtgtagtggtgggcacctgtagttccatctactcggtaggctgaggtgggagaatcgcttgaacccaggaggcagaggttgcagtgagctgagatcgcaccattgcactccagcctgggtgacagaatgagactccctctcaaaaaaaaaattaaaaaaaaaaaaagagctctaggtgctctggcttgggactttttctaaggactgtagagcatttagggaggggagggacatatgaatccacaccaagatgtaacagcagccaaccagagttagaccaagatgacagcccgtttaaaagagcacctcacagatttagaaaagcgagtgcagtccatggaaactttatgactccaaataacctgaacatttctatcaccatgcctaggacagacttcagcccagcctgtcctggatatggtggtagaaaaggggagggaactaatgaccccatccttaagagaggcaaactcactgccttgtttaggaaactagtttggttactataataaaggccaacagaaaagggtataaaccagattgaagtgtattttcctctcatgcaccaatgtgaatggaagcaatcctgattgacatggtggctccatggcaacggggacccaggctctcaccttcttgttgctctgcctcccatagcacgtggttttcaccttgtggcctaagatggtttttctgctggccaacaggaaggagagaagggaagaagttcccttctcttctttttaagggcacgtatcacttctgctcccatcccattggccagacctatgcggtggccacaccaaactgcacaggaggctgaggaacatgttctccagccggacggccagcttaggagctgctaacatgtgtctcttcttctctttccaggggaggacccgcagatcctgtagactatctgccagcagcacctcgggggctctacaaggaaagggagcttccctattatccaggggctcatcctatgcaccctcccaaagggagctatccccgccccacagagctcagggtggcagatctccggtatcctcagcactacccacccccgccagctccccagcacaaaggaccctttcgacaagacgttccgccttcccctccccagcaccaaagaatgccagcctatcaggaaacaggcagaccagggccccgtgggggcagcccagaccagtacccttaccgaacccaggattcccggcagaagaaccccatgactgcagccgtatagctgagtgccaccgaggccagcccggtccagaaaggaaggtgtctactctacctttgccctttctaaacctgaagacctccttggtgttaggaattctccatgttactgataagctttttctcactgacattgtaacgcatgactgctaatcagagagaaaaagaaggggaagggaattggggaggaaaaaaaatcagaaggaagacgaaagatggggctataaaaacaaaactacctgatagttgaaacgctttcagagttgttcaaatcagtgagagtggcaacggaacacacaaacaactaattatggaactctactctggggatcctctctggctagataacctgtgctgatgtgcagacacgtggacatccccctctgagactggtggtccagaggcagtctctgccaggcagcattacccgctccgaggtggagcctcagcccccttcttagagctgttaagtctaaggtgtggcagagcagacagagatagaggcatctgaagtgagtataggttttttgactaagaaaaaaaacaacagcaaacatgactagtgatcttgaaatattttgtaccgagagaaagactgcatttatttgtagaatttatcaggtttctgataccactcattggatgtaaacatttcatgtttcctcacttttgatatgaaagtcggtaaaatgcagtattagtcccgggaggatgtgcacagctggtcagagcttccagaaggaatatcttccgaggactaaggtgatcaggttaagagggttcaacatcccacggccctcaccttcctccctcccacattccaggcatggagatatctggtttcagagtcagccccaaatctcctgcctataattactttaactggggtctctaaggttcccacttgagggctaaaatgtagttgggaaagagggcctactggggaggtctcacaggaggcagtgccctgggaaatgccaagtccagactcagtgccaagcagtaaccatctgcactcggggacagcgaggagctgaccgtggcctctgatgaccagcaggtattagatggaagtgaatgagagagagagagagagagtatgtgtgtgtgtgtgtatgtgtgtgttcgaacacatatgattgccagtatggagaatgaaagattaataatgctttctggagagtttgatgcaaaagtgggggaaacggagaaaaggcgctaaggctaaatccatctgcatttgctatatttcattagctaaagtcaggtcagggcagggccaaggcctccaattggcaaaggacagtgttatggctttaaaaagctgaaaccccaacctctaagtagatcacaatgttttctgagctttgcagtaattttctatggaaactaaaacctctaaaacatacaagctggcccaaatgagaacacaagcaaaagatgtggaagacagcaaaacctgagcactggtttgaaccaggcactgacatttgaaatgctttaagccttttcacattccttctttattccctccaaaaaaaaaagtcttgagtttaatttaggtctattttggctgagattagcatacctctgactcacaggatttaataaattatagtattattgaatacataggacatccctctaccccagcttactcttatctttttaatttaaaatagtattctgctaccaagaaggatgcaactgctagttttagatgtaaatagtgttatttactggactttgtgatattattttcttaactacactttactatggccctgttgaaaacagactatcaagttttttgtctctgttctgtcatctctcttaagccaggcacctttagagtgtttgcaatttgttcgaagtggttgaggatctcaggccctgctcacgtgaggtggagtgcaggggagctaccggtttccctgctgacctgctgaatgctaccttcccctcgagttgaatacaccttaaggaaaatgataacacgagggacgtgtaacttgttttgaagcattaaaaaccagcagctcttcactatgttccatattttaaccaaactactgtagactactaaacatagccaagccagaacattccttctggattaagcctaggccacttgaggggcagccaggggtgatggtgtcaggtgagaatcctgtgtcttgaaggagtggcctttacaggaagagtgcccatgttttcacctgcagcgttgccaccagagtgtgcaatacctcctgcacacaggctcagggtaaactgctccaaagctgggttttgtgttgcatacaaagtcaataaaatagttgctaatcctgaatggcagccagtgatgtgaaggtactattaaagtgaacaaaaactagattgcaacagttttctttccttgcttgaagtataacacacgctccatttgatcctgcctgaaagaagctaacattatatttgtgacagacagaggctccatcaagccaagcaacaattaacagctcaagtgtaagatttataaatgcccgtgtactcacccttcaattgttaccacccagaggttacaggactctttcccagcatttaggggaacaggcttttagagtatttagaagaccaggctataatcagtaatgtgcctgggagcaggaaatagctcccaatttatttatggccttgggaaaactcaatccggtgtctccttgtagctcagaacactaatagcccccctggaagagagtggcacattgagctccaaacccaatcaacatacatccacttggctgcagatctgactgctgggtcatgaaggccgtgaaatgatgtttgccctcaagtcactagatattttaagaagccctatttttctccctttttgcaggagtagagagatgaaagaggacagaccattgaaaacttttagatgcaggagaattgagacttccacaagggagagaaacacagcctccccagaatccattatgccatcgggttgtggcactctcacccttgccataataccgtttcctaacaatatcaaatcagtggatgaaatacaagctcagaaacaggaacattttcctaaatcataacctaatagcaaacaaaaattgaaaaaacaattattctgaagctcattattcttagatctgtagatatatatgtgttgactcccacaggatggcaccaagtaaagatcttaagagcatagtaggggttctgagaccgactgtcacccgtggatcctgatggggaagaacagaggcttcactgtagctatagttttccaccaagtcaatcaaattaaaacatgactcattgtcccctccaaagattcataaaattcttgagctaaagtgatcttctgaagaaaagccacctaacaatgttaggaggctcataaagctcatttctcttttccctggtatgcacaaatatcaagcctataaaaaagtaattatttccccaaacctgtaaccactgcattcgttttctttggaggaacattgtagcatttcaggagggtcgagagatctaaagagtttggtctgaatgtgtgtctgtacaattccctttggcattaaactctgaaacctacaatcaatggccttcaaattggtgttaaattgggagaacaccctactgctttctgagtctacgagcaacagaaagactggtcttagtgcaattaggcaggagggatttggactcagaaacagccacagaagtatttctcagcactcccagttcctgccaacttagctggaaacgatgccacagcgagaccagaaagaggagtcgccttaaggtatccctacaaagtcacctttctgataaaaaggagggaaaaaaaagttagatatctaaaataagcctagaatctcacacacagctgtgacttctaagtgaaactcttttctccctcatgtccttaaatagtcacagaatcacacacagcctgacttttaaagacaagcttggctacaggaaatgaaccaaccccaaagactcttctaacctgtctcctgactgggctccttcagaaagtgttctcctgttccatctgtagggctgcttactactggaacctaaaacaaaacctgttgtttgtaccatcactttttctggtgtttcctgtgcttttgtgattccaagtctgttcataagttctgaagataaattatgtgaaatcatattttggcatatgggggtggaggatgaattctttacagactttttaagatgatccatttgtaccacagaaaacattttggaagttgttatatatgagtatataaatttttcttttcatattttacattaaaataaagctttattcagtcattaagacgtcagagtcttggattgctttaggatggggttgtccaatcttttggcttccctgggccaccttggaagaattttcttgggccacacataaaatacactaacaccaatgacagctgatgagctaaaaaaaaaaaaaaaaaaaagctgcaaaaaatccctcaatgttttaagaaagtttatgaatttgttttgggtaacattcaaagccaacctgggctgtgggttggacaagcttgtttcaggatcggatctgatgaatcaacaagtgggtctgggcctactcaccctggaatagcaacattcagtagttgaatagcaacgttccaaacagcaagagggcaaggaacaagagcatcagtcacacgctgggccccccaagaaacagatgctgagatggagattctcaagccaatgtgtactgaggtgtgcacttgggtttcaataccttaaaaagggagggaaacaggcctgggcagagggagaagctgagccgtagtgcactcccagcttaggcctcagccaccccacagtgggagcaacaatggctcttcagagctgtccccagttgggacaagggagctgagcctttatgccaccattgattggtaaatacaggttacctctggaaagaaagatctagctagggttcggcagttttcttcagttgaggcaaacccaaagaaagccgacagctggggcccatctttggatggtattcaaaacagctggaaaagagctccttcttaatgtggcatctgagcagcctgtcacagcattcaggacaacatctaaaactggcaaccactttctggtgctggaatcactcatccctagaaagttctccttgagaccgtccctgtcaacccccagctcctttattcccttggcctagtctcagacctccccatactcctggtaagcccatccacagccaaggtttcggccaccgcctctctactgactgctccagctcagctctgtgccctgagctcatgcatttctgcttttccactacccattcccatttggatgtcctgcaaagcctttaaacataacatgcccacactgaaaacaagctttctccaaagaaacctcctcctcacaattctgtcctggccaaaatgtgaaccaagttcacagctaaaaactggaaacttggaaattatcctggatttcccatttaaaattctgccccttcctcctacacattcccatataatgagatggaaggccaacattgtgtcctgcaattccatcaaatatgtttatgtttcctgataccgtgacatgcctgggctcagcctcatcacttctcacccagccccttcaatagccttcgatgtgatcgccccccacctcaggccttgttcccttcaatccacctctgtgctatacagccctgctccttgcttctggaaataaagttatattggaacacatacacacccattcatttacatgacgctctagagctctttcacaacagcatcgatccctgctctatattgctgcctaggaatttttctgaagtagagatctgatgatattactcttctagaggcagcatgtcttcttgaaaaaaaatgttggctttgaaaacaggtaggcatcgatttaaaacaaagttcaactactgattggttgcataaccttgaataaaatacttatttatccgtctagcatcattagtgaagtagaactgctattcaccttatagggttggtttcagaattaagtcacatgacagacagcaggccctcaaataacctcatttcactcaatgttgtatcattataacattaattaggaaaaaaaaaattgattcctggccggggccactgtgtgtgtggagtttgcatgctctccccacgtctgcatgggattgctccggatacgccagtttcttcccacatcccatagatgtaactgttcagttaaacagcaggcctaaatagtccaagtgtgaatgagtgtgggtgtgagcgtgagtcctcccttcagtggaagggcatcctgtccggggctggttcctgccttgtgccctgagctgcccgtataggctcagccacccatgaccctgaactgatataagtgggttgaaaagtgagtggaggcaaggcacggtggctcacgtctatcatcccagcactttgggaggccaaggtgggcagatcacatgaggccaggagttcaggaccagcctggccaacatggcaaaaccccatctctaataaaaatacaaaaattagccaggtgtggtggtgcacacctgtaatcccagctactcaggaagctgaggcacaagaatcacttgaacccaggaggcagagtttggagtgagccaagatcttgctactacaatccagcctgggtgacagagcaagaccctgacaaaaaaaaaaaaaaaaaagaaaaaaagaaaaatgagtggaaaaacgcatacaaaataatctaaaatacaaatatgtaaacaataatcatacaaatgcacagtaaacgatgcggtacaagaatgctcagtgagcctgcgatatctgtgattgtttttgaaccgcatgatggtgggaggtgctccttacaatttcactttgtaaacatttactccttgatttaactcactgccgttattcactgattcaccaaattatggataaattattttcttgttttcatcaatatttcttcaatgtatgtatagctcacacgtatttttcatgggtaagattagaagcacttgggtctttatctagaagtttagtgatgcttttgtgaccagaagtataccataggaacgtaactcttgcttctatcagttaggctatggtaaaattggcgtcattatacatcacttcactcaaaattgcagtttccggtaacccattgaggacattaagggaggacttactgtatagaagcactggtgccagcttcaaagagccaactgtatgcatctcgtcccaactccacattcagtgatgtcatggagaaaggctgaaacgggatatgttgggagtatttacaacacaggaattggcatatctgacaaatcagggcgttttttccttccctctggagagccagttgttaaacatttcacagcacaccatggtcgtaacatccccagcagtcaaggaaaattaacccgtccccattacacacacacatacacaaaaacacacacacacacacaaacacacacacacacacaccttaaaacctttctgtggcttcctactacttacagcttaagtcagaaatccaaaacccctgtgtgcctctcccgcctccgtccttgctgctcatagtttacatcttgtgctaatgttatttcttttttctttttgagacagaatctcgctctgtcatccaggctggagtgtaatggtgcgatcttgactcactgcaacctccgcctcccaggttcaaacgactctcctgcctcagcttcctgagtagctggaattgcaggcacgtgccaccacgcccggctaatttttgtatttttagtagagactgggtttcaccatgttggtcaggctggtgtgctaatgttatttctaatgactttgatccgtgtgacctggacatgaattctcacagctccgtaccctggcagtatgcagtaggcaatagcacagccacccctgctcaaactaccctctttgcccaccctgctttgtcctgtggatccttattcatctttcaagcccaggtgaagcagctctttctccatgaagccttgaaaacagaaattggagactgactccctcccttccaccctgctttcttgtagcaggacttactgcagggtaagtcagaaattctgacatgggccgccacatttttcagatttcctctcaacttgggttccacgtgagactcatttccaccaaacagacccagcactctgacagacggaactgaggctaggcctgctcttgctggctaacccagcaccagctggagtgcccaggctctagcttcctgggcatcaaaagggctgtgtgacggttagccattgtgtcagcatgcatcccagatgaggcaacgggatcctgttgtccactggttctttgaatcccccctttttttaaaacagctttattgaggtatgtttgcagagctgtgcaaccatcaccacaatcaattttagaatattttcaacatccaataagaaaacgccatagtcatcagcagtcaatccccatttctccactcccccatttcctctgccttacccccatccaggggaatcacttgtttctgtatgtttgcctgctctggaattatcctgtccatcgatggatgaatgattaaagaaaatgtggcatatgtacacagtggagtaccttattagtctattttcatgctgctgataaagacatacccaagactgggaagaaaaagaggtttaattggacttacagctccacatggctggggaggcctcagaatcatgccgggagacaaaaggcacttcctacatagcggcagcaagagaaaatgagaaagatgcaaaagcagaaacccctgatagaaccatcagatctcgtgagacttattccctactacgagaacagtatgggggaaaccactcccatgattcaaattatctcccactgggtccctcccacaacatgtgggaattatgggagtacaattcaagatgagatttgggtggggacacagagccaaaccatataaagtactattcagccataaaagaagataaaatcctgtcatttgtgacatcataggtaaacctggaggcattatgttaagtaaaataagccagacacagaaagacaaataccacatgttctcactcacatgtggcattttagaaagctgctctcatagcaggagacagcagaatggtggttaccagagacttgggtagttaggagagagaggaatggggagatgtggtcagaggatacaccatcaaagacaggaggagtaattttttttttgtgtgagacagtctcactctgttgcccaggctagagtgcagtggtataatcatggctcactgcaacctccacctcccaggctcaaggaactctcccacctcagcctcccaggactacagtcatgtgccatcacacccagctagttttttgtattttttgtggagatggggtttcaccatgttgcccaggctggtctcgaactccagagctcaagcaatccacccgccttggcctcccaaagtgctgggattacaggcctgagccaccgtgcctggccaggagaagtattatttcttttttaaaattgtccagaatctttgactttcttatcactgaaggtagcaactttctcagtgggccagctctgtgatgtttttctgagacttattcctggaaacactgcctagagcctgctcctccagcccttccaacaatttcataaacacctaactccccacattaaattcctgtttcaacttgctagaagaggctcagttatctgcaattctaccgacacaaacaccttccacacccctcctcccgaggcagagttgataattctacactgtatgttactgagatgctttctgcagattctcaataaaacttttactacctgtattacaataattagtttccacgtctgtgtggccttctaaggtgtacctgcctggctct

SEQ ID NO: 981 - DNA, 3706 bp, Homo sapiens
agagcgcgggcgccgcagaggagttgggagccggcgcaaaagtttcctcccaactctggccccgtgcgccgccgccgccgccgcccagatgaaagtgaccgtgtgcttcggcaggacgggcatcgtggtgccctgcaaggagggccagctgcgcgtcggcgagctcacccagcaggcgctgcagcggtacctgaagacccgggagaagggtcctggttactgggtgaagattcatcacttagaatatacagatggaggaatcctggatccagatgatgtcttggcagatgttgttgaagataaagacaagctgattgctgtgtttgaagaacaagaaccactccacaagattgagagccccagtggaaaccctgcagatcggcagagcccagatgcttttgagacagaagtggccgcccaactggctgcatttaagccaattggtggggagattgaagtaaccccttctgctctaaaactaggcactccactgctggtgaggagaagcagtgacccagtgccaggcccacctgctgatacccagccaagcgcttcacaccctggtggccagagtctgaaactggttgttccagattccacgcagaacttggaagacagagaagttttgaatggtgtacagacagaactactaacttcgccaagaactaaggacacattgagtgatatgacaagaacagtggagatttctggggaaggaggcccattgggaatacatgtagtgcccttcttttcatctctgagtggaaggattctaggactcttcatccgaggcattgaagacaacagcaggtccaagcgggagggactatttcacgaaaatgaatgtattgtaaaaatcaacaatgtggatctcgtagacaaaacctttgctcaggctcaagatgtcttccgccaggcaatgaaatctccaagtgtgctcctccacgtgcttcctccacaaaaccgtgaacagtatgaaaagtcagtcattggctctcttaacatttttggtaataatgatggcgttttgaaaaccaaagtgccgcctcctgtccatggaaaatcgggactaaagacagcaaatctcacaggaaccgatagtcctgaaacagatgcatcagcttccctgcaacaaaacaagagtccccgagtaccaaggctgggaggaaaaccatcctctccctcactctcgcctctcatgggatttggcagcaataaaaatgcaaagaaaattaagattgacctaaagaaaggccctgaaggacttggtttcactgtggttaccagagactcttccatacatggtcccggtcccatttttgtaaaaaacattttaccaaagggagcagcaataaaagatggccgcctacaatcaggggacagaattttggaggtaaatgggagagatgtcactggacgaacccaggaagagcttgtggccatgctcaggagcaccaagcagggggagacagcatcgctggtcattgcccgccaagaaggacattttctgccccgagagttgaaaggagaacctgactgctgtgcactctctctggagacaagcgagcagctcacctttgagatccccctgaatgattcaggttctgctggcctcggggtgagcttaaaagggaacaaatccagagaaactggaacagacttggggatttttatcaaatccatcattcatggaggcgctgcttttaaggatggtcgtctgcgaatgaatgaccagctgattgcagttaatggggaatctcttttgggaaagtccaaccacgaagctatggaaacacttaggcggtcaatgtccatggagggaaacatccgagggatgatccagttggtgattctgaggaggccagagagaccaatggaggatcctgcagagtgtggggcattttccaagccatgctttgagaactgtcaaaatgctgtaaccacctctaggcgaaatgataatagtatcctgcatccacttggcacttgcagtccacaagacaaacagaaaggtctattgctgcccaatgacggatgggccgagagtgaagttccaccttctccaacaccacattctgctctgggattgggcctcgaagattacagccacagctctggggtggattcagcagtatattttccagatcagcacatcaacttcagatctgtgacaccggccaggcagcctgaatcaattaatttgaaagcctcgaagagcatggaccttgtgccagatgaaagcaaggttcactcattggctggacaaaaatcggaatctccaagcaaagattttggtccaactctgggtttgaaaaagtccagctccttggagagtctgcagactgcagtggccgaggtcaggaagaatgaccttccctttcacaggccccggccgcacatggttcgaggccgaggctgcaatgagagctttagagcagccattgacaaatcctacgatggacctgaagaaatagaagctgacggtctgtctgataagagctctcactctggccaaggagctctgaattgtgagtctgcccctcaggggaattcggagctagaggacatggaaaataaagccaggaaagtcaaaaaaacgaaagagaaggagaagaaaaaggaaaagggcaaattgaaagtcaaggagaaaaagcgcaaagaggagaatgaagatccagaaaggaaaataaagaagaagggcttcggcgccatgctgagatttggaaagaagaaagaggataagggtggaaaggctgagcagaaaggtactctgaaacatggtggcctgagagaagaagagctggagaaaatgaaagaagagcgtgaaaggattggagcaaaacatcaggagctaagggaaaagcaggcaagaggtcttcttgattatgctactggtgcaattggatcagtgtatgatatggatgatgatgaaatggaccccaattatgccagagtgaaccactttcgggaaccatgcacatcagcaaatgtctttagatctccatctccccctcgagctggaccatttggttaccctcgggatggccatccactgtctccagaaagagaccacttagagggtctctatgccaaggtcaacaagccataccatccactggttccagctgacagtggccgtcctacgggtggaagcactgaccgtatccagaagttgcggaaagagtattatcaggctcggagggaaggtttccctttatatgaagacgacgaaggaagagcaaggccatctgagtatgacctactctgggtgcctggaaggggtccagatgggaatgcacacaacctccgctttgaagggatggagaggcagtacgcatccttacccaggggaggacccgcagatcctgtagactatctgccagcagcacctcgggggctctacaaggaaagggagcttccctattatccaggggctcatcctatgcaccctcccaaagggagctatccccgccccacagagctcagggtggcagatctccggtatcctcagcactacccacccccgccagctccccagcacaaaggaccctttcgacaagacgttccgccttcccctccccagcaccaaagaatgccagcctatcaggaaacaggcagaccagggccccgtgggggcagcccagaccagtacccttaccgaacccaggattcccggcagaagaaccccatgactgcagccgtatag

SEQ ID NO: 982 - protein, 1195 aa, Homo sapiens
MKVTVCFGRTGIVVPCKEGQLRVGELTQQALQRYLKTREKGPGYWVKIHHLEYTDGGILDPDDVLADVVEDKDKLIAVFEEQEPLHKIESPSGNPADRQSPDAFETEVAAQLAAFKPIGGEIEVTPSALKLGTPLLVRRSSDPVPGPPADTQPSASHPGGQSLKLVVPDSTQNLEDREVLNGVQTELLTSPRTKDTLSDMTRTVEISGEGGPLGIHVVPFFSSLSGRILGLFIRGIEDNSRSKREGLFHENECIVKINNVDLVDKTFAQAQDVFRQAMKSPSVLLHVLPPQNREQYEKSVIGSLNIFGNNDGVLKTKVPPPVHGKSGLKTANLTGTDSPETDASASLQQNKSPRVPRLGGKPSSPSLSPLMGFGSNKNAKKIKIDLKKGPEGLGFTVVTRDSSIHGPGPIFVKNILPKGAAIKDGRLQSGDRIVNGRDVTGRTQEELVAMLRSTKQGETASLVIARQEGHFLPRELKGEPDCCALSLETSEQLTFEIPLNDSGSAGLGVSLKGNKSRETGTDLGIFIKSIIHGGAAFKDGRLRMNDQLIAVNGESLLGKSNHEAMLRRSMSMEGNIRGMIQLVILRRPERPMEDPAECGAFSKPCFENCQNAVTTSRRNDNSILHPLGTCSPQDKQKGLLLPNDGWAESEVPPSPTPHSALGLGLEDYSHSSGVDSAVYFPDQHINFRSVTPARQPESINLKASKSMDLVPDESKVHSLAGQKSESPSKDFGPTLGLKKSSSLESLQTAVAEVRKNDLPFHRPRPHMVRGRGCNESFRAAIDKSYDGPEEIEADGLSDKSSHSGQGALNCESAPQGNSELEDMENKARKVKKTKEKEKKKEKGKLKVKEKKRKEENEDPERKIKKKGFGAMLRFGKKKEDKGGKAEQKGTLKHGGLREEELEKMKEERERIGAKHQELREKQRLLDYATGAIGSVYDMDDDEMDPNYARVNHFREPCTSANVFRSPSPPRAGPFGYPRDGHPLSPERDHLEGAKVNKPYHPLVPADSGRPTGGSTDRIQKLRKEYYQARREGFPLYEDDEGRARPSEYDLLWVPGRGPDGNAHNLRFEGMERQYASLPRGGPADPVDYLPAAPRGKERELPYYPGAHPMHPPKGSYPRPTELRVADLRYPQHYPPPPAPQHKGPFRQDVPPSPPQHQRMPAYQETGRPGPRGGSPDQYPYRTQDSRQKNPMTAAV

SEQ ID NO: 983 - DNA, 3520 bp, Homo sapiens
agagcgcgggcgccgcagaggagttgggagccggcgcaaaagtttcctcccaactctggccccgtgcgccgccgccgccgccgcccagatgaaagtgaccgtgtgcttcggcaggacgggcatcgtggtgccctgcaaggagggccagctgcgcgtcggcgagctcacccagcaggcgctgcagcggtacctgaagacccgggagaagggtcctggttactgggtgaagattcatcacttagaatatacagatggaggaatcctggatccagatgatgtcttggcagatgttgttgaagataaagacaagctgattgctgtgtttgaagaacaagaaccactccacaagattgagagccccagtggaaaccctgcagatcggcagagcccagatgcttttgagacagaagtggccgcccaactggctgcatttaagccaattggtggggagattgaagtaaccccttctgctctaaaactaggcactccactgctggtgaggagaagcagtgacccagtgccaggcccacctgctgatacccagccaagcgcttcacaccctggtggccagagtctgaaactggttgttccagattccacgcagaacttggaagacagagaagttttgaatggtgtacagacagaactactaacttcgccaagaactaaggacacattgagtgatatgacaagaacagtggagatttctggggaaggaggcccattgggaatacatgtagtgcccttcttttcatctctgagtggaaggattctaggactcttcatccgaggcattgaagacaacagcaggtccaagcgggagggactatttcacgaaaatgaatgtattgtaaaaatcaacaatgtggatctcgtagacaaaacctttgctcaggctcaagatgtcttccgccaggcaatgaaatctccaagtgtgctcctccacgtgcttcctccacaaaaccgtgaacagtatgaaaagtcagtcattggctctcttaacatttttggtaataatgatggcgttttgaaaaccaaagtgccgcctcctgtccatggaaaatcgggactaaagacagcaaatctcacaggaaccgatagtcctgaaacagatgcatcagcttccctgcaacaaaacaagagtccccgagtaccaaggctgggaggaaaaccatcctctccctcactctcgcctctcatgggatttggcagcaataaaaatgcaaagaaaattaagattgacctaaagaaaggccctgaaggacttggtttcactgtggttaccagagactcttccatacatggtcccggtcccatttttgtaaaaaacattttaccaaagggagcagcaataaaagatggccgcctacaatcaggggacagaattttggaggtaaatgggagagatgtcactggacgaacccaggaagagcttgtggccatgctcaggagcaccaagcagggggagacagcatcgctggtcattgcccgccaagaaggacattttctgccccgagagttggatggtcgtctgcgaatgaatgaccagctgattgcagttaatggggaatctcttttgggaaagtccaaccacgaagctatggaaacacttaggcggtcaatgtccatggagggaaacatccgagggatgatccagttggtgattctgaggaggccagagagaccaatggaggatcctgcagagtgtggggcattttccaagccatgctttgagaactgtcaaaatgctgtaaccacctctaggcgaaatgataatagtatcctgcatccacttggcacttgcagtccacaagacaaacagaaaggtctattgctgcccaatgacggatgggccgagagtgaagttccaccttctccaacaccacattctgctctgggattgggcctcgaagattacagccacagctctggggtggattcagcagtatattttccagatcagcacatcaacttcagatctgtgacaccggccaggcagcctgaatcaattaatttgaaagcctcgaagagcatggaccttgtgccagatgaaagcaaggttcactcattggctggacaaaaatcggaatctccaagcaaagattttggtccaactctgggtttgaaaaagtccagctccttggagagtctgcagactgcagtggccgaggtcaggaagaatgaccttccctttcacaggccccggccgcacatggttcgaggccgaggctgcaatgagagctttagagcagccattgacaaatcctacgatggacctgaagaaatagaagctgacggtctgtctgataagagctctcactctggccaaggagctctgaattgtgagtctgcccctcaggggaattcggagctagaggacatggaaaataaagccaggaaagtcaaaaaaacgaaagagaaggagaagaaaaaggaaaagggcaaattgaaagtcaaggagaaaaagcgcaaagaggagaatgaagatccagaaaggaaaataaagaagaagggcttcggcgccatgctgagatttggaaagaagaaagaggataagggtggaaaggctgagcagaaaggtactctgaaacatggtggcctgagagaagaagagctggagaaaatgaaagaagagcgtgaaaggattggagcaaaacatcaggagctaagggaaaagcaggcaagaggtcttcttgattatgctactggtgcaattggatcagtgtatgatatggatgatgatgaaatggaccccaattatgccagagtgaaccactttcgggaaccatgcacatcagcaaatgtctttagatctccatctccccctcgagctggaccatttggttaccctcgggatggccatccactgtctccagaaagagaccacttagagggtctctatgccaaggtcaacaagccataccatccactggttccagctgacagtggccgtcctacgggtggaagcactgaccgtatccagaagttgcggaaagagtattatcaggctcggagggaaggtttccctttatatgaagacgacgaaggaagagcaaggccatctgagtatgacctactctgggtgcctggaaggggtccagatgggaatgcacacaacctccgctttgaagggatggagaggcagtacgcatccttacccaggggaggacccgcagatcctgtagactatctgccagcagcacctcgggggctctacaaggaaagggagcttccctattatccaggggctcatcctatgcaccctcccaaagggagctatccccgccccacagagctcagggtggcagatctccggtatcctcagcactacccacccccgccagctccccagcacaaaggaccctttcgacaagacgttccgccttcccctccccagcaccaaagaatgccagcctatcaggaaacaggcagaccagggccccgtgggggcagcccagaccagtacccttaccgaacccaggattcccggcagaagaaccccatgactgcagccgtatag

SEQ ID NO: 984 - protein, 1133 aa, Homo sapiens
MKVTVCFGRTGIVVPCKEGQLRVGELTQQALQRYLKTREKGPGYWVKIHHLEYTDGGILDPDDVLADVVEDKDKLIAVFEEQEPLHKIESPSGNPADRQSPDAFETEVAAQLAAFKPIGGEIEVTPSALKLGTPLLVRRSSDPVPGPPADTQPSASHPGGQSLKLVVPDSTQNLEDREVLNGVQTELLTSPRTKDTLSDMTRTVEISGEGGPLGIHVVPFFSSLSGRILGLFIRGIEDNSRSKREGLFHENECIVKINNVDLVDKTFAQAQDVFRQAMKSPSVLLHVLPPQNREQYEKSVIGSLNIFGNNDGVLKTKVPPPVHGKSGLKTANLTGTDSPETDASASLQQNKSPRVPRLGGKPSSPSLSPLMGFGSNKNAKKIKIDLKKGPEGLGFTVVTRDSSIHGPGPIFVKNILPKGAAIKDGRLQSGDRIVNGRDVTGRTQEELVAMLRSTKQGETASLVIARQEGHFLPRELDGRLRMNDQLIAVNGESLLGKSNHEAMLRRSMSMEGNIRGMIQLVILRRPERPMEDPAECGAFSKPCFENCQNAVTTSRRNDNSILHPLGTCSPQDKQKGLLLPNDGWAESEVPPSPTPHSALGLGLEDYSHSSGVDSAVYFPDQHINFRSVTPARQPESINLKASKSMDLVPDESKVHSLAGQKSESPSKDFGPTLGLKKSSSLESLQTAVAEVRKNDLPFHRPRPHMVRGRGCNESFRAAIDKSYDGPEEIEADGLSDKSSHSGQGALNCESAPQGNSELEDMENKARKVKKTKEKEKKKEKGKLKVKEKKRKEENEDPERKIKKKGFGAMLRFGKKKEDKGGKAEQKGTLKHGGLREEELEKMKEERERIGAKHQELREKQRLLDYATGAIGSVYDMDDDEMDPNYARVNHFREPCTSANVFRSPSPPRAGPFGYPRDGHPLSPERDHLEGAKVNKPYHPLVPADSGRPTGGSTDRIQKLRKEYYQARREGFPLYEDDEGRARPSEYDLLWVPGRGPDGNAHNLRFEGMERQYASLPRGGPADPVDYLPAAPRGKERELPYYPGAHPMHPPKGSYPRPTELRVADLRYPQHYPPPPAPQHKGPFRQDVPPSPPQHQRMPAYQETGRPGPRGGSPDQYPYRTQDSRQKNPMTAAV

SEQ ID NO: 985 - DNA, 3619 bp, Homo sapiens
gatgaaagtgaccgtgtgcttcggcaggacgggcatcgtggtgccctgcaaggagggccagctgcgcgtcggcgagctcacccagcaggcgctgcagcggtacctgaagacccgggagaagggtcctggttactgggtgaagattcatcacttagaatatacagatggaggaatcctggatccagatgatgtcttggcagatgttgttgaagataaagacaagctgattgctgtgtttgaagaacaagaaccactccacaagattgagagccccagtggaaaccctgcagatcggcagagcccagatgcttttgagacagaagtggccgcccaactggctgcatttaagccaattggtggggagattgaagtaaccccttctgctctaaaactaggcactccactgctggtgaggagaagcagtgacccagtgccaggcccacctgctgatacccagccaagcgcttcacaccctggtggccagagtctgaaactggttgttccagattccacgcagaacttggaagacagagaagttttgaatggtgtacagacagaactactaacttcgccaagaactaaggacacattgagtgatatgacaagaacagtggagatttctggggaaggaggcccattgggaatacatgtagtgcccttcttttcatctctgagtggaaggattctaggactcttcatccgaggcattgaagacaacagcaggtccaagcgggagggactatttcacgaaaatgaatgtattgtaaaaatcaacaatgtggatctcgtagacaaaacctttgctcaggctcaagatgtcttccgccaggcaatgaaatctccaagtgtgctcctccacgtgcttcctccacaaaaccgtgaacagtatgaaaagtcagtcattggctctcttaacatttttggtaataatgatggcgttttgaaaaccaaagtgccgcctcctgtccatggaaaatcgggactaaagacagcaaatctcacaggaaccgatagtcctgaaacagatgcatcagcttccctgcaacaaaacaagagtccccgagtaccaaggctgggaggaaaaccatcctctccctcactctcgcctctcatgggatttggcagcaataaaaatgcaaagaaaattaagattgacctaaagaaaggccctgaaggacttggtttcactgtggttaccagagactcttccatacatggtcccggtcccatttttgtaaaaaacattttaccaaagggagcagcaataaaagatggccgcctacaatcaggggacagaattttggaggtaaatgggagagatgtcactggacgaacccaggaagagcttgtggccatgctcaggagcaccaagcagggggagacagcatcgctggtcattgcccgccaagaaggacattttctgccccgagagttgaaaggagaacctgactgctgtgcactctctctggagacaagcgagcagctcacctttgagatccccctgaatgattcaggttctgctggcctcggggtgagcttaaaagggaacaaatccagagaaactggaacagacttggggatttttatcaaatccatcattcatggaggcgctgcttttaaggatggtcgtctgcgaatgaatgaccagctgattgcagttaatggggaatctcttttgggaaagtccaaccacgaagctatggaaacacttaggcggtcaatgtccatggagggaaacatccgagggatgatccagttggtgattctgaggaggccagagagaccaatggaggatcctgcagagtgtggggcattttccaagccatgctttgagaactgtcaaaatgctgtaaccacctctaggcgaaatgataatagtatcctgcatccacttggcacttgcagtccacaagacaaacagaaaggtctattgctgcccaatgacggatgggccgagagtgaagttccaccttctccaacaccacattctgctctgggattgggcctcgaagattacagccacagctctggggtggattcagcagtatattttccagatcagcacatcaacttcagatctgtgacaccggccaggcagcctgaatcaattaatttgaaagcctcgaagagcatggaccttgtgccagatgaaagcaaggttcactcattggctggacaaaaatcggaatctccaagcaaagattttggtccaactctgggtttgaaaaagtccagctccttggagagtctgcagactgcagtggccgaggtcaggaagaatgaccttccctttcacaggccccggccgcacatggttcgaggccgaggctgcaatgagagctttagagcagccattgacaaatcctacgatggacctgaagaaatagaagctgacggtctgtctgataagagctctcactctggccaaggagctctgaattgtgagtctgcccctcaggggaattcggagctagaggacatggaaaataaagccaggaaagtcaaaaaaacgaaagagaaggagaagaaaaaggaaaagggcaaattgaaagtcaaggagaaaaagcgcaaagaggagaatgaagatccagaaaggaaaataaagaagaagggcttcggcgccatgctgagatttggaaagaagaaagaggataagggtggaaaggctgagcagaaaggtactctgaaacatggtggcctgagagaagaagagctggagaaaatgaaagaagagcgtgaaaggattggagcaaaacatcaggagctaagggaaaagcaggcaagaggtcttcttgattatgctactggtgcaattggatcagtgtatgatatggatgatgatgaaatggaccccaattatgccagagtgaaccactttcgggaaccatgcacatcagcaaatgtctttagatctccatctccccctcgagctggaccatttggttaccctcgggatggccatccactgtctccagaaagagaccacttagagggtctctatgccaaggtcaacaagccataccatccactggttccagctgacagtggccgtcctacgggtggaagcactgaccgtatccagaagttgcggaaagagtattatcaggctcggagggaaggtttccctttatatgaagacgacgaaggaagagcaaggccatctgagtatgacctactctgggtgcctggaaggggtccagatgggaatgcacacaacctccgctttgaagggatggagaggcagtacgcatccttacccaggggaggacccgcagatcctgtagactatctgccagcagcacctcgggggctctacaaggaaagggagcttccctattatccaggggctcatcctatgcaccctcccaaagggagctatccccgccccacagagctcagggtggcagatctccggtatcctcagcactacccacccccgccagctccccagcacaaaggaccctttcgacaagacgttccgccttcccctccccagcaccaaagaatgccagcctatcaggaaacaggcagaccagggccccgtgggggcagcccagaccagtacccttaccgaacccaggattcccggcagaagaaccccatgactgcagccgtatag

SEQ ID NO: 986 - protein, 1195 aa, Homo sapiens; identical to SEQ ID NO: 982

SEQ ID NO: 987 - DNA, 2518 bp, Homo sapiens
agagcgcgggcgccgcagaggagttgggagccggcgcaaaagtttcctcccaactctggccccgtgcgccgccgccgccgccgcccagatgaaagtgaccgtgtgcttcggcaggacgggcatcgtggtgccctgcaaggagggccagctgcgcgtcggcgagctcacccagcaggcgctgcagcggtacctgaagacccgggagaagggtcctggttactgggtgaagattcatcacttagaatatacagatggaggaatcctggatccagatgatgtcttggcagatgttgttgaagataaagacaagctgattgctgtgtttgaagaacaagaaccactccacaagattgagagccccagtggaaaccctgcagatcggcagagcccagatgcttttgagacagaagtggccgcccaactggctgcatttaagccaattggtggggagattgaagtaaccccttctgctctaaaactaggcactccactgctggtgaggagaagcagtgacccagtgccaggcccacctgctgatacccagccaagcgcttcacaccctggtggccagagtctgaaactggttgttccagattccacgcagaacttggaagacagagaagttttgaatggtgtacagacagaactactaacttcgccaagaactaaggacacattgagtgatatgacaagaacagtggagatttctggggaaggaggcccattgggaatacatgtagtgcccttcttttcatctctgagtggaaggattctaggactcttcatccgaggcattgaagacaacagcaggtccaagcgggagggactatttcacgaaaatgaatgtattgtaaaaatcaacaatgtggatctcgtagacaaaacctttgctcaggctcaagatgtcttccgccaggcaatgaaatctccaagtgtgctcctccacgtgcttcctccacaaaaccgtgaacagtatgaaaagtcagtcattggctctcttaacatttttggtaataatgatggcgttttgaaaaccaaagtgccgcctcctgtccatggaaaatcgggactaaagacagcaaatctcacaggaaccgatagtcctgaaacagatgcatcagcttccctgcaacaaaacaagagtccccgagtaccaaggctgggaggaaaaccatcctctccctcactctcgcctctcatgggatttggcagcaataaaaatgcaaagaaaattaagattgacctaaagaaaggccctgaaggacttggtttcactgtggttaccagagactcttccatacatggtcccggtcccatttttgtaaaaaacattttaccaaagggagcagcaataaaagatggccgcctacaatcaggggacagaattttggaggtaaatgggagagatgtcactggacgaacccaggaagagcttgtggccatgctcaggagcaccaagcagggggagacagcatcgctggtcattgcccgccaagaaggacattttctgccccgagagttgaaaggagaacctgactgctgtgcactctctctggagacaagcgagcagctcacctttgagatccccctgaatgattcaggttctgctggcctcggggtgagcttaaaagggaacaaatccagagaaactggaacagacttggggatttttatcaaatccatcattcatggaggcgctgcttttaaggatggtcgtctgcgaatgaatgaccagctgattgcagttaatggggaatctcttttgggaaagtccaaccacgaagctatggaaacacttaggcggtcaatgtccatggagggaaacatccgagggatgatccagttggtgattctgaggaggccagagagaccaatggaggatcctgcagagtgtggggcattttccaagccatgctttgagaactgtcaaaatgctgtaaccacctctaggcgaaatgataatagtatcctgcatccacttggcacttgcagtccacaagacaaacagaaaggtctattgctgcccaatgacggatgggccgagagtgaagttccaccttctccaacaccacattctgctctgggattgggcctcgaagattacagccacagctctggggtggattcagcagtatattttccagatcagcacatcaacttcagatctgtgacaccggccaggcagcctgaatcaattaatttgaaagcctcgaagagcatggaccttgtgccagatgaaagcaaggttcactcattggctggacaaaaatcggacggtctgtctgataagagctctcactctggccaaggagctctgaattgtgagtctgcccctcaggggaattcggagctagaggacatggaaaataaagccaggaaagtcaaaaaaacgaaagagaaggagaagaaaaaggaaaagggcaaattgaaagtcaaggagaaaaagcgcaaagaggagaatgaagatccagaaaggaaaataaagaagaagggcttcggcgccatgctgaggtatggg

SEQ ID NO: 988 - protein, 806 aa, Homo sapiens
MKVTVCFGRTGIVVPCKEGQLRVGELTQQALQRYLKTREKGPGYWVKIHHLEYTDGGILDPDDVLADVVEDKDKLIAVFEEQEPLHKIESPSGNPADRQSPDAFETEVAAQLAAFKPIGGEIEVTPSALKLGTPLLVRRSSDPVPGPPADTQPSASHPGGQSLKLVVPDSTQNLEDREVLNGVQTELLTSPRTKDTLSDMTRTVEISGEGGPLGIHVVPFFSSLSGRILGLFIRGIEDNSRSKREGLFHENECIVKINNVDLVDKTFAQAQDVFRQAMKSPSVLLHVLPPQNREQYEKSVIGSLNIFGNNDGVLKTKVPPPVHGKSGLKTANLTGTDSPETDASASLQQNKSPRVPRLGGKPSSPSLSPLMGFGSNKNAKKIKIDLKKGPEGLGFTVVTRDSSIHGPGPIFVKNILPKGAAIKDGRLQSGDRIVNGRDVTGRTQEELVAMLRSTKQGETASLVIARQEGHFLPRELKGEPDCCALSLETSEQLTFEIPLNDSGSAGLGVSLKGNKSRETGTDLGIFIKSIIHGGAAFKDGRLRMNDQLIAVNGESLLGKSNHEAMLRRSMSMEGNIRGMIQLVILRRPERPMEDPAECGAFSKPCFENCQNAVTTSRRNDNSILHPLGTCSPQDKQKGLLLPNDGWAESEVPPSPTPHSALGLGLEDYSHSSGVDSAVYFPDQHINFRSVTPARQPESINLKASKSMDLVPDESKVHSLAGQKSDGLSDKSSHSGQGALNCESAPQGNSELEDMENKARKVKKTKEKEKKKEKGKLKVKEKKRKEENEDPERKIKKKGFGAMLRYG

SEQ ID NO: 989 - DNA, 90070 bp, Mus musculus
  misc_feature (1)...(90070): n = A, C, G or T/U
attttatggaatggaaacaaaacttctaaatataacccagctgtgtcagaatcgggtcctcaggaaggcaacgccttggtagagccaacaggattctggctgcaatacagaaaatatagatgtacccaagccaggcctgttccatctgagggagacctgctgagtgcaccaaacagccagaaggttaaagtttgagctttagcggcattcattcaacaaatatttgggtattacctatgtatcagccactcttttagatattatagataaagtaggaattgtggggtagtgcctatcctgcagaatgaaaacaataaacaataattgaattagcatatagaacactggaaagcaatggtactatgaagaaaaagaaagcaagtgttgtgtagatactgaatcacagcctcccagagccaggagctaagactctagaagctaaggcaacatgtaaggcttgagaaactcagaaatttctaagattcacaaggctgctctccaaggttatataagcagtgaacaggtatgggggaggtgcctgaagctgcagctgtcagccacattggggatggcttatgatgatgcaattgccttctggttactggtattcctataagtcaacaagctagacgtaagttctctctctctctctctctctctctctctctctcagatgaagagatatttgttcacattttcccaggtcatataacagtgagaaagggagagacaggcagagaaaatgagcagaagggtggagatgggaggaagcaggaaggaggcaagagtcagctccctacagtctgtaagtacaagagtctctgtggagcacaagcctaaaaatgtgaggataaagagagaatattctaattaacagctaacagacatatccaagtgtgatggctattcctgattgccaacttgattacatctggaatgaactacaatccagaaatggagggcacacccgtgatccagatcttgaagctggaagacacaggtctgacccagatcttgacacacacttttgatccagatcgtgaggcctaggcaacatagtataggcctttaatcccaggagatagagaaaagcaaatctctctagttcagggccagccttggacagagcaagttccaaatccagacatggaggtacacacctttaatcttggtcataccttctgctggaggcctatataaagacaatggaagatggaaggctctctctcctttggctgcttgcacttacttgccagcacatctgttagaacctacttcttcagtattccagcctatacagaagaccagctaaaccacctacccgcatgggactgagaaactactagattcttggattcccattgttgggttagttggactgcaggctataagtcattctaataatttcccttaatgtacagagacattccataagttctgtgactctagagaaccatgactagtataccaaggtcaaaagaaaatgaacagaaatcatcatgatatatgatgatgcccttggctgttgggtgaagagcacatgatcagctccttagtcggaccagggacatgcacagtgtgtgtgtgtgtgtgtgtatacaaatgcccattggtttagccagcaacatgcccagagaattaacttaataaaaagtacctcagtcattgtccattctgccactgttctcagaaaaggctgctgaactacaccactcagcagtctctctcttgggattccatccactctccagagtctttcctgtttttccttaataaacttcacttcgttaactcccttgtctgtttatgtctcatatcagtgtgagacaacaaattcaagagccaccagctcaggctcaatctgttgaccactaataatccagcatctaagttctctgggttaagctcaccagcacgagaaaggccttattattctcaaagatttatctacattaagatggtgggtttgaataagaatgggccccatagactcatttgaatgcttggtcacagggagtggcactgttaggaggtgtggccttgttgaggtaggcgtggccttttggaggaagtgtgttactaggggtgggctttgaggttgcagaagcctaagccaggccctgtgtctctcttcctgctgcctgaggatctggatgtagaactctttgctccttctccagcaccttgtctgtctgcatgcaactgtgcctctagccatgatggtaatggtctaaatctctgaacttacatgccagcctcagtgaaatgtttttcttgataagagtagaaccctgggaattaatctggttgagaatttacctccaaaaaaaggaactagaacaacagaaaaattgtactaaagctgtaagaagaggtagatataaagggtttttgatactcctggggtttttaatttctaattctcattcatcttaccccacctctctctcatgtatgtgtatgtgtgaatgtgtgtgtgtgtgtgtatatatatatatatatatatatatatatatatatatatatatatatatatatatattaagatacaacacatgaattaatgggggaaaagggtaactggtaaacagatcaataatagttgtgaatagatcagtgatttctctgtattgaaagtcaaaatcacagatgacttattaagcatttataacattccctccttacactaatttcaactatgaataaatagtcccacacatccatctaccctgcaggggaagcagtggtgaatgaaccagatgtttgaaatgtctccatagggcacatcccccaagggaaactctaaccacccattcactctctcattcaagaaacactgttgaagtcaggaatcttgaacatctattatgtgccagttactagtgaaacaagttcaataacataagctttgccttcaaagatttcatgggataaagcatgtgagcaagtgaatgaatgtgtaattagaaatctctaatagataaatacatgtatgtggtggtttaaatggaaatgctcctcagagccccatatatttgactattttgttcccagttggtgggactgtttaggaaggattagaaggtggccttgttggaataggtgtggtcttggaggaagtgtgtcattgtgggtgggctttgaggtttcaaacacccaaggcaggcctagtgtgtctctctcttccttctgcttatggatctggatgtagaactctcagctatttctccagcacaatgcctgtctgcatgctgtcattttcctcaccatgatgataatggaccaaacctctgaaactgtaagccagccccatattaaatgcttcctttgaaaaagagttgctacagtcatggtgtcccttctcagcaatagaacatacactgtccgtcagctactgctctagtgccatgcctacctgcctgctaccatattctttgtcatgatgatcatgaattctactactttttggaactgtgagctccaaattaaatgttttataagttgccttagtcgtggtgtctcttcacagtgataaaaaagtaactaagacattgtgcatatagaattaagacattgtacatataagaggcaatggtgaattacatggtttactattttgttttggagacatttgtgccattcatgttgttgaggctcttaaagagaaatatttaagatttcaattgttgtatttgtccttaaattttactaaattagatgaaaaatcccttgtcttcattttgattgtggaagtaaccaagaaaataaactgactcaaaacagacaagagaaaagccccaataaaacttcagacccacttggtggaaagattgggaggatatgacagtgttggctctttgaaaaaaaaaaaaaaaccttttgagtataaagggaacagtttaacgtaccaaaaggaagaagtaagggatgccatggcaggtttctcaagatgctttgtaacaatccaggaaagagatgaaggttgatatggaccaggctcatgtgtacccagatatctttaaggtaccaaggaggtttccttttgggtgagatgtggaacaaagataggttctatcagtgagccaacattttaacctaagtaagacaggaaaggctaaagctacgtgatgaaataaccactgtattttgaacagattgaatttaaagtctagtaaccatttgttgtaccttagatggtcccagctttgcttgtggttctttggggcctttggctactgtcctacagctgctgaacaactgacctcttgcagtagacccaatagcactctgccttgtgcccaggcaggcgatgcatcttgaaagagttggacatccacacaaaatagaagttggtgtgcatcactgagatggagggagagtggtataagcatgcctttgactgaatcctgacctgttcttttctccaatgtcctgagattctgctctctaagaaaatagtacggaggcttttccctcaagttctgcctcctgggagaacataaaagacaatatctaagtggatagatgtgttggtgttgggaggagggtgttgtttaaatgagccacagtttgagagagtgattttgtaagatgaaagcttaagtgttgtgaacatagacaccaaaggcatgatgggcaatgggtgccatcatgatactggttgacaatacaaaagaatgaagaaaaagcagacagtttgaatattttggtccctgtgagagcagagacaataagttctattcactgttgtccctccaatttctagaaaagtacatggtacaaagttggtgttcaacagagaattttaacttgaatgaagtagattgtcctggccttggggttagataggaaagaaaatcaagccatagaagtgatgaattggaataggcaggttcaaggaacttgaaccccatgaagtttgtgaaaattaggtctaacagcagaagcaagagaggaaaataacagaaaaaggaagctgtggttagagaaaagctctcaagtacactttctgcttgaagccttttatactcatctcaggggatgttcccccctcctgcacctctttgaagatactgcatcttttactgtgtcaagttctatccacatggcctactttcatctctttcttcacccctaatatggaccttatcttccaagagactgaatttgaaaaatagaggtgacttcaagtcccaggcacacaaattgtgtgtttgaaagtttagcattcctggtttgtgtctaagatgtacagactgaagctaaagcagggtatacatgaggaggctggatttcaaatttagatggtgcccaaaagtacagcaaaataacttgcctggtatgaatgagttcacctgggtacagaggccactagacagaaaagaacatgacttaactgagtcccactggtctgatagtatgatccaggtggaaaagaccagacaggcctgctttagaaggcactttagaatttgacaaaatgtggaacaaataaggcctaaatagaggtcaatgtgaataaaagggaaaggtgcacaaaaaaaaaaaaacaaggttaaactaaggttaaaagtttggcaagtgtcttagtttgtttcctattgctgtgataaatactgcctccaaaccaacttggagcagaaatggtttatttcagcttacaactcccaggtcaatagttcaacaaagagaaggcaggaattcaaggcaggaactgaagcccaggccatagaggaatgttgtttaatggcttgctctccaatggcttgttcaggttgcttttttatacagtccagggctacctgagtagggatgacactgcccacagtgggctgccgccttcccttcccgtcaatcattaaccaagaaaatgttgtattctcagttgaggttccttcttcccagattctagcttgtgttaagctgacaataaaacaaaacaaatgatcccaaagggtattatggcatggacaggcaattgtaagatgttaggattatctataaggccagagtaagaaaaatatcaggatgacgacaaacctaaatgcttaaaaaacgtttgacataagaacaagaaagccaaataaagttagtagtagccaacacttttatgaattcaagacacatgaaacactgtgcttagtacaccttaattatcttatttcagcttcacaacagcattatgacgtaggtgctactttattttacagatgggagacagagtcacaagagtaagcaatttacccagtgtcattagctaagtggctgaactagtacaacaaatcaaatatttgtgttcacactgaaatcttacccaccaacatattactcagcttgctttctttctttcttttttctttctttctttctttctttctttctttctttctttctttcttccttccttccttccttccttcctttctttctttctttctttctttggtttttcaagacagggtttccctggctgtcctggaactcactttgtagaccaggctggcctcgaactcagaaatccgcctgcctctgcctcccaagtgctgggattaaaggcgtgcgccaccacgcccagctttcagcttgctttcttatatagcctagtactatgtgcctaggagtggaaccgcccacagtaggctggacactcccacatcaatcattaattaagaatatgcccccaaaacatgcccacagagcagtctgatcgagccaattcctcagctgagactctcttaccaggtatgtctaggtttgtgtcaaattgacaaaaaactagccagtataataaccttaaagacttatttaatatgtctctgcctgcatatatgtatttatatgcattaagtatgtgcctggtgcccataggagccataagagaatggggagtgaaatcctgagtgtatgtattgttgagaggagcatagccatattaaggacaccaagacctcagatccatgggaatggcaaggccctccccttgtcctaggtatggatggtcactgacaaacggttgtcatttagctaagaccagtacatgcagaaagtagctactgcaacttcctcatgcctatgactgcagccccagactgctccccgacagcccccctcttttgtgctgtatataataaatgtgctatgccccagctgttggtggtacatcttcatccaagcacagacctagcccatcccagattttcattctgtgtgcccatcatttcttcatttcctgtcaccccactcaggtcaactgtaaagttgtacaggttgagggagcagagagcacaagatcccctgggactgcagctacaggctgttgcaagctgccatgtgggcgctagaaaggaacctggttcctctgcaattgctcttaattgctgacacatctttccacccaatcagtaccgttacaaaaggaacctgagagttcttgacctctttcacattgtgaagctacatggagaagatgcccacttgcactcccgacgatggacacattcagagcctgcccatactggtagtttgctctcagacttccagattctagaactgggagaaacttgtttacaagctgctaatgctttattataacaagccatgctcactaagagtcagcatttgaacccaaagatgatatatataatatatatatataaatctggacccatacagaaactcattgtttgttcaataaacatttagtgagccctgctgtattctagacatcatgacatcatgttcctggggatgggaaagaagggaagcaggcagttaaaaggtagagggactcgtgctatagaaacatgctacaagaagaatggacaaagaatcacaggagtgaagaatcagaagagacagtgatagtctatgtcttggtaagagtaaagcattctggggaaagaggatgacaagagcaaagcctggaggtgagagcctgacttgggagggaaagcgggagaagagcctgcaaataaagagactagtaaatacggctggggaacagaaagtaaaggagacagatggaggagggacaagagacaagtccagagaatggtgctaaagccagtgttgatgaagcaaaagggaagccacttgcagggctttaggaaaggcagtgatctaactgaatctgactggcaaatagactggagtgaggcaggggcagttttagaggatgtgggtagtggccactgcaggactccaggcaagagacgaaggcagcttaaaagactggtggagaaggcatggggacacagctcatacacccaagttttcaggaagcaggcaatccaggggagcctaattggtatcagaagtggactcggttcccaatgtatctgaatgatgtcctgaccctttactgagctaagaaccgtgggaggaagggatatgagaactcgaggtgagtaagactacacactgagcatctagccaaacggacccggagcagaggctgctgggaagaggaattcagagtcccagggtgagacctaactaagactggagtgtctgagagaaggcatttgaagccagtagaagaggatgagaccacctagggcaagagattacagtaggattgtggaggatccgggctcagatgactcctgcacaggagttagataaaggagaatctagttgttgaggagtagggttaaaaggaaaactggcaagtgaagaggggagagagtgtttggaagagtcaaacagcatcaaatgctaggatggtcttgaaaatgcaagatgcaaaactacatagacaggaagactgtgacaattcagagccactgcaaatggagagagacagtaaaagacaggtggaactcggaaaggagcttaaggaggaagtttctatattttatttattgcccacacatactactgtgatgtaagtgctgaggtcaaaggacaacttatgggagctggttctctccttctaccacgtgggttctcgaaattgaccttagattatctggcttggtggcaagggcctttattcatctcaccaatgccacaagagtcttcttaaagagaggaagagacgttagcatgctaaaagttctggttagaaacaaaagaaaattaagctactcttcagtataatgtccttgggaaagcgggaacggctaggacacacggaatgaaggcaagctcagtgttataaaacgtcaacaagggctggcgtccagcaggaacaaaactataggaagagggctgaacggcacaacaacaaaaggtgaagaactggcggttaggggcaactcagagagcagttgcggtagctttgaggctacggaagtcacactgtcaagttctggggtgcaaacggtggaagccacgccgcagcagcgtgccaccgctgcagaaagggctgagaaaagtcagcacaggatgtcgcgggcaggtagggtggggatctgtttcaagtgttgagagcagcatggctgatcatttctccagcctcagagggaggacggtacccagtacctaggggctctggctggccgcaaagcggagctgaatccccacatgccacctgtgccatagctttcttcccagcaaagaaccagctccggcccggcagactcccctggccggtagccggcgtctccaaccttccagcgccgtccgcgcggctctgggccctcgcggcgcgtcaaagttcccgggcggtctgcttccgccgcaggatcagaccgcgcgggggtttccagcaagtccccgccaccccgggaatccccacaccaccccaaatctggctacacacaaaccccgcttcctccaaatctcctcagctggcgtccgaagcctccacccgccacagtgaggctcggatcgtgcctccagagcgggtctcaaaccgcctacaccagcttccccggtcaaccccttcgcagcgccgggaagtagccgaaggccttcggcaggttccgccagtagcgcgggggcggggcctgtcgagcggctccgggtcgagctcggctgtttccgtgagtggccgctgcgcactcggcactgggcggcgctggctggctccctggctgcggctcctcagtcggcggcggctgctgctgcctgtggcccgggcggctgggagaagcggagtgttggtgagtgacgcggcggaggtgtagtttgacgcggtgtgttacgtgggggagagaataaaactccagcgagatccgggccgcgaacgaaagcagtgacggaggagcttgtaccaccggtaagaggagcaggaggaggaggcaggagccggagagagccggggggacagaggggggccggggaggcgccggacacccgcgctcggggccttcccctcgnnnnnnnnnnnnnnnnnnnnnnnnnnnnnnnnnnnnnnnnnnnnnnnnnnnnnnnnnnnnnnnnnnnnnnnnnnnnnnnnnnnnnnnnnnnnnnnnnnnnnnnnnnnnnnnnnnnnnnnnnnnnnnnnnnnnnnnnnnnnnnnnnnnnnnnnnnnnnnnnnnnnnnnnnnnnnnnnnnnnnnnnnnnnnnnnnnnnnnnnnnnnnnnnnnnnnnnnnnnnnnnnnnnnnnnnnnnnnnnnnnnnnnnnnnnnnnnnnnnnnnnnnnnnnnnnnnnnnnnnnnnnnnnnnnnnnnnnnnnnnnnnnnnnnnnnnnnnnnnnnnnnnnnnnnnnnnnnnnnnnnnnnnnnnnnnnnnnnnnnnnnnnnnnnnnnnnnnnnnnnnnnnnnnnnnnnnnnnnnnnnnnnnnnnnnnnnnnnnnnnnnnnnnnnnnnnnnnnnnnnnnnnnnnnnnnnnnnnnnnnnnnnnnnnnnnnnnnnnnnnnnnnnnnnnnnnnnnnnnnnnnnnnnnnnnnnnnnnnnnnccgggcccccgcctgggtgcccgtggggggtggaggaggaggaagaagaaggagacagttgagggcagaggaggtgaaggtgctgccgccttcgcggcggtgcccgctcggcgagccgcaacgtccgacctgctttcctctacagcgctctttgtgcaataaagttcgaaacccaaggttttctctggtgctgtattttattcttgcccctctccccggctcccacgcggtcggagaaaatgctgttttctgccctaggctgttttaagggtttggggttttttgtttttgttttgtttggtttgtttttgttttttgtttttttttttactatttccctcacccctcggctttgaagatgaagaacgaatcagtagtcctgggaatgcattcttttgggaaggaaagaggtgctaagaaaacatacatgtaataactttttgcagaaactgttgggatcttgtaaaagggaagctggtgcttgaaaacagtttcggttttaaccctttccactaagataatgatcacttgaggtcaatcattctgaaacccttagaaattatcgaaggggaaattagtattagcgaaggtacttttcgttttctgtcatttgaagggaggcagtcttgccaaggttttttgagtcatccgtatctccccttagcctctgccatgctcctcacacgcttctgtctgaactttaatggaggattgatataattctcactctaaaaatagttattgaaactatccattatttgtatattgccgtaggtaatcccagcctgaggttgatggcagtttaagccagcaggggttgtggtgttcctttttttccttcacctagaacatctgcaaaggggactgtcaaaagtcattgacaccttaaagatccaaagacatttttaaagggcattgcagtatgacctatttaaacctgccatatcttctcaaagttaagagtttgatcctagcctcagttttgcaccacatctgccttcaaaagatctagcacaaaatacctttgggccatctattgaaatcttgtgccctgatgatcatttcccaattgaaaagcaaagcccaaaattttagttgatttgaaaggtgcacagttttttatatatttggggggggggggttgcttgtttcttttacaatacaaccagttactgtaccattgaattgtgattggtccatacaaggcttttggttaggaataaatattgattggtaatagaaccattgtgtttgattttttttctatgcgtcaggactctgaaacttgacaagttacattgctagtctttagcactccaatttgcaattgttaagaaaattaagatgcaatagaaggagttgtttccatagggttgagaagatgattttgtttccacacagtgaagactctatacatggtaatgttgatgataaaatagttttttcaaaagattttctacaagccaatagtgatgatacatgaggatgattcttcccctgtgagaataaaaaaaaattcctatgtgtcctttcttcagtgttgaccaaaagatactttaggttttatttatgggatcttttatggagaatcaaattgattctcagcaattgcaagtgaaacttggaacactttttgtgtgcattaattttcaagcattcacctggaacctgacaataaattacagttctctcttgcagaggtcagtgaaagttctagcacggtgtgcttccctcctcttcctccttcctctcctttagttgtttatttttgatggacctatgtattttagaaagctaatgaattatttacaaaaacttacctaatgaatactaagtgagcattcctttggaatttaaaactagtgttaaacacttttgaacagaatttcacacaagggcctgaagaaacagaccataatattcttttttcctaccctcagatactcatagggattttagttttcttagagaagtagttttgtcacttgtaaagcccttgggtttgtttttttaaatctcatatgccttttttaaaacaatagagaacattgtttacttgtgacagtgcttatacgatataaaatgtttattacaaatacgttagcagatacagccatataaactcacctgttatacattcgtgtgagcatctttcttgctgtattacttctagtggtagcttcattattttgaataaatagagctcaaatcttagcttaagaatataatagatatcagaaaatagataattatagcagtttattcctcatgcatgtgtgaacttgactgccccgctgaatacttgacagtagtcactggtgatgtgaatatttaacacatatagtgatgggcagtacattgaaagatcgtctatctggtttgggaaatcacgagtgtgggtttgaaactgctagtcttgtcacatgcctgcacttggggagttttgtgaccatgggacactgtctgctatctctgcctcagtttcttcacttgtaaagttaaaataatagcatatactcctgggggttttgagataaatagaaagtactttttctagggtgagtttaactgttcatcttagtttttacctcttacctttgggacttcccaaagatgtcataatttctccaaacttactgtgtttaatacagttggccagaaagaccaacaaatccaacgaggaattttactggttttatgcttaaggaactgttgggaacagttatttgtcatttgaaaacaatcaaaggaaagagaacactcttggtgagctgaaaaggagtctttgtattttcagttttgtgttttaattatttttgtggttatagtgtaaaacataagttatagcaacatatcctatattctgtgtcatccagtgttgcccacatgttttcagagatgctctgtccatatgcaagtaaacatgtatgtgtatcgtcctctatacaagcagtagcatactatacaatctgtcttgaattctgtcctcccttacctgtttgacactcatttcccaggctacttataatgacttagcaattgatttgtataagcatgtaaagacctttttaaaaagatctttaaattgtatgtgtatatgtgtatgtttgagtgtatgaatgggcacagtgtctgtaggagcccaaaatggtgagaagaggacatcggatcccctggagctgcacttgtgagccaccgtgtggatgttggaacacaacctgggtcttctgcaagagcacttaaccactgggctgtctctccaacctgaaccttttttccttttccattttttattaggtatttagctcatttacatttccaatgctataccaaaagtcccccatacccgcccactcccctacccacccactccccctttttggccctggcgttcccctgtactggggcatataaagtttgcaagtccaatgggcctctctttccagtgatggccgactaggccatcttttgatgcatatgcagctagagtcaagagctccggggtactggttagttcataatgttgttccacccatagggttgcagatctctttagctccttgagtactttctctagctcctccatcaacctgaaccttttaaaagaagcatgtatatagggatatacttaaatttattaaccttttagtaagctgattctatttctaggtcatgcacggccttttaaattgtaatgccaccaagcttggtattagttcatgcctttaatcccagcacttggggcaaaggctgctggatctctaaattcaaggccagccttgttttacaaagtaagttccagcaagggctacatagtaaaacctagtctcaaacacaaactttatttaagtaacactcatctgagtgaaaagtaatggactagttaataagtggaagttgaggtttaatttaaactgccttatttttagctccactttataaaagctttagttaaaagattgagatgtacatagcaacaagcaaactatgagtttagaaggaatgactttgcttcattagaattcttaccaagctgaactttcaattactattttgaccaaaaaaagtcttggaagttttctctactggtaaaaaacaaaaaaagaatggttaattaaatttagtgcagtgttttgtttgagagggagaacggctcttttctgtttatttggttgtttgaggagggtcttggtgtgtaatctagactatcctagaactcattatggagcgtaggctggcctcagacttgaagtcattttgccttagcttgtagccttgtgagtactgaggttacagttttgttttttaaacatttcttggtgtaatttaccagtgagttttgtatttcttgctcaaatagaaaacaagtaggttggcacacgtctatctcctgggagtcacactgtactgctgccttttttaattgttgaaagctcttagtcagtcagctggactatgtaaaatgcatttcagccccagcactgaacaagtctcagtagctctttgtttctttcttggctcttcaaagcagcttaaagctatagtaggttttaagtatacatgctacagattttctaaacagtgcatccccctgttttcttttagttattaaataaagctgtcacaatagagtgaattgtttgtatggttaaaggcttaagttgagaatgacagtgttgtggtcatgcaggttgcagttttacaagactactcttactgctctttggagcttttcttagtattataaatattaacatgctgcttttacctgctgcatagttaaaggactacacaaagcatgtgtatagatttggtaaaaatggggtagataattgaagtttataaaggcaggtgacttgcgggtatttgcaagctatcagcaaggtacatacatggtttcttgatgtctttgggtcttccttcagtttagtattttgttctaatcattggggtttgtttgtttgtttgttttttctagtctaggcttctctgtgttccctaactgtcctggagcttgtgctgtatgtagaacaggctggccttgaattcagagatcacctgtgtctgcttcccagacgttgggattaaaggcatggctgatgtagaataattgttttatatacacacagatgctgagtttattttataaatgtgggttttaaagtttgaatgagggtagccatttcgtcttctccgtcactcagattgtatttcttcccttactatgagcacactcttgtctcaggtcctgactttgtttagcttatggtctcttttcttaattcttccagactagttcatttaaaatatatgttattattattttgtctagatttttggttatctcttgggttaccctaaattgcctttcatattctcctccactttaggagaggaacataatctgtaatttctgcacacattagatagtccagccatgaaaaattgttcagaactaagtacctaattcttgaggctatttacataaatatcaaagcagtagttgggactgatcacgtgactcgatgagagcacttgcctatgatgaacaagacctaaatagatgcaagcaaggtttgtgaggaggtgatctaggggatttatagagcttttttttttctaaaaggagaaaagattgatactttggttcaagaagagtgagctgagtgggaagataaaatagccacttcctgttcctggagtaaagggtgtgtcttaatgctgactaatactagtaggaatggaaatttctttcccaaacattaatggatcctctttgaaactgagatttattcaatcgattgtagttgtatcctaataacctggtgatttgcatgtgaaattctggttgtgattatgatatagatgtagcaagcaatgtttaattcggcaagggtataatgaaacattctccagaaatttatccctgcttgctttagcaattgacaaaaagagacttggaagtctcttatttttcatcaccaaagtaataattattgctcatttgaagcatttttattcttcttagggtttttcttttttgtgtgattttgtttgtttgtcttgagacagaaatcttcccttgtggattggttgtcctgtatctacctacctccgccttctgtgctggggttaaaagtggtatcattttcttgaatcaatagaagcctgcaaataataatagtaatattctgctgttctttgttgctatttatcaacctaatttgatcatggaacatttgatgatcatcaattcaaagttgatgagcaaatcacaagaaaatgtattcaggtagttaagaaaataattcctagccaggcagtggtggtgcacgcctttgatcacagtacttgggaggcagaggcaggcggatttctgagttcgaggccagcctggtctacagagtgagttccaggacagccagggctacacagagaaaccctgtctggaaaaaaacaaaaaccaaaccaaaaaaaaaaaaaaaaaaagaaaaaaaataattcctgaatgttacatgaagatgtttagatgttataagtaaaaaaagtccaaatatgtctcttacccacaaagaatttgcagtacatactgtagggtatggtgatgcaaggacaagtttctgctgtcatgaagagctatagcgtttagaagagaaaagaattcacatggggaacttggtgggaagatagcattcaaatggagtattgaagaatttgtataggtagaagtaaaaagggtgtgtcatagacagtaaaatggaaaaccgtaagaggacgacgctgaggtgcaatgaacttgatatacacacaaattggtgaagagaatgttagattagctacagatcaacactttaaggaatcctgaatatgaatcctcatggcacaggtttaagttttatgtaagttgtgtgtgtgtgtgtgtgtgtgtgtgtgtgtgtgtgtttgtgttatatgtgtatatgaacaatacaatgactaccttaaaagtgtagttttttttacttccagtgtgttgtattataaaggacacaatagcttctctataaacttttttgaagtgttatatataatcttcccatttggtaggtacagttccatgatttttaatgttgttagccagttgtgcatctactgccacagtcagccctgggacatattcaccacctcagaaagaaactatcaccccttaaacttcctacacaacagcccaagacaacagctaatctgctttgtgctttattaatttgtttttggacatttcatatgaataaaagcatacagtgtattatcatcttagcataattttttcaaagtccacctatgtagtatttatcagtattaatttctgttgccaaataatagtccacattatgctcaatattttactcattcgttcatggacactgggctttttgatttgagttatactaatataaacattttcatttctcttgtatagatatctaggaaagaacgtgttgggttgtatgctaaccctgttaaagctgttttgaggaactgccaggccattttctaaaactactgcacatattttataaggagtgtataagggttttaatgcctccatgtcctcactaatacttgctataatctatcttttccattatatccattcgtgtgggtgacaaggaagctattttgatttgtattttcctaacggtatcaggcatcttttcaaatgtgtttattggtcctttatatatctttgaaaaatgtatttgtttagatcctttgccttaccaggtacatatataatttatatttttccctcccattgtatagattgtcattttatgttttgttttgttttgttttgttttttccagacaagttctcactatatagctctgactggccttggatttgctctgtagactatgcctacctcaagcttacagagatctgcctgcttctacctctcaggttctagaattaaacgtgtgtgccatcatgcttgaggcataaaatttttcatttttatttctggttcatcaattttatttttcttctgttgcttgtacccttagaatctttttctaaacatcacattttttttcccccaagtaactgaaagcccagcaaacaatagcattgcttaatgaaaaacagttaactgaatggatgcaggactatgttctactttcttctgctcttctccattaatctgtgtccttatgcctttttttttttttttggagtgacttatgtaaaaaaaaaatgaaaagatgaaaaatcaagaaatggcaattttgaatataacataataattggttatatttttttagttcatttatggtgtcagagtaagtatagtgtattacttataaactaccttacttgggaaatttatatataagtttggaagtttatataaacttagatgtgagggaaattttagtgcctttgtttgtgttgtttgtttgtttgtttgtttaaagaagactaaattggtcctgtggactgtaaatgatgtacttactgtcatagactgctcgttttttggtcacattatctctgtggaaaaagttttcaaggctcttgttttattaataactcctaaagtttgtctctaagcaatatcagctttagtttataaatagctcacttggaggtgattatcctagtataggtcatggaaaatgcattaatttccttattttattaatcagatctttatcagtagagaggttataccctccactcccaatttcttaaatcctagtcatttccaaatggacatgcatacttttcaataacttaccaaacagaaatgcttgtttagagggaatatttataggtacccaagttataactattacattatacttgtctcctttgatacaatatttcatctctaactagattgtaagctcttcaagaggaccgtcttgtgtgttttaatctgttacttcctggagatccatcgtgcaggaaacacagaacatttctttagtgatttattctttttagggccatacattttaaaggaagggttagcagtattcttttagagttgtacagattagaggaagcagaaaaaacatgtttactataatttaattgatttttctttccctgagacagagtttctcagtgtagacctggccttgaactcagagatgagtctgcctctgctttccaagtgctgggatttaggtgtgggccgccaggcccagcgtaattgcaggttttgtcttttgttttttcttttttaaagataaagaggaagtttatttttataccttaaaaaaagtcttctgtgctttggattccctttcatccttatgctttacacagtggcatcttcctctggaacctaagcatagtgctgagattgtgttgctcagaataacttctcgagaagtcggggtcacggtagtaaagaagcgcgcctccctcgaaggctggacttggtgttgattatgtcacaatcaaagaaaaaaacactgaattcaaaaataagtcttctcaaaactacacataaagaacaatattcggtctgatactatatagtggatatgcatgtcattctatatgtccagattcagtgcgaagtaccaagataaaccgtgatgtcaaaaaataaatacagtaaaaatacataaagcttgtatcattgtctacatgctatttatcagttttatagactatccatggactgttttaagtataatctgttgcatcttacatttttcatttgctggatgactggtaagcaatgtattaaaatgacttgcatatttctttctattctgtagagctttattgttgacaatacagacagttctccacttttataatattgaagacagtgaggatagccctgaagcctataaattccttacagacttctcagcatctccagttgtctggttaaatgcagaatatgtgttctttgaccttgccttcatgcagtcccacctcagggagctgagttttcactgttccatgtctgacttgtaaatatttcatcaagaattcaagacctaattcaaaatcactcacactgatgcttaaacttacagacctcttaaaaaaatctaccaacaacaatatcaaactgtgtaggccttcagcgtcctttgaatgtagtcttacacagtcatttaggatttgctgaccacctcagatagaatactaaatatttaactgcaggtcatacataactttgtggttctttcagttcaggaattgaactagtttataaagcaaaacttaaagacagcttcactctctttcagtgtgaaaactagttttagaaaagtaactacttgttgaagatgtagtgctttttatttttaagaaatgagcttctggggctgaagagatggttcatcggctaagagtactggatgctcttccagaggtcctgaattcagtttccagcaatcacgtggtccacaacctctatgatgagatctgatgccctcttctggcaagcaccatatatagacacagaacactcatacataaataaaaaaaattttttaaatgaacttcagggtccatttcgtagcactttacacataggcattgcgtgaagggttggctttctaaaaaggctcagtgtagagagctgtgtgaggtgctcatgtctgcgaaggtagttcactgggaagacgtggcataaaagtgttgccaaaaaaagccagtgtgtggtttgttgtgtaaaggtgcttgctgccaagcttggtgacctgagttcagtcccaggaacctgcatggtagaaggtaagaatccgctacataagttgtcctctgatcaccatactcacacatgcacatgataaataaatcttaaaaaaaaataaggcacttaataccatcataaaagatgtataaatagtgctgtgtagttgcaattgcttaccgggtagcaggaagcttgtttttagaaccatgtgtagtctcaccttaaagaaaacaaggcaagaaaatgttgccagtactttaaaaacaagacaaaaaacttggatttgataatgtttgacaactttcttgttgaaagaaactatatatgagatattcataaatgtcataagttacacagcgtttacataaatcacataacattttcctaatttactcttgctgaatatttgctttgagaacagtatttttcttaagctgtgctatatgttaaaatttgttaaaactggcattccaataatctggtaattacaaaattacagtaaaccattaaatactgaaataaactttctctgtgttaagcaaataaatcaggagatttactaaataacattgcagtgttgctatttgctgtttccatttggagtggtggttaggttacactggtgtttactcatggcacatattgtctatgaaaatatgaaaactgaaaagtcttcctttgcatctggaatttactttaggatttgtgtgtgcgcaacacatgtttgggtgcttgcagaggtgagaaatgtgtgtctgatttcctgaagcaggagttacaggcagttgtaaaccacctgatgtgggtgctggaacctaagtttgattacggaagagtaacaaacacttttaactgatgagctgtctctccagcccctagagttctagtcattacattacagtcaccttgatattacctttnnnnnnnnnnnnnnnnnnnncccctccccccacccccgggtttctctgtatagccctggctgtcctggaactcactttgtagaccaggctgtcctcgaactcagaaatccgcctgcctctgcctccagagtgctgggattaaaggcgtgtgccaccatgcccggctcatattacatttcttgcctttgttatctagaggagagactttaagtatagattcattctctgtttgaaaaaggccttaataggggctctgaaaatttgagaagagaatttaataaacttagtgtagatagcatttagtgatgtcattgtcttgacttgttctttcaaaatatacaacatttccattttgttagaacatagtctgacttaatctcaggtttagacagttcgggttaataagtattaaattgggtatgtatgtaggagatgactgaatatgctgttttcttgtctggattcgatgaaggggtgctatattgaccaccgggagactattcgcagagatttggaacattgctcagtttctgttgattatatacatttcagttctgatagattagacatacaaaatgtctaatggcaaatatttcaaggtgaacaagaaagaactgtgcaaggataaggtagagaagtacaggcagtgccacaaggtcattggctgtgaaacgtctgtcacacagaacccaagcttttgtccctcgtcagtgacacttcagaaaaggagcatatatatcagcggtgaaaggatgggttggcaaggcttttaaacttcacaaaactaaaaacaagtacaaaagaactagaaatcactgtaccccatgtaaggctggatatacttctgcagaacttgcacaagcgtgtgtgtgtgtgtgtgtgtgtatgtgtgtgtgtgtgtgtgtgtgtgtgtgtgtgtgtgtgtgtctacatgcaggcacctgctgagaccccatgtaaggctggatatacttctgcagaacttgcacaagcgtgtgtgtgtgtgtgtgtgtatgtgtgtgtgtgtgtgtgtgtgtgtgtgtgtgtgtgtgtgtgtctacatgcaggcacctgctgagaccccatgtaaggctggatatacttctgcagaacttgcacaagcgtgtgtgtgtgtgtgtgtgtgtgtgtctacatgcaggcacctgctgagaccaggggtgtcagatccttctggagctgggttgtagctgagtgtgagtgtgagctgcttgctagacatatgactgctggaaaacagacacaggtcctctgaatgagagatacacacacacttcaactgctgactcatctccctaaccctagtcagtttttaaattacatgcccaaatatgccttttgctgaagttgccctagaaacttcagttctgtttatgtggttgccttaaatccttggaattttaagcgttaaggatgaactaagatcttattcttatgctgaaaaatcgttttctcatttctaacaggttattttctttttaacagacagcatatgtttcactagttagaaaagcatttctttgaaatattatctcatatctttgtaataattaaatttgaatttaagacttaaatagccaggttatgaggagtatggatttgttttgctttaagatttatttcatttttaaatatgaatgcatgtgagactgggcatgtttgtgcaggtgcttgcagaagccaggagttagccttggatccagggggtggagtttcaggttattgtgagctgcctctggtgggtgctgggaattaaacttaggtgctctacaggaacagtatacactgatgaaccatatccagcctcctgaagatagatttatttctcaaaaacttgtagagtgatgaagatcttaaggactgaggttcttaagaaaatcagaatattttaggaaaaagaagtggaagtatacaacctcccttcacttggtgattatgaaagtgacagtttgactttctttgatgagctttaattttcagtttcatgacaatttgtgttaacttggtgtagatagatagggaggtagtgctgccaaatttatttctgatacagcacacttctgtgtaggtgctacttaggggaatttaaatgctagcctgttagacaggttcactggtcagccttcataatactggctagtatgtcacgcataatattgccactgtttgtactaggctaattttcctacacacttccaccctctgacttggtggacattttatatgcctgctcttttgtactgttcctgcacagcagaatgaaagctttataaaagaaagatatttacggtttcactcaatagcttgaatgatgcttagcatgtagaggtaaattgatcaactttaagactattgttagtaaagtatattagtaaaggaaattattttgttgtgaattagcccattgcaatttttaaaattctaagtccagtaacatcaagtgttatgatttaaaatatataattacatgcatgatgggtgcggtagtgatggcagctagaggctgactttgtggtgtcagtttggttttctctttctgccattgagggagcttccagggattaaactcaggttgctaggattgcatggcaagcgtctttacctgcttagccagtctcagccctagggattagtttttatattttcattgttcaggatcctacaaattgtttctgataggtaattctgtacctggatacaacactggggttaatagaaaaatgaagatcctacacgtgatgctccatactctgtccttcccatacgagcagacaagcaggtggaatgggcctgctccaaatgtcagcgcaggccaaccggcagaatggtggtgtaatgtctttaaggtgaaaaccaagagtgttgtagttgagtccaagaaccttctcatctgtcgtagtaatcttactagcactttcttcttaggaaagacactattcgtgtcactgcccatttggttggcatctgtttaaggtaaaaggtaaccatttaaaactggctcctaccttgaataagggccagtagccacctgactaaagtggtaataaaacactagcagtttagttgaggacccgttgctactggaaataccatagtgtccagtgatagagaggattatctagatgcaggaaggggatgtgaaaatcatagccattttcatacatagtctgcagctgtaactacttaaattttctgttccaaaaactcatcaagaagccttataccttaaatttaaattaaaaaaaaaaaaaaaaggcaagtagcctcaggctgttctcaatagaaacaaggaatgggacccatctgtaggctccctttgatcaaatggtaaagtgaaactatgtgtggatggcaacataggtataaataagtaagtagacagaattttgaagaggtatggtttggaagaacgtcttaaaatgatcatttatatttgtcttttctttctttctttcttttttttttttccctttttggtattttggagacagggtttctctgtgtagccctggctgtcctggaactcactttgtagaccaggctggcctggaactcaaaaatccacctgcctctgcctcccgagtgctgggattaaaggcatgcaccaccattgccgggcctcacatgtcattttcattcaagtcaaaggtgtagatttgttttgggatagccaacttgttttttaatggtttgggtttttttgttgttgttggttttttttgtttgtttgtttgtttttttacgtactatgtttcttttaaaaaaattagtataactgatatgataattttataaattttcataactacattatttgtttttccttcatttataaaaacagagtaaacagttcagccaaaataagtacttttacttaaaaaagaaaaagtgagggggctggagagatagctcagtggttaagaggacccaggttcaattcccagcacctacatggcagcttacaactgtctgtaactccagtttcaggggatctgacactctcacacagttatacatgcagtcaaaacaccaatgcatataaaaaataattcagtaatttttttttaaaaagtgaggtttgagaaaatgtcagtggatatctccaaatcactgttgaaatacagtttttgtattggtgaattattgaattattgcttaaactatacaaacactcttgaatctatgtttcctagaaggaaaatagtcttcaaccagtgctgatattaaaggatgtaaaaagagtaccagatgatgagacttgccatcctataaaagatttttatagatcccacttccagcttagtgtttaattccccacaccctttttgtggccacaccttcacacttcttttttaattataagtgggattccactgtatttaatgtcattacattgtagacaggcttctttttactgcattaattcttttcatatccctcctaaaaatagtgtttctagttttgtggttttaaaaacaaaagaaaacaaaacaccaaaattctatcccagatacctttgaactactttttttttgtaaactgcctgttgagggtttcatattgactcagagttgcattttgcacgatctcgtggtggtcttggcagttacttctcccagtgcctcatgagcttgatgactgttttaatacccatgctgacaagtctgctgatcttttttctttgtcatctatgttttatggatactggtatttctaactttttatattaatttttgaaatggcattttatcttaaatttaaagtattataaataatgacatgttaaatattggatacatttaatagtatataatgattataaggatgaatgtctgttttgattagttttagagttgtttggtaaagcattgagatttctctggtttatgagagatgagtatagataccactcatggtaagttcatcttgtctggtaatatgtaggcattgagctataagaaggatacactatagaggtattcccttttttcttgtccccaaaatttagaaagggttgcttccccagttatctgaaagcttagtaaaatgtgcatttaacttctgcacctaggagttcttctctcttgaatcttgctgctgagaggtgttagagaactccacaggtatgcaaaacaaggtcttaaaagttcaagagtccaatattgacttatccagaattttacaatcataaaaagttgctttgcttctctctgtgtgtataggtatcgtgttgtactctgccatgagtgaggagtaggacaccatgaccttcgcagtgtttgaagtctctgattaggctctggccatatattttcctttttacctctgtgccctacttgatttgtcctgttaccagttaccttctagggagcagcttacagttgctcttcttgctctgataggaagaaatgcctagagggatctgaagccagacctcaggcctgacttcactcctgctttctacactctttctgaacctggctggtgcagcttgggaaaatcagctttgctgcctcctctggcctcctggctagtaagggaccaatcaagacagggaccattcctcatttcctattaggaagaaacacacagagaagactttgtatttcttcattgtttgtttttgttatttgaagttactaagatttatagctaatcagatttgagcaagttgagtaaaagatcagctgcattctgttttagctagatttttaagtgcatttgctaacttaaccaccacatagcctattcataacttgaagtttgcctttaaagtcactcaagtacaaagcactgtagtgctcgtaacgatcttccatattattgtaggtaactaaatgaccatggaatctggagcagacaaccagcagagtggagatgctgctgtaacagaagctgaaaatcaacaaatgacagttcaagcccagccacagattgccacattagcccaggtataaaaatacatggagagattccaagctgtatctcttttaagagtaatatgtttccaagagaatttaatttttaataaacatatacatagaatgagtggaaattttctttaaaatatcagaattcctgttcagtattagcattagcttatgtttagaaatgaaagtaatgataaattaacatattagtaaaatgtatcattaaacattaatataatgtgtgtagtgacatgattcagaaataattacttttttgttaataaatgaattggccctctcaaggcaatgatgacaactgccttgtttttctttgtttgtttgtttgtttgtttgtttttgttatttttgttttaaataccacacaagcttattttgggaccttgaggtgcagacgatttgaaagtctaaatttatatattctaatactaaaatgcagagtcaaaggtcggtgtggaactcagtcctaaaggtgataacagccgttctttcctgtgcattttaaatgcgttagtcggattttgttttaagagtcctgcccttgccaggtgtggtggcacacacctttaattccagcacttgggaggcagatgcaggcagatttctgagttcgaggccagcctggtctacagagtgagttccaggacagccagggctacacagagaaaccctgtctcagaaagagtcctgcccttgaggctgtcatctctgtgcttgctttattgttcatatctgtttttctttattaacatctttgcttaaatattagtggaaacagtgcttaatataagaaccaaataagtgttaaacctgctagggtaagaatgtggtatttccttctctgatttttggacacagaatgtcactgtgtagccctgagtggcctccacctcagagatccaccttcctctggattaaaggtgcgtagtaccacgcctgtgtgtttttaaagtgaaggctcccaaagaaaaataatcctggcaaagctttgctttgcttatcttcagtttctccaggagttaaaaatctccattggaagtggctaattagaataagtcctgggaaatacagggttaaccacggctggggtgagggtgggaatgagtcagatactggagctccaggccaaatagtcagagtaagcaagctgactgtccttcctcctaagaacagggcttccctgcagatctcacgagtaagacaacaccacatatgcttggagataagatatatcagatgaggtagcacttaataggcttagtaaaacaggcatggagaaattggggcacatctgaccatttagctaagcagtctccttgatgaagacagccttcagcatgttgtctattctggttaccatattctatccagcttggttgttccctgagttgactttatagagtcatcttggaaattctttttgctctcattattttttctttgggaatttgtattcttgatgaagtagaacatgtaggtagcataattttgagaataaaagattaactgagataaaaattcttggtaagatactttctttggaagttttctatggtccacttagtgttgcttacaaatttttagaagacttaatttcttatatctcacatgttataaaataccttagatctcctcacaatgaatgttcattttttttcttgtggaggatggaaactcacaccctctgttttaggaaatttctttcaattagttgttggtggttttgtttttcattgtcagaatccttgtgacccagatgttacgcttctgtgactggttttgtggtggtatgtttttgtttgtttcttccatttccttatattttccttgcaatttttcactttttgctctacttcctaggaatgtattcactccatcctgcctgctgaatttttttttttaaataaacagttcatttacaaaacatgggtttgttttgtttcttttaagaagctgtgcaactgttttttgtgttttgtgttttgttgttttagatttataacatatacagcattctgcctgcacatatccctgcagcacagagagggcaccagatctcattatagatgattatgagccatcttgttactgggaattgaactcaggacctctgggagtgcagctactgctcttaaccactgagccatctctccagcccctgactgatgaattgctatcatgtttccaagagtgttatgtttgttccctgggtagtcttttggtattttctttttgctttgttttgttttgtttttgttgtttttgtttttcgagacagggtttctttgtatagccctggctgtcctggaactcactttgtgtagaccaggctgacctcgaactcagaaatccgcctgcctttgcctctcgagtgctgggattaaaggcgtgtgccaccacacccggctggtattttcatagtatcctgtgttttataagtattctgtttattttcaggaaaaggggtttgtttacggtgtggttttcgccttattcggtacttattttgagtttctatttctcacatggccacataactcttcatcttcatttccatttgttttagtgtccatctttcctagtagaggctttcaccagattcttaatactctgtgaatgtctgctcaggattaaagtagagggagactaggagataggattgtagcttaatagtagagcatgtacttagcacttgtaaagccctgggctcgtgtctcaacattaagtgaatcgtaggcagatataaaatgacgaagaagctactttgaaagctttgtgtatatagtagctccaagccaagaacttaactgcaggacagtggttgtcttaacttttagtaccttggatcttgaatttgatcagatccccagaggtttcactaaccctctgtttatatataaaaggcctgagagccaagggaaagaagagggctgggatatcatagtgactttcagtaaacctggtatgacgtggttaagacccattatctgtgtaatgctgcactcttctctcacagcgggccagacttctttcctgcacggattgagtaaggattcatttgtttttaaagagcttccagtgaaccctttacttattttcagcccttctcttcatgcttccgtttgcagtgttgcagaccccaagtatctatctgcatttgtgtggtgcaagtcaggctttccttcctccaagattggaccatctgtgggcagcttagtttgttactgttgacccatctgttccactgcctcctttcctagtccttgcacttatttgattgtgcatatagaagtgaaattaatttcatgaaatataacttggaatccagaagggaacatactcagtttactatcaggcagccttttagcatagaagacttagaatggaatgcgtagttgaccgtggattttaagaaagcttttctttcttcttgtctagttacagttttactttttagttactatctgagttttttttaacaaaaacaccatactaataaaaattatcttttttttttgagagtttgatacatgtatataatgtattgtgtcacatgtatcacctctatactcttttgctcccaccagacctcttctttccaagataccttctactttgttgtcttcttctggtggtagtggtggtggtggtggtggtggtgatgacccactgagtgtaattatgaatgcttacatgaacgtgagtggggagttacataacaccttgtcagtggctatcccactgaagacaatgtctgtccctcttccagtaaccattaactgctaatagttcctaagagagcttatgaaatcctgcctctatccatggtaggatgttacaggccccatcttatacatgttttatgcaggtcatcagagttgttgtagcagtttgttagtgtaacagcagtgtcatgcccagaactcagagtttaccagcattccttcccatcctctgttacattccttccagctgttctcttaaagtgttccctgagccttgagggaggtgtatatcatagatgttgacacacctcctgttaattctgactccagataatgtttgaatgctagtttttaaatactaggaaaacattgtaaagtgaaggcagaatgattgtgcttttgccaatgaataggaggggaggaagcaagtagtgaaggaaagcaacgttaggattgtgtaggctggcctcacccgtgctgtctcctcagtaccacacaggggagaatgttacatccagtaaatctaagcaaaaagtaatcataggactttattaagcaataaagaattaaacagaaataatgaacttctacaatgtagctctatttttagactatgtcaagatattataattaccctaaaaccaaaaaaataggttatggtggtgtgttgtaaaaattgaatgtgtctgtgtgtcttgagagacatctgtcaagcatggctcactttgaccaggccataagcttcccagaatagttgtgaatatggcccaacaacattataatatcaaaagataggacatctgtgataggagagtgcttacctagcaggcgggaggacttgagtttaatctgtggcacagaataaaaaaagctagaacacagcaaaaatgccatggtgattctggtagtagagacagatgggatttttaggcaggccttatcagacagccttgtgagataactgctccttgggagtctgagcaggaggaccataagttcaagatcagcctgagtagtcaagtgagacactgtcttaaaattgaaaaaaaggaggatggtgatacatttccatgttagattacttgtctgctactcacccatacacacacgaaagagggcttacttaatactttatgtttgcttcctgtgtctgtgtaacctaaatgtaaggagctttgataaatagctaggataattcactggagtagcttgttaggtttacccttgaaggatgcaggtaagaagtcactgatactgtaattgcttcaaatactcaaatagctttcctatgaaattaagatgagacgctcagctcataataactttatggctgagccttttaaacctaaggaatcagcattcttagtttcctcttcaatttgtcattacaaacaggacaacatgtgcgactctgcagatagtccttgcaccacatttatagaaccaagtaaaataaaacatgactgaaaataggactagtacagaaggcttttgtggatgtctaaggaaaggaaacttctagttttaatctgtgtgttaaagatcacttgtcttcaagaggccttgctgggtaggtatgtctgcaaactggcattcagtactatacctttcacctcaaccccagctctcccaaaccctgtccctctttcattctgtctcgtctttaattcctctcagacagcctttcagaaagcccgtggtctgcctcaggatgttcatatgagctgcttctcttggacctgtccttaccacctactaccctacttctggctctcatcagcctaccctaactatataggctttctcatggtacaccacttccacttttctctgtctgaagtgtatatcagtcattcagccactaaagtgattgatctaaaatgcaaacattctatttagttcagcagttcttcctatatattctcagaataaatgaagttttatttttgagacatggccttgaatggctcaggctggccttcctttacagcaatccttctgcccaaatatctttagtattggaattacaaacatgtgacacttttactgactaaaatgcaagatttttgtttgtattgaaacagggtctcactacacctctggtttgcctgaaagtcacagagatctggctatctgcctcccaagtgctgggcttaaacacatgagacaataggtctggcttgaaagcttttttaatctgacatatagagaggtgtggggttttgtttgttttaattattttgtgtatgtgagtacactgttgctgtcttcagacacaccagaagaggacattggatcccattaaagatgtttgtgagccgccatgtggttgctgggaattgaactcaggacctctggaagagcaatcagtgctcttaactgctgagccatctctccaggcccatatagggaggtgtttataactagaccattgaagacttttagaacctctgttactttatctctacttctgacattagcaatgtgtgtgcctttcctccattttacatacacacacattcacgtatacatatgcgtgcatcacatgcgcacacacacatagacacacacaaacaggtgcacacctacacacaggtcaactttttgaaagcagggccctatatctttctcctttttgtggtttttattataacattgctctcagtacatgtgttgtggttactatttatcaaatgcaatgaaagtttcttaaatatgttggtgcttaggaacaataaatactatttgatagacatgtcagtaaactcttaagatctggacattgaatcattaatattgacttctttgtgcttcaagaaaaactagtttccttttaatattcttttagctctgctcctttttcatccaaaattaaaacacttcttaaaattccacctgttaccagattagtgttttttgtgaatgtgaaaaatcgaaatttttaattacaatgcatgtaccttcttgttaatgaaaaaacatacttttttaaaaagtaaatctttttctttctttctttttaattaattaacttatttatttattatatgaaagtacactttagctgttttcagacacaccagaagagggcatcagatttcattatggatggttgtgagccaccatgtggttcctgggatttgaacttaggacctttggaagagcaatcagtgctcttaacagctgagccatctctccagcccagaaacttacttgtaattagtctaaagtagcatactaaagtctttatttagcatgtgttgttctgaacttagcaagtccttgttgcccagattggaaaagctaagattttaaaacatgatttaacagcagggtgttgtgaaaacttttgtacttaagaccagtagcatgtctgtcgttgaccttgagtgaatcagtctcttagcatatttttgtctttacgtaaatataatccttattactcaacctttaaaaagaaggagagaaaatttggatataaaaaagcagacagggaaatgtagacaccgaatgaatggggtattcattagcttcagagaatgactgggttgcatgttttgaagctacaggagatagctggctcttggttgttttgctttgtcacttgggaatggctgaaaagtagagaagatttgtagggtttgaactttttttaagactagtaaattgttggcttcttgtacattgttaaaatatgtatcaagcagaacggtcatagttttgcttattagaagtcactcaacattaaacctgagtagtcccacagagttttctgtggtggtcattgctttctgtgtttctataggtatccatgccagcagctcatgcaacatcatctgctcccactgtaaccttagtgcagctgcccaatgggcagacagtccaggtccatggcgttatccaggcggcccagccatcagttatccagtctccacaagtccaaacagttcaggtatgtgtataaaagttttgtatgtactttaataacttgtttatagccatttctgtctcctttcattagttgtgaaaataaagacacatctagtttagatttattttacttgacagtaaaggagtatgttgtatctgcatagttctgttatatgtaccaagtcagacctcaagaaaattactttttttaagcttcaaaagaaaaagcatttatttagacagataaatagtaaatacatgtgataaaggaaatgttgggaaagactgtaggactgatgtacctcaattaaggaaaattaacttaaaatgaacctaagtttgtatggggaaagggttgataaaaattaattaatagccttacctgagatagaatttgtacttagagatcacatcagacatcatattgtctgttgagcttttaggtagagtatgtaactctgaaataatactatattcagaaggtacatcataaggatcattgattgtatcacatatatctgattctttggagagcttgcttctttggggttttgggaataaaggcattctgaaggtgactacttagatctagggaccaagagcagtaacaggataattctttaccaatcagctaattgaaggaaaaaaacaaagactgaacattcatgcaagtaggccataaccccagcctcccgtttcatatttttttacttcacagtcttcctgtaaggacttaaaaagacttttctccggaactcaggtgagtcctaggtcctagatttgaagaaagttatttttagaaaggaaggtgagaaattatttacgtcttttgtccttctctgtgaacatggagttttggggtttgagtcaaagtctacacctccgttgtactgctcactgcatagttactgctcaggtctctgtaacagctctcctcccccagaactgcatgaatgccttgagaaaaggaagctgaacctcctgaggtctagacaattagacatgaagcctaactgctggcatactgtgtgactagccagagtatactttctaaaattgggacctggtaaccccaagaactcagcaaatctcactcatttctgtcagacttcttcctttcccttctttccccacacccttcccactgtacagcaagttttctagattcaacaagcttctatttttctaaagcacttattatatggtgtatgttgatttctcttgcccagccttggctgtttctgctgtgttttccttgtatggtagccagaactgattagtatttttgcaaaggggaaaggtgcttcctcctttgtccaggaaccattctgttattgttatcaaagcccacataaggttcattagcggtttcttccctttgggcttctgatttgctgtaacatttacagggtagaaaactgttacgtgaaatcctggttactagtttcccgaagatgctgggaatggacattattaacaagccttgacagtattagccagattaaggcctatttttgagaaaccacagtgataagtagtcctgtgacttagtttgtatttcatgaaatgccaccttgccaatctccatatgatcttagcattagtaccgtccctgaattcttctctagggcttacctgctagtcaagagttttagagatcagacctactttggatagtaataggtcaagtgatggtaagcacaaatggcccttactttctctttttcacttacagaaagtttttgttattaaaaaataaagttaagctacaaaatacatattataggatttggggtttgtttgtttgtttgtttgtttgagacagggtttctctgtgtagccctggctgtcctggaactcactttgtagaccaggctggcctcgaactcagaaatccacctgcctctgcctcccaagtgctgggattaaaggcgtgcgccaccacagcccagcccatattacagtttttaattaataaaacatgatatttaattgttgcctgtattcttatttttaatcttatcttggggcaaaataatttgaactcaagtattaaatgtccttaactttgatagaaatctgtgtttgtctttttaagaatacatttttatcacagtgagctatgtttataactttaaaaaaacatgtttgaaaaagaaaactggctccttgaagcctggactatatggagatgtaaatgtgtttcttttgcattaaacactctacaccggaagaatgtgttaaactttgatggttacttgagccagccaacagtggttagttttaataactaggaagtagtggtttacaatagcttatcaaacagggtggaagtatccctcaaacttctagatggtagaatgatagcgttatatataaagtttccaaaatagacaaggtatgactctcctaatggaagagtaggaatagtaggacatcgcttgatatatttcaatatagtaatattggagactgtactaatattttatgtacagcttcactttataattcttacgtgtataaatcacatctcataggtgacatgagaattcttgcaaaatgacagcagtttcacagtgtatatagggttagtagtggcacttaccaatttgggccacatttcaatatagtgctgtctaaatgtaccagaaaggattcatagatttttatgagtgtaaattattacatccatttcttcaacaaatgtttattgatgacatgctatgtgccagtcattgttctaggtgctatcaaaggcagcagtgaacaaacagtacatctctgttctcatgaagatcacatttgagtgaagagagacatactatgagaaaataaaatatgtcaggtgaggataagtgctgcagagttaatcaaacaggggaaagggtagggcaagatgcaaagggaagtgtgctggaactcattgacggtggttgggcagtacagtgagcagaaaccagacagcaggagagggagctaagccaagccaaagatgtggaaatgaggatgtttgtgatttgaaagagtagcatgttcctgctggttaaagtgagtgagaaggggaaggaaaacgatggagactccctcagtgttgatagactcgtcaatgatatgatggagacagtggtaaagccttctacaacataggtagtggttccgttctctggctatcatatagcatcgctgtgtctgaattaagaatgagtagtgggtttggggacctggggggttgggagggatatttggtttttgttttgctagcccaagacaagtgttccaaaatttctgatcttggtgatggcaagcaagggctttgagggatattttacctaatagaaatccctttgtactatctttgtggggagggggcattagccacaagtgaaaggattattagttataagaaattgtcgagagaaatttgaaaatgctttcttaactttttccatggtaaacagtgtaagtttatctgctttaagtcttagagtttcctcagttgtatcactgtcagccttagtggaggtttatatactaagatcttgttgcaaaaaaggaaaaaaagtatcttcttactggagtgcaatatgtaaatgaaaataattattttctaagcacagctaaaaggcactttttttttgttaatctctacatttagagttctcttttaaattggtagatatccagccacatttccaaaaatgtagacctaggcaggcagggtattactgtataggtagccctcaaagtctttgcctcagtgctgggattaaaggcatgtgcctccatacttgacttgaatcaccgttgaaagatgttaatgatcttttgggttttccagatgggctttctctgtgtagccttagctgtcccagaactagctctgtagaccaagctgcctctaacccaaataacgctttcttctacctcctgagtgatgggattaaagatgtatccactatctacctcctgagtgatgggtgtaaagatgtcaccactggctgttagtgatcttttaatgaagtacatttaatgacattgttcttactgttagtgaaaaacttaattctacttgaataatttatttatttagcctatcctaagaacttttaaaataaataacatttaaaatttacaaataaacatatatgtccacgtgaaatttttttatttgtctgcatgtgtgcctgtacaagatgtgcatgcctggtacctgttgatgccagaaggaaggtatcctgaagactggattagaaatggttgtgagcttccatgtaggtgctgggaattaaactcaggatttgtaagaccagctggtgttttttttgttttgttgttttgttgttggtggtggtgttgtttgttttttggttttggtttttcaagacagggtttctctgtatagccctggctggcctcgaactcagaaatccgcctgtctctgcctctgaagtgctgggattaaaggcatgcgccaccacacctggccccagctggtgttattatctgagccatttctccaacccccagttttcttaatgtaagggagatagcagatcaagttttaagatccggccttattttgatccattgagtaaaaagttatctaaaccagccaagcaaaacacttaagtttgcaaaggattgtatagttttaataatgttttagcatttcttaatttctagtcactgtttggttctgttaaaatttcaaattataaaaataagtaatgatttgggttttggcaatgtccagactgttacaaagagccaaaggtaaaaacctgtttaaggaatttggggagatagacattaagagacgtggcaggaggtgtgaggactgggggggggggggtgttactggaatgtgataattatgaaacctatattaggtttttaattttacatgattacttttaatttcttacacttatgaagttataaaattgaattttgatatttttattagtgtaaaaagcatgtatcctgtataattttttaagacttcatttttcaagagcagcttgattcacagcaaaattgagagttaaagagttttcccatgtattcctggcccccacatgtgtagcttcttccatgttaacacccctataccagattgctacatttgttagagctgctgcatcataaccatccaagcccaagtgtaaaatgatacacaggctctcagtgttggtatgcttcatagccatgtggtttggatttttcattttagttaatactttctgtttgaaaagacaaaatcttttagattagagaaaggccacaaagtctactgagttggtgtaggaaacaaagttgcaactaaaaaagcagaattttatttcaaaactaatctgtactttatttctttatatattttgatttttgttgttgttgaaacataaagcccaagttgactttggacttactgtatggcatgtataaccttgaactactaatccttctgtctccacctcccaggtgctacgtttgtaggcataaggcaccatactttcttggtcctgagaatcaaacccagggttttgttcatgttaaacaaacactctaccaactgagctacatccccaagcccagtatgtaaggaactagctcatagagcttgctttattgagtttcaacatgaatgaggtattcctctgtcagtgtgtatccttaagatcttgatagttgttaagagtagggcatggcagtacatagctattgctccagcatttagaagcaagactaggaggtctgtctgtctgaggccagcctagctgaccaggaaagactctctgcctcttctttcccctagggaaaaatattaagatggttgtaaggatgggggatatcatatgtgagagtcaaaggtagaaagccaaaggggaagaaagattagccaaaataagtacatttgccatagtggtgcctactatgaatgtatttattggctattgactttttcttgttctgggttttttgtttggtttttttgttttcctagcttctgatcttctctttatccgtaagaacatttgtatagagacactagagtgggctaggtatagcagctagagcattccttatttttctctgcaatgagcatatgcatcatacagcactgtcaaaagacatgagtgtccaccttgagcttaagtccttgagcttagattgcatgtggaattcctttggaatttctcaaatttgtctgaatatggttttacatgttgctgttgttgactattttgaggcaatgctaacacacactcttgtattgtttaagacactaccgagaagtagtgtgacagcatcatgtcacatggaggaaagcacatgagacttatagtataggctagaaaaacttggtcatataaattttacagatttggagtccagagtgatctaaagtgctgtgagcttgttgctatgacagcactgacactgggaccaccaggattttaatgcgtgtaaagtggaagtgctgagtgcagcaaaggccacactccttagctttgcggccccatagagttgtctatcctgcttgtgccttagctcttctatcttcttcaatgaacataagaccaatggactcatctggtacctgatacttatgaaataatggcaccacccacaatggactggaccttaccccatcaatcactaataagaaaatgtcctacaggctggtctgcagccagatcttacagagaagtattttctcaattgaggcttccacctctctgataactctagcttgtgtcaggttgacataaaactagccaatagtctactacttggtaaagaatcactaacttacttatacaactgtaaatctgtgtttgcacaacagttacaggaaatcatattattattatagactcataactcatgtcggaatccttatttttcttggcagttctgttctaacaactgcaagaaatcactgctgtggtgatatatttaggattgattgcttggtagaaattaaaaacattttctggacaaacatttttgtttccatggcatcatgttagtctgtaggagatgaatcttagtggtgtggttgtctccgttaaaaactgaagtgtgtataagatttatatatacatcttgtgttggacttaaatattttatgggaactaaatttgataaatttgataatcaagataaagttattctttgctttcagatttcaactattgcagaaagtgaagattcacaggagtctgtggatagtgtaactgattcccaaaaacgaagggaaatcctttcaaggaggccttcctacaggtatgtgatttaatagttacagtcagagacgtgcaggaagacttagtacttggcaggtagagatgtcagacaccaataaagctggtccagaaagtactttgcatattatttctcttgagttacttctcaaataagctgatgtttatagtacaaaataagactattactctaaactagtggttctcaaacctgtggtttgcgatccctgaaaaccattggaaaaacaggttacttacattatgattcatagtagtggaaaattatagttacaaagtaacaacgaaaataattttctaggtgagggtcagcacactatgaggaactgtgttaagggttaggagattgggaagcactgctctggcagctgtaggacatttccctcctgtttttgtagctgtgcagactgttgctctccctttaaaaagcttgggttacctttgagtgttagcatcgttcttggtgcactgttgatctgcttagttacacatttataggcgatttttatgtcatggtccttagcaaacagctgtatttaatagttttcagggtaattctttgctaacatcctcaagtttgagtgcaactgtgatgttacctacctagtctatgccttgcctcaaaagaaggtcaaaaccaattactacaatatatcaattggttccatgttaagtatatcaagaaacaacattatctattaatctcatgcttacttaagaattcccttaacagagttaacagagacaaagtttggagctgagacaaaaggatggacaatctagagactgccatatctgggcatccatcccataattagcctccaaacgatgacaccattgcatacactagcaagattttgctgaaaggaccctgatatagctgtctcttgtgagactatgcagggcctagcaaacacataagtagatgctcacagtcagctattggatggatcacagggcccccaatggaggagctagagaaagtacccaaggagctaaagagatctgcaaccctgtaggtgcaacaacattatgaactaaccagtaccccggagctcttgactctagctgcatatgtatcagaagatggcctagtcggccatcactggaaagagaggcccattggacttgcaaagtttatatgccccagtacaggggaatgccagggccaaaaaagggaatgggtgggtagggaaatgggggggagggtatgagggacttttgggatagcattctaaatgtaattgaggaaaatacgtaataataaaaaataaaaaagaaaagaattccgttaacttcagaattttacagtaaccttctgtgttagtttaaattatgcctatttatgtacatttctattcattatttgtttttagatttattttgttttatgttaatggatgttttgtctgcatatgtctgtacaccagttgtgtgcatagtgccaacaaaggtcagaagatgttggatcccctagaactgagttacccatggttgtgaatcactctggatgctgggaatcaaaacaggccttataatagagcagtcagtgctcttaacctctgagccgtctatctagccttactcctttttttaaaaagtagttgattgccttatctccctccatgtacttacttagagttactactaagctctttttcaatcctcatccaattataaattccaaatattattagttaattaattttgaggtcctaagaaattttatgttgtaagatatatattataggcatttatatgtatagtctttactatttgttttattttgtgtgtgtgagtatttgtatttctgtacaccatgtgcatgacgtacctgcagaggctagaagtgatgtcaggccctctagtactagagttagaaacagtgtgagctgcttctcttttgttttcaatatagcatgtgttagatcttgagacattgaagtatatcttatgttagtatgtaatacctttgatcctgaagcaaatccaacaaagtattaagaagcaagtcacatgacttctcctaaatcctaagcaaatcatagctgccagatggctccagcagataaacatgctgatgcaagcttggtgacctgagtctcagccacataaggctggaaggcaagaaccaagtccaccaaattgttctatgacctccacacagggacctcctactacattcacacttaaacaaacaaacagacaaaacccacacaaaggccagctttatgtttgtcttaatatttctctggccaaaatcctagcaaaagttatttaaatcaaccatgctttactaatgaaaggaaagctctctaaagaaagcatggagagaaagggttataaagggtactgttaccttaccttagagttaaaccttcacactgagatactatttatatgaaggttatgaattcctgaaatgtagcctttatatctatctagattataacaagctatttaacagatgcttatagtatgcttgcaaggttagaaaaatgaaattgattgattatacaaaataggttaaagcagttaatttgtatacagcagaaaggtgctccattttgtctcttgtggcttgatattttcaccagtaattgttctgaaaaaatagaagccatgcatatcagatttgcaaatgatagaaccatcaggcttaataaagtgccctggtgctaggagcatgagtgccttgaaaggtcacagcaggcaaaggaaatgggctggaaaaataaggtgaaactgtaatgacaactgtaaagtctctgagacagcttacaaaataaacaagttgttcaaatatctgattctggatttattgatgaagaagtaaagttatttatttttatcagccaatataatctagagcaaaaagaactaaagtgtgaataatgtcttagctgtgggtttggattctcatgcaaaggggagctagattagattgtgagactaaattgatgatgtttaaacttccaacgataatcctaaataaggaatatttcttcatgttataatagcgccaggcatacaaggtatgtaactgtaatcccagtactggtgaggctaaggcaggaggattgtgatcttcccaacctgagattcataataagacactgtctggacagtggtggcacacgactttaatcccagcactctggaggcagaggcaggcggatttctgagttccaggacagccagggctacacagagaaaaaaaaacaaaaaaaaagccaggtggtggtggtgcatgccttttatctcagcacttaggaagcagagaggcagatctcttgaatttgggctagcctgttctatacagggtgacaaggtgagtttcagaataaccagggccacacagagaaaccctgtcttggaaaaaaccaaacatacatacattcatacgtatgtatgtgcatatatgtatacacatagacacatggcttgtgaaggctggagtgagtaaggggagatggtctaaaggacccagattcaatccccaggtcacatagtatctcacaaccatctggaactctagtctaagatacacagtggcctcttctggcctctgcaggcaccaggcatgtgcagataaaacacccaaacacatcacaaaaaataaaataaacatatgtagttttattttttatactgccccaccaccaccaccaccaccacgcaattcttgcatttgaagttcctgctttgtttggagtttattcatgtgtttgaatttttgtcctatacgttagtagttttctaatctctatttgtacttagtgaatttttttaaaattaaaatagctctttatttttctaggaaaattttgaatgacttatcttctgatgcaccaggggtgccaaggattgaagaagaaaagtcagaagaggagacttcagcccctgccatcaccactgtaacagtgccaacccccatttaccaaactagcagtgggcagtacagtgagtaatacatttttctattatgaaaagtgagaaggaaaactgttagagtctctttaagaaagtgataaatgccaaggcttttgctgccaatattgtttgccctactgtcagacattattaaagaattgttaagaggcatttattggaaatgtcactttttttttcttttatcctatcttccctttcgccatgtctcttacatgattcatgcacaaattactatttttaattttagaatgatgttggcttgccagcctgtaatttgtattccagctgtatttaaagtagattcctaaaggaaaatttttagcttttccaacactgaaacttttagtattatttataagggagggggttttttttgttgtttttttttttttttttaagatttgctatttttattcatgcgtgtgtgtgctgcatgagtttatatgcatcacctgtgtgcagcagttctgggaaacctttggatcaaatcctttgaaactagagtgacagacacttgtgagccacctaatatgggtgcggggaaccaagcctaagtaccctagaggattaagcattcttagccaccacgtcatcggtctgaaccgtaaggatggtgcttttgataaattgcctttactatctgtgataactgagctaaataagcttagatagatttttttttccttaaattattggtggctgtaaaaaggtatatcttcctcaccctgcctgtgtgtgtctgtgtgtgtgtttagtttgagctaatttcatttccagtttaagtgttcaagatggttcttttctgacattgtacaagacttctttttccaccagcatgaacatactgagggtatatcatattcctgtcctaacttactacctcggggattcttacttgaactagaaaagatgatttttagaaaagacatacaggagctgactgggagaagtattagattactaccatccccttagatactttagtttaaatgtactatactttgagatttttctctaaacctttattcatttatatactgcccctttggtacatgcatgtgtgcctttaatgaaactggtttagcattgtgttcttgatttttcttttccactaagaaacaacataatgaatactcacatgtatggcaaactacttatttttgtaacttatttatttgtaatttttaaaaaaatttatgtgtatgatagctttgtctgcatgtatatcaacaccacatgtatgtggtacctgtaaaaggtagaagagggcgttggattcctctgatactgaagttacaggtggttgttagccaccatgctgatgctgggaattgaatctgggtcttttggaagagtagtcagtgctcttaacctttaatcatctctacagccctgtattttgtaacttgtaaagttaacatggttaccaaacttgaagggttggatttataatatccataaactgtaaacctctttcagcctttcccatgaggaaggattgtatatatctctcctctctcattctatttttcaataagctgtcctgtacagattctcagctaatacagtttaattgtatttagattattaaagttaaaattttacgtaattatatttccttgttcatatttctcagtagtaatttaattaaacctagagataataattttcttaatgaatttggttttgtcaaaactgtcttatacttttaaagtgatcaaatggacaggtaaatattgcatagttaaagacatgtttaaatcttagatgagacgaatatattcaaagaatcgtcatttgtgtgtgtgttagacaccttatttagtgtttaaaacaactatgcatctgttatgtaagagcagatgtttttagatttccaggaaaattacaaagtcgaatgatcttaacagagtagcccatatcttttcttgtgtagttttttccttccattcactttgagcctgttactgtgtaatcaagaaaaaagtagagtgttgattaaatgaagaggttttgttaaccttctgattctttaaagtacccttccccaccctcttggtgtattgttactttatatgcgtggatgttttccttgtgcaccacatgtgtgcagcgcctgcaaaggccaaaagagggtgtccagtcccctggaactagctgcacatggctatgagcctccctgtcggtgctgggaatagaaagagcagccacgtctccaggtcttcccaagtaatcttacagaattagttgtagaacaattcttagacatttttttaacatctaagataaaaaaaatctgtgattagctaacataggaggattatatatgctagtatgttaatttccacaaatttatcaccttgataaagtgactaaataataatgctcttgattgaacagtgaattatcaattttctgtgtacacaccactcaggatggtataattccccagatctcactgatactcccaaactaattcacttctgttagacagtaacatcattagatacattgataccacactttttaaactttccttttaatgcaattataatccattatggagagctgggaacaaacctcaatcaatggagtgcattcctactgtgagtgaaagttttattctcaatactcacccatgcatatacacacacatacacactttatgaaattgctcaggtaaaattaacaatttttagtctttttttggaaaacgtgatccttagatttatctgagaagtcaatcatattttcagttctagtatctaaagattatgtattgcaaacaaggtaagaacttacctttcaagtcacttttcctgtgtactgttgtataagggtgacttgtgtgagtattgattaattttcatttgccagatagtagctagtgtgcttactcatcagtcagtagaaggctctgtgaagacccagacatggagcttagaacaagatgaggtgcatctagctgagggtcttggatctgagtttaaacttgatgagacacacatagtaactgagatccagggtatttcctgtctttcttgatgagatttttggtggagatggtggatggtaggtgctagagactgaacccagggccttgcacattaatgtattactgattcctctttttcttttcttaaatatgactaatttcctggatttattttgagatgctgtcttactgtgtttcccaggctagtcttaaactcctagctcagtgatttttttgttgttgttgttgttgctttagccccctgagaagtatcatgctttcacatggctgtctaagtacactactgacagagtttataaattgttttaagagttagaaaatataattcactgacagatggctttattaaatacacttttaacaaatatttattgggtgcttcttatattaattaattagttttctaccaaaaaatgtatttacaattaaagcagcagatagtaaaaatatctgagggagtttccagtgctgtaaaggaaagtgttgttgtaaagcatgccctccttggagtttaaataagttcaaaaagagtttgtgttttcactttttatattgttaccatgcattatttattatagtacaattcatagagtatatttctctcatagaaattggatatggtttcctgggtacacggttacttgaatataccaagtttttcttggtgatattattttctagaataatttctcctagattatgctttgctaattgcatgggtttagtgtattttaaaagtcttgtgtggtatgaattaaacttgtaacaataaaattcattgggttttagttgccattacccagggaggagcaatacagctggctaacaatggtacggatggggtacagggcctgcagacattaaccatgaccaatgcagctgccactcagccgggtactaccattctacagtatgcacagaccactgatggacagcagattctagtgcccagcaaccaagttgttgttcaaggtaatagaattaagaattcatacatatggtacattcttttaaaaattaatgtgtatactcatgaaaagtaagtatattacaaagcactactaaaatagttttcttcagtatagatttagatattaacagtttagatatgcatgtatttaatacataaatatctctcatgcaactttccactcagatgaaaatgtcatggcataaaaacaactatcttttagcttaaaaggggtttttcctgtctttaatgcctttagtagtcaggattggaagaaccaaaatatgttagaagagaactgaggaagttatagccaggctgaatggcctcaagtaacactagctcccctgggcccctttctttccctcctctgtgtgctatgtcactattaaagagttctagtggattctgctgttttatctgttttgtcttgtttttattatttttaatttaaaaggaatatagagcttttctgaagtcatcaatttggattttggataagaacaagcatcattatgcagatccttgctcattggagaacaagttgtcctttagcctcggtggacgagaggattttgttttgttttgtttcccaaaatttcaagagtctggagagtgttaactattcagcattaattcactgagcagttcatagttcaatattaccagattaaaaatttatagattaaaaaaataatatttgcttctaaaaatattttattaataataactaatgttgcctgtgttaatgagagttatatcccttcaccatggataattacttttggatcataccacaacaccaagtagaacatcttttgtttaacaatgtctaataaatttatactatatatcttgttattagaccaatgatatttaaaaaatattttgcttattagtgggagtaaaacaccttttcactttacatgcaggtactcaaaaaattgtaaagcaggatgtcagtgaatttgaattctcaacgtcagtttgaatatggtaacatgtttagtatataaatctttgtccctcaaacgatacaatcggtgtttttaactgatatgaatgattttataaagacattcaaaatctctcacatagtattagggtacttatgaaagcatatcatgacactgtttctagaagcaaataatggacaaatagtgattttttttttcacatatggagattgtatggtgaggaaaacccaaactacacgcctttaattccagcacttgggaggcagaggcagaggcaggtggatctcttgaattctaagccagcctggtctacataatgagttctagacagccagggctacatagtaagtccctgtcttagaaaactgaaatgaaaacaattcagcttttacttacttagttttagtcacttatattaagatatgtttacatataccatgattggcagcaaatgtccagtttttcatacttggagttttgtttgaattagaaatttataacagtttctatatgcttattttttttcttctattttgctattttatgaaaaatcatggtcgtttttatgtcgtggcaagagtctacttgagttttttggtttttgttttaaatgtgaatttatgtaaagcaagggaagatactgaggcctgtgtgggaggacatctctgctcagctcctttagacttaaagctgacaagcatgcaaaccacagactgcatctccctcccagcacaacatgaataagacccgcagggacgctgaggcaccctgccccgtacctgtactaataaataggacagacaattggagtcttcttcttagatagagtcccattccctgtttcccttttaatctaagtatgtttagattgattgagacacagttgaattaaattgtagtgtttctgtgtcttataccttgttcgctcttctctgcagctgcctcaggcgatgtacaaacataccagatccgcacagcacccacgagcaccattgcccctggagttgttatggcgtcctccccagcacttcctacacagcctgctgaagaagcagcacggaagagagaggtccgtctaatgaagaacaggtacagattccaaacacttaaatgctatgggtcaagtatgtctataaactcttctgtgtgtgcctttacatctgctaacagtaggttctgtgcattgattttctttttctggtagaattagtggatcttgctaaagcttctttgtttattaagttgcatttataagatggctaatggaactttaggtcagtcttcaatcaaaaaagtaatttttcttcatagtttttccacaagagaaatacatagctttaatgaatttgtactttattctagctaataggatatgttaattaaaaaaatttgtaagtaatattcatcaaagtgtcacatatgtatactaacattagactctagtttatttgcattaaatttatttataacaagtatacagtagccatttttgttttaatgaatactttcttttgcatttttatacacttacagatttatttatgcatgttttatgcatatgtgtcaatgcctacatgtatgtatatgtaccacattcataccacaaagggcagaagaatgcattagatctcttggaactagagtgagaggggttggtcagccacctgccttgttctttgtttggggtcagagtcttgctgtgtgggccaaagttgcctggagctcttatcctcccgcctctgggagtgagtgctggaatcacaaccttgggcctggccttaggggcaggggctttctttactcagtaataacttaacatccaaacacttttaaaacagagaaattctaaaaagtatggtattcccgacaaagccttaatgcacagttaatgttagtcttaagaagttaaagtggtacagaagagaagctataaaacacaggtaaagcctttcttagaaatttatttgctttcaaatgtttttgccatcttaaaaaaaaggaagttattaatgtggaaatgatcaaaacaaaacaaaacaaatggtctgaggaggccatcgttggttaatgtgttcaccatccaagcaagaacactggagttcagatccccagaacccatataaaattcttggtagggccctgtaattcctctgatggcacaggtggggttttcagggtaagcttgtctgtaagctctgggttgaagaaaccatgactcaagagtaagcgaaaaagcaacattagggaagatagcctgcacacacataaaacatgtgagtaaacatcaaggggctataatgggggagggaggtgaaaactaaaagagaatcaaggtgtatagagatgtaaactatttaaattcttctttttaccccaagagtgtaagaactatgataaagtaaatgagacagaaattgaacttagcagatctaacttcaattcctgcattcaccctttagctatgactctggaagaatacattaatttcctaaacttgggtttctacctttgagtaaaataagatctctccttgcacccaaagcttggctctcagggtcaggtaagacagcacatggcatctctactgctccttctcttccaacaattttatttttggtaggtcagcatcattgttcctgaaatagtcttaactgtcacagtcttagtaaattatatctagctatgaaaaaggagaaacccattctgagatagtaagggaatcttgaaaagaagccctgtgacctttattgtgcaccaaactgtagtctcccctcccccagcctgaaacctgcttgctcaggggtggagcttcccactcaatcgttctgccacgcccactgctggacctgcggctttgctgtttggagccgtgcacgtggtcaccctgctatttgaccccaagactaattggcgggaatcgggcccccttcccctgcttcataactgcgtgtagaacagtaaaatagaactttgatcagaatgcctgtcttagctgcatttctttatctcgccacctagtcctcttctcttccaggtttccaaaatgcctttccaggctagaacccatgttgtgatctgctggccggacacaacaccaaacaactataagtagttaagatataatagaaatgtactgcctaactcttatttaaatgttatttggaaatacgaattaagttacacattaatctgttcagttttaaagtatttgttaagaaatagttgaccttttctaaaataagaaagaatggtgtttaagatgtctcaagtaaagatctaattgtaaaatttcagacagcagcacttactaaagaaacaattctaaggggacagagtaatcagaatgttttttaaggacttgaaatcatggctgcatactttggctctgtagagtaaaggctcatctcttacagagaacctcagagaggtgtgggaccatgtgcaggggcagcaccagctcctttcttcctcccttccatgcagtactgggattgtcctgagggcctgttcatagtagacaggcgccctaccactgatttagactcaacccagcctttttacaatttttaaaacttccagacagggtgttgctgttacccaggttgatctgaattcactctgagatccggtggcacattacccatccctacctcatctctggaatcctgaagcaaagcttagtttcaataaaaaagagccaggctactttttccagtctttctgtctcagcttcctgagtagctgagattacaacctgtgccagccaagcctactcatattacaccttcttagctgcccagagcattgcctgcttataaacacttgttaggtttaccagtaggcacaatgctgctttttctccacttctcagtgttctgaaagtcactctgacagaatccccgagaaaccaacttaaagaagaaaagttttaaaagacgctcagtttcagcactccatggttactgggcaccattgattttggtctcatggtgaggcagaacatcatggccaggagcctgcagtggaacagagtggctcacgttttagcagactagaggcagagaaagaaaaacatgtctggagagactggtagtggatctcacacaatggaaagaaagtaactctccaaaattgtcctctgttccccttctgtgtgctttggggtgtgtgtgtgtgtgtgtgtgagtgtgagtgtgtgtgtgttccccctagttatcttccctggacacacaaaaataagtaaatgtaaaaggttggtaatgtaggaatgatagacaacactcatcgacctctggtttccacaagcatatgtacctgtacagacctgcacattacacaagcttagaccacactgataggaatgagtgaatgtaagttgtttttaagtgattggaaattatggcctagtcttcaagggcataacttattgacccacttctcttcagctaagttctatctcccaagttttccgataccttcctatgcaattgtgaacgtatccatggattaacccgtaagtgaggcgaaggtcctcataactcacaacattgcttttattcatagccaagccttttcaggaacactccattgaaaccataggccactctactactgtcactacctccaaaccacaccaggttaggaaggcaggtcattttttttttttaatcataatcttctcagatggtttatttttgcttggaaacatcatcaaaaggataaatagtgtacataaaatttaaaaacaagatcttccatttaggaagtcaactagtattttatttatgaattttcagggaggaaagtcacattgtaaaatgatattttacatcttcaagtgtcccaggagtagatgaaaaaccacgctgtccaagatggccatccttagtttgcctgctgtgaggatatatactgttgctggccccaactaacagctgtgtatcagcacacaccagatttccacaattgggacaaaataaaagagtacaatatccaaataattttatattaactgtgcattaaaatgataatactttaggataaatgaggttaagtaaaattcatttcaaataaattttgtttctctttaagtgtataatcaaatatatgtatctaatattcagcgtacaaagcaaaaagatactattttattatgtattgttgacatataaatgggcttcagaatctatgctttaaaaaaacaaacatgaacaaagaaaggtcatgaactgcagggcagttccctgggaattcatacaaaaccagtgtttgctctgatggatactgacgcagtattaacttcatcatttactgtgcatgaaggcagggcagatggtgagacagctgtggcagacggtttaaagatcaataaacacacatctaactttgtatctcttatctcttgtccttaatggaaggtaaacagtgatatgcgtgcaagcgtgccgtgggtgcgtgcgtgcgtgcgtgcgtgtgtgtgtgtgtgtgtgtgtgtgtgtgtgtgtgctatgtatgtgcttcttggtgtgttcacatgcacacatacacgcacgcagctcaaggtttccaagaggaaatgaaaagggctaactaaacaggaaggcagttgttaagatagttgcttacaagaggtctacaaagctgcctgattacaagcagggactgtaataagatgcttttgcttagatttagttactgtctgtcaaagggaagttgcccatactctgaagtagttctctttcctctacccagggaactttttaagctttcctagaatctggcttcttaccatatcacttacatgtgcctagaaaagtacaggctttcccatacccctggcaagtctagcatactcttctcagttatttctacctctgtggttagccaacttttgaatgttcagtatcctaagcttccctggtttattctaagttacagtgtgtattagacactagccttcacacgcagtctgtctcttatagccaaataagatctttttccactttgcagaagagaaagaaggtaaataccagagaaaagctaaatagcagtcagatgtccggtatcttaggtaaaaagcctgaaagacagtttgaccctgtgtctaatgacaagtctcctgagcttgtttcaccctgctgtgcctctaagcagagtaaaacacactgttgtcaggatacatagccccaggaaataactgtagaatgctttcctgggatgtccattttgctcagagtcaagagaaacaaactctaattttaagaggaagtaaattcaaaagacattagtactgtagtagttgctttaagctgtatctccagaatcacctaccatattggtgtcattattactgtaagtcttcagtagacaagttagagcatcattgaccacaataagtgaccctcgtgtacattgatcacagcccatctcacactgaacttggggaggtggtttgaggaaccccaaaattctattgtgtgagagttgtcaattattccaaagtgaagataattggcatacattttgtgttactatagcaacagtcataaaatctcagcatcttggaacagcatgacctcttcctctcattataagttgtacattgtcagttccaagtcagttgctgtggcttgtcttcatatctcatcgtcattgccagttgcttcctggatccccactgagtaagagcagcatgttcaagacatagcctttctatggcaaatggggaaggcacagggcctgagcgtaagatccaaccatttttttcaggagctggctctccgcttctaccttgttttgaggcatgtctcatttctgccactgcactgcattagggctgctgtagtacagatccagctttgtgtgtgcaatgaaacagttaggcttgttcagtgtgcgctttcatgccctgagacatctcccaacctacatatgctttggctcactatgtccatttgtgtccactggctacaactctgggaaggcaagcccaagtcagtgggctgtgcatggggattctttccacagagaggattgtgagagtaatacagtttgctgcccttacttttagatagcctacagtgtagaggggccttaaatagggtttccaaagatgaagttaataaaccgttaaatagatttcacactaaatttaaaaaccttacttcagtgaagaacaaaagaaaaatagcaaagtaaacattaaactgggggattagagttgaggatatggattggcagatttacagaaaatgaatatgttcttgagtttcatgtgtttcccaaattgtatcttatatcttgggtattctaagtttctgggctaatatacacttaccactgagaacatatcatatgagttcttttgtgattgggttacctcacacaggatgatgccctccaggtcaaaccatttgcctaggaatttcataaattcattctttttggtagctggtagtactccattgtgtaaatgtaccacattttctgtatccattcctctgttgaggggcatctgggttctttccagcttctggctattataaataaggctgctatgaacatagtggagcatgtgtccttattacatgctggaacatcttctggatatatgcccaggagaggtattgcgggatcctccggtagtactatgtccaattttctgaggaaccgccagacggatttccagagtggttgtacaagcctgcaatcccaccaacaatggaggagtgttcctctttctccacatcctcgtcagcatctgctgtcacctgaatttttgatcttagccattctcactggtgtgaggtggaatctcagggttgttttgatttgcatttccctgatgattaaggatgttgaacattttttcaggtgcttctctgccattcggtattcctcaggtgagaattctttgttcagttctgagccccaatttttaagggggttatttgattttctgaggtccaccttcttgagttctttatatatgttggatattagtcccctatctgatttaggataggtaaagatcctttcccagtctgttggtggtctttttgtcttatagacagtgtcttttgccttgcagaaactttggagtttcattaggtcccatttgtcaattctcgatcttacagcacaagccattgctgttctgttcaggaatttttcccctgtgcccatatcttcaaggcttttccccactttctcctctataagtttcagtgtctctggttttatgtgaagttccttgatccacttagatttgaccttagtacaaggagataagtatggatcgattcgcattcttctacatgataacaaccagttgtgccagcaccaattgttgaaaatgctgtctttcttccactggatggttttggctcccttgtcgaagatcaagtgaccataggtgtgtgggttcatttctgggtcttcaattctattccattggtctatttgtctgtcattataccagtaccatgcagtttttatcacaattgctctgtagtaaagctttaggtcaggcatggtgattccaccagaggttcttttatccttgagaagagttgttgctctcctaggttttttgttattacagatgaatttgcagattgtcctttctaattcgttgaagaattgagttggaattttgatggggattgaattgaatctgtagattgcttttggcaaggtagccatttttactatattgatcctgccaatccatgagcatgggagatctttccatcttctgaaatcttttttaatttctttcttcagagacttgaagttcttatcatacagatctttcacttccttagttagagtcacgccaaggtattttatattatttttgactattaagaagggtgttgtttccctaatttctttctcagcctgtttattctttgtgtagagaaaggccattgacttgtttgagttaattttatatccagctacttcaccgaagctgtttatcaggtttaggagttctctggtggaatttttagggtcacttatatatactatcatatcatctgcaaaaagtgatattttgacttcttcctttccaatttgtatccccttgatctccttatattgtcgaattcctctggctaggacttcaagtacaatgttgaataggtagggagaaagtgggcagccttgtctagtccctgattttagtgggatggcttctagcttctcaccatttactttgatgttggctactggtttactgtagattgcttttataatgtttaggtatgggccttgaattcctgatatttccaagacttttatcatgaatgggtgttggatcttgtcaaatgctttttctgcatctaacgagatgatcatgtggtttttgtctttgagtttgtttatataatggattacgttgatggatttctgtatattaaaccatccctgcatccctagaataaaacctacttggtcaggatggatgattgttttaatgtgttcttggattcggttagcaagaactttattgaggatttttgcatcgatattcataagggaaatcggtctgaagttctctatctttgttagatctttctgtggtttaggtatcagagtaattgtggcttcatagaatgagttgggtagagtaccttctacttctattttgtggaatagtctgtgcagaactggaattagatcttatttgaaggtctgatagaactctgcactaaacccatatggtcctgggctttttttggttgggagactgtaaatgactgcttctattactttaggggatatgggactgtttagatcgttaacttgatcctgatttaactttggtacctgatatttgtctagaaatttgtccatttcgtccaggttttccagttttgttgagtatagccttttgtagaaggatctgatggtgttttggatttcttcaggatctgttgttatgtctcccttttcagttctgattttgttaattaggattttgtccctgtgccctctagtgagtctggctaagggtttatctatcttgttgattttctcaaagaaccagctcctcgtttggttgattctttgaatagttcttcttgtttccacttggttaatttcgccccgagtttgattatttcctgccgtctactcctcttgggtgaatttgcttactttttttctagagcttttaggtgtgttgtcaagctgctagtgtgtgctctctctagtttctttttggaggcactcagagctatgagtttccctcttagaaatgctttcattgtgtcccataggtttgggtatgttgaggcttcattttcattaaactctaaaaagtctttaatttctttctttattccttccttgaccaacgtatcattgagaagagtgttgttcagtttccacgtgaatgttggctttccattatttgtgttgttattgaagatcagccttagtccatggtggtctgataggatgcatgggacaatttcaatatttttgtatctgttgaggcctgttttgtgaccaattatatggtcagttttggagaaggtaccatgaggtgctgagaagaaggtatatccttttgttttaggataaaatgttctgtagatatctgttaagtccatttgtttcataacttctgttagtttcactgtgtccctgtttagtttctgtttccacgatctgtccattgatgaaagtggggtgttgaagtctcccactattattgtgtgaggtgcaatgtgtgctttgagctttactaaagtttctttaatgaatgtggctatccttgcatttggagcatatatattcagaattgagagttcctcttggaggattttacctttgatgagtatgaagtgtccctccttgtcttttttgataactttgggttggaagtcgattttattcgatattagaatgtctactccagcttatatcttcagaccatttgcttggaaaattgttttccagctttcattctgaggtagtgtctgtcttttgccctgggatgggtttcctgtaagcagcaaaatgttgggtcctgtttgtgtagccagtctgttagtctatgtcttttttattggggaattgagtccattgatattaagagatattaagaaaagtaattgttgcttcctattatttttgttgttagagttggcattctgttcttgtggctgtcttcttttaggtttgttgaaggattactttcttgctttttctagggcgtggtttccgtccttttattggtttttttctgttattatcttttgaaaggctggattcgtggaaagataatgtgtgaatttggttttttcatgaaatactttggtttctccatctatggtaattgagagtttggctgggtatagtagcctgggcttgcgtttgtgttctcttagtgtctgtataacatctgtccaggatcttctggctttcatagtctctggtgaaaagtctggtgtaattctgataggccttcctttatgttacttgacctttctcccttactgcttttaatattctatctttatttagtgcatttgttgttctgattattatgtgtcgggaggactttcttttctggtccagtctatttggagttctgtaggcttcttgtgtgctcgtgggcatgtctttctttaggtttaggaagttttcttccataattttgttgaagatatttgctggccctttagttgaaaatcttcattctcatctactcctattgtccgtaggtttggtcttctcattgtgtcctggatttcctggatgttttgagttaggatctttttgcgttttgtattttctttgattgttgtgccgatgttctccatggaatcttctgcacctgagattctctcttccatctcttgtattctgttgctgatgttcgcatctatggttccagatttctttcctagggtttctatctccagcgttgcctcactttgggttttctttattgtgtctacttccctttttaggtcttggatggttttattcagttccatcacctgtttggtcgtgttttcctgcaattctttaaggccaggaatgttgcccttcccttcattgctttaaaccttactcaaccacggtgtggtgggctcctgtaatcccagcactcaggccagacaggactgaaattttgaggccaaccaggtctactcagcaagactttgagacagaacaggctgttgtgcacataatgcccccatttcttgtttctcccagccagctgtgttccttcttccatgtctgtaccacatagtaaggatgtgcaaggaatagatctctgcttctattacaaatggttgcctgtaaaattgctcattttttcatgttttacaaaactagaatatttttactttctattgctaggattattgaactatagatagagcttttgagtttatgagtttgttttgaagcttgccgaataataaatttttattcttttaatttgttaagatttttcaacctcccttttaatccttaaaaaaaaaaggagaatttctatcttgaccatttttaagtgtacagttccgaaatactatatatatccccatcatggtttaatagatttccagaacatttttatcttgcaaaacactcaacctgatagtcatgcttataattcatgtggacactacccacgaaactgagtatgtagtatggaatcatatctcaaaacaagaacccccaaactctctctgtattcgacagttctccactaaccccattccaatctttcggcaaacgcatccagtcctataaaattttattctaacaaactcttagaagcagaattctacagttttgttttttatgactagcttacttcacaaagcaatatccacattatagcatataccaaagttttcttcattttaaaggccatgtaacatttcattgtctgtaagcactttgttttctttttttttctatttttttaagatttatttatttattatatataagtccactatagctgtcttcagacactctagaagagggcatcagatctcattacggatggtgtgagccaccatatggttgctgggatttgaacttgggacctttagaaagtcagtccgtgctcttaacctgaaccatctctccagacccgcactttgttttcttcatccatttgtcaagggacacttggattgcttttgtacatcttgaatattgtgaagagtgctagagacacaggtatacaaagaatttcttttaaatctagtgaaattgannnnnnnnnnnnnnnnnnnnnnnnnnnnnnnnnnnnnnnnnnnnnnnnnnnnnnnnnnnnnnnnnnnnnnnnnnnntgttctacacacacacacaacacccacccacccacccaccattctgtttggtcaatcttggcagaaattgggccttttgtaaatgtgatgcattctacagatttgctccactgtagcagcaattatagataaaactgtgctagagccgggcagtagtggcacaggcctttagtcccagcacttgggaggcagagacaggtggatttctgagttcaaggctagcctggtctacagagtgagctccaggacagccagggttacttctgaacgtataagccagccccaaataattgttttcctttataagagttgccttggcctctgggtctgttcacagcagtacaacctaaaacagctattaggacatttcagaattaatgataaggataaatgtggtagagtaaccctgtctcgaggggcaggttggggggggtggggggtgctgtgctagtttcttttcatcctttcagttatttcttaagatagtgattatcatttttagtatggccatcctaatagttgtgaagtactatcttgtggttttgattttcatccccctagtgattgatattgagcaccttttcatgtgcctgttggctatctgtacatcatctaagtctgctaaaattgtgtgtgtgtgtgtgtgtgtgtgtgtgtgtgtgtgtgtgtgtgttcctttgcttgatgtcaggtgtcttctttaatcattcttcacattttttgtgaaaagtttctcattgaacctggagccttgcagttagctagaatggctcccctggcaagccccagggacctgcctttcactgcttcctcttcacaggattacaggcttgcacctcgcattggtggggatcagactcaggcgccatctcccagccagtgcttattttctaaactgcttattttattgtcaaattgtaattattcttaactagttatcatctattattcaaaaatagtctcattttagtctgcctttttactgatcattgtatctttaacgtacagaaactttttaaatgtggtgaatcctcattgtctgttttgaccgtttacagtgctgtacacaagaaatcactgcgaagcaaaattcagaactattttgttgtaaaagtgttacacatttaggtctcatatttagatccttgatccattatgagttaaattttgcatatggtaaatggcaagggaaaaacttcattattttacctgtggagatccaattttcctaacagcatttatttatttttattctttgaatgtagatgttactgtaagtatgtatacacttgcatatgcatttgtgtggtgggctaagggtagcatcaggacttttctttaattactatttaacttgctcttaatattgatttatttttataatgtatataagcattgcttgtattaattcatttttataatgtatataagtgtattaattgcatatctgtctgcaaaccatagtgtgtgtagtgtctatagaggccagaaaagagtgtcagatcctctggaactagagtaaataggcatgacgtgggagctgggaataaaacctgggtcctttggaagagcaacaagtgcttctgaccactgcaccatttctctagcccctccaacgttgattgtggattgttgttcttgttgttttcccttttactggaatagatgttttcgcacatatatatccttattagtttcccctccccctactccttccagttccttcccacttcccttcccttccggatccactccctttctgtttctcattagaaaacaagcaggaaactttatatgccccagtacaggggaataccagggccaaaaagggggagtgggtgggcaggggagtgggggtgggtggatatgggggactttttggtatagcattggaaatgtaaatgagttaaatacctaataaaaaatggaaaaaaaaaaaaagtaaagaaaaaaaaaagaaaacaagcaggattatgaaggattataataaaataaaatataagattaaaaaaataacataccagaattggacaaaacaaatggaaaagagtccaagagaaggcacaataaatctcattcacacattcggggtttctatagactcataacatatatgcagaggacttggaacatagctatgcagaccctgtgcatacagcatcaatctcaatgagtacataccatgtgtgttcttttgtgactgggctaccccactcgggatgatatttctaggtccatccatttgcctgcaaatttcatgaagtcattgtttttaatagctgagtaatattatattgtgtaaatgtaccacattttctgtatccgttcctctgttgagggacatctggatatttccagctactagctattataaataaggctgctatgaatatagtggagcatgtatcgttgttatatgttggagcatcttttgggtatatgcccaggagtggtaagctgggtcctcaggaagtgctatgtccaattttctgaggaactgccagactgatttccagagtgattgtaacagcttgcaatcccaccaacaatggaggagtgttcctttttctccacatcctcgccagcatctgctgtcacctgaatttttgatcttagccattctgagtggtgtgaggtggaatctcaggattgttttgatttgcatttccctgatgactaaggatgttgaacatttctttaggtgcttcttgaccattcgagattctttagttgagaattctttgtttagctctgtacctcatttttaatagggttatttggttctccagagtctaacttattgagttctttatatatattggacattagccttctgtcagatgtagaataggtaaaaacctttccccaatctgtacgttgccattttgttctgacagtgtcctttgccttacagaagctttgcaattttatgaggtcccatttgtctataattcattttagagcctgggccattagtgttctattgagaaattcccccctgtgccgatatattcaaggctctttcctgctttctcttttaatagattcagtatatctggttttatgtggaggtctttgattcacttggacttgaactttgtacaaggacataacagtgggtcaatttgcattcttctacatgttgactgccagttggaccagcaccattccatttgttgaaaatgctgtcttttttccactgaatggctttagcttctttgtcaaatatcaaggtctatgggttcatttctgggtcttcaattctattccattgatctacctgcctgtcactgtaccaatactatgaggtttttatcactgttgctctgtagtagagcttgaggtcagggatagtgatttccccagaagttttcttattgttgagaatgttttttcactatcctgggtttcttgttattccaaatgaatttgagaattgctctctctatctcagaaaaattgaattggaattttcatagggattgcattgaatctatagatgacttttggtaaggtggccatttttactatgttaatcctgccaatgcatgagcataggagatctttccatcttctgaggtcttcattttctttcttcagagacttgaagtttttgtcatacagatctttcacttgcttggttagagtcccaccagtatattttatattatttgtgactattgtgaagggtgttatttccctaatttcttgctcagccagcttattctttgagtagaaaaaggctactgatttgtttgagtaaattttatatccagacactttgctgaagtagtttatcagctgaaggagttttctggtgcaatttttgaggtcacttaagtatactatctgcaaatagtgatgtgttgacttcttcctttctaatttgtatccctttgacatccttttgttgcttgattgctctggctagaacttcaagtactatattgagtacatagggagagagtgggcagctttgtctagtccctgattttaatggaattgcttcaagtttctctccatttagtttgatgttggctactagtttgctgtatgttgcttttactatctttaggtatggaccttgaattcctgatctttccaagacttttaacatgaagggctgtcaaattttgtaaaatcctttttcagcatctaatgagatttttttctttgagttagtttatatagtgtattatattgatgaatttctgtttattgaaccatgcttacatcccattaaaatgaagcctacttgatcatggtgagtgatcattttgatgtgttcttggattcggtttgtgagaattttattgagtatttttgcattgttatgcataaaggaaattggtctgaagttctctttctttgttgggtctttgtgtggttttggtatcagtgtgtaactgtggcttcatagaatgaattaggtagtgttccttctgtttctattttgtggaaaagtttgaaaagtataggtagtaggtcttctttgaagatctgatagaactctgcactaaaaccatctggtcttgggttcattttttggttgggagacttttaatgactgtttctatttcattaggggttatgggactgtttagatggtttatctgatcctgatttaactttggcacctggtatctgtctagaaaattgtccatttcacccaggttttccagttttgttgagtataggcttttgtaataggatctgatttttttttttaatttctttggtttctgttgttatgtctccttttcatttctgattttgttaatttagatactgtctctgtgccctctggttagtctggctaagggtttatctatcttgttgatttttctcaaagaaccagctcctggtttggctgattctttgtatagttctttttgtttccacttggttgatttcagccctgagtttgattattttctgccagattatttcctgccttctactcctcttgggtgaatttgcttccttttcttctagaccttttaggtgtgttgtcaagctgcgaatgtgtgctctctctagtttctttttggaggcactcagagctatgagttttcctcttagtactgctttcattgtgtcccataggtttgggtatgttgtgccttcattttcattaaattctagaaagtcttttatttctgcctttatttctctcctgaccaaattgtgattgaatagagagttgttcagcttccatgtgtatgtgggctttctggtgttttgttttgttttgttttgttttgttttgttttgttttgttttgttattgaagaccaaccttagtccctggcaatctgatgggatgcatgggattatttcagtatttttatatctgttgaggcctgttttgtgaccaattatatggtcagttttggataaggtaccataagatgctgagaagacagtatattgattgtttgttttaggatgaaatgtccaatagatatctattaaacccattcagttcataacttctgttcattgcattgtttctctatgtagtttcttagacatgtcatagatgatagtttcatcatctatggtaattgagagttttgttgggtatagtagtctgggctgacattttgttctgttagggtctgtatgacaactgctcaagatcttctgactttcatagtctctggtgagaagtctggtgtaattctgataggtctgccttcatatgttacttgacctttttcccttattgcttttaatattctttctttgttttgtgcatttggtgttttgattattatctgacaggaggaatttttttctgatccaatctatttaggactctatcatcttcttatatgtttatggtcatctctttctttaggaaagttttattctataattttgttgaacttgtttactggcccttttgacttgggaatctttgctttcttctatgcctgttatccttcggtttggtcttctcattgtgtcctggatttcctggatgtttttggttaggatctttttgcattttctttgactgttgtgtcaaggttgagactctttcttctatctcttgtcttctgtcggtgatgcttgcatctatgaatcctgatctctttcctaggtgtgttttgtgttttttggttggttggttggttggttggttggttggtttggtttttttgtttttcgaggacaggaatttctctgtatagccctggctgtcctggaactcactttgtagaccaggctggcctcgaactcagaaatctgcctgcctctgcctcccaagtgctgggattaaaggcgtgcgccaccacgcccagcttctcctaggttttctaacaccagggctgtctccctttgtgatttctttattgtttctattcccatttttagatcctgaataaccatgttcaattcctttacctgtttggttatgttttcttgtgtttctttatgggatttatgtgtttcctctttaagagcttctacctgtttgcttgtgttctcctgtatttctttaagagagttatttctgtccatcttaaagtccactatcattatcatgagatgtgattttaaatcagaatcttgctttttcaggtgtgttggggtatccaaggcttgctgtggtgggagaactgggttctaataatatcaagtagtcttggtttctgttgcttatgttcttgtacttgcctcttgccatctggttatctctggtgttagtggtcttgctgtctctgactggagcttgttctcctggcttgttagcactcctgggagatgaggggcaggatttgggtgcagatagctctgtggcacagggtcagctccagggcgcagatggaaacctctagaaggatcctgtccccagctgcaccatggttcctgggtcctgtgggctctggttgggtctcataggtctcagctgtgatcttatgtgtgtcagcactcgtgggagattcgctttctcgggtcgggactggggagcagatagttttggcacagggtcaactccaggtcccatatggaaaccaatgatctgggtttcttatccttcctgtccgactgttatttttagattttgtggtgtcccgtatttctaggatgtcttttgccaggaatttttagatttaacattttccttgattgatcaatttcttctgtcctgtcttcaaaaccagagattacctcatcatctttgcattctgttcatgtgacttgcttctgtgattcctgttcaagttttaaaggttttatttgcagagtgtcctcagcttgggttcctttattctgtttgcactttcagactttgagttgttttatcccttccatcccactgcttgttgtgacttcatgggagtctttaagggatttgttcatttcttctttaaggccctctatcatattaataaaggctattttaaaatcggtttcttgttttcggctctgttgcaatactcaaggcctgctctggtaagtttgctgagccctgctggatacattgtcctagctgttactatttttatgctgacatctaggcatctggtttgagaagaatgtaattctaggtgttgatatcagatcttgtgtttgtgagcatgatttattccttggtttctgttgctctctggttctttggagaatgtggttactctctgttgttactctttgttgtctggtgggacattcttctgggatctcacacacagttgatctatgatggtcctggaggtggggtgcacagggaagagcaaagcagggtgttccaccaggatctgctcagacccctgggagtgaggccagagtgagaagttacaagtagtcttctacagagttggggatgagactcggggacagacttggaggaatacaggaagaggtgaggagatgggcgcaggaggtggcacagaggcctcagaggtaatctacatagctatggatgtgactggggaattggttttggaggagagaaaatataggtgaagatcggaaattagtctgcctgtttccctggtgagagtggcatgcagattcctagggagtccctgttggagttggggtctgagataaggcaacgagttgggggggccggaggagggaggttagaggtgttcaaggaagaaacctctgcaggtgacacgggattggatttggagggacagagggaaaaaaagagaagatctccacttagcctccatccttcccaccaacttccatttttgaaagtctttcattaaatctggagctcaaggattgaggtaggctttatggccagttcattccatggagctttctgccttctgtctgagcccgttgtgggcttttatcagggtgctaagcatctgaatccagtccactgcttgtgcgttggtactttacctactgagctatttttaggtagttggaaaagatacattttttacctagtgcgtgtacacatgcatgggagcagataagtaaagaagaagcagtaggttctcaccatcagccatgtggggttcaggggctgcgctcagattgtccagcttagcagcaaggggcattaccagtgtgctgccgcatcaggcaatgccagtatcatttcctgagcatttcttgtataatactgaacgtttgcttatttcagctgtttctctagaaaacattctgttctaaaattagtggaatggagtttatgaacataaatttttttgtgtttttcatttttagggaggcagcaagagaatgtcgtagaaagaagaaagaatatgtgaaatgtttagagaacagagtggcagtgcttgaaaaccaaaacaaaacattgattgaggagctaaaagcacttaaggacctttactgccacaaatcagattaatttgggatttaagttctctcctgttacggtggagaatggactggcttggccacaaccagaaagacaagtaaacatttattttctaaacatttctttttttctatgcgcaaaactgcctgaaagcaactacagaatttcattcatttctgcttttgcattaaactgtgaatgttccaaaaactacttccacttctgccctcaagaaatgtgcagcgccaggaatcatgaagagacttctgccctccgtctccaccaccctcaagaagtaatcatttgcttatttgtaaattgttgggggaaatgaggaaaatgaaatcttggctttcttatttttgttttaggtttgttttgtttgttttcttattaatgacttcaaggtttgttgagctccatgattgccttagggacagttacccagcctgctgagctgacgtaatgtgtgggccacacaggaaagtaaggaaggtgcaatgaagaagtgttgactgccaaattaatgtttttacactttcattgtgaattatgtcgaactattaaaaacatcctttaaataaggatattagtgtggtgttgggagtaaactttatatgtatgttcctttcttcagcactgacaagttgtccttggtgctgagaagcacggtattggctacagttcctctgtagggcagttgttgcttcttcattcagttctgtgtgttcagcagtttgaatacattaacagaagtaaccaactgaatggaaagcatggttttgaattttgagttaagttaaaatcatactataaagcttattctggtgagtactaagtcttaatgagtaggtgctggccaggaagctaactccttgagttatacaataaggtgtttaataaataaagacttttgtccttgctttccgaatcctcatactgtcactcatttacctagtccactgctgcatttacactgtgcagccaacaggagcgttttcaagatgtccagccaaagtgatggaaagtactaaatagacaaccttttctatagtcatatttttatcagagaatctcttgggatttttttttttaaatcaaagaagttacaaggatgtgattctaaaacattgtgttaaatgcacacaagaaaagtaatttccttcagacattggagtgtgtgctatggtacaatatttggcaaacacttttttttttctcctaaaaaaggtggtactgctttaactatccaaaagctgttctgtttctgaagatgtttctacttacatccttacctagagtctacatttatgtgtaacattgtttctgataagacttagtaataactcatttttttttattaaacctaataaaatctaagagttacctctttaaaagacaaatatgaggacagtggaggctggcatgttaggttacttcacgtttgaggaagaactcagactcagaagagtgtcttatatttgctttgggatattaagaaagttaatattaatatcagtatacgtatgagcgggaactgtttggcccatttctaagctaagactaggttgctatctgtaaatgttctacgttgtttataacaaaccattgtcttttttcaaggatgaacagtttgtgaaggacatgattctaggagttgagtgatgtaataatccttctgtctggacagttcaccagattctccagaaggctttcaaacggctaaagtttgatctttgtcctgctgagcttgctgggaaggagatagcataaaagctgtctgtgctagcaagtagatgtatcatttgctaaacgtggtgaaacaaaaaggaagcagaatcacaaatctgtcaacaaactggaattacttcacattaagtcagaatgtcagattgaacattttaaatgtcacaagtggaaaatttgcctagcgtgcagaagttgtaatctctaagtgtctatcttcaaaagtcgaggttttctacataatgaggaaacaggtggtctccttaaccctttagagaccaaggcagtctcagccatacttcctagttggatggatattaatttacagaggcctgggtctttatgcttggagcatgactgtactagtttgacaccagttacttgataatgtgagaaatatatggtgttgtgaaacctgactttgaaatttcagttcatacagaaagaaatcaaagcctctttaatgcaagctggattttttttttaacatgagaatgagaaaaacaaaaacaaaaacttgtttttgagctatgtggagaatctttattaagaaaatgacataattttttaaaaactcttatatccaaaattgtatgtggccacattatcggtaatgttttctcttcatgttggccaaaagggaatggaactgtcataggaatctgtacatatgctactgatttgcctagagaatagaagtttggtactgctcactttgcatatatatagtggcacttttatctatagggcagattaactctaataaaaatgaaatggggataggtttatttttgatatattactcttctgagttttcaagctttgatagtgtttaactgaaaaatggtttagaaagggctagatccaatatgttcatatttaaaaaattgatatgagatacaatttaagttctttatcaaaagcaagtaccatattagcaaccatcatattgtcctaggtgctgtgcttgtttagatggtatagtgtgggtggggacgtggcattttgtaatatatgtgtacatatatacatacatacagtatatcatctaaatgctctgagagctggtatgtcaggaatgctgagtattatagcgtattgaggtccggtgagattccactttgctgtgctttctcctgcatctcttctggtgtttcagtgactgttttactccagcactcacaactgggttttctcttttcttccagttttttattaggtttttgttttgtttggcttgatgcttttgagtatgttaccagtcacttaaaaactcctaaaccccaagctcttttccccctgctttgtttctggcagctataaaattggtaagaacattttgaaaaaaggttttaagagaattgtttcaagaatcattttgggcaaagacttttcatgtttcatttgaacagggatttttgtcaagatgtgttttgatggtaggccagcaagcagtgctactgtctaaagcacaaaccagtcaggcaggctgtccagccagaagccctcttggctgaagccggtctctgcctctcaggactcctccctactattttcgaccatttagggtgacatggaatcatacaaatattggggcttagaaacaaacatttatataacccggaatgcttttacgtacttgaagtgacttcagtcaaaatgttgcctttcctgtttaggaagctttggttctctgttgactcgtcagctagtaacacaaatcggtttctctaccaatagctgcttcattttcagttccttccagaggcttttgttctgcctttgtaacactgaaactctggattggcacagcatcccggggcccagtacacaggctgtatgttgacttgaggttgtatttacagtagttctttgtaaaggtttgctgtaacttgcacttttttttaaggacccagtttgggtatcagcaacttgggaaattccttatcaatgagttctcagctgacccttttgtcttcctccttcaaatcatgactccttaatggaagcgtttcattgatcacagtatcatagctagccttaagcatgttataaaagctaaatatctgggaattaggtttgactaatagtgaaggaaaaataagtacttataattttaaatttcatcctccaactttagttctatgtagagcatgccaaaagttttttttcagaagattacaaaccttgttaaagcaattaatttgttgtcatcatgggaaaccatgtaatcgatgttactaaatcattttaatttggctttgttaacttccgagaaatgctgcctaaacgtaactggtttctgactgcgggggagtacagtatgctttgttaggcctgtaggtgactcattctagaataaacgtgttcactgagatgtacaaagcacaactagagttttgggtggcttgtgtgtgtcttgattactttcaatgttaatgttgactttttaagttaacagtcactgttatgtactaggaactggtttccttgactttctagaatcaatggccaagagaggcatataatccttgaggggttgaaggtatcatgaagttgagtcagtatggaagaatttcaaacaaatcaaacagggtgctgaagttccggctgactcatctgctcatggtatgcttactgattagtgaatgtagttttaagcctttgtgtgtgtcctcaggggcagacagactttaacaaggaccagataacatttgaatggaggaattatatttcaggtgttttagcttgaaatttattttttaaaaaaaagaaaaattaaaaaaaaaataagagagcaaagtttgggaagcgagttgacagtatgaaagcagcagagctgaggatgagctggcctgtcccactgctgcagtggggtgggtcccagctggggaaatgttacattgttaccagcaagaaaaaggaagaagggtcaaaaagtaggaaactcctacttttgcaggcatgatttactacttgtccatagtagtatagcatttctaagcttctaagggcatctcaaaagataagagtaagtccgagatgttgaaaaaatcagtagggaagaaagatcactgcagatcataatctatgttggccacatgaaatgatttattatatttgggaagttttattttcttatgttttttaaaattgaattggtaagtgctttatagacgtatttttacccaggtgccacttcaatgtgtatgtaataaaattatttatattaaaagtgggaaattttgtgaacatttttctgtgtgtgtagatttattaggatggtgaagaagtgtgctagttagcagttttctgtgtaaagctgtcttgagctgatctgtacacatcggttataatgccccagtggaacctagacatgtcacttgagacttttgaaaaacaaaataaccagggaagtcctagaatggtatttggctgtttggtttttccttgagtactggagtagagaatacctccccagaactgtcagcacaaaacagggtatcagctttaactctgatgttcctattggagtagagtactaataactatgagaaggggaatacatttctaataaccttccctacaatctagaaacgtccctgtttaaattttttacctaaatctttttgtgctttatgtgtaaagaataaaagtaccaagacaccatgcattttattaacactatgtacatactggctgctttgtgttcagaatggtagcagttactttgtatattaaagtgatccttgtgaatttgtgaaatattgtcttaaagtgcttttcttactgtaatctttgtggtatcaactgtcataatgccctttttacacagacatttatgtgcagtcacataaacatgcttttaaaaactctgtaaagtctcttttttgggcctgggacacccctccccaagctagtatttgtttaccctcattttcttggacttgatgttattttgtcaaatgagcaaagattacattgaatgatcacaagcttgtaatgcttagcaacagaaaactgtaattcatacaacacatctaaacactcaattttactgaattctttttagcacttttttgagtaaggctgagcatgatctaaaactcccaagtgctgttctcccgtcaagtaactaatggagatgtgttccgcagtttaaagttaagacgtgtgcatgccctgaaagaacaataaaaactcggatcacctttattctgaaatatgtgactgtataaaatgcagaaggaaggtgggtacaatagcatggccttgtaatcccagcctcatgagaacaggaggcagaaccagggactaggtgggctatctggtagagatcctgtagggaaggtgggaagggtatgaacaagggaatcctgaaatgcacgtatctattattgccaaagaactaataagatccctataatgttctgaagttctggaacttaggaactttattagtaagctgtgtaatgttccctggttgcttgtcagatgtggttttgaagctcgggtcacatggatttcctgtttctcctttctgcagagcaaccacacttaaccgaattaccgagacttaatattttaaaaatgaaaggatggaagctggcatggtagcacgtacctttaatcccaggttttgggagacagaggccagcctggtctacataagtgagttccaggacagccagggctacatagtgagatcccttaaaaaaaaaatcacaacctgaaaggcaggtgtaaaccagagttgtaccaagcagttcagttctgtgatcatattacttgtaagctattgggcctccggaaagataatagtgcctatcttcctgtagctgtgacttggcattcatttgaggacctaggaactagagtaacagaagaaaagtacttctcaaaatcgaaaatagtcctccaagaatataacttggtagagttggtatccctttcctctacaatgaattctagacttccatgtgtttgttagatgggaagcacaggtcccaaacagaacaaatttctcctccaaatctgtcccttcaggcattttccatgtcatacacacggtgccactttccattaagttgactgtcaagcccaggaaagcactgttcgtccgtgccaccttgcctgagactgaattttcttcagttttaagcattcttcagataaagacttagcatcaagtggaaggcaggctcatttccagcgatgagtattatttttgctttttaactgataagtggttaacagaaccataaagtgacccatttgcgttcacacacttgggcaactaccattcctgtgcagttcacagacatttccatcatctggataaaaccctacacctactaaatggttatctttcccctttttccttctgcctctggcaaccagagtctgccttctgtaaattgagaaatttcaaataaatggaatcataatgtgtatatgactttgtgtctagcttttttcatgaaacatgtttctatgacactggaattaaacccagtagtgttcacactagtcccgcgttctactccatcctccatcttcaagtatgctgggattgaaccctgggttctatctgacttgctaagcaagtgatttaacgctgaaaagcatccctaacttttatgtctgacgctgttgccaggtttacacaaggctatgatgtgtatacactttttctagtctgttggttttcccttctgcccccatattgacaatggtttggtttggttggttggttggttggttggttggtttgttctcctgcgactgtctcgggatttttaaacttaaccctttcctggctatgccaagaagtatttaccattttacagcactaagaacctatgagttaacaagccttcaagtgttgagacacaactggagactgcctagactattcagcttgtgcgagtgagaacacagcttgctagggcagcctctcaacacaatgacacccttgttctgtaaagaacttgactgctacttctttgagacagtgaagagcagcagaaaggttagaacacagaaactcatgccttctactaactcataaaagtcaggtgctgggttccagcacaacttaaccaacactgtgttagattggtttggtttggtttggtttggtttggtttggtttggtttaagcactttaaggttctgttctgttaaagaactagtagaaaatgcttccgataaagaataacaattatctggggatatatagcaaagtgcaagacatgagactggaggatcagtttaaaatcatcctggactaatgagaccaggtctcaaagggcaaagaaaaagtatagtagtgaaatgccattgattattgattggtcaatcttatacacattcacgtaacttcattattgatcattgattattgattggtcaatcttatacacatttacgtaacttcattattgagagtatgctttgttattttaacagcctgagaatccatttcttgagacagattggattaggaaagaaaagcagacataacatggtacatttagataatcataaagggcttttttttttaatgcactgatgttactgagctgccttttatgaccacccaaaacccagtggtgtgctgtttccagtataaactgtatctgctaagacaagattgcaggcaagctgggagcgatggcatacatctgtaaccccatcgctagggaggtggtggtaggacttgttcctgggcaacctgggcaacatggctagactgtatgtctgaaatagcagtaacaggagtctacctgaaaagaatctagcatttaggccctagctaggtggttgcagtggtaaggaacatttgctgctcttttagaggactaagtttaatttccagcacccaggcagctcacaacctataattctagctacacaggttgcaatgactccagcttttgtatgcactaaatgcacatatctgcacacaggcacataattaaaataccaatttttaaaaatctaatattcagttcattatatttgggtgaattacaattctgatttctttgtaaaggaatatatttcctgacagttgcacccctttacgggtattttcttcaggccaagggtgtgccctaatcaccagatcacatagatgtaaaaggccaatcagggaatcccagctctaaagaattagagtacttttccaggtgccacgcaaaccagttgaggcctgctgttctcaccctccctcttgggatgtcatcttggaagcattcccacttagacttctgtacccctaatgcacacacacaatcctctgtttgcctagaaatgaccatgaccaataatacaatcaccattttaagtagatacagaagacaacactgacaggtactcttatatccaaaatatttaataatttttaaaaaaaggtcttactttgaatagtctattcaacaaatttctatcacccactgccactgtgcagttataatagctatgctctaaactgcttaagcttttagtcaagctttaatgtaaaagaagaagcttgtactgataacattattcataaagtctacccagagaaaacaaaaaactagtaacctttggctggggacgtaataactcaaggctaatgtttgccgagggtctgtaaaaccctggttttgatccttaacaccacgaaacatcaattacctataactgaaattctccttgactacttggtttttactggaccctgggtaagcaaagctacaaggcctccccgcagcttgcagcccaccaggagctgtagaccaagtgggtgattataggtacaatacagactgcaccatgggagctgacctttgtgaagaaatgagattgaactctgaaaaactgacatactagaaggaaaaaaaaaaaaaccctaagaaatagatacagcaaaactgagaaacagcaaagttgaaacaaacaaaagcatggttttagaagtaatttctaacctacaagtttaggtaatttcaaatgtaaaattttatttttatttcattgcttatatacttgctcctgaaatctggtaaaaaggtatgacatgagacccagagaactcatcttcatctcaaggggcttaagaactaaacagtcagccaggtggcatggcacacacctgtaatcccagcagttggcggcagagggaagacagtcactgcaagcttgaggtcagcctggcctgcggtttcagaccagcccacggccgacacaaaaaagactaaacacaagagactccaacagtacacacatttcagggaatatatgtaataaatctgtttacactcagcagacaaggaaactgagacaaaatccatcccaaaatgtctgactgactctccaggtcaccagtctccatcagtggggactgcttacccagtgagcacacaggataagaacgaaacaccagccagacctcacaagtccacttgcagaagtgagccaatctggctgacagttacagctatgaggcaaggcaccgactacaaagtacacatgtgctttgttccttgagcagctctaagcggactgacttgcagtcagccacgtcattaacatggctaagagttctagctgtaagaccttacctggtacattcaattcttagaaaatactgcccgctacaagtcctccctctggtttctcttctgtgctttgtaaatgtgtacgtccttctcaggatcgtagtgaaccttactcacagtgaattgcctctccagcattgttaagaagttactatcccgttcatagcggattcggcaagctaaaagaatcacagaattgttgctacagagatgtcccagtgtttgaagaaggtctgtgaaggtatcttctaagtatatgacatcagctccaagtatgagatcaaattctccaggtgaaaaactttccaaattttgtccccaagtcagctccttaacaacagccttaggttggatatggggaggtaagttggcttcaacgtttgacttaagaaactctaatgctactttccgatccgtgatagtcacctgagcacctacaatgtggaacaaaaagaaaggaaggtgaacatcgtacgaccgtagtaaatggagagtcttatctagttaacacagggcattctctaaatatccagctattttgcagaataccatacccttctgcaggcaggtaaccagaccagaacagaactctttttatgctgtgtaaatagaaataaatgatcagcttgcttctgtgccacacctactgtttgccaaagtgggtgaatcattagagtggcataggtatattgtagagtcacagagtaacacaagccagtgcccctgaattctccaagcttcatgagtagtcaccattcagctggattcattgggtcataaccttcaaatcagtagggctcagggtacagtacaatccaagaatagaaaatcaagcagcagaatatagctatcaagataaaaagatacaaatacaaaccaaaaaaattatgctttaagccgggtgtagtggtgcacgcctttaatcccagcacttgggaggcagaggcaggcagatctctgagttcgaggccagcctggtctacagagtgagttccaggacagccagggctacacagagaaaccctgtctcaaaaaaacaacaacaacaaaaacaaaaaacaaacaaacaaacaaacaaagtctgctttagaggaactaaggttaaaacacactcacaagagacaactcagctactgagaatttccaggccactacgatgctattctgaagcagctaagctgtttgtgtgatacaacataacttaggagaaactgtcttctgagttagcgtgcagacttagtgtgtgccaggttcatgtgtaacatgttctccaaatgctgttctacatgcagaggaggaaattgatgcacagtattttattcatctgtctttatgggctattagacaatgaactgtaacatctacttttctaaaccaatgtgggtaaaagaagactgaactacatcaaaccattacaaagtggagtcaggtctagttctgacatcagaaaatctaaaacttaaaattgttttattccttcataatagtatctttcctttctacatacttttctaatctcccaaaggcccccaaccccttccagtggcagctcacaccaggtgtttcttatcttgctaaaacactaaggcggtatgcaattatatctgagctttacagatggtgctgccaatcaaaatgcccaagctgtccgagtctccaagcctgggcctatgccactctaatgattcacccacagtgttgcccaaaagcacaattcaatgactgttctctgataatgaaaactgcaggcagccttcctggtttgactgtttccttatatctgtgtagttcttagcaggactcagtgctctactcgtttaagcgtcacctcagcatttaaccctgataacttctctaagtctatcctgggtaggaaagcaagtagatccctaccgactaggtactattatcttacaaggcgtcccagacctgacataggattgtaatatcaacgaacgttaccctaacatctaccaatttacaaacacaagtgaccaccgccagccaggagagacccagctcactccagccacagagctgacccagcacaggtctgtgaaccctggcaggagaacccgaattttacttaggttggttacagcctcatgagcaaggtaggaagggcatgatgttgggccaaacacgaagacagtgattcctgtaaggtaagtactgctaatagaaaagcaagctaatttagtccatgaatgacaatgaaaacagacctagtaaaaacacaatgggctgtcactcaggaacggaaaacaatgtgtaaacctttgtcattgcttttagtttttgtttacaaatactgctttatttttgattaaacattcagacatataccatgtgctaaagacacaaagctgagcaagaaaacccttacctggagcacagtcctgagtgagagaaagctaagaataactgtgacgcagtgggatgacgaagtgggaggcggggcagctgtgcaccagaaagcaagtgttcagagggagaggccaaaggaaggacagcctgaacttacgtgtgagacgaggccacgtgagctgggaaagggaaaggccgttctaggtaaaactccacaaaacatggaagaagccaatgaactgcagaatgagattgcctacaaagccttgcctacaagcccgggatggagtccgtagcaacagaaagatgcgtttaaacacagagcacatcagttaattgtacactttagctaactatctggcagttactccaggaagcaagtctgagaaagcagaaggaccaggtggaaggcggctatggtcatacatgggacagacggtgaaggctcaagtcagcattagagagagagagttaagacagactccacagaggccagggcaactgaatttgaaatctaaccacaatccatcacctctgtggtccccttcattacagcacatgaagagaacagcaagtcagtcaggtctacttgtcacagaaggctgttctaagaatgagactaaatacacagcaaatccttcaactcctgggtgactgtgtagacaatggcactaactccaaaccaaggaggaaagggaagagatatccatgcgttgtcttgtgccactcgaggtactgggaaagagccagggagccacgctcgtttcagaagcacaggtccaaggctcagcagaaagctgtagtaggatggcagctactcaacagacggcaccttcctaagcattatattttaggacagggtctccagatttaactgggcatcaaattacacattttttaaaatgcagattctctgacccaacccaacctaccaaatcctagcttcaaaaatgggattcccctccctccccccccatctagaaatagttcccaattagcataaagattcagggatttttttttttttttaattcaagctctgagtttgaaagccagaactagattcaaagtctcaccatgattcatagctttgcaaccttggggaggtgacttacttgttaaccctttgtcaacacttgagaactcatgatcagacctactaatgaatgacacaggcctactctactgaccctgaatacacagcccatctgccacacaggaactgctccttcacttcgaaagcctcacgcccaatactgacgttccgcagagcatcctttacttcttttaacctttttgtgcctgtctttgccttgttcttcactccagacttagagcataagtaagcttcctacgatgctgctctgcctgtctgtttactgtgtgctacctacactgatctagcaggcactttctttgttgttgttgttattgtctttggttttggcttttcgagacaggatttctctgtatagccctgtctgtcctggaactcactctgtagaccaggctggccttgaactcagaaatccacctgtctctgcctcccaagtgctgggattaaaggcgtgcgtcaccaccgcccagctagcaggcactttactttctaagtaaccactgcagtcagggacaattgactaaaattaccaaaacacaaactttaaaaagggaacaatcaacccctttccaatgtttcaaaatcactgttttagttctgtttctatttttaaagctttcttactctcaatttttaacatcaaaatctctcctatctaatacttcatactgagtaggaaagtcatatagcaacaaaatgcttatgataggcatatgaagatatgcacacacacatgtacagacacaaacatatatagccataatgacaactgtgaatatgtaaatacagatgaaaaaagcatatgaaaggaaatatatcaaaatgcaaacaggacacctgtttcaaagataattatttttgtaataaagttacatcagttttatagagaaaaatatccaaagagtcttcaatatggttggctcatttttccttttaagttttttttttatttatttatttaagaattctttacttattttctgtatataagtatactgcagctatcttcagacacaccagaagagggcatcagatcccattacagcccctttttaagttttaaactgtgtgtctgtgtgtatgtgtgtgtgtgtgtgtgtgtgtgtgtgtgtgtgtgtgtgtgtgcatgtgtgagtgtaagtgcccagagtccagaagagggtgttggatccccctgagctggacttacagtcagttgtcagtcacctgatgtaggtgctgggaactaaactgaagtgctgtgcagagcaggtcatcataatatgctcatcactgccgagccatctctctaggccctagcttgttcgtgacttactcacaaactagccaagtaccccagtgtctgagcggttggcactgttcaagaatgagtgaagagcctcagcctaagacacagacacctgaagcaactgctatccttcattctaaaatagcgtctgaggaacctaaacctgacttctttaaccccacggctccagacttctcattaaaaacagaagcacccagaatagccaccgacacacacacacatacacacacacacacacacacacacacacacacacacactcacctaccctacactgttggtggtacactcactgcgtgaaattgtgtctgtccttcctcacctacctaaagcattctctgattggctttaataaaaatctgatggacaattagctgggcaggaagtgacaggtaggactttggggaaggggacaggaactctgaaaaggaggaggaaagccttttttgccaggagacatgaagagagatgg

SEQ ID NO: 990 - DNA, 6682 bp, Mus musculus
cgcactcggcactgggcggcgctggctggctccctggctgcggctcctcagtcggcggcggctgctgctgcctgtggcccgggcggctgggagaagcggagtgttggtgagtgacgcggcggaggtgtagtttgacgcggtgtgttacgtgggggagagaataaaactccagcgagatccgggccgcgaacgaaagcagtgacggaggagcttgtaccaccggtatccatgccagcagctcatgcaacatcatctgctcccactgtaaccttagtgcagctgcccaatgggcagacagtccaggtccatggcgttatccaggcggcccagccatcagttatccagtctccacaagtccaaacagttcagatttcaactattgcagaaagtgaagattcacaggagtctgtggatagtgtaactgattcccaaaaacgaagggaaatcctttcaaggaggccttcctacaggaaaattttgaatgacttatcttctgatgcaccaggggtgccaaggattgaagaagaaaagtcagaagaggagacttcagcccctgccatcaccactgtaacagtgccaacccccatttaccaaactagcagtgggcagtacattgccattacccagggaggagcaatacagctggctaacaatggtacggatggggtacagggcctgcagacattaaccatgaccaatgcagctgccactcagccgggtactaccattctacagtatgcacagaccactgatggacagcagattctagtgcccagcaaccaagttgttgttcaagctgcctcaggcgatgtacaaacataccagatccgcacagcacccacgagcaccattgcccctggagttgttatggcgtcctccccagcacttcctacacagcctgctgaagaagcagcacggaagagagaggtccgtctaatgaagaacagggaggcagcaagagaatgtcgtagaaagaagaaagaatatgtgaaatgtttagagaacagagtggcagtgcttgaaaaccaaaacaaaacattgattgaggagctaaaagcacttaaggacctttactgccacaaatcagattaatttgggatttaagttctctcctgttacggtggagaatggactggcttggccacaaccagaaagacaagtaaacatttattttctaaacatttctttttttctatgcgcaaaactgcctgaaagcaactacagaatttcattcatttctgcttttgcattaaactgtgaatgttccaaaaactacttccacttctgccctcaagaaatgtgcagcgccaggaatcatgaagagacttctgccctccgtctccaccaccctcaagaagtaatcatttgcttatttgtaaattgttgggggaaatgaggaaaatgaaatcttggctttcttatttttgttttaggtttgttttgtttgttttcttattaatgacttcaaggtttgttgagctccatgattgccttagggacagttacccagcctgctgagctgacgtaatgtgtgggccacacaggaaagtaaggaaggtgcaatgaagaagtgttgactgccaaattaatgtttttacactttcattgtgaattatgtcgaactattaaaaacatcctttaaataaggatattagtgtggtgttgggagtaaactttatatgtatgttcctttcttcagcactgacaagttgtccttggtgctgagaagcacggtattggctacagttcctctgtagggcagttgttgcttcttcattcagttctgtgtgttcagcagtttgaatacattaacagaagtaaccaactgaatggaaagcatggttttgaattttgagttaagttaaaatcatactataaagcttattctggtgagtactaagtcttaatgagtaggtgctggccaggaagctaactccttgagttatacaataaggtgtttaataaataaagacttttgtccttgctttccgaatcctcatactgtcactcatttacctagtccactgctgcatttacactgtgcagccaacaggagcgttttcaagatgtccagccaaagtgatggaaagtactaaatagacaaccttttctatagtcatatttttatcagagaatctcttgggatttttttttttaaatcaaagaagttacaaggatgtgattctaaaacattgtgttaaatgcacacaagaaaagtaatttccttcagacattggagtgtgtgctatggtacaatatttggcaaacacttttttttttctcctaaaaaaggtggtactgctttaactatccaaaagctgttctgtttctgaagatgtttctacttacatccttacctagagtctacatttatgtgtaacattgtttctgataagacttagtaataactcatttttttttattaaacctaataaaatctaagagttacctctttaaaagacaaatatgaggacagtggaggctggcatgttaggttacttcacgtttgaggaagaactcagactcagaagagtgtcttatatttgctttgggatattaagaaagttaatattaatatcagtatacgtatgagcgggaactgtttggcccatttctaagctaagactaggttgctatctgtaaatgttctacgttgtttataacaaaccattgtcttttttcaaggatgaacagtttgtgaaggacatgattctaggagttgagtgatgtaataatccttctgtctggacagttcaccagattctccagaaggctttcaaacggctaaagtttgatctttgtcctgctgagcttgctgggaaggagatagcataaaagctgtctgtgctagcaagtagatgtatcatttgctaaacgtggtgaaacaaaaaggaagcagaatcacaaatctgtcaacaaactggaattacttcacattaagtcagaatgtcagattgaacattttaaatgtcacaagtggaaaatttgcctagcgtgcagaagttgtaatctctaagtgtctatcttcaaaagtcgaggttttctacataatgaggaaacaggtggtctccttaaccctttagagaccaaggcagtctcagccatacttcctagttggatggatattaatttacagaggcctgggtctttatgcttggagcatgactgtactagtttgacaccagttacttgataatgtgagaaatatatggtgttgtgaaacctgactttgaaatttcagttcatacagaaagaaatcaaagcctctttaatgcaagctggattttttttttaacatgagaatgagaaaaacaaaaacaaaaacttgtttttgagctatgtggagaatctttattaagaaaatgacataattttttaaaaactcttatatccaaaattgtatgtggccacattatcggtaatgttttctcttcatgttggccaaaagggaatggaactgtcataggaatctgtacatatgctactgatttgcctagagaatagaagtttggtactgctcactttgcatatatatagtggcacttttatctatagggcagattaactctaataaaaatgaaatggggataggtttatttttgatatattactcttctgagttttcaagctttgatagtgtttaactgaaaaatggtttagaaagggctagatccaatatgttcatatttaaaaaattgatatgagatacaatttaagttctttatcaaaagcaagtaccatattagcaaccatcatattgtcctaggtgctgtgcttgtttagatggtatagtgtgggtggggacgtggcattttgtaatatatgtgtacatatatacatacatacagtatatcatctaaatgctctgagagctggtatgtcaggaatgctgagtattatagcgtattgaggtccggtgagattccactttgctgtgctttctcctgcatctcttctggtgtttcagtgactgttttactccagcactcacaactgggttttctcttttcttccagttttttattaggtttttgttttgtttggcttgatgcttttgagtatgttaccagtcacttaaaaactcctaaaccccaagctcttttccccctgctttgtttctggcagctataaaattggtaagaacattttgaaaaaaggttttaagagaattgtttcaagaatcattttgggcaaagacttttcatgtttcatttgaacagggatttttgtcaagatgtgttttgatggtaggccagcaagcagtgctactgtctaaagcacaaaccagtcaggcaggctgtccagccagaagccctcttggctgaagccggtctctgcctctcaggactcctccctactattttcgaccatttagggtgacatggaatcatacaaatattggggcttagaaacaaacatttatataacccggaatgcttttacgtacttgaagtgacttcagtcaaaatgttgcctttcctgtttaggaagctttggttctctgttgactcgtcagctagtaacacaaatcggtttctctaccaatagctgcttcattttcagttccttccagaggcttttgttctgcctttgtaacactgaaactctggattggcacagcatcccggggcccagtacacaggctgtatgttgacttgaggttgtatttacagtagttctttgtaaaggtttgctgtaacttgcacttttttttaaggacccagtttgggtatcagcaacttgggaaattccttatcaatgagttctcagctgacccttttgtcttcctccttcaaatcatgactccttaatggaagcgtttcattgatcacagtatcatagctagccttaagcatgttataaaagctaaatatctgggaattaggtttgactaatagtgaaggaaaaataagtacttataattttaaatttcatcctccaactttagttctatgtagagcatgccaaaagttttttttcagaagattacaaaccttgttaaagcaattaatttgttgtcatcatgggaaaccatgtaatcgatgttactaaatcattttaatttggctttgttaacttccgagaaatgctgcctaaacgtaactggtttctgactgcgggggagtacagtatgctttgttaggcctgtaggtgactcattctagaataaacgtgttcactgagatgtacaaagcacaactagagttttgggtggcttgtgtgtgtcttgattactttcaatgttaatgttgactttttaagttaacagtcactgttatgtactaggaactggtttccttgactttctagaatcaatggccaagagaggcatataatccttgaggggttgaaggtatcatgaagttgagtcagtatggaagaatttcaaacaaatcaaacagggtgctgaagttccggctgactcatctgctcatggtatgcttactgattagtgaatgtagttttaagcctttgtgtgtgtcctcaggggcagacagactttaacaaggaccagataacatttgaatggaggaattatatttcaggtgttttagcttgaaatttattttttaaaaaaaagaaaaattaaaaaaaaaataagagagcaaagtttgggaagcgagttgacagtatgaaagcagcagagctgaggatgagctggcctgtcccactgctgcagtggggtgggtcccagctggggaaatgttacattgttaccagcaagaaaaaggaagaagggtcaaaaagtaggaaactcctacttttgcaggcatgatttactacttgtccatagtagtatagcatttctaagcttctaagggcatctcaaaagataagagtaagtccgagatgttgaaaaaatcagtagggaagaaagatcactgcagatcataatctatgttggccacatgaaatgatttattatatttgggaagttttattttcttatgttttttaaaattgaattggtaagtgctttatagacgtatttttacccaggtgccacttcaatgtgtatgtaataaaattatttatattaaaagtgggaaattttgtgaacatttttctgtgtgtgtagatttattaggatggtgaagaagtgtgctagttagcagttttctgtgtaaagctgtcttgagctgatctgtacacatcggttataatgccccagtggaacctagacatgtcacttgagacttttgaaaaacaaaataaccagggaagtcctagaatggtatttggctgtttggtttttccttgagtactggagtagagaatacctccccagaactgtcagcacaaaacagggtatcagctttaactctgatgttcctattggagtagagtactaataactatgagaaggggaatacatttctaataaccttccctacaatctagaaacgtccctgtttaaattttttacctaaatctttttgtgctttatgtgtaaagaataaaagtaccaagacaccatgcattttattaacactatgtacatactggctgctttgtgttcagaatggtagcagttactttgtatattaaagtgatccttgtgaatttgtgaaatattgtcttaaagtgcttttcttactgtaatctttgtggtatcaactgtcataatgccctttttacacagacatttatgtgcagtcacataaacatgcttttaaaaact

SEQ ID NO: 991 - protein, 318 aa, Mus musculus
RGVLRGGENKTPARSGPRTKAVTEELVPPVSMPAAHATSSAPTVTLVQLPNGQTVQVHGVIQAAQPSVIQSPQVQTVQISTIAESEDSQESVDSVTDSQKRREILSRRPSYRKILNDLSSDAPGVPRIEEEKSEEETSAPAITTVTVPTPIYQTSSGQYIAITQGGAIQLANNGTDGVQGLQTLTMTNAAATQPGTTILQYAQTTDGQQILVPSNQVVVQAASGDVQTYQIRTAPTSTIAPGVVMASSPALPTQPAEEAARKREVRLMKNREAARECRRKKKEYVKCLENRVAVLENQNKTLIEELKALKDLYCHKSD

SEQ ID NO: 992 - DNA, 6621 bp, Mus musculus
cgcactcggcactgggcggcgctggctggctccctggctgcggctcctcagtcggcggcggctgctgctgcctgtggcccgggcggctgggagaagcggagtgttggtgagtgacgcggcggaggtgtagtttgacgcggtgtgttacgtgggggagagaataaaactccagcgagatccgggccgcgaacgaaagcagtgacggaggagcttgtaccaccggtaactaaatgaccatggaatctggagcagacaaccagcagagtggagatgctgctgtaacagaagctgaaaatcaacaaatgacagttcaagcccagccacagattgccacattagcccaggtatccatgccagcagctcatgcaacatcatctgctcccactgtaaccttagtgcagctgcccaatgggcagacagtccaggtccatggcgttatccaggcggcccagccatcagttatccagtctccacaagtccaaacagttcagatttcaactattgcagaaagtgaagattcacaggagtctgtggatagtgtaactgattcccaaaaacgaagggaaatcctttcaaggaggccttcctacaggaaaattttgaatgacttatcttctgatgcaccaggggtgccaaggattgaagaagaaaagtcagaagaggagacttcagcccctgccatcaccactgtaacagtgccaacccccatttaccaaactagcagtgggcagtacactgcctcaggcgatgtacaaacataccagatccgcacagcacccacgagcaccattgcccctggagttgttatggcgtcctccccagcacttcctacacagcctgctgaagaagcagcacggaagagagaggtccgtctaatgaagaacagggaggcagcaagagaatgtcgtagaaagaagaaagaatatgtgaaatgtttagagaacagagtggcagtgcttgaaaaccaaaacaaaacattgattgaggagctaaaagcacttaaggacctttactgccacaaatcagattaatttgggatttaagttctctcctgttacggtggagaatggactggcttggccacaaccagaaagacaagtaaacatttattttctaaacatttctttttttctatgcgcaaaactgcctgaaagcaactacagaatttcattcatttctgcttttgcattaaactgtgaatgttccaaaaactacttccacttctgccctcaagaaatgtgcagcgccaggaatcatgaagagacttctgccctccgtctccaccaccctcaagaagtaatcatttgcttatttgtaaattgttgggggaaatgaggaaaatgaaatcttggctttcttatttttgttttaggtttgttttgtttgttttcttattaatgacttcaaggtttgttgagctccatgattgccttagggacagttacccagcctgctgagctgacgtaatgtgtgggccacacaggaaagtaaggaaggtgcaatgaagaagtgttgactgccaaattaatgtttttacactttcattgtgaattatgtcgaactattaaaaacatcctttaaataaggatattagtgtggtgttgggagtaaactttatatgtatgttcctttcttcagcactgacaagttgtccttggtgctgagaagcacggtattggctacagttcctctgtagggcagttgttgcttcttcattcagttctgtgtgttcagcagtttgaatacattaacagaagtaaccaactgaatggaaagcatggttttgaattttgagttaagttaaaatcatactataaagcttattctggtgagtactaagtcttaatgagtaggtgctggccaggaagctaactccttgagttatacaataaggtgtttaataaataaagacttttgtccttgctttccgaatcctcatactgtcactcatttacctagtccactgctgcatttacactgtgcagccaacaggagcgttttcaagatgtccagccaaagtgatggaaagtactaaatagacaaccttttctatagtcatatttttatcagagaatctcttgggatttttttttttaaatcaaagaagttacaaggatgtgattctaaaacattgtgttaaatgcacacaagaaaagtaatttccttcagacattggagtgtgtgctatggtacaatatttggcaaacacttttttttttctcctaaaaaaggtggtactgctttaactatccaaaagctgttctgtttctgaagatgtttctacttacatccttacctagagtctacatttatgtgtaacattgtttctgataagacttagtaataactcatttttttttattaaacctaataaaatctaagagttacctctttaaaagacaaatatgaggacagtggaggctggcatgttaggttacttcacgtttgaggaagaactcagactcagaagagtgtcttatatttgctttgggatattaagaaagttaatattaatatcagtatacgtatgagcgggaactgtttggcccatttctaagctaagactaggttgctatctgtaaatgttctacgttgtttataacaaaccattgtcttttttcaaggatgaacagtttgtgaaggacatgattctaggagttgagtgatgtaataatccttctgtctggacagttcaccagattctccagaaggctttcaaacggctaaagtttgatctttgtcctgctgagcttgctgggaaggagatagcataaaagctgtctgtgctagcaagtagatgtatcatttgctaaacgtggtgaaacaaaaaggaagcagaatcacaaatctgtcaacaaactggaattacttcacattaagtcagaatgtcagattgaacattttaaatgtcacaagtggaaaatttgcctagcgtgcagaagttgtaatctctaagtgtctatcttcaaaagtcgaggttttctacataatgaggaaacaggtggtctccttaaccctttagagaccaaggcagtctcagccatacttcctagttggatggatattaatttacagaggcctgggtctttatgcttggagcatgactgtactagtttgacaccagttacttgataatgtgagaaatatatggtgttgtgaaacctgactttgaaatttcagttcatacagaaagaaatcaaagcctctttaatgcaagctggattttttttttaacatgagaatgagaaaaacaaaaacaaaaacttgtttttgagctatgtggagaatctttattaagaaaatgacataattttttaaaaactcttatatccaaaattgtatgtggccacattatcggtaatgttttctcttcatgttggccaaaagggaatggaactgtcataggaatctgtacatatgctactgatttgcctagagaatagaagtttggtactgctcactttgcatatatatagtggcacttttatctatagggcagattaactctaataaaaatgaaatggggataggtttatttttgatatattactcttctgagttttcaagctttgatagtgtttaactgaaaaatggtttagaaagggctagatccaatatgttcatatttaaaaaattgatatgagatacaatttaagttctttatcaaaagcaagtaccatattagcaaccatcatattgtcctaggtgctgtgcttgtttagatggtatagtgtgggtggggacgtggcattttgtaatatatgtgtacatatatacatacatacagtatatcatctaaatgctctgagagctggtatgtcaggaatgctgagtattatagcgtattgaggtccggtgagattccactttgctgtgctttctcctgcatctcttctggtgtttcagtgactgttttactccagcactcacaactgggttttctcttttcttccagttttttattaggtttttgttttgtttggcttgatgcttttgagtatgttaccagtcacttaaaaactcctaaaccccaagctcttttccccctgctttgtttctggcagctataaaattggtaagaacattttgaaaaaaggttttaagagaattgtttcaagaatcattttgggcaaagacttttcatgtttcatttgaacagggatttttgtcaagatgtgttttgatggtaggccagcaagcagtgctactgtctaaagcacaaaccagtcaggcaggctgtccagccagaagccctcttggctgaagccggtctctgcctctcaggactcctccctactattttcgaccatttagggtgacatggaatcatacaaatattggggcttagaaacaaacatttatataacccggaatgcttttacgtacttgaagtgacttcagtcaaaatgttgcctttcctgtttaggaagctttggttctctgttgactcgtcagctagtaacacaaatcggtttctctaccaatagctgcttcattttcagttccttccagaggcttttgttctgcctttgtaacactgaaactctggattggcacagcatcccggggcccagtacacaggctgtatgttgacttgaggttgtatttacagtagttctttgtaaaggtttgctgtaacttgcacttttttttaaggacccagtttgggtatcagcaacttgggaaattccttatcaatgagttctcagctgacccttttgtcttcctccttcaaatcatgactccttaatggaagcgtttcattgatcacagtatcatagctagccttaagcatgttataaaagctaaatatctgggaattaggtttgactaatagtgaaggaaaaataagtacttataattttaaatttcatcctccaactttagttctatgtagagcatgccaaaagttttttttcagaagattacaaaccttgttaaagcaattaatttgttgtcatcatgggaaaccatgtaatcgatgttactaaatcattttaatttggctttgttaacttccgagaaatgctgcctaaacgtaactggtttctgactgcgggggagtacagtatgctttgttaggcctgtaggtgactcattctagaataaacgtgttcactgagatgtacaaagcacaactagagttttgggtggcttgtgtgtgtcttgattactttcaatgttaatgttgactttttaagttaacagtcactgttatgtactaggaactggtttccttgactttctagaatcaatggccaagagaggcatataatccttgaggggttgaaggtatcatgaagttgagtcagtatggaagaatttcaaacaaatcaaacagggtgctgaagttccggctgactcatctgctcatggtatgcttactgattagtgaatgtagttttaagcctttgtgtgtgtcctcaggggcagacagactttaacaaggaccagataacatttgaatggaggaattatatttcaggtgttttagcttgaaatttattttttaaaaaaaagaaaaattaaaaaaaaaataagagagcaaagtttgggaagcgagttgacagtatgaaagcagcagagctgaggatgagctggcctgtcccactgctgcagtggggtgggtcccagctggggaaatgttacattgttaccagcaagaaaaaggaagaagggtcaaaaagtaggaaactcctacttttgcaggcatgatttactacttgtccatagtagtatagcatttctaagcttctaagggcatctcaaaagataagagtaagtccgagatgttgaaaaaatcagtagggaagaaagatcactgcagatcataatctatgttggccacatgaaatgatttattatatttgggaagttttattttcttatgttttttaaaattgaattggtaagtgctttatagacgtatttttacccaggtgccacttcaatgtgtatgtaataaaattatttatattaaaagtgggaaattttgtgaacatttttctgtgtgtgtagatttattaggatggtgaagaagtgtgctagttagcagttttctgtgtaaagctgtcttgagctgatctgtacacatcggttataatgccccagtggaacctagacatgtcacttgagacttttgaaaaacaaaataaccagggaagtcctagaatggtatttggctgtttggtttttccttgagtactggagtagagaatacctccccagaactgtcagcacaaaacagggtatcagctttaactctgatgttcctattggagtagagtactaataactatgagaaggggaatacatttctaataaccttccctacaatctagaaacgtccctgtttaaattttttacctaaatctttttgtgctttatgtgtaaagaataaaagtaccaagacaccatgcattttattaacactatgtacatactggctgctttgtgttcagaatggtagcagttactttgtatattaaagtgatccttgtgaatttgtgaaatattgtcttaaagtgcttttcttactgtaatctttgtggtatcaactgtcataatgccctttttacacagacatttatgtgcagtcacataaacatgcttttaaaaact

SEQ ID NO: 993 - protein, 264 aa, Mus musculus
MESGADNQQSGDAAVTEAENQQMTVQAQPQIATLAQVSMPAAHATSSAPTVTLVQLPNGQTVQVHGVIQAAQPSVIQSPQVQTVQISTIAESEDSQESVDSVTDSQKRREILSRRPSYRKILNDLSSDAPGVPRIEEEKSEEETSAPAITTVTVPTPIYQTSSGQYTASGDVQTYQIRTAPTSTIAPGVVMASSPALPTQPAEEAARKREVRLMKNREAARECRRKKKEYVKCLENRVAVLENQNKTLIEELKALKDLYCHKSD

SEQ ID NO: 994 - DNA, 6803 bp, Mus musculus
gcactcggcactgggcggcgctggctggctccctggctgcggctcctcagtcggcggcggctgctgctgcctgtggcccgggcggctgggagaagcggagtgttggtgagtgacgcggcggaggtgtagtttgacgcggtgtgttacgtgggggagagaataaaactccagcgagatccgggccgcgaacgaaagcagtgacggaggagcttgtaccaccggtaactaaatgaccatggaatctggagcagacaaccagcagagtggagatgctgctgtaacagaagctgaaaatcaacaaatgacagttcaagcccagccacagattgccacattagcccaggtatccatgccagcagctcatgcaacatcatctgctcccactgtaaccttagtgcagctgcccaatgggcagacagtccaggtccatggcgttatccaggcggcccagccatcagttatccagtctccacaagtccaaacagttcagatttcaactattgcagaaagtgaagattcacaggagtctgtggatagtgtaactgattcccaaaaacgaagggaaatcctttcaaggaggccttcctacaggaaaattttgaatgacttatcttctgatgcaccaggggtgccaaggattgaagaagaaaagtcagaagaggagacttcagcccctgccatcaccactgtaacagtgccaacccccatttaccaaactagcagtgggcagtacattgccattacccagggaggagcaatacagctggctaacaatggtacggatggggtacagggcctgcagacattaaccatgaccaatgcagctgccactcagccgggtactaccattctacagtatgcacagaccactgatggacagcagattctagtgcccagcaaccaagttgttgttcaagctgcctcaggcgatgtacaaacataccagatccgcacagcacccacgagcaccattgcccctggagttgttatggcgtcctccccagcacttcctacacagcctgctgaagaagcagcacggaagagagaggtccgtctaatgaagaacagggaggcagcaagagaatgtcgtagaaagaagaaagaatatgtgaaatgtttagagaacagagtggcagtgcttgaaaaccaaaacaaaacattgattgaggagctaaaagcacttaaggacctttactgccacaaatcagattaatttgggatttaagttctctcctgttacggtggagaatggactggcttggccacaaccagaaagacaagtaaacatttattttctaaacatttctttttttctatgcgcaaaactgcctgaaagcaactacagaatttcattcatttctgcttttgcattaaactgtgaatgttccaaaaactacttccacttctgccctcaagaaatgtgcagcgccaggaatcatgaagagacttctgccctccgtctccaccaccctcaagaagtaatcatttgcttatttgtaaattgttgggggaaatgaggaaaatgaaatcttggctttcttatttttgttttaggtttgttttgtttgttttcttattaatgacttcaaggtttgttgagctccatgattgccttagggacagttacccagcctgctgagctgacgtaatgtgtgggccacacaggaaagtaaggaaggtgcaatgaagaagtgttgactgccaaattaatgtttttacactttcattgtgaattatgtcgaactattaaaaacatcctttaaataaggatattagtgtggtgttgggagtaaactttatatgtatgttcctttcttcagcactgacaagttgtccttggtgctgagaagcacggtattggctacagttcctctgtagggcagttgttgcttcttcattcagttctgtgtgttcagcagtttgaatacattaacagaagtaaccaactgaatggaaagcatggttttgaattttgagttaagttaaaatcatactataaagcttattctggtgagtactaagtcttaatgagtaggtgctggccaggaagctaactccttgagttatacaataaggtgtttaataaataaagacttttgtccttgctttccgaatcctcatactgtcactcatttacctagtccactgctgcatttacactgtgcagccaacaggagcgttttcaagatgtccagccaaagtgatggaaagtactaaatagacaaccttttctatagtcatatttttatcagagaatctcttgggatttttttttttaaatcaaagaagttacaaggatgtgattctaaaacattgtgttaaatgcacacaagaaaagtaatttccttcagacattggagtgtgtgctatggtacaatatttggcaaacacttttttttttctcctaaaaaaggtggtactgctttaactatccaaaagctgttctgtttctgaagatgtttctacttacatccttacctagagtctacatttatgtgtaacattgtttctgataagacttagtaataactcatttttttttattaaacctaataaaatctaagagttacctctttaaaagacaaatatgaggacagtggaggctggcatgttaggttacttcacgtttgaggaagaactcagactcagaagagtgtcttatatttgctttgggatattaagaaagttaatattaatatcagtatacgtatgagcgggaactgtttggcccatttctaagctaagactaggttgctatctgtaaatgttctacgttgtttataacaaaccattgtcttttttcaaggatgaacagtttgtgaaggacatgattctaggagttgagtgatgtaataatccttctgtctggacagttcaccagattctccagaaggctttcaaacggctaaagtttgatctttgtcctgctgagcttgctgggaaggagatagcataaaagctgtctgtgctagcaagtagatgtatcatttgctaaacgtggtgaaacaaaaaggaagcagaatcacaaatctgtcaacaaactggaattacttcacattaagtcagaatgtcagattgaacattttaaatgtcacaagtggaaaatttgcctagcgtgcagaagttgtaatctctaagtgtctatcttcaaaagtcgaggttttctacataatgaggaaacaggtggtctccttaaccctttagagaccaaggcagtctcagccatacttcctagttggatggatattaatttacagaggcctgggtctttatgcttggagcatgactgtactagtttgacaccagttacttgataatgtgagaaatatatggtgttgtgaaacctgactttgaaatttcagttcatacagaaagaaatcaaagcctctttaatgcaagctggattttttttttaacatgagaatgagaaaaacaaaaacaaaaacttgtttttgagctatgtggagaatctttattaagaaaatgacataattttttaaaaactcttatatccaaaattgtatgtggccacattatcggtaatgttttctcttcatgttggccaaaagggaatggaactgtcataggaatctgtacatatgctactgatttgcctagagaatagaagtttggtactgctcactttgcatatatatagtggcacttttatctatagggcagattaactctaataaaaatgaaatggggataggtttatttttgatatattactcttctgagttttcaagctttgatagtgtttaactgaaaaatggtttagaaagggctagatccaatatgttcatatttaaaaaattgatatgagatacaatttaagttctttatcaaaagcaagtaccatattagcaaccatcatattgtcctaggtgctgtgcttgtttagatggtatagtgtgggtggggacgtggcattttgtaatatatgtgtacatatatacatacatacagtatatcatctaaatgctctgagagctggtatgtcaggaatgctgagtattatagcgtattgaggtccggtgagattccactttgctgtgctttctcctgcatctcttctggtgtttcagtgactgttttactccagcactcacaactgggttttctcttttcttccagttttttattaggtttttgttttgtttggcttgatgcttttgagtatgttaccagtcacttaaaaactcctaaaccccaagctcttttccccctgctttgtttctggcagctataaaattggtaagaacattttgaaaaaaggttttaagagaattgtttcaagaatcattttgggcaaagacttttcatgtttcatttgaacagggatttttgtcaagatgtgttttgatggtaggccagcaagcagtgctactgtctaaagcacaaaccagtcaggcaggctgtccagccagaagccctcttggctgaagccggtctctgcctctcaggactcctccctactattttcgaccatttagggtgacatggaatcatacaaatattggggcttagaaacaaacatttatataacccggaatgcttttacgtacttgaagtgacttcagtcaaaatgttgcctttcctgtttaggaagctttggttctctgttgactcgtcagctagtaacacaaatcggtttctctaccaatagctgcttcattttcagttccttccagaggcttttgttctgcctttgtaacactgaaactctggattggcacagcatcccggggcccagtacacaggctgtatgttgacttgaggttgtatttacagtagttctttgtaaaggtttgctgtaacttgcacttttttttaaggacccagtttgggtatcagcaacttgggaaattccttatcaatgagttctcagctgacccttttgtcttcctccttcaaatcatgactccttaatggaagcgtttcattgatcacagtatcatagctagccttaagcatgttataaaagctaaatatctgggaattaggtttgactaatagtgaaggaaaaataagtacttataattttaaatttcatcctccaactttagttctatgtagagcatgccaaaagttttttttcagaagattacaaaccttgttaaagcaattaatttgttgtcatcatgggaaaccatgtaatcgatgttactaaatcattttaatttggctttgttaacttccgagaaatgctgcctaaacgtaactggtttctgactgcgggggagtacagtatgctttgttaggcctgtaggtgactcattctagaataaacgtgttcactgagatgtacaaagcacaactagagttttgggtggcttgtgtgtgtcttgattactttcaatgttaatgttgactttttaagttaacagtcactgttatgtactaggaactggtttccttgactttctagaatcaatggccaagagaggcatataatccttgaggggttgaaggtatcatgaagttgagtcagtatggaagaatttcaaacaaatcaaacagggtgctgaagttccggctgactcatctgctcatggtatgcttactgattagtgaatgtagttttaagcctttgtgtgtgtcctcaggggcagacagactttaacaaggaccagataacatttgaatggaggaattatatttcaggtgttttagcttgaaatttattttttaaaaaaaagaaaaattaaaaaaaaaataagagagcaaagtttgggaagcgagttgacagtatgaaagcagcagagctgaggatgagctggcctgtcccactgctgcagtggggtgggtcccagctggggaaatgttacattgttaccagcaagaaaaaggaagaagggtcaaaaagtaggaaactcctacttttgcaggcatgatttactacttgtccatagtagtatagcatttctaagcttctaagggcatctcaaaagataagagtaagtccgagatgttgaaaaaatcagtagggaagaaagatcactgcagatcataatctatgttggccacatgaaatgatttattatatttgggaagttttattttcttatgttttttaaaattgaattggtaagtgctttatagacgtatttttacccaggtgccacttcaatgtgtatgtaataaaattatttatattaaaagtgggaaattttgtgaacatttttctgtgtgtgtagatttattaggatggtgaagaagtgtgctagttagcagttttctgtgtaaagctgtcttgagctgatctgtacacatcggttataatgccccagtggaacctagacatgtcacttgagacttttgaaaaacaaaataaccagggaagtcctagaatggtatttggctgtttggtttttccttgagtactggagtagagaatacctccccagaactgtcagcacaaaacagggtatcagctttaactctgatgttcctattggagtagagtactaataactatgagaaggggaatacatttctaataaccttccctacaatctagaaacgtccctgtttaaattttttacctaaatctttttgtgctttatgtgtaaagaataaaagtaccaagacaccatgcattttattaacactatgtacatactggctgctttgtgttcagaatggtagcagttactttgtatattaaagtgatccttgtgaatttgtgaaatattgtcttaaagtgcttttcttactgtaatctttgtggtatcaactgtcataatgccctttttacacagacatttatgtgcagtcacataaacatgcttttaaaaact

SEQ ID NO: 995 - protein, 327 aa, Mus musculus
MTMESGADNQQSGDAAVTEAENQQMTVQAQPQIATLAQVSMPAAHATSSAPTVTLVQLPNGQTVQVHGVIQAAQPSVIQSPQVQTVQISTIAESEDSQESVDSVTDSQKRREILSRRPSYRKILNDLSSDAPGVPRIEEEKSEEETSAPAITTVTVPTPIYQTSSGQYIAITQGGAIQLANNGTDGVQGLQTLTMTNAAATQPGTTILQYAQTTDGQQILVPSNQVVVQAASGDVQTYQIRTAPTSTIAPGVVMASSPALPTQPAEEAARKREVRLMKNREAARECRRKKKEYVKCLENRVAVLENQNKTLIEELKALKDLYCHKSD

SEQ ID NO: 996 - DNA, 6846 bp, Mus musculus
cgcactcggcactgggcggcgctggctggctccctggctgcggctcctcagtcggcggcggctgctgctgcctgtggcccgggcggctgggagaagcggagtgttggtgagtgacgcggcggaggtgtagtttgacgcggtgtgttacgtgggggagagaataaaactccagcgagatccgggccgcgaacgaaagcagtgacggaggagcttgtaccaccggtaactaaatgaccatggaatctggagcagacaaccagcagagtggagatgctgctgtaacagaagctgaaaatcaacaaatgacagttcaagcccagccacagattgccacattagcccaggtatccatgccagcagctcatgcaacatcatctgctcccactgtaaccttagtgcagctgcccaatgggcagacagtccaggtccatggcgttatccaggcggcccagccatcagttatccagtctccacaagtccaaacagttcagtcttcctgtaaggacttaaaaagacttttctccggaactcagatttcaactattgcagaaagtgaagattcacaggagtctgtggatagtgtaactgattcccaaaaacgaagggaaatcctttcaaggaggccttcctacaggaaaattttgaatgacttatcttctgatgcaccaggggtgccaaggattgaagaagaaaagtcagaagaggagacttcagcccctgccatcaccactgtaacagtgccaacccccatttaccaaactagcagtgggcagtacattgccattacccagggaggagcaatacagctggctaacaatggtacggatggggtacagggcctgcagacattaaccatgaccaatgcagctgccactcagccgggtactaccattctacagtatgcacagaccactgatggacagcagattctagtgcccagcaaccaagttgttgttcaagctgcctcaggcgatgtacaaacataccagatccgcacagcacccacgagcaccattgcccctggagttgttatggcgtcctccccagcacttcctacacagcctgctgaagaagcagcacggaagagagaggtccgtctaatgaagaacagggaggcagcaagagaatgtcgtagaaagaagaaagaatatgtgaaatgtttagagaacagagtggcagtgcttgaaaaccaaaacaaaacattgattgaggagctaaaagcacttaaggacctttactgccacaaatcagattaatttgggatttaagttctctcctgttacggtggagaatggactggcttggccacaaccagaaagacaagtaaacatttattttctaaacatttctttttttctatgcgcaaaactgcctgaaagcaactacagaatttcattcatttctgcttttgcattaaactgtgaatgttccaaaaactacttccacttctgccctcaagaaatgtgcagcgccaggaatcatgaagagacttctgccctccgtctccaccaccctcaagaagtaatcatttgcttatttgtaaattgttgggggaaatgaggaaaatgaaatcttggctttcttatttttgttttaggtttgttttgtttgttttcttattaatgacttcaaggtttgttgagctccatgattgccttagggacagttacccagcctgctgagctgacgtaatgtgtgggccacacaggaaagtaaggaaggtgcaatgaagaagtgttgactgccaaattaatgtttttacactttcattgtgaattatgtcgaactattaaaaacatcctttaaataaggatattagtgtggtgttgggagtaaactttatatgtatgttcctttcttcagcactgacaagttgtccttggtgctgagaagcacggtattggctacagttcctctgtagggcagttgttgcttcttcattcagttctgtgtgttcagcagtttgaatacattaacagaagtaaccaactgaatggaaagcatggttttgaattttgagttaagttaaaatcatactataaagcttattctggtgagtactaagtcttaatgagtaggtgctggccaggaagctaactccttgagttatacaataaggtgtttaataaataaagacttttgtccttgctttccgaatcctcatactgtcactcatttacctagtccactgctgcatttacactgtgcagccaacaggagcgttttcaagatgtccagccaaagtgatggaaagtactaaatagacaaccttttctatagtcatatttttatcagagaatctcttgggatttttttttttaaatcaaagaagttacaaggatgtgattctaaaacattgtgttaaatgcacacaagaaaagtaatttccttcagacattggagtgtgtgctatggtacaatatttggcaaacacttttttttttctcctaaaaaaggtggtactgctttaactatccaaaagctgttctgtttctgaagatgtttctacttacatccttacctagagtctacatttatgtgtaacattgtttctgataagacttagtaataactcatttttttttattaaacctaataaaatctaagagttacctctttaaaagacaaatatgaggacagtggaggctggcatgttaggttacttcacgtttgaggaagaactcagactcagaagagtgtcttatatttgctttgggatattaagaaagttaatattaatatcagtatacgtatgagcgggaactgtttggcccatttctaagctaagactaggttgctatctgtaaatgttctacgttgtttataacaaaccattgtcttttttcaaggatgaacagtttgtgaaggacatgattctaggagttgagtgatgtaataatccttctgtctggacagttcaccagattctccagaaggctttcaaacggctaaagtttgatctttgtcctgctgagcttgctgggaaggagatagcataaaagctgtctgtgctagcaagtagatgtatcatttgctaaacgtggtgaaacaaaaaggaagcagaatcacaaatctgtcaacaaactggaattacttcacattaagtcagaatgtcagattgaacattttaaatgtcacaagtggaaaatttgcctagcgtgcagaagttgtaatctctaagtgtctatcttcaaaagtcgaggttttctacataatgaggaaacaggtggtctccttaaccctttagagaccaaggcagtctcagccatacttcctagttggatggatattaatttacagaggcctgggtctttatgcttggagcatgactgtactagtttgacaccagttacttgataatgtgagaaatatatggtgttgtgaaacctgactttgaaatttcagttcatacagaaagaaatcaaagcctctttaatgcaagctggattttttttttaacatgagaatgagaaaaacaaaaacaaaaacttgtttttgagctatgtggagaatctttattaagaaaatgacataattttttaaaaactcttatatccaaaattgtatgtggccacattatcggtaatgttttctcttcatgttggccaaaagggaatggaactgtcataggaatctgtacatatgctactgatttgcctagagaatagaagtttggtactgctcactttgcatatatatagtggcacttttatctatagggcagattaactctaataaaaatgaaatggggataggtttatttttgatatattactcttctgagttttcaagctttgatagtgtttaactgaaaaatggtttagaaagggctagatccaatatgttcatatttaaaaaattgatatgagatacaatttaagttctttatcaaaagcaagtaccatattagcaaccatcatattgtcctaggtgctgtgcttgtttagatggtatagtgtgggtggggacgtggcattttgtaatatatgtgtacatatatacatacatacagtatatcatctaaatgctctgagagctggtatgtcaggaatgctgagtattatagcgtattgaggtccggtgagattccactttgctgtgctttctcctgcatctcttctggtgtttcagtgactgttttactccagcactcacaactgggttttctcttttcttccagttttttattaggtttttgttttgtttggcttgatgcttttgagtatgttaccagtcacttaaaaactcctaaaccccaagctcttttccccctgctttgtttctggcagctataaaattggtaagaacattttgaaaaaaggttttaagagaattgtttcaagaatcattttgggcaaagacttttcatgtttcatttgaacagggatttttgtcaagatgtgttttgatggtaggccagcaagcagtgctactgtctaaagcacaaaccagtcaggcaggctgtccagccagaagccctcttggctgaagccggtctctgcctctcaggactcctccctactattttcgaccatttagggtgacatggaatcatacaaatattggggcttagaaacaaacatttatataacccggaatgcttttacgtacttgaagtgacttcagtcaaaatgttgcctttcctgtttaggaagctttggttctctgttgactcgtcagctagtaacacaaatcggtttctctaccaatagctgcttcattttcagttccttccagaggcttttgttctgcctttgtaacactgaaactctggattggcacagcatcccggggcccagtacacaggctgtatgttgacttgaggttgtatttacagtagttctttgtaaaggtttgctgtaacttgcacttttttttaaggacccagtttgggtatcagcaacttgggaaattccttatcaatgagttctcagctgacccttttgtcttcctccttcaaatcatgactccttaatggaagcgtttcattgatcacagtatcatagctagccttaagcatgttataaaagctaaatatctgggaattaggtttgactaatagtgaaggaaaaataagtacttataattttaaatttcatcctccaactttagttctatgtagagcatgccaaaagttttttttcagaagattacaaaccttgttaaagcaattaatttgttgtcatcatgggaaaccatgtaatcgatgttactaaatcattttaatttggctttgttaacttccgagaaatgctgcctaaacgtaactggtttctgactgcgggggagtacagtatgctttgttaggcctgtaggtgactcattctagaataaacgtgttcactgagatgtacaaagcacaactagagttttgggtggcttgtgtgtgtcttgattactttcaatgttaatgttgactttttaagttaacagtcactgttatgtactaggaactggtttccttgactttctagaatcaatggccaagagaggcatataatccttgaggggttgaaggtatcatgaagttgagtcagtatggaagaatttcaaacaaatcaaacagggtgctgaagttccggctgactcatctgctcatggtatgcttactgattagtgaatgtagttttaagcctttgtgtgtgtcctcaggggcagacagactttaacaaggaccagataacatttgaatggaggaattatatttcaggtgttttagcttgaaatttattttttaaaaaaaagaaaaattaaaaaaaaaataagagagcaaagtttgggaagcgagttgacagtatgaaagcagcagagctgaggatgagctggcctgtcccactgctgcagtggggtgggtcccagctggggaaatgttacattgttaccagcaagaaaaaggaagaagggtcaaaaagtaggaaactcctacttttgcaggcatgatttactacttgtccatagtagtatagcatttctaagcttctaagggcatctcaaaagataagagtaagtccgagatgttgaaaaaatcagtagggaagaaagatcactgcagatcataatctatgttggccacatgaaatgatttattatatttgggaagttttattttcttatgttttttaaaattgaattggtaagtgctttatagacgtatttttacccaggtgccacttcaatgtgtatgtaataaaattatttatattaaaagtgggaaattttgtgaacatttttctgtgtgtgtagatttattaggatggtgaagaagtgtgctagttagcagttttctgtgtaaagctgtcttgagctgatctgtacacatcggttataatgccccagtggaacctagacatgtcacttgagacttttgaaaaacaaaataaccagggaagtcctagaatggtatttggctgtttggtttttccttgagtactggagtagagaatacctccccagaactgtcagcacaaaacagggtatcagctttaactctgatgttcctattggagtagagtactaataactatgagaaggggaatacatttctaataaccttccctacaatctagaaacgtccctgtttaaattttttacctaaatctttttgtgctttatgtgtaaagaataaaagtaccaagacaccatgcattttattaacactatgtacatactggctgctttgtgttcagaatggtagcagttactttgtatattaaagtgatccttgtgaatttgtgaaatattgtcttaaagtgcttttcttactgtaatctttgtggtatcaactgtcataatgccctttttacacagacatttatgtgcagtcacataaacatgcttttaaaaact

SEQ ID NO: 997 - protein, 341 aa, Mus musculus
MTMESGADNQQSGDAAVTEAENQQMTVQAQPQIATLAQVSMPAAHATSSAPTVTLVQLPNGQTVQVHGVIQAAQPSVIQSPQVQTVQSSCKDLKRLFSGTQISTIAESEDSQESVDSVTDSQKRREILSRRPSYRKILNDLSSDAPGVPRIEEEKSEEETSAPAITTVTVPTPIYQTSSGQYIAITQGGAIQLANNGTDGVQGLQTLTMTNAAATQPGTTILQYAQTTDGQQILVPSNQVVVQAASGDVQTYQIRTAPTSTIAPGVVMASSPALPTQPAEEAARKREVRLMKNREAARECRRKKKEYVKCLENRVAVLENQNKTLIEELKALKDLYCHKSD

SEQ ID NO: 998 - DNA, 87707 bp, Homo sapiens
ttcttattctttactgtggggtatcaggaaagaaaagagtaaaaagcattgttcaatcatcttgtttaatcaggaacccaaatagtatgtgccctgcgttccaatctttgagactcttctcacatctacttctgatatagatataataacagcacagaaataatcaaatctcactaaagtcctcaatccacatatgaaactagaacagggccaggcatggtggctcaagcctgtaatcccagcactttggaaggccgaggcaggcagatcacctgaagtcaggagttcaagaccagcctggccaacatggcaaaaccccatctctattaaaaatgcaaaaattagctgggtgtggtggtgcatgcctgtagtcccagctactctggaggctgaggcaggagaattatttgaatctggcgggtagaggttacagtgagcagagatcacgctacggcactccagcctgggcaacagcgagactccatctcaaaaaaaaaaaaaaaaaagaaaaaagaaaagaagctagaacaggcctcagaaatgttttcataaactctgtcactgttttggaaagcaggcagaataggaatgggaagaaaataaaagtagaaaaaagaaaaaaaatgagaggggggaaagttttttttaaaggaaatgcatatgacaagattatgaaatgtgcaggttacttagtaatctggtgctacctgtggactagcagagaagaatcaataggattcttgggaacaggaaggcaacatcatatatgaacaaaaaagctaaagttagaattggaagttctaaattcagaccccaattctcaaacttacaagtttgatcttgtggaagtcagttaggtaacttggttctatagctgaggaacctgaaacccagagaagttatctgaatttaaattagcacatatatgtaaaagaccctaggaaaacatccatcacacagcagttgaatgtcagctgtatctgaagcagacagtggcactaattgaaaacttagcattttggcactggcagtgattccataacacgaaaacccaacagctagaaggcagattgaaagaaaaccatctcttccatttctaaaaaggtaggctagcctagccacaagaaaattcaccttaatacctggatataattgcagataggctatagaaatatcacttaaattcattcagattttttttttaccaagtctggatggaacattcaaaaaaattttatcaaactcctccaacatgccaaacaccatgataggtattaagggtacagcaatgaataagacagacacaatctctgtcttcacagagattagtccagcagggaaacagacaattcaccaaacaatgacaattatgataggtgctttgatggaaataaaaacgtagagtccagggacctaaaccagactagggtgttggtgttggggagttatgtgtggctctcaacagttaatgacacacccttaagagcacagctaaagagcaggagctagtgaagcaaagatacaggggaaaggtttggcagagtgtttcaaggagcccactcctttgactagaaagagtgacaaagtaccttggaggccagtcagcctaaatcttgtattatgcatgaaacagcaacagggttgatgccagaagaaagtgcttggttacgaaggtgcttttagaatggcagaattaccgtgatggagtcatagttattttgctttcttttcaaggtaaagttcttctccccttttcattctgtaagcaggcagtggaacacaatggttaagagttcaggctctaaagcctgtcagaatgtgcctgggttcacattctgactctgacactcactggctctaagaccacagacacgtttcttctctggtttcagtttactcatctgtaaaatgttcctaatattaatatttccctcactgggttgttgtgaggattaaattaggtaatatatcaaaaggtgtttagaacagtgccagcacaaagcaagcactcaatacatctttttttttttttttttcctgagacagagtctcactctgtcgcccaggctggagtgcaagtggtacgatctcggctcagtgcaaccttcgcctcccgggtgaagtgatcctcctgcctcagccttccaagtagctgcggactgcaagcacgtgccaccacgcccagctaatttttgtattttcagtagagacggggtttcaccatgttggccaggctggtctcgaactcttgacctcatgatctggccgcctcagcctcccaaagtgctgagattacaggcttgagccaccatacccagccaataaatctttgcttgttactgttcctggttttagtgccagccactggactttttgcaatttctaagataataagagaccacctgacatgtttacatggtattgctttcagttgcagagaagatggagcatgcagcagcactagtatcctaccatttggcccttgaaatgctaattacaagctaccagaatcttgctgatcagttctccagttccgactctgtgacatgggaagaccagaaagcttcaaagaggtcttcgtctctttaaggttataaggaacccagacagaaatggcagagtgtagccacatagaaattgggcaccacaagaagctgttagcttggtggagccaccatgattcaggctgtaatacagaagctcaatatttatagatgcacctacaggtgatcagtctaagaaagacctgcttatgctaatccaggagattacatccaaaatttcaattgcattcattcaacaaatatttgagtcccagctgtgtaccaggtactcttctagatgttaaggatacagcagcgaaaaaaaaagggacaaaagtccctgccctagagggggcagacaataaacacaataaataagttaatatatagcacagagaaagtgatatgtgcaatggagaaaaataagtagtaaaggaaaatagggagagcaaaagagcaaagaggtggttgttcggtgatcaatttccaccagagtagtaaggaaaggcctcacagaaacaggagcatttgagcaaagacatgaggagtcaaggaagacatggatatctgggagaagcattcagagcagaggaaatagcaagggcaaagtctcttgggagaaagtgtgttcaaagtgtttgagaaacagcaaggaggccgccaatgtgactgaacagagaatggaggggaataacagaaggaactaagaccagagaggtaagggggtgtacagggactaattgtaaaaataagtgcttttactctgagtgagataggaagcttttagaaagttttgaacagtcttaatatggtctgctctatattttaaaggtatcactctggctgctgtgttgagaatagaatgaatgttaagggtagctaatacaaaattctagtcaatgatgacagtagtttggaccaagctgctatcagtggagttggggagagtggtcatatattttgaagagagagcaataggctttgatgacaaactgaatgtgggatataaaagagttgctgagttggcctcagcaatcaaatgatggagttgccaataactgagataaagaaggttgtaggtagagaaagtttttgaggggaaggggtatgctgagttttgttttggatatgatcaaatgaagaggtctattaaatatacaagtaaagatgctgaggtacttggaatacaagtttgggtttaagacttgggagttgtgagcatatttacatgtaaagacagaagactgaatgagagcactataggaaagggggtaggaacagaagaaaaaaattccaaggcagaggcctgggacactccaatattaagaggtcatgagcaggagtttgagaacagtgactagtagtgtaggactaaaaccaggagactgaagtatcctataaactaagtggagaaagtgttaaagggaggagggagtaatcaactatggcaaatgctgataggtcaaggatagagacaaagaactggctattggattaactaacaaaataacaaagtaattggagagtaatttcagtggaatgctgggggcaagaggtagttaaaatagttttaatagaaaacaggagaaaaggaattggggcagtgaatatagaactctttcaaggattttatagtaaaggagaacaaaaacaaatgggacagtagctggaaggggaagtaaaagccaaaattttttttgttttgtttttctggtttttaaaatcaattttaagatacaatacattaatttgcatgggggaaatgtaactggtaaacagaccagaaatagttgtgaagagattagtgctttcttttctatctggaaagtcaaattaaaatcacagctgggtgtggtaagctcatgcctgtaatcatagcactttgggaggctgaggtgggaggactgcttgagcccaggagtttgagacgagcctaagcaacacagggagacccgtctctacaaaaaataaatttaaaaatattagctggacatgatggtgtgtgcctgtcatcccagctactcaggaggctgaggtgggaggattgcttcagccaggagatagaggctgcagtgagccatgatcgcaccagtgcactccagcctgagcaacagagtgagatcttgtctcaaaaatactaaacaaataaataataaataataaaataaaaccacaggattacttagtgagcattgataacagctcctttcacattgatttcaactgtgaagagtctcagcatccccttcttctcagcaggggaagaatttctgagtagatctgatgcttgaatcagcagggtagagcacactcccttggccagtgctggagaaactgttaccattcattcactctttcattcaacagacactgctgagcacctactattacatgacagttactaggatacaagttcaacaaaacacaactttgcctttagagagttcatggttcaataaagaatatatgtaagtatacatgaaatgaataagtatagttataagagttaagagtggtacatgtatataaaagagacaaaaacaaattaagtggttatctattcagtaatggggacatttgggtcattcacatttttttagccattataaatagagggatactgaggatttcaattaattcctcacccagaagtatttatttattgctatctattatattaagactataggaaatcttaccaaataagaaagaaacccataatatatccccctccttgctttaaggcactaatcccattcacaaggggtttacctcccaagtagagaagttgaaaatgttaggacatttgagaggaaagacaatctgttttattcataatttccccagtctctagaagaatgcctggcacaaaggaggtgctccacagatatttttagaataaatgaaataggtcaccatggtcttggggttaggtaggaaagcaaatcacaggaggtgatgaactagggcaggcagggttcatggaacttgagctcacagtgagggtgaaaattatattcgacagcagaaatgagcaaaaaataacaggaagaggaagttgtgattatagaaaagctctcaaatactactttctctttgaagccttttataatcatcttatgggaccttccccctattctggacctctttcaagatacttttcttatactctatcaagttacatccatgtgcgctcctctttcatctccctgatattgaccacattttgcaattggaaaactgagtcaaaaatgggggatcacctgtagtcccagctactcaggaggctgagggcaagagagtcacttgagcccaggggtgtggggctgtcacatgcgatgaccgctcctgtgtacagccactgcacttcagcctgagcaacacagcgagagactgatcctggaaaaaatttcttttaaaatgcaggtggcttccaaatcccagagacaaaacttggatgctgaaaggagaaatgtcagatagtgagattgaaaatgctagagtatatccgaagagagaatatccaagagagaaatgtcaaagtagagaggctgaaaatctagagtatacccaaaatgttagtagtaaaataacttgcattggaatgaatggatgattgaataaatgaatgaacaaagttaggtgggaacggaggtcatttgagcagaagtcaagaagaatatatgttttaataattgtttgaggcccactggtctgacagtaagggcccaaatgaatagggaaagctagcctccagttagaagacacctaggaagttagcaaaataatcaatgataatagagtctaaatgaaggttagtgtatataaaaaggaagaatgaatatgaggacatttttaaataaaaactcaccatatttggtgggtgataattataggttatgagtaaataattccaaagttttttgatatcatgtatagagccacggtaagaagagcaggaagatgaactcaattttgaaaacgtatttgacacgaggataagctatccaagtaaaagctagtaataggcaacatttttcctaacattgttccaagtatacttcacatgtattatgtcacgtaatcattacaataacactatgaggtgctattatcatctttattttacagatgggaaaactgaggcacaagagtgaacaatttgcccaaagtcattagctaataagtggctgagccagtgcaatgaattcacccccacccctgtctcctgcaaattcgtatttttgaaatcttcaccctcaatgtgatggtattaggagatgaggcctttgggaggtaaaccccttgtgaatgggattagtgccttataaaagcaacccgagagctcttgctctctttctgcattgtgaggtaaagggaaaaaacagccatctacaaccctgaagagggccttcaccagaacctgaccatgttggcagcctgatttcagatatccagcctccagagctatgagaaatacatttctgttgtttataagccaccagtctatatggtactttactacggcaacctgaactcactgagagccaggatttgaattcaaatgttgagaaaactttgcccgggaccactcagaaattcactatttattcgataaatacctaacaagtaccactatattctagacattgtgctgttgctagggagaggaaaagctggtagtgaacaagacagacgtggtccttacctgcacaattacatggacactaaacaaataatgagaagtaggaattggaaaagaaagtgataagttacagttaggtaggaggaatgggtgacagaaaaaaattccaggggaagggaagggcatgtgtaaatgccctgaagtgagagcctacagtagggaataaaaagaggagagcctggaaaaaattaaaatactatggcaggagtgcaggcagctagggggacagatggagaggctggagagaaagacaagtacagataatggagcttagacaatgtgtggtaagcaaagggagaccactggaggaatttaagcaggtcaatgatcagatttatatttaaaaaattactctggcagcagtatggcaaatgtattggaacgaggcaagagcagttttggaggacctgaatgggttactgtgggacttcaagcaagaggcaacagtggtttagactagaatgggaatgaaaaaatggtcatgggaacagagagaggtcacaaatccaattttccagggagcagacagatgtaggtgattctgctgtgtgttggaggtgtgctaggtttctggcatgaactgggtagatgttaagataccctttactgaaccagggactatgggaggagcgttttgaaggaattatgatatacgggttgagtttgaaatgccctaagtcatccaaatgaaagtgtaccaaaggcagtatgctgggaactatgaatgtaggattccagagcaagatctaggcttgagttatggattgaagagtctttgacagagggtatttgatgctgctgggagagcataagaccacctaggaaagtgtatggggagactcagtaagagggccagggttcagctcagcatgattccaatgtgtaagaggtagatcaaggaggagctggttgttaaagagcaaactcaggtagggaggaaacctgggacataagaccagagggaagagggtatttggaagcaactgtggtcaatcgcgtcaaatactgggatgagggcttgtaaaatgaggactgaaaatgatccgctgcatttacagtcatgaagcttgtctgtggacaattcagagccacttcaggtgagcggtggggacactggagagggctgggaggtgggacatgaaagactgtccatggggtaagagacagctgcagttgttggagagcaatttagggagaagagaaatctttttaaagaattgaaagacttaagcatgtttaaataccagtaagaaagagccggtagagaaggaaaggttgagagtaacagaaggaaaggagactcgttaagggcaaagtccataagaaaacagtagggtacctggagtaccaggaaggacaactctttctttacaagagaagtgagtcatgggcggagtccagaatcgaaccctctctgcttcctaaagacacgtctcctttaaaggacagaaaaagaatgattaagacttgaggccgggcgcggtggctcatacgtgtaaccccaccactttaggaggccgaggcgggtggattacctgaggtcaggagttccataccagcctggccaacatggtgaaaccccgtctctactaacaacacaaaaattagccaggtgtggtggcaggtgcctgtaatcccagctactagggaggctgaggcaggagaatcgctcgaaaccgggaggcggaggttgcagtgagccgagatcgtgccactgcactccagcctgggcgacaagggctagactccgtctcattaaaaaaaaaaaaaaaaaaaaaaagacttgaaaccccaaggagagggctgcagagttcactatcaaggagaatggggacctagtggtgccgtcctgagagacctctgaaagaacaattcagtagtttccagccacggaagtccccctgctgggtttagggtgcagtgggtgcgaatccctgctgtagaaaacaggctgaggaaagaaagcgacacaggatgttgtctggagaaaggcggggaggtaggaaggggcatatttccaggggtccgggcaggttgtgtggcttggaggcctccgagggccgtcgacgtcagccatggtccgggcagagccccgcgaggtgccacagtatcggggccagcgccccccggaaaagcatgctccgctggcggccgccaggtttctccgcggagtctcggaaaggaaaacccgtccccacgggggtcccacgacgcccccgggtcccaggccccgggacgttggcagaggcgcagcagaccttcttccccagcccgcacggctccagcggtccggccgcgtcccagcccgggctgcccgtcccccgtctcccggcggcgtcggaaagttcccggggctggcggcggtcaagagcagagccagggcagccgcagccgccttctagcccgccgctcaccgccgcaggggcaggcctgagcgggggtttccaccaagtcgccgacacccctcgggaattcccccactgggccacacacaaaccccgcttcctccttcaaatttccgctgccggctttaccgatgcgaaagccgcggtggagtttagaccactcctcccggcgccgggctcagcccgccttcgccttccctctccccgcggaaccccttctcgtcgcccgaagaaacccgaaggtcttcggcaagttccgtccccagcgcgggggcggggccgctcgagctgctccgggcctagctcggctgtttccgtgcgcggccgctgcgcactcggcactgggcggcgctggctggctccctggctgcggctcctcagtcggcggcggctgctgctgcctgtggcccgggcggctgggagaagcggagtgttggtgagtgacgcggcggaggtgtagtttgacgcggtgtgttacgtgggggagagaataaaactccagcgagatccgggccgtgaacgaaagcagtgacggaggagcttgtaccaccggtaagaggagcaggaggaggaggcaggagccagagagagccggggggacggaggggggacggggaggcgccggacacccgcgcttggggccttcccctcgcaggaggggccgcggtaaagatggagcctccgcccgagccccacaacatcgccgccgctcgcagcgaacaaagaataatggcggcggactggagccagcggcggccggggcggcagcgactctgcctgcagccagcggcggcgctcatggcggggggcggcgggcggcgggcggcgggcggggtgggagccggcggccgggggtgtgtgcgggcggccggccgcggcgagctggcgcccgcgttcccgccgccgccgccgggccgggcgcggagccgggaacccggagccgccccgggggaggccgcccgctcggcccggcgctgccccccgcgccgctcgctcgtccggcccccgccgcccgcctcgcccccggcccgacccggccgggcctccggggcagccgccgcctaggtgccggtgggggatggaggaggaagaaggcgacagttgagggcagaggaggtgaaggtgcctgctgccttcccggtggcttcggtgcctgccatgcccgcttcgcaaggggaagagctgcaacgtctgacctactcttctctccactctttgtgcaataaagttcgaaacccaaggtttcctctcgtgctgtattttattcgtgccctttcccccccgctcctacaccgttgaggaaatgctgctttctgccctgtgttgcttagttgagagatgagagcttgtgcttttggggggaatttttgactccctcacccctttgctttttttttttttttaaagtcagtcatggaaatgcatgctttttgggagaaagggtgctaagaaaaacatttataataactttttaaactgttgggatcttataaaagggaagctggtgtttgaaaacagtttcggttttaaccctttttaataaggtaatcatcacttgagatctatcattctgaaacacttcgttggaacgagtatcagccgatgtactcttgttttacatcatttcgcggggtgcaaccttgccaaccgcgtttgggtcatctggatctcccctcaccctccgtcccactccccctaccatatttcccacgaatttctgtgtgaactttaatgagagattgatttaatactactactaaaaatagacattaaagtatccattatttgtctcatgcagtaggtaacccccgtcttgagattgacaatttaagccacaagctgtattttttcttcgcctgttgggaaaagaggacagcagagaagtcattgacacattaaaaattaaaagacagtttttgaaggacgtgcggtatgacctatttaagtttgtaataccatctcaagttataattctaacctcagctggcgtctaacttctgaaggtttagtagaagatacttttgattgctgcctattgaaatcttttacatttatggctcatttcgtgatttaaaagtaaagccccgaacagttattttaggtggtgcaaaagacgaacaagtttgttttaaaaatacttgtctgtcactgtatgattgcattgtgattgatacgtacaaaccttctggttaagaacaaatattgattggcagcagaagcactgtcttatttttctgtattctagtcacttttccaaaacgtgctttgctgtattgcttctctttaaaagaccacattggcaatttgtcatttccaagaaaattaagaagaggcaataaaggcaggttttctataaagattggggaaatgattttatttccgagcactgaaaaaattatagtattgataatggtagcttaccatttttcctttatgttgttccgcaagccactatcagtagagtagaattttttttcttgttaagaatataagtcgggcgcggtggctgaggcctgtaatcccagcacttggggggtcgaggcgggcggatcacttgaggtcaggagtgcaagaccagcctggccaacatgatgaaaccccatctctactaaaaatacaaaaattagccgggtgtggtggcacgcgcctgtaatcccagctactcggggggctggggttgcagtgaattgagatcgtgccatgcacttcagcctgggcgacacagcaagactccgtctcaaagaaaaaaaaaaaaaagaaagaatatatgactcttcatttgtgagatttttaaaaaattgttcactgatggccgagtgcggtggctcacatctgtaatcccagcactttgggaagccgaggcaggcggctcacgaggtcaagagatcgagaccatcctggctaacatggtgaaaccccgtctctactaaaaatacaaaaattagctgggtgtcgtggcgcgtgcttgtaatcccagctactagggtagctgaggcaggagaatctcttgagcccaggaggtggagattgcagtgagccgagatcgcgccactgccctccagcctggtgacagcgagaccccatctcaaaaaaaaaaaagtttactgataagttctttctttagtcttgcccgagagatattttaaattgtattttttatttttatttttatttatttgtttttttgagacggagtttggcccttattgcccaggctggagtgcagtgggctggtctcggctcactcactgcaagctccgcctcccgggttcaagcaattctcctgccccagccccccgagtagctgggattacaggtgtgagccaccgcgcccggcctgttttattatttatacattcataatttgtgattcttagcaattccaggtgaaacttcaaacttgtattcattaatacttgaacattcacctggaacatgttactaaattgtacttctgcactgttccagccatggataaaaattacagctggatctgcttgaatctttttttttttttcatgaacacctacatttagaaagctaataaattacttgacagagtttgcttgaagaatgttaaaagaacacttctttgggaatttaaaacttaagtgttacctgttttgaatgatttttttttttgtttacataaagagcctgaagaaacttagacacctgatccataaaaatggcacctttttctactttctgaaactcatattcttgattaggtctcattattagaaattttgggttcttcatagagaagtagctttatttctctctcattctaagacatttggttttgtttgtttggatacagtatggttatggggttatagtaaaaccaagtatgtcttcctcacgtgtttttaaattctactttttataacagaaaattatttttaacctaatgcttacaatatattaccgaaatttataatttcatttattccataaatagcttatcagatatgagttacataaacttgtttacagccagcttgtgacatagttttgcaaatatcttgatatatggtgtaactttgatggcttctttattgaatagagctcaaatctaaatttaagaatgtaatgagatgtcaagatggaaaaatgcaggatttttttttttcttacccatgtgtaaactcatctgtactgcagtatcacttgagacagcagtttatggtaattcaaatatttatttggcactcactgtgacagagaatgtagttgaaagagcatgaggtttggaatcataggcctaggtctgaatccaagcattgccactgctatcctgtacccaccctaaaggaattttgtgtcctgaaggaagtttcttaatctttctcagcctcagtttccttatatgtaaaattagaatactactacttatttcataagattgcgagataaacataaagtaccttagggctacaactaatgatagctagtcccttaagctttattttaacttcctacctgtgggcccttaggcaagttatcttaacttcttaatacctcactttcctttctgatcagtgtagaacaactacctcagaattgtgggggttaactataaagtaatacatactaagtcccaggcattgtgcaagtgtcgagtgctcaagtgttgacaaggcttttttcttttgttttaatttttttttgagacggagtcttgctctgttgcccaggatggtgtgcagtgatgcagtctcagctcacggcaacctctgcttcctggattcaagtgattctcctgcctcagcctccctagtagctggaactacaggcatgcaccaccacgcccggctaatttttgtgtttttagtagagacagggtttcaccatgttggtcaggctggtcttgaatgcctgggattataggcgtgagccaccacgcccagctggtctgttactttttaaattatttattattactatatgtaatacagtgggtcagaagctacaacaaatccaaagatgaattacgctgtcttatctctaccctcaggaactgttggggacacagtgactaaggcaaaatatgtgtcaaaagaaagcagtcaaaggaaaaagggatcacctttggtgaagtgaggagtatattttttatatttctaatttggttttttgaataagtaattcattcacatgatctataattcaaaacataataacagcaaaatgccctacattctcttgccctattacctaagtgttagcaattttttatttgtcctttaagaggtgttttatgcaaacacgagcaaatatgtatgtacagtctccccctttttgtacaaatggtagcatactaggtatacgctctcctatatcatgctttacccccaccacttaatatggcttagcaattttgtatcagcacataaagagcttcttcattttttaacatacaattggaagcattttattatgtaagtagactgtattaaccagttagtgagctgcttttattcttaggtcttatattaccttttaaactaagggaaactgccatcttgcctttatttctttaaatgaaaaactttctatttgaatgaaaaataaatagtttgtgacaggaaattgttatttaaagtccctcatttcctgtttaactccagtttttaaaagttttagtaaaatgatcaaaatgtacatgaggaggcaagcaagccaggttaagagttaactcacaaggtgaatttaactcttttgttgaggttcttacagttctgaacagactacttctttcaattattattttggcccaaaaggtttttatagctttctttcttaatgagaaagaacatttcatatagtccggtgtttttttgggttttttttaacagacagctcatgggatattattacccagtaaggctgattactatactagatttctccctgcattcatttattttttacatacttgttaacttaccttgacgattttctagtatttcttaatgtaattatgtgagttttatattttgtacctaaatttaaaaatagtgagattcacctatatgattgctgagatgataaactttactgcatagatgatttttttacccccgtggggaaacctttggtcaaccagttggaccaagtaatacgtatttcagccaaagcacaaaatgcgtttcactaccttttttttttcctctagcttttcgaaacagcattgagctacaatacttttttatttatttatttatttatttatttatttttatttatttatttttttgaggcaaggtttggctctatcacccaggctggagtgcagtggcacacacttggctcactgcaacctctgtttcctggctcaagccatcctcccatttcagcttcctgagtgagtgggacaacaggcgcgcaccaccaggcccggctaattttttgtagagacagagtttcgccatgttgcccaggctggtctcaaactcatgagctcaagccatccacctgcctcagcctcccaaagagttgggattacaagcgtgagccaccatgcccgaatgctgtagtacattttaaatatacatgctgtttgtatttatctttaaaatgtacacactatgacttttttgagttgattaaactcagaaagtgattaataatatagcagcaagggcacaaatctctttccagaaaacatcattaagtaaagctgtcatgggccagtcgcggtggctgacgcctgtgtgatcccagcactttgggaggctgaggtaggtggatcacctgaggtcaggagttcgagaccagcctggccaacatggtgaaaccccgtctctactaaaaatacaaaaattagctgggcatgggggcaggcgcctgcaatcccagctactcaggaggctgaggcaggataatcacttggacctggaaggcagaggttgcagtgagctgagattgcaccattgcacgccaggctgggcgacaagagcgaaactctgtcttaagaaaaaaacaaaagctgtcatggtatatttcgttttttgtattcccaagttggtgtttatgcgttgatcatatatacaaagtttttaatgtaagaatattgttttgaggttttactaatatttgatttaaaatattactatgtgctatttggccaggcgtggtggctcacgtctgtaatcccggcactttgggaggtcgaggcgggcggatcacttgaggccaggagtttgagaccagcctggccaagatggtgaaaccccatctctactaaaaatagaagaattatctgggtatagttgtatacgcctgtagtcccagctgcttgggaggctgaggcaggagaattgcttgagccctggaagtggaggttgcagtgagccagtatcaccccactgaactccactctgggtgacagagcaagatgccatctcataaataaaatattactgtgtgctatttgtacctgctaaatgattaaaatgtttacaaagtgctttgttgttgttgttgttgagacggagtctttctctgttgccaggctggagtgcagtggtgcgatctcagctcactgcaacctccgcctcctgggttaaagcgattcccctgcctcagcctcccaagtagctgggattacaggcgcctgccaccatgcccagctaaagagacagggtttcaccatgttggccaggatggtctcgatctccttgacctcgtgatccacccacctctgcctcccaaagtggtgggattacaggcgtgagccactgcgcctggcctacaaagtgcttgtctttacatatttggggatgggggtggggtagatcattgaaatctgtaaaggcagaacgttttttatctggaacatatctgtagactaacagagttaaatgatttcccacagtgtcatggaatcatcagtggattgcctcttggggtggaggcaaagatcattaaagcagcaaactgataatgtgaacgtggttgttttttctctgccaattaaatatatgctagtttagtcattatagaagagccagatgctggtcagcttgttgaagttgtaagtagaaggtgtggttttatcacatctgtaaatgtaggtttttgagacaaaacttaaataagaatagacgttagtttttattcacattcagaatgtctgactccccttaatatatacacactcttgtcttatctactgggtttttttgttgttgttttttgttttgccttttctctctctctttttaagctctgccagacaaggccctatgaagataggttttacaggttgagaatcttttatctgaaattcttgggaccagaagtatttccagttttgggttttttcagattttagaatatttgcatatacatacataatgagctatcttggggatgggacccaagtctaaacatgaaatttgtttcatatacacattatacacatagcctgaaggtaattttatacaaaatttttaataattttgtgcatgaaacagttttgactgtgaactgttacatgaggtcaggtgtgggaatttttcatggcatcatgtcagtgctcaaaaagtttgagattttggatgttttattagggatgcttaccctgtattatattttgcccagatgtttcctcatttgtcttctaggctaccagaaagatgttagcttagaaaaacgtattctggcgtttattccaacagatgagaaggcagtttctccagtgatgaataattacctataatttaatacgtgcattatacatctccagtgatgaaaaatcactgtgtattaaaaaattcttgaagctaggtacataatctcaactcctaaaaaagaaaataaacagtagtactccttgatgaacttacagatgctaagttgccttttcttagagttgaaataaggtgataaaggagtttaccgtgagactagctgtgtgaacaaagatgaaaaacaccctttcagttttcttcctcttggatgattctaggatctctaaaaaataatcttaaaaggggcgaggttttgagaggatgaggtctaaggaattgatggtgagttttttctgaaagaagagaagtgacatttgattagataagaaagggttaaaagggaagttattaataaaatagtttaggagtagagtggatctgaaagttgacttataccaatgatgatagaatgtgtcttttcccaaaggttagtgcatcttctctgaaatgaagacgtttctttcatcaattttaagtgaatttctaaggatctggttatctacttgtgagtttttggttgtaactgtatgacagtacagatgtaactaaaaatgtttgtaatttacccaaggttaaataaccattatttttgagggctgttatccctgttggtataagtaagtagttggcagtaggggacacagaaataccttgtttttcaccactgaagtgaaaattacagattattctgaattatttgtactcttttttttttttttttgagaggaatctcgctctgtctcccagcctggaatgcagtggtgtgatctcggctcactgcaacctccgcctcctgggttccagcgattctgctgccccagcctcccaagtagctgggattacaagcatgtgccaccatacctggctaattttttttttttttttttgtatttttagtagagacaggatttcaccatgttggccaagctggtctcgaactcctgaccttatgtgatctgcctgcctcagcctccgattacaggcatgaaccaccgcccccagccctatttgtactcttaaaggggagtcattttcttataataagtatcagtagtagctctattgtttgctgtgatcaatggtgacaccttgactttatgtattgccatttatcaatcatttattcagtgaagatttattgaccattgactttattatggttggtgaaataatcgcaagaaaatttattcagttaggtatttataaaaatacctaggtattaaatgaagattgttctagttgatataagcaataaagcctgactatatggctcctaccctcaagaatcttacggtatagtagggatgatgaaatagtgtaagaatgatttatatgtgccagagtacatgacagagtttttactgtcttgaagagctacagagttcagaagagaaggggcttagtgaggaaaagttttgtgggagaagtagaattcaagttgaatactaaagaacttcagtaagtacagataaaatggagtgtattctaggcagtggaatggacaaaaaaatgaaaacatggacatataatgaacttgacatactcataaattggtgaagaaagtattagattatagatctacattttgaggaatgctgagtatgaggcagggagctttgagtttcatgtaagagaaggtaagatataaacaggaatacaatgataaattgggctgaaatgtagatttcctgactcccaattcttctccttagtgtagacagagatatacagtcatgcactgtataagaacgttttggtgaatgacagattgcatatacaacagtggtcctgtgctagtgtaagcaaacctattaagaacttcagataggtccttcaggaggtattccagaagaaggcattgttaccataggagatgacagctccatgcatgtgattgccccttgaagacattccagtgggacacgttgtggaggtggaaggctgtgatgttgacaatcttgaccctgtgtaggcctaggctaacgtgtgaatgtctttttaacaaaaaattttaaaaagtggccgggaatggtggctcacgcctgtaatcctagcacttggggaggctgagtcaggcgggttgcttgagcccaggagtttcaagcagcctgggcaaaatggcgaaatcctgtctctacagagaatacaaaaattaattaactgggcttggtggtgcatgcctgtaatccctgctactcacgaggccaaggcaggagaacccaagaggcagagattgcagtgagctgatactgtgccactgcactccagcctgggtgacatagtgagaccctgtgtcaaaaaaataaagtttaacaaaaaagtttaaaaagtaaaaaaaaaaaaaaaaaaaaaaaaaaaaggaaaaaaccttagattcttttattgctttactttattactaaatttgctttcacttaaaaaccctttagagaaaaaatatttttatacagctgtacaatttatttgtgttttaagctatgtgttattacaaaagagttgacaagttaaaaaaactaaaaagcatatgaagttacagtaagctacggttaatgtattactgatgaaagaaaattttgtttatataaatttagtgtagcctggatgggcacagtggctcacgcctgtaatcccagcactttgggaggccaaggcaggtggattacctgaggttagaagttcgagaccagcctggccaacatggtgaaaccctgttcctactaaaagtgcaaaaattagccaggtgtggtggcaggcgcccgtaatcccagctactcaggaggctgaggcaggagaatagcttgaacccacaggtggagcatgcagtgagccgagatcgtgccactgcactccagcctgggtgacaagagcaagactccatctcaaaaaaaaaaaaattagcctaagtatacagtgcctttgaagtctacaatagtgtacagtaatgttgtaggccttcacatttctcacactgattcacccagaccaacttctagtcctgcaagctccgtttgtgataagcaccctgtacagatgtaccattttttatcttttatattttatatcttttatttttactgtaccttttctatgtttggatatgtttcgataacaaatacttaccgttgtgttacatttccccacagtgttcagtacaataccatgctgtatgggtttgtagcctatactatgtagccttggtacatagtaggctataccatctaggttttgttttctaacctaattaactaatgatgcatttctcagaacatattaccatcaagtgacacatgactgtatatgtattacagttaaaaattggacatcatagattcttttttaaacagctttattgaaatataattcacatactctacaatacacccatttggtgtgtacagttcagtggttttcagtatattcacaaagttgtgcatctattaccaccatcagtttaggacattttcattatccctaaaagaaatctacacatctcctctcagccatcacctcttaatctccccatacctgcagccctaggcaaccacctatcacctttgtgtctctataggtttgcttattctgggacattgtgtataagtggaatcatatagcataatgtccattgtgatgagctgcctttagcataatgttttcaaggtttattcatgttgtagtatgtatcagtattcatttttattgccataatagtccattttatggatatagaacattttatttgtgagttcacggacattggactttttgattattatgaaaatgctgccataaacattcatttatgttgacttgccttcatttctctgagtatatactcaggaatggaattttatggtaactgtgtttaaccatttaaggaactgccgggctgttttccaatctgctgcaccaccagcagtgtattagggttcaaattttcccccatcttcactaacacttgttatcatctgttttttggggttttgggtttttgtttttgtttttttgtttatttcaattatagccattctactgagtgcaaagaggtagctcagtttggttttgatttgtatttccctcacgactaatgatatcaagctgcttttcatgtgctgatttggccatttgtatatcttctttgggaaaatttctgttcagatcttttgcacattttaaaattcggttggctttttgttgtaatagttgtttattattctagatacaaatctcttgtcagatacatgatttacaaaaattttctcctgtgggttgtcttcactttcttgatggtgtctcttgaagcacaaaagtttttaatttttatgatttccggttcatctaatttttcttttcttgtttgtgttttggtgttatattgtgtatatcataaattcttgtttattataaacatttaaaaaatatctctgatctctgtgaaggcccaggcaaacaagataccattatttaatgaaaaataactgaagctactaatgtgtatttggagttataatccacctacctcaggccttccctttattctgtgtccatatccttcagtttgtagtgacagatgaaagaagcaaagatgaaaatcgagaaataattttgagtgaaacattttaatttgaagcacagttgtcccttggtatcgatggggaattggttccaggaccccttcaggtaccaaatccacggatgcttgagtcccttatataaagtggtatagtatttgcatgtaatcgacaaatatcctcccatatactttaaatcatctctagattacttataataccttatacagtgcctgcccatcacttgactcttatgggttcaacataggagtcagcatgcagcaaattcaagctttacttctgggacttggggatttttttcccccaaatatctttgatctgcagttggttgaatccacagatgctgaatctttggatacagaggcccagttgtaactatgatccaagaatttgttatttattatgagagaatttattataatgactgcgatggtagtttataacttataaactctaccatatttgggaaattcacagttacaaacatttacctatgaagggggagtgagtagtcattccttcattttttacaaataagctgagtcgtggagaatttaagtgatgtgtgtagaaactcacagtaagtaaggcgtagtcttcatcactcttgtagtactgcattatctctttgtaaagttttcagggtttctgttttattaatggttattaattttatttatttatttatttatttatttttgagatggagtctgtcaccaggctgaagtgcagtggtgctatcttggctcactgcagcctctgcctcctgggttcaagtgattctcctgcctcagcctaccgagtaactgggactacaggtgcatgccaccacacccagctaatttttttgtatttttagtagagacagggtttcaccatgttggtcaggatggtatcgatttcttgaccttgtgatctgcccacctcagcctcccagagtgctggggattacaggcgtgagccacggcgcccagccaaaatttgtttttttgtttgtttgtttgttttttgagacgaggtctcgctgtgttgtgcaggctggagtgcagtggcaccatctcagctcactgcaagctctgcctcctgggttcatgccattctcctgcttcagcctcctgagtagctgggactacaggggcccgccaccacgcctggctaattttttgtatttttagtagagacagagtttcactgtggtctcgatcttctgacctcatgatctgcccgccttggcctcccaaagtgctgggattacaggcgtgagccactgcccggccaaaatttttctttttaagcaatattagtttaggcttgtaagtagctcacttagggtaaatattctagccaagatcatgaaaaaatacattgatttcattatgttcttaatcagatctgcatcagattaccataaataggcagctattctttctttttttccacagttcattgtattcctaccatttccaaatagaagtttatggttttaaattactgatgttaagtacttgtttggaaggaatttatagttaaactagttataataatttatacctgtcaagctctttcatatatagtacatattttatctctcattagtttctgtaagctcttgagagaaaggttcttttttatttccaccttttaagttcaggggtacatgtgcaggatgtgcaggtttgttacatagctaatcgtgtgccatggtggtttgctgcacacatcatcccatcacccaggtattaagcccagcattcaccagctgttcttcctgatgctcttcctcctcccacccccaaccctctgacaggccccagtgtgtgttgtccccccaaccaccgatgtgtccatgtgttctcatcatgtacctcccacttacaaatgagaacatgcggtatttggttttctgttcctgtattagtttgctgaggataaaggcctccagctccatctatgttcatgcaaaggacatgatcttgttctttatggctgcatagtatttcatggtgtgtatgtaccacattttctttagtctgtcattgatgggcatttaggttgattgcatgtcttcgctattgtgaatagtgctgcagttaacatatgcgtgcatgtattgttataatagaatgatttatattcctttgggtatatatccagtaaggggattgctgggtcaaatggtatttctgcctctaggtttttgaggtattgccacactgtcttccacaatggttgaactaacaccaccaacaatgtagaagcattccagagaaaggttcttttatttttgttttgttttgttcgagacagtctcactctgttgcccagactggagtgcagtggcatgatctcggctcactgcaacctctgtctcctgggttcaagtgattctcctgcctcagcctcctgagtagctgggactccagtcatgtgccaccatgcccggctaatttttgtatttttagtagagatgaggtttcactatgttggccagctggtcacgaacttctcacctcaagtgatccacccgccttggcctcccaaagtgctgggattacagacgtgagccactccgcctggcctaattccagagaaaggttcttatatgttttatgctacagtcccatagtatgggactactactatgtagtaattttcagttctgctgaaaatgctgtagtcgttactacgtagtaggcgcagaatatttgtttaatgagtgattctctattaaagggtcataaatttgaaaggtaaaggttaagaacaatttctctttagagttgtacagattaaaggaagtgaacttttttttttttttttgtgagatggagtttcgctctttctgcccaggctagagtgcaatggcgcaatctcggctcactgcaacctctgcctcctaggttcaagcgattctcttgcctcagcctcccgagtagctgggattacaggcgtgcgccaccacgcctggctaattttgtatttttttagtagagacaaggtttctccatgttggccaggctggtcttgaactcccgacctcaggtgatctgcccgccttggcctcccaaagtcttgggattacaggcatgagccaccgcacctggccaaacatatttttctttaactgaggaaattagattcattgtccaaagcttaaaaggaagattttctactttgagtttttattaactctgatactttactatgacagtacttccagcctctgagacatgagaaatagcgtgagattgtagtaatcaaaatgaccttaccagaaatcaccaccaggttggtgaaaaacagtacatctacacagaaggatggacttgatgttgattctttcaagattaaagatgaagatgcccgaacttgaagcaagtcttttatcaaaaccgtacataaagcaaaacacactgtatgatactgtaatggtggacacatatcattacgcatttatctgtagaatgtgcaacaccaagagtgaaccgtaagattaaaaaagaaacaacaacaataggctgggcgcagtggctcatgctggtaatcccaacactttgagaggctgaggtgggcggatcacctgaggtcaggagtttgagaccagcctggccaacgttgtgaaaccccatctctactaaaaataaaaaaattagctggctgtggtggcgggtgcctgtaatcccagctacttgggagactgaggcaagagaaccgcttgaacctgggaagcggaggttgcagtgagctgagatcatgccactcactgcattccagcttgggggacagtgagaccctatatcaaaaaaaaaacaaaaaacaacaaaaacaaatcaaagcctgtacataaagtatgtactgttgcctgcatgccatttgtcagttttaaagattaaccatggtcagtttttaaatgtagtccagtatatccttggtacctttgagttcttgggctttttcctttgctgtttgactagtaagcaaaatgtaataaaagtaattagcatattgcataatagtccacatagttccattcccaaatattacagagaactcctcattttttgtaatattggaggctgttataaccctgaagtcttgaacattccttacaaatctcttgacatcttttgttctccatctgtgaagttagctaacaccagaattcctgtattatgactcctcccataacatgtgctgtctcacctcaagaaaactgaattttcactcttccatgtccaatttgtaaataattcaccaagaataacatttcaaaatttagttcaaaataacagatgttacttcataaacttatttaaaaaacacttggacattcatctcccatttggatgtagtgattttgacgtaatcactttgattttcttaagtaaatgtaagtaggctatacatatttaacttcggggcatagtaacttttgggtatttacagtttcagcattgagctagtttacgaagcagaactaacatttgaagacagcttcattctttagtcaacataaaaattgtttttgtcaaagtaactgtatgtaggaagtatgtgatcctttttttcttaaaaaaatgagctccaaatagccatttagtaacacttcatgtatagaggtttctgtgagatcaattcttccaagtgttcaaagtgtaaaaagctgtgaaacacccattaagtgggtgtttggaatgaaaggggaatggaaagagatgagataaaaatattatctaaaatattgcatagtcgtggctgctgctttgctaagcaacactgtctcttggtggtcacatacatgaagacttgtttcaaattcatgagtatagtcttacctgaaggaaaacaaggcaagtaaactttgcaaatacttaatttcaaacaaacaaacaaaaaactttaagaaagcactacagctttcttgttgaaaggcgctatagagttagtcacatattctgagatggctgtcaaaccatgcaatatgtttctatatatcagatgatttttttttttttaaattgagatggagtctcattcaccgtgtcacccaggaaggagtgcagtggtgcaatctcgactcactacaacccccacctcccgggtacagcattcttgtgcttcagcctcctgagtagctgggattacaggtgcacaccaccacgcccagctaatttttgtatttttagtagagacggggtttcacaatgttggccaggcagatcgcaaactgcctcaagtaatctgcccgcctaggcctcccaaagcgcagggattacaggtgtgagccactgcatctggctggcattatttctaacacacttctgttaaatacttccttcaagaacaatatctttgtcatagaatatgctacattttttaaaaacaaatttatttatcaaggatggcattcaaataccctggtaattacaaaactgcaatgataaaatacaaaatattgaacttaaacagtttctctgagctaaatccaataaataaatcagggaatttgttttcttaaataatattgaaaagattcctggggccaggcccggtggctcacacctgtaatcccagcactttgggaggctgatgcgggtagatcacctaaggtcaggagtttgagaccagcgtggccaacatggtgaaaccctgtctctactaaaaatacaaaaattagccaggtgtggtggtgcacatctgtaatcccagctacttgagaggctgaggcaggagaatcacttgaaccggggaggcagatgttgcagtgagccgagatcactccattgcactccagcctgggcaatgagcaaaactctgtccccgcctgcctcccccgctcccccccaaaaagattcctttttgctatttattgccctgtttttgatgactatggtggtggttgggttattttggtatttactattaatacagtttataaaagtaaacaaattttcaagcttgcttttatttttgtcatataagtaatttaaatcttatcaaattcagatcacagagttaacttcatgtataacttttcttgctttgtaatatctagattggaggctgaaataaggatttgttctctgttaaaagcagaaagaccttggtaggagcacagggaaaactcagcttgataaagataccaatttattttcatttatcacattgtctgctctgacttgttcccttaaaatatttataacctttgttacagtgtgatcagtctaatctaaagtttattcagttgaggttgatctatgttgaggagtgtgtgtacatatatacatacatgtatatgcatatgacatttgaatatgcttttttgcctgtctggtttcaatgaaagtgtgctatatttaacaccaatagactattattagcatcagaaacctggagcattgctaagtttccagtattgattagataacagctcagttctgccaggttggacatatggtaaagataaatgacaagtattttaaggttaaccctcccccgcttaaaaaaaaaaggtgcaggaaaaaaagtaggggaaaacagtagacagtgcaccctagttattgattcttggaaagctaaaatctatcgtgtagcacctgaacattataacactttagaaaattaagacatttgaaggatgtaagaatgtatcagcaaggctttggctggggtgcagtggctcacgcctgtagtcccaacactttaggagcccaaagcaggcagatcacaaggtcaggaaatcgagaccgtcctggctaacacgatgaaacacaaaaaaattagacgagctcacacctgtagtcccaacactttgggagccgaggtgggcagatcacaaggtcaggagatcgagaccatcctggctaacatggtgaaaccccatctctactaaaaatacaaaaaaattggcacacacctgtagtcccagctactcgggaggctgaggcaggagaactgcttgaacccaaggggcgggggttgcagtgagctgagattgtgccaccacactccagcctgggcgaaagagcgagactccatctcaaaaaaaaaaaaaagagagaaaagaatgtattagcaaggctttcaaacagttaccctaaaaactaaatacaggcacaacataactgtgtagacataattatgtatcacatgtaggtacttatagatatatttatgcagagtatttttagttaacatatctgactgtgacaacaaaatagtcatttagtttgaaaatcatgtgcccaaatatgtgttttgctgtggttaccctggagactttggagttctgccatgtgatttccttaaatccctggaatttttgattgctgagaattcaggaggagttgcccacttgttagtgtgcagggaaatgtgtttttctcatttctagttgaggtcattctttttttttttttttttttaaaccatagcatgtgttccattagttatgaatgtattatttctttagagtcaaaattcacgactcatttctttgaatattatctctgatcctagatgggatcaaaattgccctagatttaggagttttaaaagtttactaggttgtggggaagatgggtttatttttcataaacttgaactagaatgttgacgattataaggactgggacacttcctaaaggtcaaaatattttaaggcgaaagtatgtattctttccttttgcttaatgattgaaagaaaaagtggtaatatgcgcttgctttctattatgagctttaatttgtaatttgatgaagatttttgttaacttgctataggtagtcaggtaaggaaacagtggtgccagaatttgtccctgattcagtatagttctgtgcaggtcttgagtagatgaatttaaatgctactttattagtaagagttagatggtcagccttgtactgagaacctccaaccttcttcccagctttatttttctacacgcttcccatcatctgacttacgtgttttacttgtttactagaatgtaagctacatacaagcagagtttttaaaatttttattctgttcattgctttattctgagtggctattatcgtttaccttttttccttgttttctatgcaaagtctcttatcagccactacttgctcatttccatacagggctatagttcaaccctttgctgataccatttttcttatagaaaaagttcttccaaaacttatcaatactgtattcatcattaatgcctctttggaattctctcattctcctgactattgctgaacatagtctcttcttttaaatgctgaggaagcactcatttgacactttgctgagatgtttacctaaactacattttaaactttttaattactactgtttttactgtggaaaggggtgtgaaagtgttacagccctttactattgggaaatctaatcagataaatttcgtgaggctaggatggaaaggaaaaactttacaagttaagcaaagggactgttaattaactgtttaataactctaacgacagttatgaccagagcaacataatagataaaagacaatctccactaagagccttcattgggtaatagtatgacttgtagtttttttaaaaaatgctaataatctcaggttgtattacagtctcatggttatacagatggatgggaatatctctatttgcctaggatcaagaggctaggtgacctcttactcaatgggtcgttctttgttatatgtattagtatatagtaaaaggaaatacttcctttaccataaatgttattttattacgtggccatgtaattatggtctcagctcctaggatcagaggatttaaacttagaagacatttttcggctgggcacagtgactcaacacctgcaatcccagcactttgggaggctgaggtgggcggatcaggaggtcaggagatcgagaccatcctggctgacacagtgaagccccatctctactaaaaatataaaaaattagctggcatggtggcgggtgcctgtagtcccagctactcaggaggctgaggcaagaggattgcttgaacctgggaggcggaggttgcagtgagccgagatcgagccattgcactccagcctgggcaacaagagcgaaactccgtctcaaaaaaaaaaaaaaaaaaaaaaaaattaagaaggctatcctctaccctaaaaaggattggtaggctgcttgaatgaaatgataataaaacaccagttgtttaaatggggctcctatacacactttgttttaaaaagaaatatcgagttgtggagggaagaggatgaaaaacattttgagtatgtctttgtaactaaaatttacttggattcactaatggctttgttcctttattgtaatggagtaatattttctaaaacaaaaagttgtaatggtgttctataccttaaatgtcaaaaaagattaagtagtctcaatgtgttgtaaataaaaatgaaagaaatggtcaatctgtgcattagattgtgtttaatcaaatggtagggtaaaactacgcataccagatgacagcatagctttaaaaatgtggcttggaataaagtctttcaaaaatggttgtgtataccctgtctacaaaggaggtattatgatacatttgtatttatctttattctagataaaatgatggtttacagggggagaaaatgaagaaaaaattgtgaatgtcttttttttttttttttggtaagacagtcttgctctgtcacccaggctgcagtgcagtggcgcgatctcggcttactacaacctccgcctcccgggttcaagcaattctcctgcctcagcctcccaaatatcccaagtagctgggattacaggcacctgccaccacgcccagctaattttttgtatttttagtagagaccgggtttcaccgtgttggccaagctgatctcgaactcctgatctcaggtgatccacccgcctcggcctcccaaagtgctgggattacaggcatgagccaccgcgcccggctgtgaatgtctgctcttaatactttgactcattactgtcattgagtgtattcatttgtttattttattttattgttattgaaactagttttttgtttttatatgccattttcttcaagatgaaaattacggataacttacaggtagacttttttttttttttttttttttgagatggagtgtcactctgacaccgaggctggagtgcagtggcaccatgttggctcactgcaacttctgtctcctgggttcaagcaattctcctgcctcagcctcccgagtatctgggattacaggtgcccactgccacacccggctagtttttatgtttttagtagagatgaggtttcaccatgttgaccaggctggtcttgaactcctgacctcaggcgatccacccgctttggcctcctaaagtgctgggattacaggcgtgagccatcgcgccgggcccaggtaaacttttgttgttgttgtttgttacatttgatgtctttcttattttgagtttaaaagaccacagtttgcaaaatataactcagtgaattaatcagttattatttgataatttgattatttgataataaccagagttatttgataatttttaagttttcttataatttagaaatacagggtgaataggcaaaatgtaaacaaaaatggtaatttcatataaaaaagtatctggtgtttaaaaaactttgtatgcatctcaaaatcatgattaaagtatagttttggcttattaaagtgttatatatgtcttctgatattaaaatttgttttaattatccaagtaatcctgaatccattctcatgggaagaaagatacttaagtcaatattaaaatactgaaatatgtgaagagttaaaggtgaaagtcattctgtacagttctacaaaattctgtttctctgttcagagctactgcttatagtttagtgtttaatcttgcacaccttttgcatgcataaacctttacaacaatttgttttacttttttaaaaaaataaatggggctctattttacaatgtgtcaatatattaattttttttcatggttacaattttgtaatggttctcttaatgatggataattgttttcaggggtttttttgctatgatttaaaaaattttacagtgaatactgttgagctacatctctggatattactatcgattatatggtcagtgcacttgtggctttatgaatattttaaataatgtagtcaagtctgttgatctttttccttgtcatctgtgttttgtggattttggtatttccaaactatattcatttctacagagttattttcatttccattttttgaactgtcacttgtaaaacactttctttttatagaaccttatgagtgatagcaagatgtattagtatgtaatacattgtgatggagtgtaatgatcacaaggatcagtgacagttttgatgaccaatttcagagttataaaataaatgaaatatattctggaaaagtcatgggctttttgtgttgtttgtggaatcactaaaggtagtccctcactattaacaaatttgttttgacacataatatgtgaggcactgaattataataggcactagaaacattgcctattttcctgaatcctttagacaggattgcttccccagttaccagagatttctctaaccttgatttacagtagctactgctggtaggaattgctctccactccacttttgctgccatccagtgttacattaccctacaaatatactaagtgcttagcaaagcagagtccaaatgtaagatcaatttttgtcttacccagaattttacaattaaaatatataaataaaagatttctctgtgtgtggatgtatgtgtacagtatagtgttgcatgctatacatggggtgaggtatcagaatgctttttcagtgtttggcacctctaatttggctctgtggccatttattccacctttctaccttgaaattccacaacttgggctcttgaaattacctggtatggtgcaatgcacgtgtattctcagctactccagaggctgaggcgggaggatcacttgagcccaggagtttgaggttgagattgagatgaactgtgagaacatgctactgcactccagtctgggcaacagagcaagacctcatctctaaaaaattttgggcttgaaacgggctgattttgtcctaccactagtaatcacttttagaagtagcttacaattgctgtttcttccttcttatggggggaaatacccttataggaggtattatgaagccaatatctaataaactctgtcatcattagctcacttccactcttctgccatctctctgtacctgattagtatagttttgaaaaattataattttgctaccactgcacctctccttgttagtaggggagatttatgtaagagaagaatcttttatttctagacaaggtaatatcccattgggaagaaacagccaagggagaagaaatgtttttttcttctttgaagggactagaacttttatagctcagcaaatttgaataagtttgatggtaattcagctacattatattttagctagatttctgagttcatttggtaacctaaccaccacatatatacctatttataacttgaaatttgcctttaaagtcacgaaagcacaaagcactgtggtgcttgtaacactcttccatattattataggtaactaaatgaccatggaatctggagccgagaaccagcagagtggagatgcagctgtaacagaagctgaaaaccaacaaatgacagttcaagcccagccacagattgccacattagcccaggtataaaatacatggagagattccagtttgtgtctcttcctagaggaatacgtttccaagagaatttagttgttattacatagatatacatagaatgagcagagatactcttacaatatcaaaattcctatttacttagtattagagtatatttagaaatgatagtattaattcaataacagtaaaatgtattattaaacaataatacagtatttttagtgaaatgatccagaaataattacattttaaacttatgggtaaatggtgctctcagataagggaagaaaaccttggctatgtatgacaactgctttttttatttttttaatatgacacagatttattttttaacagtgggaatgcagataatatgaaagcctaagtttatataactaaactaaaaattaggataagcaaataaattgacatgtaaggaaattttaaggatgatagcagtttttgtttcctgtatattttaaatataatttctgattctttcatttcatctttctctttaacatcctatctttaagaatattttctctcattcttatgtttttgtttgcatgcattctcctcaactattttattaacagctgtttacatagataggaatgagaaaggtggttaacttaaaaaacaaatagcagatacagacctgctaggtaatagtgtgataccgtctctttcagatgaaggttcccaggagaatataatcctagcagaagctctgatatatgtagcttcagtttctccaagagtttaaaagttcctagagaagtcacctagcaagaatgaatcatgggaaatagaggactcaccacacttgggtgtctggctgaggtagtgtgagccagatactggatttccagcaagaatatagtcagaaggagtgagctgttctgtgttttctcctaagaccaccagggtttacctccagccttcaggaataagacaaagccaaatacatctaatgtactcatacgaggcaggctgcaggattgaaggggagagagccaggacttccatcaatatagggtcaacagataagaatctgggctcatctgtatattttgccctttagaaagaggaagacacaatgctaggccgggcgctgtggctcacgcctataatccaaacactttaggaggctgaggcgagcgaatcacttgaggtcaggagttcaagacgagcctggccaacatggtgaaaccccatctctactaaaaatacaaaaattaaccaggcgtggtagcacacacctgtaaatccagcgaccttagaaggctgagggaggagaattgcttaagtccgggaggcagaggttgcagtgaactgagattgcgccactgcattccagccggggtgacagaacaagattccctctcaaaaaaaaaaagaagatgcaatgccagcaggcttctttatgatgatagcccttaacacatcttatctctggagtcacactattttgtccagtctggttgtccccagagtaggctgtattgtgtcatcctgggaattcctttctccctacttccattttctcacagtttgtgtttttgatatggtaaagcatgtttttcagtggttttatgagaaagaaaggttggctgagtaaagatagcatgttataaaaattgaatgtatgggccgggtgtgatggctcacacctataatccccacactttgggaggccgaggcaggcggatcacgaggttaggagattgagaccatcctggctaacacagtgaagcccgtctctactaaaaatacaaaaaaattagctgggtgtggttatgggctcctgtagtcccagctactcgggaggctgaggcaggagaatgtcatgaacccgagaccgcaccactgcactccagcctgggtgacagagcgagactccatctcaaaaagtaaataaatacaaataaaaattgaatgtacatgtgccttaacatctagaagatgtacaacaaaaatattaaaagtgattagctatgggtgataggaatataaagggtttttattttattttttatatctgtattttataaatttataatgagaggagccattatataaaattattagtgtagaaaagggattattcattgagttagctaggtatattttccctagagaagactcaggaaagagaacatagtaattgcttcaaatattacaagagcatttatatggaattgagatgagatactctgaataaggttatggttctcaaacttcagtgtacgggaaagtatgattgggttcctgttagagttgactttacagagtatcctgtgtgactctaatgaagctattccatggaccacattttgagaatcaaataaaactaagcaagatttatagtggccagagagaaagtgattaataagtaaggactttattactatccagagatggaagcttctggttttaccctatatgccaaagacactgtctttatagggatcttccccccaggcttcacagtcacatatttcgctgcctgctaaaataaacatctctacaaattcagatgtcagagtagtttcatcatcttccattacaaccccagtcacccaaaagcctatccttacttcttgcattctctttttcaattaaggacagtctgccaattctctttcagacatgaaacattgggtcatctgcagttcctctctcacctcttttaactattcataaagccctttctggactgcttccaaattttcataaaatcacttccctcgttcccatctctactactactaactgccctctttttggccttcatcatctttccttaactacttcatgggctttcttcgttggtctccccaccaccagttttccccctgaaatatatatctttcacactgccactaaagtgattttttttttttttttttgagatggagttttgttcttattgcccaggctggagtgcaatggcgcgatctcggctcactgcaacctctgccccctgggtttaagcagttctgcttcagcctcccaagtagctgggattacaggcacctgccaccatacctggctaattttttgtatttttagtagagatggggtttcaccatgttggccaggctggtctcgaactctagacctcagatgatccacccgcctcggcctcccaaagtgctgggattacaggcgtgagccacattgcccggcctaaagtgatctatctaaaagcaaacatcaccatggtattcaggagttcaaaagcccttcagtggcttctgcaataccctcaggataaaatgcagtttctctgaggtgacataatacaggctttttgtgactagcacatctagccccacctgcctctgttgttttctctctccctacttcatacatcatacagtaacacacttatgtgcaccattggtgctgagctgctggttatcccactctgccatgtgtgctgtttctctttgcttttgccactactccactctgtgcttgaaattctgtgactcttccctgtaagtaataataacaagtctaacttttttcttttgttttaaattcacattcttccctgatagcctccccttctcttaggttgggtagagtaattctcagtgtgtccatttttcttttagcaaacctcattactaaactgaattgtattgtgtctcttttccccattccttcgcatacatacccccaataatttatttgaggtcagagacccctatctttctcacttttgtagtttcagttctaacattattcctggaacataggtccccaataactgtttcctgatttagcaaataaaattcctatccttgaatgtgttcaagcataggagcaataaataacatctgatagacatgtatgatttaaggacccttttaacctgggtattgactcattaaaactgccttagttctagacttagtaggtcaggtttgcttatgcttgagagcagttagattttagaacgtgacttatttaacatgatattctttagaattttatgtttcttcaaggatagtatatctgttgaccttgggtgaacacttaatctcattgagcagttatttgtgtttttaaaaatggagatccttatcacccagtcttcagtttcttcaaatagcaaaatcagaaattggaaatgaaagcaggtgggaaaatgtaaagtgccatacaaataaagtgatatctcatgttcagagagtctgtattacatatttggtataacatgggaatagtttttaattttttgtcacttgggaagagctgaaaaggataggggtatagtttttggtgttttttatagtgttttttcttaaagaatattaaatttagtcattactttcatatcagtgaaatacatatctagcaaaaaggtcacgtttttgcttctaaaaagttatttcatattgaacatgagtactgccaaagagtgtctgggatgataattcttttctgtgttcaacaccataggtatctatgccagcagctcatgcaacatcatctgctcccaccgtaactctagtacagctgcccaatgggcagacagttcaagtccatggagtcattcaggcggcccagccatcagttattcagtctccacaagtccaaacagttcaggtatgtgtataaaaagttctgcatctattttaataacttttgtttatagccatatctctctcctttcactagttatgaaaataaggacacatctagttcagtttattttattcacagtataggaatatgctgcatctgtatagtcaccttatgtataggaacatatatacagaagaacaaacataaaagaaaatgactaatttcttaagctgcagaggaaaaagaattgattggggaaaataatgaagtacatgagataaagtggaagtgtttgggagaaactgtaggactgaagtacctcagtcgaggaaaattgagatgcaaaaatagtaactaattttctaaatctgcaattggagaaaaataaacccttgatcaaaaattaataaccttacctaagatattatttgaccttagagattacataaagcatttgtaaaatcagctgtgcttagggttttcagttacagtgtgtaactttgaaataatatattcagaggttacatcttaagggtcaggaattatactatgcatgttatctaattctttggagagatctttcctttgggtttgatccacaggtaataaaggcactgtagacctttgaaggtgactactctgtttaactgtagggaaccgagagcagtatagatcattgcaattgagcttattgaaaaaaaagacttgaacgttcattcaagtaggccataaccccagcctcccatttcatattttttgcttcacagtcttcctgtaaggacttaaaaagacttttctccggaacacaggtgagtcctaggtcctagatttggagagaactattattagaaaggaaggtgagaaattattctttatgtctttgtccttttcctctataaacatggaatttcaacacttgaacaaaaacctcagagatcttctgggtctaggccatacttgttacctccccagcccttagtctgttgcttaattctgtttaacatttctcccctcttcctaatggtagtccagcatttacttgaacactttcagagaaaggaagctcaatctcctgaggtaacctgtttacaattaggagtgattgctaaaatattcttctctgtgatgatccaaaatatatcttcctaaaacttttacctagtgatcccgggtaaacacaggttctattctcggaaactagattagcaagtctaattcctgttctattggactgcttcctcttccccatcccccgcacccttcctatttttaagaaaatttccagactaaacaaactatttttctttagccatttattagatggtataactctgtttcctcttcaccatcctggttgttttcttctgggtgagcgctgttatgttttctttacatatagtaaccagaactgattaatatttgtagaggggagaagtgctgtctttgtcctggaagcattctattaatgtcctcagtagaatttgtcagccattttatactattgagtcatcgaacttctattaaccacctctacttcattctgtctttgtgcttttggttcactttgacacttaagtgggagcgtgggggaggagaagtaatgtttttgtgtgaaatcatcagttggatcaatttccataagacactgggaatggcatttgttaacaagtaaaagatagtgttgtgcatgtaaagatctaagaacttgatatttctatgaaatcacaatgactgagcaatagtcctttgccttagtttttattccattgagtgctaccttaccattgtccatactgtgccattactaattccctaaccatatgctcctcttagtaatagtgagaaaacttgatttgctagtgaggagacctagattccagacccagtttggacattaataagtcaaatggccttgggcacatctacctttctctttttcacttatagaagatctttctataaagaacacaaaaattacttaagttacagccacaaaatttgctaagattactgttttttattgtaatatgtgttattgttgattgtattcttgattttaatctttattctggggcaacataatttggacatgaagattttatggccattaagtatagaaatattctcttttttttatttgcttgtattcatctttaaggaacacatttgtccattaaggtccattaaggtgagctgtacttctaatttaagagtgtgtatttataaaagaaaagttggacttattgaaccctggattctacaaatagagatacaaatataatatttttttctttaaaaggcctaaactatagaatatctattttaatagttatcttagccagttaatggtgattagtgttaacaactaggaaatagtttttatcaaaagagatgatcaaacaaggagaggatcttctagatgggagacctcattaatattccagaataaagtttccaaaatatacaaggtacagttctcttgttgtgagaatagattattactttaaattatcattcattcctacaacaaatgtttattggtgacatgctatgtcactgttctgcttgctataaaagacagcaatgagcaaataatacttctctgttctcaagaagatcacattttaatgaaaagagacagactatgaaaaaataaattgtgtcaggttaggagaattaacgagagagatgaataaagccaggggaaagggatggagaatgatgtggagggaagggtgttctactttatgtaatgtgctcagggaacacagcacagaccagaaggcaatgaaggaggctaaggcatgcagatcgaaaggtttggaagtgagggtatacttgggatatcaaggaataacagaaaggtatggctggaatagagtaagtgaggagggaagtgattggagatgcaatttacaacgtaagtttgtctcctttaaaatgtcaaatctacgtattttaaaaccctaggaatagaactttgtaaattgttcaggagtcttccggagtttcagcaggtattgaacttatttcttaaaaatacaaaattgtaaccccttcctattaacatggaataaactgacttagagccagggagatgaaaataataaactagataaatctcattgaaagcttgcataattggtagatgcaaatgaaaatgattatttagtaagcatacctcaaatgcacctagttttgttatctacatgaagttttctttttcaatgccagcagttgttaaatcacatttcagaaaacccaagcttagaatctgacttctaaatgactgttataaagtgttaaatgaggtcagactccgtggctcattcctgtaatcccagcactttgggaggctgaggcgggcggatcacttgagctcaggagttcgagatcagcctggccaacatggcaaaacgccatctctactaaaaatgcaaaaattagccaggcgtggtggtaggcacctatagtcccagctactcgggaggctaaggcacgagaatcgcttgaaccctggagacggaggttgcggtgaaccaaaatcatgctgctgtactccagcctgagtgacagagtgagactctgtctcaaaaaataaaagtgttaaatgatttttaatgaagcatattatgtcattctcactatcctgaaaaataatattatttatctttaagaaatatataaatttttaatatttatgcttatcatatctctttaagaactcttgttttataatacgaatacttaaaatttagaaataagaaaaatgtatgcctgtgtaaaatttttcttatttataagagatacatgcagatcaaaagagttggaagatcattgatctagactttcagtaagcttcttgatccaatgagtaaaacactgtatctaaggccaggtgcagtggcctataatcccagcccaggcaggaggattgcttaaagccaggagttcaagaccagcctgggcaacatagcaagaccctgtctctacaaaaaaattaaaaattagctgggagtggtagtgcatgcctgcaatcccagctaactcaggaggttgagtctggaggatcccttgagcccatgagtttgaggctgcagtgggctgtgatcgcaccactgcactccagcctcggtgagtgagtgagatcctgtctcttaaaaaaaaaaaatcttaaaaaaaaaatatatatccaaaccatgagtctcaactctaccgagggatagtacttaagtttccaaaggaccatatataggtttaggaaacatcgaatattaccattgttttgattggttctagttactttatagtttattttaaaatttcaaataatcgaaacggggtcctccacctttccaatataaacaggtagtatgggttttaaataaaccaaagttgagaaatacagacctaaaactttatatctacaagtggtagtttagctttttgaaaatttcttgacttacaagtggccaaaattaaagacctatttaaggaattcagaaagaagttaataagtgataggagatgagaataaaaggaaggggttccatcattggaatgtgatgatgatacgtgatgtttataattgggatataatttttcatatgatgtttttattctgttatttataaaaatagatttttgacatgatttttattgatctcagttatgtgggtccagtatgtttttttttttttaacatcagttttaggttcacagcaaaattgagaggaagctacagagattacctgtatactccctccccaactccatggatagcttcccctgttcttaacatcctcccccagaacggtacatttatgttataatttgatgaccctacattaacacatcataattacccagagtccatagtttacattaaacttcattcttggcttggtatattctgtggcagtatttttattattgattaagtgatagatcagggactccataggaattagcttcatggcttacttctcttcagatggtattcccaaagaggaagtgttgtgtttatttcagtggtctgaattctctttacatttacaaagttgcaagcactaaatagtgataagttaattccttctgtgtgaattgacaaaatcttacaggtcagagaaaggcaaccttttttttttttttcattaagggccatagatccagagttagaaaaaaaaaggacacagattaaaaaacaacattaatttgtttcatttcaaaactatcctgtgggtagtttatatggcatgttttaatgttgttgttttagtgagttccaacttggaaggggggtgttccctaatcactatatgtccttaagagaagcatgtaaggatggggcatatgagagtcaagcagtggacacagaaagagccacagaggagctaagtgaattctgagtggcgtattaatgaagggaaacaacacttgtcacagtactatcaactttgagttcagtcttgttattccttgaatttctgatcctttcctcaggccttttcatagctcctgatcttctgtatgtgagaaagtttgtgcagagactcttgtgtgtgggctagttacagcagctactgattaacgtgaaacttttctgtgtgcttctttggcagtaattacagcattattattctgctgagaatcacagactaaattcagcattactcatctttttatctgtcatttgtgaattcattatatgttgcctattgatttttaggtctttcagattgtacttagactttaaagtgtttggatggggcaaattacttcattataaatatattttactacaagttactaactttacctggtttcattttaaatgagcatgcatatcacaaagccctgtaaaatgaatgcccacttgggagaactgttaggctcagaccacacatagagtacgcttggaatttctcaagtacttctgaatatgttttcttactgccattgccatacgttttgacgtggagctgacctacatagacccttttgtcttggttaagtataattcttactctgaccgcataatgtgcccctagttcaggaaagagcataacgtttctgctgattagagaaacttgggcagtgtaaatttgacaatcaagcatacttaggtaagtgaactcttctagtctagaaaaggtgtgaaaatgccactggttgctgcttctgacaaacctggtttgagactataacagtctggtttgagactggaaccaccaggattttgatgctggtaaggatgtctaaaatggaggttaatgacagtggctccactacttcctagctttgtgactcgggtgagttacttctttgtgccttagttcttccatctatggaatggatataatagtatagtacccatctggcgcctacattactgtgagtattaagtaatgtagtatatgtaaatgcattagcataacacctggcacataggcatctgtaaattctagtttctatcattaatatcccatgtaaattttttattcacttatcttcattacttttcagtctaggtattcttatcagaaaagcatagttctttaccttgaatttttacttaaaagtgattatagaatgctaactttgaaacatgttaggagtttttcctaacttgctaggaacaactgtcagggatgtcatgatggatcgccagtcttactgtacaactgtaaatatattcataagtgtttatacagttaaataataatatttgtatagtcactatatagacttaggaccaaatatttagccatccattttatcctttatatcagaaaccttattttagttggtagttttgttccaacagatgtaagaaaaaactgataagtaatactgatgcattcaggattgattacatggagtcctgaaaaaaaaattaaactgcagctattttaggttctctaacttcatcgtagtttatagggtaagtaaagggaaggggaaagtgattggtgtggttgtctcccataagaactgatttttttctactgaagcatgtataaagtttatatatgactttttatatttgtttaataaaaattttacaggaactaaatttgattatcaatatgaagtttttctttaatttcagatttcaactattgcagaaagtgaagattcacaggagtcagtggatagtgtaactgattcccaaaagcgaagggaaattctttcaaggaggccttcctacaggtatggaatttaatagttagaatcaaagatgtggaggaagtcttaggtagttgcagataaagagatgtcagaagaccagttagttgttcacgtcagttccttatagattacttttcttcatcttgagttatttgtctcaaataaagtggaagcttatcctacagaataagaagagcacttgttactctcaccagtcctaattttttttttttctgtttctgtttctgtagactgtgctggctgtctttctgttaaaagtttggaatacagttgataaggttatagcattttttagttataagccaactctgaggctctgttatttatctacttagtaacacattgcaaaccattttttatgccatggtacttaacagatagctattaatttaataattgtctcagggagatgctttactaacatcccctaattttagcagtagcttactgtaatttttgtgttcagttatagatgttgcctagtccatgccttgcctccaaggtgaaccaaaaccattttttaatgtaaaaattagctccacattaaatatcttcaggaagggcagttccataaatcttgataagtttacttcagcattgaagaaacttcagactcataattatcttccttgttagtgtaaattattttttatatattcctatttttcaaagggatggttttttccccccgcttggctattaaactaacccttttctctgtccttacaattaaattaagaatcctaagtgactagcaataaatagattttgaggtctaagaaattttatattaccagtttatgttatatgtatttatattcataatttattttaagtatagctagtgttagattttaactttgaagtatatctcctgttagtatataacacatttgatcctgaagcaaatccaaccaaatactactagtaaagtaattacacaggtaaatataaaagccaggattattatagttttggtttgtaactcctttttttcctatgtgattggaaagacaaaggcatagaacaataactataaatttatgtgactaagcacatgatatatgaagatgtcatttttgacaatagcataaagggacagagtttataactagtttgttacaaatttaagatatcaaaaattacttgggttagggtttttaggggttttttcccacctttcagtgtgattatgttattcatttgaaatatggtatggttcctttgtttttgggttccattttagagtttctccacccatccttgttgatctttatttttttttctagtaagtgaaacatttaacactgtaccaaaagtcagaattgcacaaaaaaagtatactcagtagtgcctccccattccttctgtcgttttcatttctttcctacccatccccagtaaatagctaaaaccattactctctcgtttatccatcctgatttttttccttgaacaaatgagcagatacatgtctgttttcatatttcccttttttccttacacaaaagatatgctgtatccattatttggatgtaccatagttgattcaaccacttgcctttatatgggcatatagattgtttccagtattttttttcctttttatttgtttttctattttagaccttggatatatggctccagtattttgcagttacaaacagtgccaatgggaataatcttaagcgagtttattttaatattgttggaattggggtgaattcctggaaatgggattgaggcacgaacacccatatttccttaaatatcaacaattccttatatcgggattgtgccagttttatactcccagcagcaatgtatgagagtgtggtgttttttgtttttgtttttgttttttttgtagctttgctaacagattttgttaacacttttttgtttcccaatctgagaagtgagaatttaaaaatcaggttttgatcttttttccctttagttgattgttgactttttactttccgactttgtgtatgtgttctttgagatgcaaaagattttttttaatgtagtcagtcttattattacccttaattgcacccttccttacattgaggttaaagataatacatctttttttttgtttttgtacatatttgggttccttttgacatctagatcaatccctgacccatgaagagtttattcatgtaatttatatattttaaacttctgctggctgggtgcagtggctcacacctgtaatcccagcacttcgggaggccaaggcgggtggatcacatgaggtcaggagttcgagaccatcctggccaacatggtgaaaccccatctactaaaaataccaaaaaaattagccaggcgtggtggcaggcgcccgtagtcccacctactctggaggctgttgcagaattgcttgaacccgggaggcggaggttgcagtgaaccaagatcgcgccactgcactccagcctggcgacagagcaagactccatctcaaaaaaaaaaaaaaaaaaaaaaccttctgtcctaagcactagcagctttctgtgagttttctcatctttaactatatttgtatttagccagtaaattgtacttatatttttaattattctagttttctaattttgtaggaaaattttgaatgacttatcttctgatgcaccaggagtgccaaggattgaagaagagaagtctgaagaggagacttcagcacctgccatcaccactgtaacggtgccaactccaatttaccaaactagcagtggacagtatagtgagtaatagacaatttctgtttctattgtgaggagaaaaaagtgaggagaaaaagctaatagttgcattctcttcagagaaaccaatacaagtgccaagtcttctcagttttgctgccattattatatttcctttactcttcactatgcaaaggtctgtaatggtagtattttcttttcttcagagagttttagttaggattagtcaagtgtataaaccttttagatgtccttttgtttttgtgcagatgcatggaaagtctgaagtttttgaaccactaattgagaccctaggtttgaggcctcatgtgttgagagaacataagttttttagattaaaaaaaatcattccttgaatatatctcggtattcattttaatagtttgtcttgccttctgaaagtagcattttaatgtcttcgtatttaataatgtttcaagtggggataagcatggcttggttgagtcagcacattcaattattccttttcatatgaaagatagtaatatactttttggcccacataaagcaaaaattgctcttacaaaattatttaaaagttttcatttctatgatgtctctgtctggcacttaggtctgtcttcttatctttcaccaaaatctgttataagacacttttgaattttattttgtttgatcaaaagcatttgtgtgaatggtacttttttctctttttccctttttttttttttttttttttttgcctctcaaagtgctttattcattcagtgatttttttcatttgtatttgtttattaaacctggtgctgcccatttatacccttttccccacccaccttagtttcaaattaaatgtacacattgaaacttctttactgagatagtttcctaatccctgagggaatctgtatcagaaatatgcataaaagtttgaggccaggcacagtggctcatgcctgtattcccagcactttgggaagccaaagtggaaggatcacttgagccatccaggagtttaagaccccatccctatttataaaaataatttaaaaattaagaaatatgcatgaaagtttgacccccatgttattttttagttccagttcaactttgttttgcgtaactctaatttgcattcccatctgtattaaagacaagttctcaagtagcaaactttttaactctgccaaggctgaaacttttgagactaagtagaaggaaggcatttttgactaaggtttttatccactgtgctcaattagcttagtcatcttttttcttcttaagatctttgtggcagatataaagtacaactctttacctacaattctgtacgtgtatgtgtattatcagttgaagcctcataccagatgcttttagttattcaagatatgtgttcgaagacattgatacatgatgtttatttttcttctacttcagcatacctgagggatacaacatactcctgtcagtaacagattcactgttacagagattctcacttgaactaggaagcatgctctttaggaaagaggcctatcagaatctaaaaaggggaaatgaaggttagaaaagtaccagcacccccatagatgtttaatttggtacactcgtctcctccagcagctgaaaattgctagttttaagagattgagccaggcgccgtggctctcgcctgtaatcccagcacgctgggaggccaaggtggtggatcatgaggtcaggagttcaagaccagcctgcccaacatggtgaaaccctgcctccactaaaaatacaaaaattagccgggcatagtggcggacgcctgtaatcccagctactcgggaggctgagacaggagaattgcttgaacccaggaggcggagctggcagtgagctgagatcacaccactgcactccagcctgggtggcagagcaagattccgtctcaaaaaaaaaaaaaaaaaagagagattaatactttgaaatttttaaagctttgttcattatttttatcctgtgtcctctctgtatatgtacacatggctttggctttgatggaactgatttaacattatattcttgattttcattaagagcaatataataaatacatatacagcaacatttatatttcttaacttataaaatgaacatatggttgtcagaattcaccatagatatataaacacacatagttatatattttgtttaatagctgcattgtgtttcactgtgtaaatacagcacttatttaaacattctcctgctgatgaacatttaggacatttctattgtttcaaacagtgctacataaatatcctaagagtggaattatcgaccatcctggctaacacggtgaaaacccgtctctactaaaaatacaaaaaattagccgagcgaggtggcgggcacctgtagtcccagctactcgggaggctgaggcaggagaatggtgtgaacccagagggcggagcctgcagtgagccgagatagcgccactgcattccagcctgggcaacagcgagactccatctcaaaaaaaaaaaaaagagtggaattatcaaattaaagcatatcctccgcaagtacccttccaggtggaggcatgaatttccactccttccttaaattggttattttattaaattcatgctgttactagatttatctgttacttattagttcagtgtcccagatagtaaaatcttattagtgattctgctcttagatagaaaatgtgtatctgtcattttgaacttgaatttttttgtttcagtaaataaaactatgactcatgatgtttccctctttattctggcaactcagattcttagctaactttctgtttaattgtattcttttcttagtctagattttcttctacaattgttttatataactaaggatacatccgttacttgacttctgtctttttatttttgttttaatgaattgtgttttattgaaagctatctcaaatctttttggaataataaagtgtatacataaacattatagagaaaaactgtgttcagtaggattagacttcagtttccaaagtattttcatatacatgacctcatttgatatttacaacaattgtacttagtggctagaacccagatgcttttgtttttagagaagagagaacagaatcaaataacagtttagtgatggctgggcacagtggctcacgtctgtgatcccaacacttggggaggccaaagtgggaggactgcttgaggccaggagttcaagatcagcctgggcaacatagcaaaaccctgtctctacaaaaaaatgtctttagaaaattagtagggcctgatgtcctgtgctagctacttgggaggctgaggcaggaggatcacttgagcccaccagttggaggctacagtgagctgtgatcttgccactgcactccagcctggaagacagaacaagaccctgtctcaaaagaaaaaaattaaaacaaaaaactgttcagtgatggaactcaaactacaacccagtcttgtcatatatggtttactatttctttcttcttcccaccttgagttcactgctctgtagccaagaagaaagtggtatgttaaatacagtaggattcactcattaactctaaatgagaaattgtgatttgtttctgttaaccttctgattctttcaagtaatcatgcaaaattaatcttagaatagttcttactcatttttctccctgcctaagataagtaaaacttctgggattagctaaactagatccagtgtatatgccagcattttaattttcacaagtgtcattttgctaaactaatcacactgtagccattaactcttcttacttcttgatgaggcagtaatcaattttccatgtacagatgtctcaggatgttatttcccatagctggtggataactgatcccaaactaattcccttctaatggacagtaacatgcttaatcagacatgttgactttcctgcattgtttacttttttcttactcagttaaaatcagttttgtagttttatatgtgatattgtgatttttggtccttctctttctgaaaagcttgacccctacagggagaattgtctagagaggatattgccacctatctaaaaatgcttcttccaaataaatcatctaatttttaaattaaatttttctatgtactgtagcataaaggtgatttagtttttcataaagtgaaatatctactagtatgagcaaaagttgactgatttattgtttaacaaatgaatgacaggtgtggctaattagggcataaacaacaaagggttctatatgagaatgcttggatatgtattaaataatttagaaatgacagttaaagttttttttctaaatgatgatcttgagctctgattttaaaattccatgagagactgttgataattaagttccataggatatttcagttgtttcattgagtggattagataccattaaagaatttctacaagagttagggaatacaatgcactgatgaactgctttattagttatatgttaaaacaaccatttattgggtgcctatttcatggctgccactgtgctaagtgtatgaaagtatataagaaaattcctactctccagaaatttatttactagtgggacaagtattaatacattatgcagttaatgctaaaataaaagaaaggatcacagagtggaacctcttcagaaccaaataacttcagaaggaatttaacatttttccacttaaaaaaattgttaacaggcattattattataaattagaatgcagttcatagagtgcatttctattgtagaagttgaatatgggtttcctgaggagcaagttacttgaatatattagacccttcttggtgatgttatttgctgtaacttctcctagattattttacaaattattctacattggatgtaatgttttaaaagtcttatatggtattaaacttgtaacaataaaatccattggcttttagttgccattacccagggaggagcaatacagctggctaacaatggtaccgatggggtacagggcctgcaaacattaaccatgaccaatgcagcagccactcagccgggtactaccattctacagtatgcacagaccactgatggacagcagatcttagtgcccagcaaccaagttgttgttcaaggtaagggaattcagaattcacaggtgtggtaaattcttcaaaatactaaaattttataaactcacagaaaaagtaagtatcatattgcaaaccaccattcaaatgtagttaacatttcttcaatattgatagtatttttcatgaactcttccattattccaattggaccaaaatgtcatggcataaaaacaactattttcagtttttaaaatattgcatctacctttaacatcttttggggtagaagaaacaggataggttagaaggaaagaccaggaaatcaggagttagaaaagatggattctgtatctaactgcatggatctgctatgaggccttgagtaaaagtcagctgctctgagcctcaggaaagtgttttgttttttgttgttgttgtttttgttttttcatctgtaaaataagagttgcactgaatctctggaaacaatcttcagaagttcaggattctgtttctctgcttccccccccccccccaaaagaaatttaaatcttctgagatcatcagtttttattattattattattatttttttctagagacatggtctcactgtgttgcccaggctagtcttgaactccgggcctcaagcaatcctcctttctcaggctcccaaagtgttgggatgcctctgcacttgactcagtttttgtttcaaatgaaaacattatattccacaggatcttataccaatatgcaaatctgctgctctttagagaaaaagtagttgttaaattctcgacaaattatagaagttgctttttttggctttttttttttttttttagttttttttttctgtttatttcaggaatctttatggatagcagttaaccatttttctttggatttgtttgaatatttcaagaatatagttaatgccaggttagaaatttgctgattgaggaaataataataaatttgtttctgaaaatatttttataaataataatgcattttgcctgtgttaggtaatgacagttgtatcctttcaccatggataattgaataatcctgaaacaccaactggagagagtcataacttatttaaagagccctaatgtttacagaatatattctgttattaaacgagtatttgaaaaagatactattttgcttattgatgagagtaaaacaccttttcactttacatgcaggtactcaaaaattgtaaagcaggatgtcagtgaatttgaattctgaacgtcagtttgaagatggtaacatgtttagtatataaatcttttccactcaaaccatacattttaattgatattaataattaatatgaataattttataaagaccttcaaatttttttaagtaacattaggttccttattaggagagcatattattacgctgtttttagaagcagtttgacaaatagtgattgtgtttgtttttacaaatggtgaatcagttagaaaaataaaacttcagtttatttagccattatcatttacattaaaacaatatgtttttcaaataatataattggcatcaagtgatacactttttcatacttttagttttgttttaattcaaaatttataatagttgaccataatgctttatcttctttttcattttgctattttatgaaaaatcatggtcgtttttatgtcgtggcaagagtctacttgaaattttttaatatgaatttaccaatatcaaaggaagacactgaggactatactctatctaggaagatcatccaagctgtgccccacttaccttttagacttaaggttggtaagcatgttaacaacagaatagaactgcattcaaatgaaaaataaaatgtaagatccagcggacataggttactgtaataaatacattacattgggaattatttcttagtagtggcgcgaagagtgctgattctttcaacgctttagccagaatcatcttttcttttttgtttcccttttagtccaaaatacatgcttagattgatgattgatacacataattgaatcaagttgcaatgtttctgtcttacaccatgctcactgtttttttcagctgcctctggagacgtacaaacataccagattcgcacagcacccactagcactattgcccctggagttgttatggcatcctccccagcacttcctacacagcctgctgaagaagcagcacgaaagagagaggtccgtctaatgaagaacaggtacaaatactgcatttacttagattgttatgtgttaagtgtgtcttcacattctgctggatgtgtatctttacatctactggtaataggatctttgcattgaattttttttttccagcagaattaatggatcttgctaaattttctttatttaataagctgcacttataagatagctgtatgattatgggtcaatctttgatcgtggagtagttttctttcatgcagtttccccacaggagatttaatgcacaacttccctatgtctgcactccaaccagttagccaggttatttaaaaatggtttcttttcatgtatagtattgttcaagaagatcaagagtttcatatatgtatattaactgtgtgttaaattttatctatattaaatttacttgatataaagtaaatgtatggtggccagttcatgttttaatgaataatatctttactcaaaataataacattttaacacctaaagattcttcaaaaatatgttaattctaagaataccatgttacggacaaaaatcttaaaatatagtcttcaaaaaaatactacattcaaaatctgtgaaatgttggtaaagcaattctcagaaagtaactttattgctgtaaatgattttgccgtcaaaaacaataaaaataagttactaaatattggtttagaactttcatatagaagtgaccgagacaaacaaaagaaaatgaaaataaggttatgtaaaggtttaaaaagtttgaaattagtgaaagtatctcactgttcatcccaggatacttcaaacactgataaagtgaaagaagcagggcttccaagtcctagccctatccctccattttgggagaaggtattaaccttctgtacctcagttttgtaaaatgggattccagcacacacccaaagtattgttgtaagagtcaagtaagagaatcctttgaaagcactttgtaactgtagtgctctgttgaaatgggtttgtgtgtgtgagtgcaatttcacagctcagatcagcttttttgttcctaaaatattcttagctgtcacaatgttagtaaattatatctaaactctgagaaatggcagagatttttctgggatattagaaaaagagttggaaacaagccaagtgactttttttttttctcccgagatgaagtcttgctctgtcacccaggcaggagtgcaatggtgcaatctcagctcactgcagcctccacctcctgggttcaagcaattctcctgcctcaacctcccgagtagctgggattacaggtgcccaccaccacgcctggctaatttttgtattagtagagacatgatttcactattttggccaggctggtctcgaactcttgaccttgtgatccaccctcctcggacttccaaagtgctgggattacaggtatgagccatggtgcccagccctcaagtgacttttatttgtgctccatccatctgtgattttgagtatttaagttttactaaagagaagcataaaagctgcattcataattcaaatatattttaaaatataaattaaaatctgtaaataaaaattaaaatattttcagtttttaaaaatgtttataaggaaacctttaacttaaaattagaagcaagtctgatcaagaagtctcaagcaaaggctgagtagtaatatttaagacaacactgcttactaaagaaaagagttcaaagcaaacataggagcagaatcaaaaaataaatccttttgattataaaaaacaacagaaggacttctgtttatgtctatgtagtttggctgtgtggaacaaaatgtttacccccgttgactggcagaccaaatttcctttttgttctatttatttttctttcagatttatgaccactgccaccaacaagttaggaacagggcacacataactacagttcctaccaggctttgcttgcctgagatcttcagggaaactacccgacttaccatggactctttcataacattactttgcttagatatagttaccctactctttaaaaaggaaacttcccattgattctgccatagttccttttcccctttgttaccagattactgctgcttttactttttcagcctccattcactggaatctggcttctatgactagcataccgctcatatgtctataaaaaggtacaaattccctcccacttggcaaatctagtattttctttcatttaattttaactctatggagtatttgacactttcgacttctcattactctaaactcttccttggcttacttcacctggttttctggctacttttcaaatttttcctttgaaccttcatccatacccatgtatttcaggcattactttatatgctgatacttcttaattctgtatattctggctttgacctttctgccgagtgctatttattaagctccagtatatattattttattaattctacctacagtgaggtagaagcttatccccactttagaggaggagaaggtaaatatcagaaaattcaaatattttgccaaaggtcacacactttatgagattagtagaactgaaatttgaacccatatctggcaccaaaacctgtaaacatgctacttcactgattccagtatgcagccatcttctgctgtgcctctcaaaccagagcacatggcagtatgctagggatgtgtagcctaaggaggtgaacgtggagtgctttccttgaatgttcattttgctaaaatatttgagagaaataaaccttatttttaaggtaaaataagagatttaaaagaaatttataccagcagtggttttgctgcacccccagagtctccatatttggtttcctcttctagtgtggctatttcagtggaaaagttaagagaagcacactcctaagcatgctcactaggatgaatttcccttatgcacatcaaacacagcctatcttaaagtttgataggaaaagattgtaatccaaaaaattcatcactatccaaattgccatttatttcaagatgaaggtaagtggtaaacattctaaaagaaagtgtagacagctcttctgttaatttgtgttgctacagtaacaaccacgaatctcagtgtcttaaaatttcttcctcacttctgttacattttggcagctgcaggtcagttgctgtggctctccttcatgtgcccatctgggtctaggatcctgggctagatagagcagcacgtctttgagaaaagggcaatgcttttgaaagcatttgcttgattttggtgaacgttacatctactcgtgatctgttagccacagcacaggcaaggacaagcccaaagtcagtggagtgggaatgaactcttcctacaggaagtggagagtgaaaaattgtgaaagtaatacaatctatcacctttgcctttatgtaactttacattgtagggggattttaaaagcagattccctaaaggcagaagtaacaaaggaaaaggttaaatggatttgaccatataaaactataaaccccctatttaggaaagtaaaagataaagtagcaaacattttaacaaataatgtcagaagactaatgagttgagggatataaataggcagattcttagaaaatggatagggtaaaaaatttgaaaaattctaaaaaaattaaaatgtatttgatatgaattaaaatatatccattcaactatatacaactagccattaagagtaaataaaggtgtatttttattaagatgggaagatgttctcggacaaaagcaggttaccaaagagtatttacattactatcaggttttttaaatttattattacacaagtaaaacatgttcattataagtaaattaagaaacattacctaaaaattgaattacttctaatttcaccatctaaaatgttaacattctaaagtcagtttttttactcaaaccagtacaaaggtaaatatacatttttaatatatttttaagtaattttaaacttacaaaggagttgtaaaaatacagagttccggatacccttcatccagctttctctaatcttagtatattacataaccagggtacatttatcaaaaataaaagtacattggtataataccattaactgaattatacattttatttccccagtttttttacttacataatccagtttgggtaccatatcgcatttaattatagtctccttcagtctgtgaaagtttgtttccttgtctttgatggccttgtaacttttgaagagtagtgatctgttttcttttagaatatccctcagtttgcatttgtccagtgttttctatggatagattgagataataggttttggggaggaattccacagaggtatagtgtgcctttctcataacatcacatccgggagcacatacataattggcgatattaactttgatcacttggttaaagtgctgtccaggtgtctccactgttgagctaccatttttctctttgtccagcccatattcaaggggaggagaattaaattccacctcctaaaagggagaatatgaaagaaatttgtggtcatatgttaaaaccaccacagtaattaggtgtattttagaagaagtacttggaggctatgcagatatattcttttctctttaaagttttgcccaccagttttagaattcatcagtaaatcttgtctacagtaattattactatttgctattctaatgggaattttgtatatctccatcccttctaatatatttaacaactgaattctataaacaagatttgtttcttctccacattatttattttatcaatacagacacatactttgggagttataatccaatactattgttatttattatgttgttcatattgttctagctttggctactgggatcttttataagtgtcttctgtgtccttttgacatgccccatttttttctttttaagcacatctttactttctgagactacaagattgtccaggttctcatcttgtgttttcccttccctagccttggaatgagctgtttttccaatgatctctagttcctttattagaaaatggtggccaatatggtgaaaccctctctctactaaaaagagaaaatttagccggggtggtggtgcacgcttgtaatcccagctactcaggcggctgaggcagaagaattgtgcgaacctgggaggtggaagttgcagtgagctgagatggcactactactccagcctgagtgacagagtgagactctgtctcaaaaaaacaaacaaacaaacaaaaaaaatatatatatatatacatacacacacacatacaccttcatatatgcacacattcttatttctgtatctttatatatagttggctctgttttccatagcccacattcaagaaaaaaagtaacaatataacaattttttaaataatacaaataaaaaagtaacctagtataacaactatttacatagtatttacattgtattaaatattataagtaatctagaggtgattttaagtatatagggggattcatataggttatatgcaaatataatgccattttatataagggacttgagcatctgtggattttgatactcatgagagttcctgggaccaatcccccacagatactgagggacaactatatacttaaataggaatacacactaacatatctgactctaagctttaaccacgtggctcattttagacttctctttgcctgtttgtaacttctttctccgacagaaacttggcttatatgtttgtttaaatctactatacatacagaaaacttgtaagaattgataatatgtaccattgtgagaaacaggattaccagttacagtgcagtatttatatacacttctttttgtttttggcctaatagtatttagcaaaagtgctgttttctaaagttacttcactctgctcctttctccacccctttcaatgaggttatatcatatgattgtagtacagttagatttgtcacaatcttcagtctgggattttctgacatccctaagtttttatccttaaatttgcatatacataagttcactctttgtgctgtatagttttatgggttttgatagatgcagtgtcatgtatctgtcaccacaatgccatatggaacaattatactagttaactaacagttatataatactaagtattctcttatatccctttgaagtcagcttcccccacgccctgaaaaccaatgaactgttttctacccttatagttctgcctattccataatctcttataaatggtatcttaaattataatttgtagccttttagatctggttccttcatctagcaaaatgcatttaagatttattgattttgttgcatgaatcagtagttgggacttatcccagataattccattttatagatatactgtgctttgtttattcactttgaatttcatcccagttatttccagttttagagaaataaagttactatcaacacataaaggtttttatatgaactttccattaacatgagtaaatatctaggagtaggctggttgcatgaaatgtaactaactgtatatttaactttttaaataaactgtccaattgttttccaaaatggctgtaccattttatattcccaccaggaatgtatgagagttcagttgctttgtatccttgccaaaacttgacattgtcaggtttattgtttgtcccccagctctagaactggtataatggatatcttatggttttaacttgcacttcactagtgactttttttttttgagacggagtctccctctgtcatgtcacccaggctggagtgcagtggcaccatgtcggctcactgtaacctctgcctcctgggttcaagagattctcgtgcctcagcctccctgagtagtcaggattacaggcacctgccaccacgtctgattttttgtatttttagtagagacagggtttcgccatgttggccaggctggttttgaactcctgacctcagatgatccacccacctcggcctcccaaaatgctgggattacaggtgtgagctactgtgcccagccttcattagtgacttttatgtgatttgctatctatatgttttctttgatgaaatgtctatttagatcttttagtcatttctattgtttgttttcttttgttttcagagaccttttttccaaatcctttgtcagagcaagtattttctttcagtctgcagctttttctttaattttcttaacattatctatcttttgcagagcaaaaggttgccattttgatgaggcccattttatcagttgtgtccttttgtacatcatgcttgtggtatttatgaattttctgcctggataggcccagcccacttacacacgtctaggagcctatggacaggcccattggtgtccacatacatcatctagggtgcctgaggattggttggtcctgcccaccagcacccactgtctggaatcatgaaggccagctcgctctcactatcacattggccacccagaggcctgcagataggcctgcctggcctgctgccaccgtaaaggcctttgtgtccacataccagccaacctgatgtccccatcctcagcaaagctttatcacagcctccactgacaaccgaagcctaagccactgaagaaatcatagatgccatgagagaatcatagataccaccattgatgacagtaaaagaaatcatacagagacaacacatctgaacccacctagaatcaaatccagagcaccctacccagctaacactacagctacatctacagtaaaagtctttctctacaaaagccagtccataaaattggataaagcagcagttgcacagatatcaagataaggacacaagaaacataaaatactgaggaaacacgatacctccaaaggaacacaataattttccactaacagatctcaaagaaccaggtaatcaataaaatgcctgaaaaggaattgaaaataatgatcttaagaaaactcagcaagaaacaacagaacacagatagacaatacaaataaatcaggaaaacaattcatgatctgaatgagaaattaaagaggtaaatagttaaagaaacaaattctggaactgaagaatttaataaataaaaaacagtcgagcagaaagaatttctgaactttaagagagaggtcttttaaaataacccagtcaaacacacactaaaaaggatgaagaaagcctacataggacatcataaagcaaacaaatatttcaattttgggagtgccacaaggagaaaatataggaaaaggcatagaaaacctatttaacaaaataatcactgaagacctcccatgtcttgagagagagatatatatccagatacaggaaggtcatatgtactaaaacagtttatccaaaaaggcctttctaagacacactattttcaaactcaaaagtcaaaaacaaagaaaaaattcttatggaaccaaaaacagcccaaatagccaaagcattcctgaactaaaagaacaacatggaaggcatcacactacctgacttcaaaatatactacaaagctatagtaaccaaaacatagtattgatataaaaacacatagaccagtggaacagaataaagaacacagaataaatctacttatttacagcaaatgtgccaagaacatacattggggaaaggacactctcttcaatcaatggtattgggaaacctggatatctgtgtgcagagaatgaaactagatacctatcaccatacccaaaaatccactccaagtggattaaatacttaaacataagaccccaaactcttagactactagaagaaaacatgggggaaatgcttcctgacattagacttggcaaaaacttcatggctaagactccaaaagcacaagcaacaaaaagaaaaatagttaagtggaaatattaaactaaaaagcttctgaacagcaaaggaaacagagtgaagagacaacctgcagaatgggaggaatatttacaaactgttcatctgacaagggactgataaccaggatatataaggaactcaaccgaacaggaaaacaaacaaaaatcctattaaaaagtggacaaaaggtctgaatagacatttctcaaaagaagacatacaaatggccaagaaatatatttgaaaagctcaacattactaattgtcagattaaaaccacaatgaagtatcattagatagaatggttattatcaaaaagacaagaagtaacaaactgatgaggatgcagagaaaggtgaactcttcctctttgtgttaggaagtatcattagttagaatggctataatcaaaaagacaagaagtaaacactgatgatgcagagaaaggtgaactctttctaactctttgtgttagaattgtctcagtgttgatgagaatgtacattaatgcagccattacggaaaacggtgtggaggtttctcaaaaaaactaaaagggccaggcgtggtggctcacgcctgtaatcccagcactttgggaggccaaggcgggtggatcacaaggtcaggagatcgagaccatcctggctaacacggtgaaactccttctttactaaaaatccaaaaattcagccaggcatggtggcgggtgcctgtagtcccagctactcgggaggctgaggcaggagaatggcgtgaacccgggaggcagagcttgcagtgagccgagatcgcaccaccgcactacagcctgggtgacggaacgagactccatctcaaaaaaaaaaaaaaggaaaaagaaaaaaacacacaaaaaataaaagaaccactatatgatctagcaatcctactactgggtatctattcaaaagaaaggaaaccagtattgcatcacttcacagtagctaagatagggaatcaacctaaatatccatcaacatatgaatggataaagaaaattgcagtatatatacacagtggtatactgtcaagccactaaaaagaatgaaaatacatcatttgtggccatgtggatgaacttgggggacattatgggttatgcaaaataactcaaacatggaaagataaataccacatgttctcactcatgtgggagctaaaaattttttgagcttatggaagtagagagtaaaattgtgggtattagagcctgggaagggaaggtgagatagggagcatggggagaggttggttaatggacacaaacttacatctaggttggtagaatgatttctggtgttctgtagcaccatagggtgaatatggttaaatacaacttgtgtattttcacaaagctagaagtgaggattttgaatgttcacaacccaacaaaatgataagtttgaggtgatggatatgctagttaccataatttgatcattacatactgtatacacatattagaatattactgcatctcataaatgtctacagttattttatgtcaactaaaaataaaaaggaaaaaagaattctttgcctaaatcaatatcacacagacttctttgttttcctctaaaagtgttatgttttatgttagagttttatatttagatctataattccctcctgagtttacttttgtataaggtgtgaggatgtgtcgagatccatttttttatataggaacatccatttgttccagaccatttgttgaaaagactattctttctctattgaattgcccttgctctttttttcaaaaattaattgaccatatttgtgtgagtctgtttcttggatatctttccattgatctttgtgtctgtcctttagccaataccatgttgccttgagttctgtataataagtcttgaatttgataatgtgagtcctccaactttgttcttaaaattgtttggctattctggttcctttgcactttaatgtatattttataatccgcttgttgatgtctacggaaagtgtgctagaattttagttaggattgtgttgtgtctatagatcaaattgtgaagaagtcacatcttagcaatacttagtttttgattccatgaacacaatataatctaatcagcacatagatcctgtacatatcttactggatttatacccaagtatgaactgttttctggtttttttttttgtgtgtgtgtgggggtggggggacatgtgctatttgaaatggtatattcaattgttcattgctggtatatggaaataaaattggcttctgtatatttaccttttatcctatgaccattctaaatttacttattagttctaggagctttgtcgggggggggtgtagattctttgggattctctacacaaattatcatgtcacctacaaatatggacagttttaattatttctaatctgcatgccttttaattttttttccttattgcaatgtctaggacttgtgctatgatgttgaataggagtggtgagagaggacatctttgccctattcttgatcttagggggtgtattagttttctattgctgcatgtcacaaactgccacaaacttactggcttaaacaacacaaatgtattgttttccagttctataagatcagaggccttcattggatctcactgggctaaaatgaaggtgtcagcaggactgcattccttcctggaggttctaggtgaaaatgtgtttctttgccatttctagcttctagaggccacccacattttttgcctcatggccccctttctccatcttcaacatagtgttatctctgttccccttctgcagtcacattttcttctgctttcctgttctacttttaagaatgcttgtggtttaactgggcccactcaggtaacccaagataattttcctattttaaggtcagctaattaacaaccttaattccatctgcaacctaattcccctttgccatataaggtaacatactcacacactgcagagattagtacatggacacctttgggggaccttaagtaatgtaatagctgtagggtctctgtaaaaagctcttcattacatttttttaaaaactctctttgatttttagtttctgagagttttcatcataaattgttgtttaatcttgtcaaatgcttttccagaatctactgaggtgatcgtgttgtttctcttatttggtctgttattagagtgaattacattcatactccaattttgagatatgcatgcattcctgggatgaacccccaattggtcatgaagtatcatttatacattgctggattcaatttgctaatattttgttgaggatttttatgtctacgtttatggctaatatgggattttagtttctttgccgtgagtttgttattagggtaatgctgaccttataaatgaggtggaagtcttcccttcccttctctttttctggaagagattataatatttgtattatttaagccttatatggttggtagaatttgccagtgaacccacataggcctggagttttctattttgagaattttttttttttttttttttaatagatacgggatcattcagactatttcttcttcagtgagttttggaagtttgtgtttttaagacattggtccatttcttcaaagttatcaaattcatgaccatagagttgtttgtagtgttagtttattattcttttactgtatgggatgtcagtagggatgtccccccgcttcattcctaatattgttaatttttgtctttcctctctctctgtattcgccacccctaccccagccaccctcctttttttttaagtctggctaaaggtttatcaattttgttgattgtttttaagcaaccaaaattcttagtttcattagttttctccttagaattgtattgatttgtactctgatctttgttattttctcctgcttgctttggtttttttagttgttctctttctagtttcttttttcattaactgtaaattttttcctattaatatatacctttgtcttatttcagtttctaagaaaacttctgcaggtatctagtttcttaagacaatagttggatcagtttggcaaatcttttgtaaagggccagatagtaaatatttcaggctttgcagaccaaatgatctgtcacaactactcaactctgccgttgtaataccaaagcagcgatggataatactgactgtgttccagtaaaactttatttacaaaaacaagcagggaagcaaagtttggcaacccttgatataaataattgatttaagccctttttttctaacataagtatttaaggctgtaaatttccattttagcattggtttagctgtgtcccacaaattttgggttgtcatttttatttgcattcagtttaaaaatttttttatttcctttgagacttcttttttgacctatagacttagaaatgtttaatattcaatttccaaataatcgaggatcttcccaggtgttttatggcccaagaacatactttgtattatttttattctcttaaattatcaagtatcatatcaatgtcagataggtgtagttgattatgtcattcaggtgtactgtatcatttttaattttctacttattctgtcatctctgagactctacttagtctatcatcactgacaggagagtgtattaaggcattcatccctttgttcatttctcctttcagttctattagcttttgcctcatacaggagaattacatcttccatttagaattatgtcttcttagaggatagacctctttattattatataatgtctttctttatccctgacaatattccttcttcagaagaatgctttgtctgatactaataaaactaccccagttggtttgttttgtttttgtttgttgagacagaatcttgctctgttgcccaggctggagtgcaatggcagtggcacaatcttggctcactgcaacctccacctccctgattcaagtgattctcgtgcctcagcttccaaaatagctaggattacaggtgtgcgccaccacacccagctaatttttgtatttttagtagagacggggtttcgccatgttggccaggctggtctcaaactcctgacctcaagttatccgctcacctcagcctcccaaagtgctgggattacaggcgtgaaccaccattcccagcctccttttgattagtatttgcataatatatatccttctccatcctttttcttctctgtttatatttgaagtgggattcttgtagatggcatatacttaggtcttccttttttactgagctacatgccttttaaatggtttagatcagggattggcaaactatggcacaagtagaaatttttaattttacatttatatatttaattttcaattgtcttcatttccttatataaatccatgttttaatctattatatttctgcctcaaaaactcttttttacatttcttagaaaatagatcttctggcaatgaattccctctagttttgtttgaaaaagtttatttcatcatcatatttgaaagatatttttgctgggtatagaattctgggtttatcatttttttctttgaagtgacagactttaaagatgtcacttaaggctgaggtaggcggatcacaaggtctggagtttgagaccatcctggccaacatggtgaaaccctctctctactaaaaatacaaaaaatgagctgggcgtggtggcacacgcctgtagtcccagctactcgggaggctgaggcaggaaaatcacttaaacccgggaggcggaggttgcagtagcccagatcacgccactgcactccagcctggcaacagagcaagactccatctcaaaaaataaaaaaagatgtcactttttttcttatgatttaaatggtttctgacaagaaatctgtgtgtatataatgctccttttcttcctctgcctctgatttgcagcaattcaaatataatatgcctagggattttccctctcttccctccttcctcccccatccccaccatatttatcttattcttcttgtgtctgtggcttggtgtctgtcattaattttagaaaattctcggccaggtgcagtggctcacgcatgtaatcccagcactttgggagaccaaggcaggcggatcacgaggtcaggagattgagaacatcctggccaacatggtgaaaccccgtctctactaaaatacaaaaaattagctggccatggtggcgcatgcctgtagtcccagctgaggctgaggcaagggaattgcttgaacctgggaggtggaggttgcagtgagtccagattgcaccactgcactccagcctggcgacagagcaagactccatctcaaaaaagaaaaaaaaaaagaaaaaaaagaaaagaaaattctcagatatactttcttcaaatatttttccgtcctgtcctccctcttcttctgagattacagttataaatatgttaggatgttggagacggtcacacagctttttgttgttctgtcttcaagttcactgattgtttcctcagctgtgtcagttttacttaccagaacatcaaacatattctttatctccatttccatttgattccttttcataatttccatgccactgctgaaataacccatctgatcttacatgttatccaccattcctattagagcctttaacatgttagtcatacttaaaatttgtatcaaggctgggtgcggtggctcatgcctgtaatcccagcactttgggaggctgaggcaggaggatagcttgagcccaggaattcaagacctgtttggaaaacataggaagacactgtctctacaaaaaataataaaataaattagctgggcatggtggtgcatgcctatggtcccagctgctggggaggttgaggcaggaagatcacttgagcctgggaggtcaaggctgcagtgagccctcattgtgccactgcactccagcctgggcagcagagcaagaccccatctcaaaaatgaaaaatagaagcaaatgctacttttttctgaattgatagttacatgaggatgaagacatcaatggaattacaatgtactgccatttggagttacctaaaaataataatagctaacacatcttcaacatgctaggcactatattgtgtgctttacatatattaactcatttgatcctcacaaactttttttttttttttttttgagacggaaacacctatcacccaggctggagtgcagtggcgctatcttggctcactgcaatctctgcctcctgggttcaagcgattttcctacctcagcctcccaagtagctgggattacaggcacctgccaccatccccagctaatttttgtatttttagtagagacagagtttcgccatgttggccaggctggtctcaaactcctggcctcaagtgatctgcctgcctcagcctcccaaagcgctgggacctgggattacaggggtgagccaccacaccagccctcacaaaccttttgaggtagaaaatattaccatgtccttttttacagtcaggaaattaaggttaagtaataagattgtggcccttgaccacacagagctaaaaaagaatttactggtttagattgagcagcttgctaaagaataatttttaattatttttaatctgtgttagatttttttaaataatttcatttttaattgtggtaaaaaatataacaaaattgaccatcttaatgagttttaagtattcagttcagtcatgttaagtacattcatattgtggtgcagtagatttccagaacttgttcatcttgcaaaattgaaactctgtacccggtaaacaacaactccccatttcctcgttcccccagcccctggcagccactaatgtaagtcctgtttctatgaatttgattgactttagatgcctcataagagaaattacacaatatttgtctttttgagactagcttgtgtcagcataatgccctcaaggttcatctacgttttggcatgcagagggccttcctaaggctgaataatattaatattacattgtatgtatataccacattttgcttaccactcatctgctgatggacatttgggctgcttccacctcttggctattgtgaataatgctgcaatgaacatgagtgttcagatatctcttcaataccctgatttcagttcttttggatctgtagcaaaaagtgggattgctggatcatatggtaaattttgttcttaattttttgaggaacctccattccattttccatagcagctgcaccattttacattcctaccaacagtacacaagagttccagtttcctcacatcctcatcaacaatgggtattttctgctggtggtggttttttgatagtagccatcctaatggttgtgaggtgatacctagtggttttgatttgcatttccctagtgattagtgatgttgagcatctttttttttttttttttttttctgagatggaggctcgctctgttgcctaggtagagtgccgtggtgcaatctcggcttactgcaacctctgcctcccgggtttaagcgattctcctgcctcagcctcctgagtagctgggactacaggcacccaccaccatacctggctaatttttgtatttttaatagagatggagtttcaccatgttggccaggctggtcttgaactcctgacctcatgatccacccgcctctgcctcccaaagtgctgggattacaggcatgagccaccgcacccagcctatattgagcatctttttataggccatttatatatctctggagaaatctctgttcaagtccctatgcccattttttaaattgggttattttgctgttgagttcaaaagttctttatatattctagattttttttttccctttcttttgagacagcatcttgctgtctcccaagctgtggtatagtggcatgatcatggctcactgcagcctcgacctcccggcctccaacctcagcttcctgagtagctgagactacacgcacacaccacctaactaatttttaattgagacaggttcttggtttgtcacccaggttggaatgcaggtggcaggatcacggctcactgcaacctaagacctcctgggcttaagcagtcctcccacctcagcttcctgagcagctgggactacaggcatgtgccaccacacttggctaaatttttaaaaatttttttttagagacagggtcttaatatattgcccaggctgttcttgaacacatgggttcaagagattctcccacctcagcctcccaaagtgctgggattataggcgtgagccatacaccttgcctattctagatcttaaccccttagcagatatatgatttgcagatatttcttctcattctgtaggttgccttttcactatttattgtctttcgatgtgcagaagttttttagttggatatagtcctatttgtctatttttgcttttgttacctctgcttttggtgttgtatttaagatattactgccaaatccaatgtcagagagtgttttcttctagaagttttatagttttaggtcttacggttaggtctttgatctattttgagttaatatttgtgtacaacataaggtgcggcccaacctcactcttttgcatgtggatatccaggtttcccagcaccatttgttgaagagactgttagatttttttaaatgccctgaaatgattagtttgtaagattttctatttaaaggattgttacacattgaaatttagctttaatgttttcttagttattgatatggatagaatttcaagttttgcaggaattatgcagaatattttaattaatagtaagatgtaatttttaagtggtcatttaggtcttgtttgtttatggagttgtttttttgtttgtttctttgagacggagtctcactcttgtcactcaggctggagtgcagtggcgcaatctcagcttactgcagcctctgcctcccaggttcaagcgatgcccatggctcagccttccaagtagctgggactacaggcatgtgccgccacaccccgctaatttttgtgtttatagtagagaggggtttcatcatgttggccaggctgatcttggactcctgacctcaggtgatctccctgccttggcccccgaaagtgctgggattacaggcgtgagccgccacgcctggccagattaaaattttaatataaggtaatttccaagtaattctgtatatcttttccaatgcttaatatatactaaaatgttggttgctgtgagctatttctttaaaaaagaaaaaaaaaaggtaatccaaaataaatatgtggaaatcatttgcataatttttcccgtcctcttttgcttgtagggaagcagctcgagagtgtcgtagaaagaagaaagaatatgtgaaatgtttagaaaacagagtggcagtgcttgaaaatcaaaacaagacattgattgaggagctaaaagcacttaaggacctttactgccacaaatcagattaatttgggatttaaattttcacctgttaaggtggaaaatggactggcttggccacaacctgaaagacaaaataaacattttattttctaaacatttctttttttctatgcgcaaaactgcctgaaagcaactacagaatttcattcatttgtgcttttgcattaaactgtgaatgttccaacacctgcctccacttctcccctcaagaaattttcaacgccaggaatcatgaagagacttctgcttttcaacccccaccctcctcaagaagtaataatttgtttacttgtaaattgatgggagaaatgaggaaaagaaaatctttttaaaaatgatttcaaggtttgtgctgagctccttgattgccttagggacagaattaccccagcctcttgagctgaagtaatgtgtgggccgcatgcataaagtaagtaaggtgcaatgaagaagtgttgattgccaaattgacatgttgtcacattctcattgtgaattatgtaaagttgttaagagacataccctctaaaaaagaactttagcatggtattgaaggaattagaaatgaatttggagtgctttttatgtatgttgtcttcttcaatactgaaaatttgtccttggttcttaaaagcattctgtactaatacagctcttccatagggcagttgttgcttcttaattcagttctgtatgtgttcaacatttttgaatacattaaaagaagtaaccaactgaacgacaaagcatggtatttgaattttaaattaaagcaaagtaaataaaagtacaaagcatattttagttagtactaaattcttagtaaaatgctgatcagtaaaccaatcccttgagttatataacaagatttttaaataaatgttattgtcctcaccttcaaaaatatttatattgtcactcatttacgtaaaaagatatttctaatttactgttgcccattgcacttacataccaccaccaagaaagccttcaagatgtcaaataaagcaaagtgatatatatttgtttatgaaatgttacatgtagaaaaatactgattttaaatattttccatattaacaatttaacagagaatctctagtgaattttttaaatgaaagaagttgtaaggatataaaaagtacagtgttagatgtgcacaaggaaagttattttcagacatatttgaatgactgctgtactgcaatatttggattgtcattcttacaaaacatttttttgttctcttgtaaaaagagtagttattagttctgctttagctttccaatatgctgtatagcctttgtcattttataattttaattcctgattaaaacagtctgtatttgtgtatatcatacattgttttcaataccacttttaattgttactcattttattcactaagctcgataaatctaacagttactcttaaaaaaaaaaaaaaaagactaaggtggattttaaaaattggaaactgacataatgttaggttataatttctcatttggagccgggcgcagtggctcacgcctgtaatcccagcactttgggaggccaaggtgggtggatcacctgtggtcaagagttcaagaccagcctggccatcatggtgaaaccccatctctactaaaaatacaaaaattagccaggcgtggtggctggcgcctgtaatcccagctactcaggaggttgaggcagcagaattgcttgaacccaggaggcagagggttgcagtgagccgagatagcaccattgcactccagcctgggcgactccatctcaaaaaataaaaataaaaaaaatgtctcatttgggaaggaaattccttttaaaaaagagttgagacacttagaaaactaatgttttatatttagtcaagagttatttaagaaagtcaagcttgtttaacaacaaaatatgaagatttaagtgttaattgctggatccattttaaaataagattttaattaacatttgtaaatggtatattttcgtttgtaacaaaccattgtcttttttcaaggatgaacagagtttatgaaggagcatcattctaagaattaagtgatgtagtctttatgtttggacagttcaccagattctcaagaaggctttcaaacaactataaagtttgatgtttgtcctgctgagctaatggggaaagttatagcataaaaattgtgtaaccgcatagatatgtcatttttaaaaactggtttaacagaaatcaagcaaagtcacaaatatgttcacaagttggaattatttattgagtcaaaatgtcgaatcgaacattttgaatgaagtaagtgttataaatgaaaaattgcctgatgtttagcagtttgtattctctaaagctttttttcaaaagttcaggctttctacttactgggaagttggtggtcctcttagtccctgataaatcaaggcaatcacattcatgtgagctggatgaatttataagttataaagaccttatccttcataccttgaggatgattgcactggttttgaagtcagttgcttaatgatgaggtgagaaatgtatcctgttgctaaatctgtcttagacccttggtgaaacttgaagatttcagtttataaagataaaatcaagcatcttttgtgcagttttctttttttaatgcaagaatggtggggaggtttgtttgtaagcatgaaactttgagaatctttattaagaaaatgacataatttttaaaaaccttgtagccaagaacatatgtggccacattaccagtaataaatgtttttctctttatattggccaaaagggaataaaaatgtcatcataggaatttgtacatatgctactgatttgcctagaaaatagcaagtttgatattgctcactttgcaaatatagggccatgtggcacttttatctataggacagattaataaaaatgaagtggggaggggtttatttttgatatattactcttatgagttttcaagctttgataatgtttaactgaaaagtggcttagaaagggctagatccaatgtgttcattattaaataattgctatcagatacaattttaagttcattctttttcaaactcaagtaccatattggcaaccataatattgtcataggtgctctcttcatttagatattcttggggggggtggcatttgtataatatatgtgtacatatatatatatatatatatatatacatacagtatataatctaaagctctgagagctcttaagtcaggaatgctgagtattatagtatattgaggtcagatgaaattttacatttttgtgtgttctgttgcattccttctggtagtttctatgactgcattactccagcactcatgattgattttatcttctaattttcttccaagtattttattttttattagttttctttggcttgatacttttaaatatgttactagtcacttgaaagcctctcccccaaaagtatttggtttgtatgctttgtctgtggcagctataacagtggtaagaacattttgaagatagctttttaaaggaaccactgattttttcaaaaatcatcctgggggaggaattttggcatttcatttgagcagggattttgtcagaaaatgtgttttgatggtaggtcagcagcagtgctagtctctgaaagcacaataccagtcaggcagcctatcccatcagatgtcatctggctgaagtttatctctgtctctcaggataaatccctgtaggacaaatccctactatcatttctaccttttggggtgacatgtggaatcatacaaaggcttaggaagaaatacgtttgtttaaaccaggatgctttacttacttgaagtgacttcaatctagatttcttttaatatttaacaaatttttaattctatgatcagccacagtcagctattaccataaattggtctctgtttattttgaagatcacggctgcttcattttgcaggattaagtagggctaatgtatcttaaagttaagatcttgaattaaagtgagttttagaaatagtgttacataccttttcagttgttttcaagaggctttatttttgttgcctttgtagccctgaaagctgttggtatattttttccctcatggacccaatagaaaagttgtatatttatttggattatatttacattctgtcctttgtaaatgtttggtgtaacttgcacttttttaaatgacccagtttgggtattagcaacttaagaaattccctcatcaagtaattctcaactttttagtctttctcctctcttcaaatcatgtgactttttaaatggaagtttttcattgattaaaatattttagcacctaaaagctagccttaaaaacagctgtaaaagaaaaacatcaggaaattagatatgactagcccagttaattaaaagacgggctcaaaccttgttttattctttttcatcttggatgaagattgaagggaaaataactcaagtgcataatatttattttcaatttttaatgagactttatcctcatcacaacattaatactgtacatagtatgccaaaatatccattaatttgtctagaatagtacaagactttttaaagcaattgtcctcacagagaccacatgtaatatactgaaatatgttcatttttaatggctttgttaacatcaaagaaatgctgcctaaatttgatttcagatgaggaaggagaaagtaaagtgtgcatagtaaggctgtaggtgaagagttgtgagataaatagttcactcagttgtacaaagcacaactagaactttttgttgggaggcttacatacatcttgaatattcttaatgtaataatgttgactattaagttggctacacagtcactgtatgtactaggaactggtttccttgacattctagaatcaatggctaggagaggcattaatctttgaggggctgaacatatcatgaagctgagtcagtatggaaaattttcaaataaacagggtgctgaagttccatctgtctcatctgcttatgataagttcttattgattagtgaatgtagcttaagcctttgtatgtgtcctcagggggcagaccgactttaagagggaccagataacgtttgaatggagggattatatttcaggtgttttagcttgaaatttattttttaaaaaaagaaaaatttaaaaaatatataaataaaatagaacaaagccggtgatgcaagttgatattataaacaggcagttttagcacagaaagaaaatactgacctgtctgcattctggtacggtgggtgcaggtcccagctgggtatgacatgatacatttttaattattctcaccagcaagtaaaaggaaaatgaacagtcttttggaattgtctttgaaaaggatcaaagagtaggaaattcacatttgacctaacattacttgcctatagaagtatggcatttccaagcttttgtctgaggagcatctcagagaagtgagagtaaatctgagttagcttaaaaattggtagggaggaagaaaatctctgcaaataatgattttatgtttgttggccaagtgaaatgatctatcattgtgtttgggaggttttattttcttatgtttttaaaattggtaaatgctttatagatgtatttttatccaagtgccactccaatttgtgtatgtaataaaattatttatattaaaagtgggaaataattgtcaacattttttttgagtatagatttattaggggtggcaaagaagagtgctagttagcagttttccatgtaaagttgtccttgactgatttgtccacatgtcagttgtaactcccccactccctgcaaaaggaattatttctaacccagatgtatcacttgaaactttttagaagcaaaataatcagggaagttcctagaaaggtgtttggctttttggtttttgagggttggggtaaagaagacttcccccacaactgtcagcacaaaacagggtattgatttttaactctgatgtttctattggagttgaatactaaataaataactataatgagggaaatacatttctaataaaattccctacattctagaaacatccctgttttaatttttttatctaaatctttttgtgctttatgtgtaaagaaaaaaatgtactgagttacaatgcattttattaacactatgtacataatagctgctttgtgttcagaatggtagcagttgctttgtatattaaagtgatccttgtgaatttgtgaaatattgtcataaagtgctttttcttactgtaatctttgtggtatcaactgtcataatgctctttttacacaaacatttatgtgcagtcacataaacatgcttttaaaaactctgtaagtctcttttttggggatgggatctctatattttgttgggttttttttgctagtagtgtgaagccatgttttattggacttaaagttacaatatattacaagcttgtgttggaaggcagcaaaactaattcagacaacaacatgtcttcagttactggatccctaattttcaggacaaaacctgtttttcaataagattgaacagtgcctatttgtggatttggagatgttactgtcaagatgactaatggagacatacgaccagctgtgtctgatgtcataaaacacgtgttcactgaaaggacaataagaatatataccttctcaggtccccttgcaattctaaaactctgtgatcatataaattggaaggaaaggggaggggatatggttaatctttgcttaagctgtaagaataaaaaagttatctcctatactattaacttctgaaataagttctgagacgagacatctgaaaataagcagctgcattatttgtatgtttcttcactgccaagatgtgttcaagcctgctatacctgccattgtattggaaggcttaatgaatttcatttattttctgcaacaacgattacagaatttattgcacaaaatgagacattttgagagtgatattaattacatgagggacaataggcatgaactaggattgttctaagcaaatcggaatcgggtcaccctgccacgttcaggtgcttggaccttcaggaaaagattgcccatcttgtcatttgaccaggcactgaagtgacaagaccatccttgagaagtcacatccaaagataaaattctgatccatttctagttttagtgtttcgccactgaagacttaacatatgtcttttacactcaggttgcaaaacacaggcccaagacaaacttaacttctcccccaaatcttccttccgctggtttttccatctcgtaagtggtgccactatccatctgttaaattgtttaggggaaacctagaaaagcactaccttaatcagtgttatccttcctcttaactgtgcgtcctaatttctccacatcttaagtgcagtgaccaaaccggatgagaattctaacacgggcctgacatcaaatggaaaggaaggataatgtccaggagttggaatgttatccttgtttttaattaagatgcaattcacataaattaactttttaagtgaacaattaagtggtagtacatccacaatggtgtacaaccaccacttctatctagctccaaaacattctcatcactccaaaagtaaagtcccgttactctccattttctcctcccaccgcccttgtccctggcaaccaccaatctgcttcctgtttctttggatttacatccgggtatttcatgtgagactcatacactgtgtattacttctttcgtctagctttaacgtgttgttgaggttgatccattgtaacatgttatcactacttcattcctttttatagctaagtatactttttatagtaagtatgccattgtagatatataccacaagtttatcgattcatccagttgagttgtttctactgtttggctaatgttcatagtgctgttatgaatgttcgtgtacaagtatttgagtccgtgttttcaattatttggggtatatgcctgggagtggagttgctgggtcatgttgaaatcgcacatttaactttttgaggaactgtcaaactttccctcagcagctgtaccgttttaccttccaccattgatgtatgagggttccaatttctccacaccttcaccaacacttattttgccattttaaaaattatagccatcctcatgggtgtggtctctcattgtggttttgatttgcatttccctgattactaatgatgtggagcatcttttgttgtctttggccatctgcgtatcttctttgaagaaatgtctgttgaggtcctttgttcattgaaattttgttgttgggttctgagttccttatatattctgggtactaggcccttataatattttcgcctataagtttttgctttataatgtcctcattgttttcaaacttactttatgtaatatgtacacttctaaaaaaaagaaacatggaaaagggcaaactgtaagaagttttttgtgttatgttttttgtgacagtctgtgcatatatacacaaatataatgtatgttctctcctcctccctctccctttttttacacaaaaggtaggtacaaacagtggtttataaactgctgccattgtacagatacagtttaaccagtcctcttctggggacatttggctgtttgaaattttttactgttacagatatacagaggttggtaactaggtctacacaagttgtatctccaggatactgagaagtaaaagttatttctgaattatggttttcttcatatttggatattgtttcctaatgattattaggtatctgctaagcaatttttattaacttatgttgattactatttttatgtcaaactttacagtctaggcatttttttctggaattaaaattagaagtggcacagactttcataaggctttccttttctcatctctgttaatactgttttctttctaatatcctcagaaataactgttcttagcaaagaaacaagttttcaatatgccatcttttctagtgttactaaatttttaacccctctggttgtagaaggaaaggtgtaacatgattttagagcagaaagctaacaattaaatcttcaagttgggccggggtgcgggtggctcacgcctgtaatcccatcactttgggaggccgaggcagaggagggcagatcacctgaggtcaggagttcgagaccagcctgaccaacatggtgaaacctcatctctactaaaaaatacaaaaattagccaggcatggtggcaggcgcctgtaatcccagctactcgggaggctgaggcaggagaatcacttgaacccaggaggcggaggttgcagtgagccgagattgcgccattgcactccagcctgggcgacagagcaaggctcccgtctcaaaaaaaacttcaagttttaaggtaaaacagagctaaggactgtccggtgtcatgctgtttatgtcagtgctaagatagtacaagtttccagcttcccagaggagggttctctatactcactgtacttaccaattcatgttaaagaccttgagaaagctacttctctctaggtagaggttctggggagcagtgaggttgtgacttcgtctaacactaacacaaattacaagtctgttttaccaactattaagtgaagtcctatatctagggccacttaacagtactggggtacattatatagtgattttttaaagtactttaaaattttatttttgttcatttttaaagaattggcagtaaatgcttcccataaatagcaattaaatggtattattattggaggtgaatcttttgcattatggtaattttgttattcagcatatgccttgatactttaatatccctgagaatttatttctcccataccttcggcaaggagaaataaagcacataaattaggcatatggtaactcatctgtaaaggaatgtgtatttttcatgagtcagtgtgaactccctttttgaacagggtaccatgttaccacttgaaatacagaatataaggtcgggcctggtggctcacacctgtaatccctgcactttgggagggcgaggcaggtcgatcacgaggtcaagagttcaagaccagcctggccaatataattaaaaccccatctctactaaaaatacaaaaaattagctgggcatggtggcagatgcctgtaatcccagctactcaggaggctgagacagaagaatcgcctgaacccaggcagaggctgcagtgtgccaagatcacaccactgcactccactccaccctgggtaacaagcaaaattccatctcaaaaaaaagaaagaaagaaagaaagaaagaaaacgatatatggatatatgctatcatccttgccttctaggagcataaattgtatttgctaagataaaacattccaaataatgttattctgccctgagtttgcaatctagtgttcagttaacagataaaagcattttgatcaactactatttgaagatggtatccaggccatctaccatgaactaaa

SEQ ID NO: 999 - DNA, 3374 bp, Homo sapiens
agtcggcggcggctgctgctgcctgtggcccgggcggctgggagaagcggagtgttggtaactaaatgaccatggaatctggagccgagaaccagcagagtggagatgcagctgtaacagaagctgaaaaccaacaaatgacagttcaagcccagccacagattgccacattagcccaggtatctatgccagcagctcatgcaacatcatctgctcccaccgtaactctagtacagctgcccaatgggcagacagttcaagtccatggagtcattcaggcggcccagccatcagttattcagtctccacaagtccaaacagttcagatttcaactattgcagaaagtgaagattcacaggagtcagtggatagtgtaactgattcccaaaagcgaagggaaattctttcaaggaggccttcctacaggaaaattttgaatgacttatcttctgatgcaccaggagtgccaaggattgaagaagagaagtctgaagaggagacttcagcacctgccatcaccactgtaacggtgccaactccaatttaccaaactagcagtggacagtatattgccattacccagggaggagcaatacagctggctaacaatggtaccgatggggtacagggcctgcaaacattaaccatgaccaatgcagcagccactcagccgggtactaccattctacagtatgcacagaccactgatggacagcagatcttagtgcccagcaaccaagttgttgttcaagctgcctctggagacgtacaaacataccagattcgcacagcacccactagcactattgcccctggagttgttatggcatcctccccagcacttcctacacagcctgctgaagaagcagcacgaaagagagaggtccgtctaatgaagaacagggaagcagctcgagagtgtcgtagaaagaagaaagaatatgtgaaatgtttagaaaacagagtggcagtgcttgaaaatcaaaacaagacattgattgaggagctaaaagcacttaaggacctttactgccacaaatcagattaatttgggatttaaattttcacctgttaaggtggaaaatggactggcttggccacaacctgaaagacaaaataaacattttattttctaaacatttctttttttctatgcgcaaaactgcctgaaagcaactacagaatttcattcatttgtgcttttgcattaaactgtgaatgttccaacacctgcctccacttctcccctcaagaaattttcaacgccaggaatcatgaagagacttctgcttttcaacccccaccctcctcaagaagtaataatttgtttacttgtaaattgatgggagaaatgaggaaaagaaaatctttttaaaaatgatttcaaggtttgtgctgagctccttgattgccttagggacagaattaccccagcctcttgagctgaagtaatgtgtgggccgcatgcataaagtaagtaaggtgcaatgaagaagtgttgattgccaaattgacatgttgtcacattctcattgtgaattatgtaaagttgttaagagacataccctctaaaaaagaactttagcatggtattgaaggaattagaaatgaatttggagtgctttttatgtatgttgtcttcttcaatactgaaaatttgtccttggttcttaaaagcattctgtactaatacagctcttccatagggcagttgttgcttcttaattcagttctgtatgtgttcaacatttttgaatacattaaaagaagtaaccaactgaacgacaaagcatggtatttgaattttaaattaaagcaaagtaaataaaagtacaaagcatattttagttagtactaaattcttagtaaaatgctgatcagtaaaccaatcccttgagttatataacaagatttttaaataaatgttattgtcctcaccttcaaaaatatttatattgtcactcatttacgtaaaaagatatttctaatttactgttgcccattgcacttacataccaccaccaagaaagccttcaagatgtcaaataaagcaaagtgatatatatttgtttatgaaatgttacatgtagaaaaatactgattttaaatattttccatattaacaatttaacagagaatctctagtgaattttttaaatgaaagaagttgtaaggatataaaaagtacagtgttagatgtgcacaaggaaagttattttcagacatatttgaatgactgctgtactgcaatatttggattgtcattcttacaaaacatttttttgttctcttgtaaaaagagtagttattagttctgctttagctttccaatatgctgtatagcctttgtcattttataattttaattcctgattaaaacagtctgtatttgtgtatatcatacattgttttcaataccacttttaattgttactcattttattcactaagctcgataaatctaacagttactcttaaaaaaaaaaaaaaaagactaaggtggattttaaaaattggaaactgacataatgttaggttataatttctcatttggagccgggcgcagtggctcacgcctgtaatcccagcactttgggaggccaaggtgggtggatcacctgtggtcaagagttcaagaccagcctggccatcatggtgaaaccccatctctactaaaaatacaaaaattagccaggcgtggtggctggcgcctgtaatcccagctactcaggaggttgaggcagcagaattgcttgaacccaggaggcagagggttgcagtgagccgagatagcaccattgcactccagcctgggcgactccatctcaaaaaataaaaataaaaaaaatgtctcatttgggaaggaaattccttttaaaaaagagttgagacacttagaaaactaatgttttatatttagtcaagagttatttaagaaagtcaagcttgtttaacaacaaaatatgaagatttaagtgttaattgctggatccattttaaaataagattttaattaacatttgtaaatggtatattttcgtttgtaacaaaccattgtcttttttcaaggatgaacagagtttatgaaggagcatcattctaagaattaagtgatgtagtctttatgtttggacagttcaccagattctcaagaaggctttcaaacaactataaagtttgatgtttgtcctgctgagctaatggggaaagttatagcataaaaattgtgtaaccgcatagatatgtcatttttaaaaactggtttaacagaaatcaagcaaagtcacaaatatgttcacaagttggaattatttattgagtcaaaatgtcgaatcgaacattttgaatgaagtaagtgttataaatgaaaaat

SEQ ID NO: 1000 - protein, 327 aa, Homo sapiens
MTMESGAENQQSGDAAVTEAENQQMTVQAQPQIATLAQVSMPAAHATSSAPTVTLVQLPNGQTVQVHGVIQAAQPSVIQSPQVQTVQISTIAESEDSQESVDSVTDSQKRREILSRRPSYRKILNDLSSDAPGVPRIEEEKSEEETSAPAITTVTVPTPIYQTSSGQYIAITQGGAIQLANNGTDGVQGLQTLTMTNAAATQPGTTILQYAQTTDGQQILVPSNQVVVQAASGDVQTYQIRTAPTSTIAPGVVMASSPALPTQPAEEAARKREVRLMKNREAARECRRKKKEYVKCLENRVAVLENQNKTLIEELKALKDLYCHKSD

SEQ ID NO: 1001 - DNA, 3564 bp, Homo sapiens
ggcgctggctggctccctggctgcggctcctcagtcggcggcggctgctgctgcctgtggcccgggcggctgggagaagcggagtgttggtgagtgacgcggcggaggtgtagtttgacgcggtgtgttacgtgggggagagaataaaactccagcgagatccgggccgtgaacgaaagcagtgacggaggagcttgtaccaccggtaactaaatgaccatggaatctggagccgagaaccagcagagtggagatgcagctgtaacagaagctgaaaaccaacaaatgacagttcaagcccagccacagattgccacattagcccaggtatctatgccagcagctcatgcaacatcatctgctcccaccgtaactctagtacagctgcccaatgggcagacagttcaagtccatggagtcattcaggcggcccagccatcagttattcagtctccacaagtccaaacagttcagtcttcctgtaaggacttaaaaagacttttctccggaacacagatttcaactattgcagaaagtgaagattcacaggagtcagtggatagtgtaactgattcccaaaagcgaagggaaattctttcaaggaggccttcctacaggaaaattttgaatgacttatcttctgatgcaccaggagtgccaaggattgaagaagagaagtctgaagaggagacttcagcacctgccatcaccactgtaacggtgccaactccaatttaccaaactagcagtggacagtatattgccattacccagggaggagcaatacagctggctaacaatggtaccgatggggtacagggcctgcaaacattaaccatgaccaatgcagcagccactcagccgggtactaccattctacagtatgcacagaccactgatggacagcagatcttagtgcccagcaaccaagttgttgttcaagctgcctctggagacgtacaaacataccagattcgcacagcacccactagcactattgcccctggagttgttatggcatcctccccagcacttcctacacagcctgctgaagaagcagcacgaaagagagaggtccgtctaatgaagaacagggaagcagctcgagagtgtcgtagaaagaagaaagaatatgtgaaatgtttagaaaacagagtggcagtgcttgaaaatcaaaacaagacattgattgaggagctaaaagcacttaaggacctttactgccacaaatcagattaatttgggatttaaattttcacctgttaaggtggaaaatggactggcttggccacaacctgaaagacaaaataaacattttattttctaaacatttctttttttctatgcgcaaaactgcctgaaagcaactacagaatttcattcatttgtgcttttgcattaaactgtgaatgttccaacacctgcctccacttctcccctcaagaaattttcaacgccaggaatcatgaagagacttctgcttttcaacccccaccctcctcaagaagtaataatttgtttacttgtaaattgatgggagaaatgaggaaaagaaaatctttttaaaaatgatttcaaggtttgtgctgagctccttgattgccttagggacagaattaccccagcctcttgagctgaagtaatgtgtgggccgcatgcataaagtaagtaaggtgcaatgaagaagtgttgattgccaaattgacatgttgtcacattctcattgtgaattatgtaaagttgttaagagacataccctctaaaaaagaactttagcatggtattgaaggaattagaaatgaatttggagtgctttttatgtatgttgtcttcttcaatactgaaaatttgtccttggttcttaaaagcattctgtactaatacagctcttccatagggcagttgttgcttcttaattcagttctgtatgtgttcaacatttttgaatacattaaaagaagtaaccaactgaacgacaaagcatggtatttgaattttaaattaaagcaaagtaaataaaagtacaaagcatattttagttagtactaaattcttagtaaaatgctgatcagtaaaccaatcccttgagttatataacaagatttttaaataaatgttattgtcctcaccttcaaaaatatttatattgtcactcatttacgtaaaaagatatttctaatttactgttgcccattgcacttacataccaccaccaagaaagccttcaagatgtcaaataaagcaaagtgatatatatttgtttatgaaatgttacatgtagaaaaatactgattttaaatattttccatattaacaatttaacagagaatctctagtgaattttttaaatgaaagaagttgtaaggatataaaaagtacagtgttagatgtgcacaaggaaagttattttcagacatatttgaatgactgctgtactgcaatatttggattgtcattcttacaaaacatttttttgttctcttgtaaaaagagtagttattagttctgctttagctttccaatatgctgtatagcctttgtcattttataattttaattcctgattaaaacagtctgtatttgtgtatatcatacattgttttcaataccacttttaattgttactcattttattcactaagctcgataaatctaacagttactcttaaaaaaaaaaaaaaaagactaaggtggattttaaaaattggaaactgacataatgttaggttataatttctcatttggagccgggcgcagtggctcacgcctgtaatcccagcactttgggaggccaaggtgggtggatcacctgtggtcaagagttcaagaccagcctggccatcatggtgaaaccccatctctactaaaaatacaaaaattagccaggcgtggtggctggcgcctgtaatcccagctactcaggaggttgaggcagcagaattgcttgaacccaggaggcagagggttgcagtgagccgagatagcaccattgcactccagcctgggcgactccatctcaaaaaataaaaataaaaaaaatgtctcatttgggaaggaaattccttttaaaaaagagttgagacacttagaaaactaatgttttatatttagtcaagagttatttaagaaagtcaagcttgtttaacaacaaaatatgaagatttaagtgttaattgctggatccattttaaaataagattttaattaacatttgtaaatggtatattttcgtttgtaacaaaccattgtcttttttcaaggatgaacagagtttatgaaggagcatcattctaagaattaagtgatgtagtctttatgtttggacagttcaccagattctcaagaaggctttcaaacaactataaagtttgatgtttgtcctgctgagctaatggggaaagttatagcataaaaattgtgtaaccgcatagatatgtcatttttaaaaactggtttaacagaaatcaagcaaagtcacaaatatgttcacaagttggaattatttattgagtcaaaatgtcgaatcgaacattttgaatgaagtaagtgttataaatgaaaaat

SEQ ID NO: 1002 - protein, 341 aa, Homo sapiens
MTMESGAENQQSGDAAVTEAENQQMTVQAQPQIATLAQVSMPAAHATSSAPTVTLVQLPNGQTVQVHGVIQAAQPSVIQSPQVQTVQSSCKDLKRLFSGTQISTIAESEDSQESVDSVTDSQKRREILSRRPSYRKILNDLSSDAPGVPRIEEEKSEEETSAPAITTVTVPTPIYQTSSGQYIAITQGGAIQLANNGTDGVQGLQTLTMTNAAATQPGTTILQYAQTTDGQQILVPSNQVVVQAASGDVQTYQIRTAPTSTIAPGVVMASSPALPTQPAEEAARKREVRLMKNREAARECRRKKKEYVKCLENRVAVLENQNKTLIEELKALKDLYCHKSD

SEQ ID NO: 1003 - DNA, 3455 bp, Homo sapiens
tgtagtttgacgcggtgtgttacgtgggggagagaataaaactccagcgagatccgggccgtgaacgaaagcagtgacggaggagctttattataggtaactaaatgaccatggaatctggagccgagaaccagcagagtggagatgcagctgtaacagaagctgaaaaccaacaaatgacagttcaagcccagccacagattgccacattagcccaggtatctatgccagcagctcatgcaacatcatctgctcccaccgtaactctagtacagctgcccaatgggcagacagttcaagtccatggagtcattcaggcggcccagccatcagttattcagtctccacaagtccaaacagttcagtcttcctgtaaggacttaaaaagacttttctccggaacacagatttcaactattgcagaaagtgaagattcacaggagtcagtggatagtgtaactgattcccaaaagcgaagggaaattctttcaaggaggccttcctacaggaaaattttgaatgacttatcttctgatgcaccaggagtgccaaggattgaagaagagaagtctgaagaggagacttcagcacctgccatcaccactgtaacggtgccaactccaatttaccaaactagcagtggacagtatattgccattacccagggaggagcaatacagctggctaacaatggtaccgatggggtacagggcctgcaaacattaaccatgaccaatgcagcagccactcagccgggtactaccattctacagtatgcacagaccactgatggacagcagatcttagtgcccagcaaccaagttgttgttcaagctgcctctggagacgtacaaacataccagattcgcacagcacccactagcactattgcccctggagttgttatggcatcctccccagcacttcctacacagcctgctgaagaagcagcacgaaagagagaggtccgtctaatgaagaacagggaagcagctcgagagtgtcgtagaaagaagaaagaatatgtgaaatgtttagaaaacagagtggcagtgcttgaaaatcaaaacaagacattgattgaggagctaaaagcacttaaggacctttactgccacaaatcagattaatttgggatttaaattttcacctgttaaggtggaaaatggactggcttggccacaacctgaaagacaaaataaacattttattttctaaacatttctttttttctatgcgcaaaactgcctgaaagcaactacagaatttcattcatttgtgcttttgcattaaactgtgaatgttccaacacctgcctccacttctcccctcaagaaattttcaacgccaggaatcatgaagagacttctgcttttcaacccccaccctcctcaagaagtaataatttgtttacttgtaaattgatgggagaaatgaggaaaagaaaatctttttaaaaatgatttcaaggtttgtgctgagctccttgattgccttagggacagaattaccccagcctcttgagctgaagtaatgtgtgggccgcatgcataaagtaagtaaggtgcaatgaagaagtgttgattgccaaattgacatgttgtcacattctcattgtgaattatgtaaagttgttaagagacataccctctaaaaaagaactttagcatggtattgaaggaattagaaatgaatttggagtgctttttatgtatgttgtcttcttcaatactgaaaatttgtccttggttcttaaaagcattctgtactaatacagctcttccatagggcagttgttgcttcttaattcagttctgtatgtgttcaacatttttgaatacattaaaagaagtaaccaactgaacgacaaagcatggtatttgaattttaaattaaagcaaagtaaataaaagtacaaagcatattttagttagtactaaattcttagtaaaatgctgatcagtaaaccaatcccttgagttatataacaagatttttaaataaatgttattgtcctcaccttcaaaaatatttatattgtcactcatttacgtaaaaagatatttctaatttactgttgcccattgcacttacataccaccaccaagaaagccttcaagatgtcaaataaagcaaagtgatatatatttgtttatgaaatgttacatgtagaaaaatactgattttaaatattttccatattaacaatttaacagagaatctctagtgaattttttaaatgaaagaagttgtaaggatataaaaagtacagtgttagatgtgcacaaggaaagttattttcagacatatttgaatgactgctgtactgcaatatttggattgtcattcttacaaaacatttttttgttctcttgtaaaaagagtagttattagttctgctttagctttccaatatgctgtatagcctttgtcattttataattttaattcctgattaaaacagtctgtatttgtgtatatcatacattgttttcaataccacttttaattgttactcattttattcactaagctcgataaatctaacagttactcttaaaaaaaaaaaaaaaagactaaggtggattttaaaaattggaaactgacataatgttaggttataatttctcatttggagccgggcgcagtggctcacgcctgtaatcccagcactttgggaggccaaggtgggtggatcacctgtggtcaagagttcaagaccagcctggccatcatggtgaaaccccatctctactaaaaatacaaaaattagccaggcgtggtggctggcgcctgtaatcccagctactcaggaggttgaggcagcagaattgcttgaacccaggaggcagagggttgcagtgagccgagatagcaccattgcactccagcctgggcgactccatctcaaaaaataaaaataaaaaaaatgtctcatttgggaaggaaattccttttaaaaaagagttgagacacttagaaaactaatgttttatatttagtcaagagttatttaagaaagtcaagcttgtttaacaacaaaatatgaagatttaagtgttaattgctggatccattttaaaataagattttaattaacatttgtaaatggtatattttcgtttgtaacaaaccattgtcttttttcaaggatgaacagagtttatgaaggagcatcattctaagaattaagtgatgtagtctttatgtttggacagttcaccagattctcaagaaggctttcaaacaactataaagtttgatgtttgtcctgctgagctaatggggaaagttatagcataaaaattgtgtaaccgcatagatatgtcatttttaaaaactggtttaacagaaatcaagcaaagtcacaaatatgttcacaagttggaattatttattgagtcaaaatgtcgaatcgaacattttgaatgaagtaagtgttataaatgaaaaat

SEQ ID NO: 1004 - protein, 341 aa, Homo sapiens; identical to SEQ ID NO: 1002

SEQ ID NO: 1005 - DNA, 3413 bp, Homo sapiens
tgtagtttgacgcggtgtgttacgtgggggagagaataaaactccagcgagatccgggccgtgaacgaaagcagtgacggaggagctttattataggtaactaaatgaccatggaatctggagccgagaaccagcagagtggagatgcagctgtaacagaagctgaaaaccaacaaatgacagttcaagcccagccacagattgccacattagcccaggtatctatgccagcagctcatgcaacatcatctgctcccaccgtaactctagtacagctgcccaatgggcagacagttcaagtccatggagtcattcaggcggcccagccatcagttattcagtctccacaagtccaaacagttcagatttcaactattgcagaaagtgaagattcacaggagtcagtggatagtgtaactgattcccaaaagcgaagggaaattctttcaaggaggccttcctacaggaaaattttgaatgacttatcttctgatgcaccaggagtgccaaggattgaagaagagaagtctgaagaggagacttcagcacctgccatcaccactgtaacggtgccaactccaatttaccaaactagcagtggacagtatattgccattacccagggaggagcaatacagctggctaacaatggtaccgatggggtacagggcctgcaaacattaaccatgaccaatgcagcagccactcagccgggtactaccattctacagtatgcacagaccactgatggacagcagatcttagtgcccagcaaccaagttgttgttcaagctgcctctggagacgtacaaacataccagattcgcacagcacccactagcactattgcccctggagttgttatggcatcctccccagcacttcctacacagcctgctgaagaagcagcacgaaagagagaggtccgtctaatgaagaacagggaagcagctcgagagtgtcgtagaaagaagaaagaatatgtgaaatgtttagaaaacagagtggcagtgcttgaaaatcaaaacaagacattgattgaggagctaaaagcacttaaggacctttactgccacaaatcagattaatttgggatttaaattttcacctgttaaggtggaaaatggactggcttggccacaacctgaaagacaaaataaacattttattttctaaacatttctttttttctatgcgcaaaactgcctgaaagcaactacagaatttcattcatttgtgcttttgcattaaactgtgaatgttccaacacctgcctccacttctcccctcaagaaattttcaacgccaggaatcatgaagagacttctgcttttcaacccccaccctcctcaagaagtaataatttgtttacttgtaaattgatgggagaaatgaggaaaagaaaatctttttaaaaatgatttcaaggtttgtgctgagctccttgattgccttagggacagaattaccccagcctcttgagctgaagtaatgtgtgggccgcatgcataaagtaagtaaggtgcaatgaagaagtgttgattgccaaattgacatgttgtcacattctcattgtgaattatgtaaagttgttaagagacataccctctaaaaaagaactttagcatggtattgaaggaattagaaatgaatttggagtgctttttatgtatgttgtcttcttcaatactgaaaatttgtccttggttcttaaaagcattctgtactaatacagctcttccatagggcagttgttgcttcttaattcagttctgtatgtgttcaacatttttgaatacattaaaagaagtaaccaactgaacgacaaagcatggtatttgaattttaaattaaagcaaagtaaataaaagtacaaagcatattttagttagtactaaattcttagtaaaatgctgatcagtaaaccaatcccttgagttatataacaagatttttaaataaatgttattgtcctcaccttcaaaaatatttatattgtcactcatttacgtaaaaagatatttctaatttactgttgcccattgcacttacataccaccaccaagaaagccttcaagatgtcaaataaagcaaagtgatatatatttgtttatgaaatgttacatgtagaaaaatactgattttaaatattttccatattaacaatttaacagagaatctctagtgaattttttaaatgaaagaagttgtaaggatataaaaagtacagtgttagatgtgcacaaggaaagttattttcagacatatttgaatgactgctgtactgcaatatttggattgtcattcttacaaaacatttttttgttctcttgtaaaaagagtagttattagttctgctttagctttccaatatgctgtatagcctttgtcattttataattttaattcctgattaaaacagtctgtatttgtgtatatcatacattgttttcaataccacttttaattgttactcattttattcactaagctcgataaatctaacagttactcttaaaaaaaaaaaaaaaagactaaggtggattttaaaaattggaaactgacataatgttaggttataatttctcatttggagccgggcgcagtggctcacgcctgtaatcccagcactttgggaggccaaggtgggtggatcacctgtggtcaagagttcaagaccagcctggccatcatggtgaaaccccatctctactaaaaatacaaaaattagccaggcgtggtggctggcgcctgtaatcccagctactcaggaggttgaggcagcagaattgcttgaacccaggaggcagagggttgcagtgagccgagatagcaccattgcactccagcctgggcgactccatctcaaaaaataaaaataaaaaaaatgtctcatttgggaaggaaattccttttaaaaaagagttgagacacttagaaaactaatgttttatatttagtcaagagttatttaagaaagtcaagcttgtttaacaacaaaatatgaagatttaagtgttaattgctggatccattttaaaataagattttaattaacatttgtaaatggtatattttcgtttgtaacaaaccattgtcttttttcaaggatgaacagagtttatgaaggagcatcattctaagaattaagtgatgtagtctttatgtttggacagttcaccagattctcaagaaggctttcaaacaactataaagtttgatgtttgtcctgctgagctaatggggaaagttatagcataaaaattgtgtaaccgcatagatatgtcatttttaaaaactggtttaacagaaatcaagcaaagtcacaaatatgttcacaagttggaattatttattgagtcaaaatgtcgaatcgaacattttgaatgaagtaagtgttataaatgaaaaat

SEQ ID NO: 1006 - protein, 327 aa, Homo sapiens; identical to SEQ ID NO: 1000

SEQ ID NO: 1007 - DNA, 3522 bp, Homo sapiens
ggcgctggctggctccctggctgcggctcctcagtcggcggcggctgctgctgcctgtggcccgggcggctgggagaagcggagtgttggtgagtgacgcggcggaggtgtagtttgacgcggtgtgttacgtgggggagagaataaaactccagcgagatccgggccgtgaacgaaagcagtgacggaggagcttgtaccaccggtaactaaatgaccatggaatctggagccgagaaccagcagagtggagatgcagctgtaacagaagctgaaaaccaacaaatgacagttcaagcccagccacagattgccacattagcccaggtatctatgccagcagctcatgcaacatcatctgctcccaccgtaactctagtacagctgcccaatgggcagacagttcaagtccatggagtcattcaggcggcccagccatcagttattcagtctccacaagtccaaacagttcagatttcaactattgcagaaagtgaagattcacaggagtcagtggatagtgtaactgattcccaaaagcgaagggaaattctttcaaggaggccttcctacaggaaaattttgaatgacttatcttctgatgcaccaggagtgccaaggattgaagaagagaagtctgaagaggagacttcagcacctgccatcaccactgtaacggtgccaactccaatttaccaaactagcagtggacagtatattgccattacccagggaggagcaatacagctggctaacaatggtaccgatggggtacagggcctgcaaacattaaccatgaccaatgcagcagccactcagccgggtactaccattctacagtatgcacagaccactgatggacagcagatcttagtgcccagcaaccaagttgttgttcaagctgcctctggagacgtacaaacataccagattcgcacagcacccactagcactattgcccctggagttgttatggcatcctccccagcacttcctacacagcctgctgaagaagcagcacgaaagagagaggtccgtctaatgaagaacagggaagcagctcgagagtgtcgtagaaagaagaaagaatatgtgaaatgtttagaaaacagagtggcagtgcttgaaaatcaaaacaagacattgattgaggagctaaaagcacttaaggacctttactgccacaaatcagattaatttgggatttaaattttcacctgttaaggtggaaaatggactggcttggccacaacctgaaagacaaaataaacattttattttctaaacatttctttttttctatgcgcaaaactgcctgaaagcaactacagaatttcattcatttgtgcttttgcattaaactgtgaatgttccaacacctgcctccacttctcccctcaagaaattttcaacgccaggaatcatgaagagacttctgcttttcaacccccaccctcctcaagaagtaataatttgtttacttgtaaattgatgggagaaatgaggaaaagaaaatctttttaaaaatgatttcaaggtttgtgctgagctccttgattgccttagggacagaattaccccagcctcttgagctgaagtaatgtgtgggccgcatgcataaagtaagtaaggtgcaatgaagaagtgttgattgccaaattgacatgttgtcacattctcattgtgaattatgtaaagttgttaagagacataccctctaaaaaagaactttagcatggtattgaaggaattagaaatgaatttggagtgctttttatgtatgttgtcttcttcaatactgaaaatttgtccttggttcttaaaagcattctgtactaatacagctcttccatagggcagttgttgcttcttaattcagttctgtatgtgttcaacatttttgaatacattaaaagaagtaaccaactgaacgacaaagcatggtatttgaattttaaattaaagcaaagtaaataaaagtacaaagcatattttagttagtactaaattcttagtaaaatgctgatcagtaaaccaatcccttgagttatataacaagatttttaaataaatgttattgtcctcaccttcaaaaatatttatattgtcactcatttacgtaaaaagatatttctaatttactgttgcccattgcacttacataccaccaccaagaaagccttcaagatgtcaaataaagcaaagtgatatatatttgtttatgaaatgttacatgtagaaaaatactgattttaaatattttccatattaacaatttaacagagaatctctagtgaattttttaaatgaaagaagttgtaaggatataaaaagtacagtgttagatgtgcacaaggaaagttattttcagacatatttgaatgactgctgtactgcaatatttggattgtcattcttacaaaacatttttttgttctcttgtaaaaagagtagttattagttctgctttagctttccaatatgctgtatagcctttgtcattttataattttaattcctgattaaaacagtctgtatttgtgtatatcatacattgttttcaataccacttttaattgttactcattttattcactaagctcgataaatctaacagttactcttaaaaaaaaaaaaaaaagactaaggtggattttaaaaattggaaactgacataatgttaggttataatttctcatttggagccgggcgcagtggctcacgcctgtaatcccagcactttgggaggccaaggtgggtggatcacctgtggtcaagagttcaagaccagcctggccatcatggtgaaaccccatctctactaaaaatacaaaaattagccaggcgtggtggctggcgcctgtaatcccagctactcaggaggttgaggcagcagaattgcttgaacccaggaggcagagggttgcagtgagccgagatagcaccattgcactccagcctgggcgactccatctcaaaaaataaaaataaaaaaaatgtctcatttgggaaggaaattccttttaaaaaagagttgagacacttagaaaactaatgttttatatttagtcaagagttatttaagaaagtcaagcttgtttaacaacaaaatatgaagatttaagtgttaattgctggatccattttaaaataagattttaattaacatttgtaaatggtatattttcgtttgtaacaaaccattgtcttttttcaaggatgaacagagtttatgaaggagcatcattctaagaattaagtgatgtagtctttatgtttggacagttcaccagattctcaagaaggctttcaaacaactataaagtttgatgtttgtcctgctgagctaatggggaaagttatagcataaaaattgtgtaaccgcatagatatgtcatttttaaaaactggtttaacagaaatcaagcaaagtcacaaatatgttcacaagttggaattatttattgagtcaaaatgtcgaatcgaacattttgaatgaagtaagtgttataaatgaaaaat

SEQ ID NO: 1008 - protein, 327 aa, Homo sapiens; identical to SEQ ID NO: 1000

SEQ ID NO: 1009 - DNA, 95119 bp, Mus musculus
  misc_feature (1)...(95119): n = A, C, G or T/U
ctctatgaggaagtttgagggcaccccggagtctctgttagggtgctggactgaatgctcagccgctgttctccagtcaggccttgcctgaggtgccaggaagctaagccaaaatgtccgactcctcactccaatcctctatcagcctgctccgtgaaatcacatccttaacttccacggccttgcggaaggcttgggaaatctcagttctcagctctctaccctaagccaccccttgctgggttctcagcgagttgctggctttctgtctcttcctgacaacagctttgctttggagttcatactccacgtagggtagaacagcagatgtaaatgaggtcttttgcctctccaccctctccaatatagttatgtctagccatggctgtgcaggaccctggcacctctgtagagactagggagtcaatgtcctcccacactgtgggtatttggaagtaaatgtggctctcctctatatcaggggttctcaactgaagccatatctagagacagtctgggttgctgtactgagatggatggagctgctaacaacaacaacaagtcttttgaccatcaaatgtcagtaaggttgaccttgggaaagccaggtctccccttatgctgacctccccagagttcaacacccatacaacatggctgtgctcctggagcaggacgcctgggaggggtgcctcagactctaaatagctgcagttagacaagatggtcagaggagatcctccatttggaaaccctcctgtgggctcggggccacgcccttccattatgcaaaggcagctgccccagtgagccgggcaggcataaaggtgacgtggtcaggagtagctatttgatctccagtttttccagaatttccactcccgtgccaagcatgcctctccagatgcggttccctgtccaagagctcaggaggctcacctagagccgtcatcttccaatggtgaagtgattcccctctgcgccaagtctcctccacagacatccagttcacaggagccggaaaggtacaagttaatgagttttctgtagtctggtggttttgactcgcctgaactataatttcagggccagagtgcaagaggaatccttatggagttgactgtgggcctgcgctcataggaatctgctgaagtgggctcagtctgttttcctttgggggtagattttagggatgctattttaggtgtgagaaccttcagctgaaggctacacacatatcttacttttctgtaaacccttgactccatcttcaggacccttgaagctccttggttgctatggataccctgtaaagtcagattataaatgagctcctccatctcccgtgcttcctctctgagaagggcacttaccaatctcatgtgtagcctggttgacttctacatagctcgggtaggaaagatttcctctgtgacctggatttttaaggagagtctacatattttctagattgttaagctcctaggcaggcaaactaaataggacttggacaaacacgtattacttcttctttttttttttcctttctgttttgagatagttgttttttattccagctacaagtttttaatttacttcttgtccttgggtagtctattatctgatgaacacaaccctgggcagaaaagcttgtcttcccatgccaccgttcgctggggctgaaataccttgagtggactattctttgagcagagatagctgctttttcctctgccatcaagttgacctaatgggctttattttagagcccgtgtctatatggcagaggaatacataggagagtttagtaaggctttttttcaatactttgagaaaagcattggttggtatttgcagtacattgtgtccatgaaaagcagaactggctttccctggaggtgtttattagatgtttgggtcttacagtgaaagggacgtatttctgtgatagcgctggcctggcttcaggggccaccagtcctgaaggatggcttggaagagcacacttcgcttcccacacactttggggggtggtgaacttggagtgaaatggtttagaaattatatccagtggctcctccgtcatcccatgcaacttgatggacttgatagtgctccccagaaaggattctccttcccagtactggcaatgcagtgacccgctggccagttcagatccctgacaactcttccatttctgaccttctgcccctctccctgccccaaccccattcaagtagagcctttctcagacctggtagctcctgtgtctgtggctttcctctgtgggctcgcgctctctgtcaatcttccctacaatcccagctctgtcttttcttactctcagctttcaaacagactcaagtctctttcatccttaagaaactacggaaccggggactggggaaacggctccgcagttaagagcactggctgctcttgcagaagacatgggtttgatccccagcacctatatggtggctcacagccatccataattccagtgtcaggatatatgacaccctcttctggcttctgcaagcgacagggacacatgtagtccatagccatccacatagccaatatacctacataaaatacattttagaaaaccctccctctagccctgcctctctcccaggcttcagtcctaggctctaacagcagaccgtggtaatcattgtttttctatttgcagattaaaggctttctcaactttgttctctctgcttccaggagacacctctgttttcggtttaactaccccttctctgccttggcttgttccttagccattaaatgtgggagttccaaattactcgttctcatttcatcactggccagtcactgtcgtcacctttgactggctggtgctttgtgctaacgtataaaagtttctgttccctcttcctgagagagagagagagagagagagagagagagaacaacagaacaaaatatttaaagatcaaggaactggatggacatggtgactcacatctgtaatcccagctctgcggtgcctaaggcagaatgatttccacaagttcaaagccagcataagccaggtagttgcaggccagtcccctaggctacagagtgataccatgtctgaagaaaaagggaaaaaagaacctaagagttcacaataacctatgaaaaacctcccttttattaggaaaacatccatttgtccatctgtccttctgtccacctacatatcaactatgaagtgacttgatgttctgtagggtctcaaactcaggtttctgcatcagatgcatgaaagaagggatgaaagggaggaggccgtgactactcccaaggtccagggaagatttatgttatagatacaagggagagcatggccagaggcagagacacctgggagagtccggagtgagcaggaccctgaggctgaccatgtgagagagaggggagaagggaagggagaagctggagcctgggaaggtaaacagcagacaaaaagggctaggtaaccaacatggctggatcatctagcaaagggcagctctaggagggcagcccagtccctgggctggggaagtttagagtaaggggcagggtatgccagctacaccctgtaacacatagggactgagggatgctgggagatcctggcagcctggtccactttgatatgtgaaataggcatcttagccatttatcctaggtttgagacctaacatgttccaaacaatgaaaagatgaagccgttaaccgaggaacccacggcagcctggttgggggaggggctaaattaacactgaggcacagggcagcctgagcttgcatgaagcccagcccaggagctggttggcacgctagcagccagcttgctgtggttctctagctcttcagttctagaatcatctgtccactggagatgccaggagcatgggtcgtaggctaagtgtactttagtctgtggggtgctggcttggggtactactcatttcagacagcacgtggaaggagcccattctcccattcaatggtactactagcaatgtccctagtattcatgggagatttagcttccactcttaccatagtatgttcactgccatgccaacagctttagatgggtagtgggttatgttggggaccctatgtctggtggggtgacaatctgtaagaggtgaagaatgaaactcagcccagtaccatctttgcaggtgctgggtgatacatagccttccagacactgaaggtttacatttcttatacatttaaggacttgtgacctgtgacctttatgataagaatgaattcttttggctgatagacagaactcaagcctggagcctagaggacggatctgtgacaagcttagggatagatttattggcgaaggatgcaaagtatatggggtgtctttcatagggatggattcctattgactgtaggatccggtcctagtgatgctcaggaagttggggggattcaggcagaggctgagagtcaccaagttgatggaccactttcccaggtgactaggcgtcattcatttccttccgatgaagaatataggcccgcgtgattgacagtcctgggttctccagtgccttttctaagctgtgctttctacaggtttactggttcaagttaagttcagggagatagtcaagggctcactgagtctgatgaatgactgctcccaagtgaggtcctttgggtgtctggcatgagttacctctgtgttgggggcacctctgtgccatacagcatgttgggcttgtgccatgataagatattcaggacttacagcaggatctggatttgaaacctggctccccatgtctgtggaccagtcaaaccccttgtatataatagtaacttttattcttctgtatttattgtcatctccaaggcttactgcctcattctggtaacctaggcctagtcctggaagcttctagtctccgtataatctaatctaggcctagaatgttttctacctctgggattttactgctgaataaactcactctttcttgttgtttctgaacttggactagctggcttaactcagctgttctggctcaaacccgtctccaaactgactgactcaatctggcttctcttttagctctgcttgcctcagactaactctagcaatctgttttaatcttctggctccctctcatcctctggctcgttctatcttcacctgtgtctagcttgttctctctgcaccctgtctctgtaaaactctcccagtaaaactgcctccttccctctctctgcactggagttgggcatgtcctattgttctctgatttgtcactctgtcacacaatttagatatcactttcaaacatggtgcttacctctccaaaccaactttaccttcattgttaaaggtgaatgctaaggacatgtctgtattctagccagagggattaaaggtgtgtgctaaaggctgagccacaccataactagaaacaggtattttcagtaagtaaaacagtcttggggttcccggtgtgattagatatcctgcagcacttcagtaaacctcagtgttttgcgaacggaaggcgtcacaccaagcctgggtgatggcctaaaccccagttatcatagtatatagtcccagctatggcttctagggaattgtctaaggatccaaacaaagcaagaacatatatgtagacccattgtgtgtgcaagccattggaggtgtttgttctattgcccattgtcgatggggctggtgattcatgtctgtgaaaaagaaacaccagggttgtgatggtgagaaattattttaagttggttacctgattaatgggagcggagagccaccgtgccttgcctttgcctctttctgtggtcaccctgcagcccaaaccacagaggaagacaaagctagggagcctagcaacagatgccagggagacagagtaaacggggcttgggtggagccccagtctggctcactctgtggctgagctgtgatacttatggccctccaacaatgcaggctattgtttttaccgtttgttctgttctcagagttctttattaggttcctgagcatgatcttgtgcacctgagaactcatgttgagactccagacatttgtttttctctgagatcacagaggacacacccacaccatacacacagacacataccaatccccccacatacattacacacacataccaaacacatacaccacacgcagatacaacatacacacccacacaatacactcagatgtacatcatttcatacatacatgccatgtacacatataccacacacacacataccacacacacatacattacacacaccagtcacacatgcatacaccatacacatatatacatacctcatacacacaacacacacacaaatacaacatgtacatatacaacacacatataacacacacatatacacatacccacacatacaccataagcatggtagggacatatctttcctaaaacctactgtgtgctcacagaaagagatacagggcctaatcccagcactccagaggcagaggcaggcagatttctgagttcaaggccagcctggtctacaaagtgagttccaggacagccagggctatacggagaaaccctgtctcgaaaaacaaacaaacaaacaaacaaaaaagagatacagggcttaaatagtatcaccaagacaaatctgtgagctcacaggtcggtcagggcctggccatatggaaggggctgcaaatgcaaagccagcttattagaaatggctgcctattggccatgtttaccaaaaggagacaactgagctgcatcatcaacctcacagctttttatatgaagaccctgggccctacagggcatggaggcacactctttgaatcccagcagtctagagatggaaacaggagattccagagttcaaggacagcattggctacatgataccatctgaacagaggaaagacaaagacctttgataccatcaagatgtcagtccagtgcacccagtgaggctccccttgcactttcaaaggtgtcctggggccttctgcctgatgtttcgtgtgcttaggaggcttgaggttttccaagcagaggctttcctatcgctctgccaagacaccgttagagttctgttgaggtgaacatttatgtagacgccccattctaccgggtgtcaatgttcataccttcccacattccagaagtttgtagagtcccttcacactcataaaccttgctgtgccttgcaaaacattaaaaaggctgatgtcgggttggggggctgtcaaagaggggcatcagagagggactggcataagaattaatggaaggtagtttggggtctttaccctttgtcagaacataggtcgattcatttactttttatttagttttaagacagggtcaaactctgcagccctgtctgttttggaactttatctatataccaggctggccgagaactcagagagatgcctgccgctgcctccctagaactgggtgggatttttttgtttgtttgtttttggagacagtgtttcaggtagccaaggctggcttcaaacttggtgtaaaagccaaggttggctttcaattctcaatcctcctgcctccaccctccaagtagattacatgcaagtgtaaccaggacatagcatttagatttaaatggcactgccaagggtcgataggaaacatacggatttccagatttctggagctgggaaccgcccacgtctgtcaccaaacaggacagactgggttcacctgagtcaaaatgtggcacctgagagagcaggctgttagggtgctggctgccataacatgttgccattctgtggaatcgcaagtcttttatgtgtttatcgctattctatggctggtggtgtatcccaactcttgaggctaggaatctcactgtcctgctccctcccactgtccgtcccccccacccccagggagacagtgggaggagtgaggggaggaattatccttttctctggctcagcccagttccagttctcagccatttcagttttatggccctgcttccttctttctgtgcgagaggaggcagcaatgagtgggctggaagattggaagggccgctaggctaggacggtatagggtgatgttctttcctagacaccaggcagagacagagccttgttgtttatgagcttgctagaagccaacagattccatggttctggggatatgctctgcaaattaataacaaatctcttcagacattgtctccggacatgcagagcaaagcaagctggcccctgggctgctgtggtggggaagtcccagggttccacatggccagaggcttagattctccctatctaggtgagaatacagtaacccgactctctcaggctgtgttattaactggattccactctcacctgtaaagttagtcctagtaaaactacttggacccccatagaaattccacagcccttgccgttacggtgttatccaaaactattctctctgattgatagagctttgtttgtaaactgtgatgctgaaaccaactgctgggagcaggtcttctccttcccaggaagttttcctcatctgaaacacttcaccaaagcttggtacccattttctttcggcctgcatagtactcctcaaactaggtccccttcatccctttggtccaggccatcctgccccctagaactcgtctttctgtgtctactctctggtctacccagtccttcgaagcactacccagagacttagtaccagaatgctgctgccccacatgtgcataagccagcgcacactggttccttgttaccaaaaaagcgtgtcagccgggctcagatgtgactggcttctctagatctttctggagtctccagtacagagaaacaaggcagggggccctctgattttccttttgagcccgaagaaggctcttctagggtggagaaaacaggtcacccaggccatgtgctcctgtccatagcgcacaacactggaaccttctggttgcttgcccgcttggctttaagtttaaatcaggggtgctcctgcccagtggacgtggaaggcgcgtgctgcgagtcgggtcactgtccagcgtggatactagttcctcgacgctccctatcggatcgcggctgtcacctccgcttgattctcgctcctgtccagcgtggtcatgggcggtagctttgtggtccccaaagccgtgccggctcggaagacagtagtgacgggcgcagctgcgctctggcagaggctcatgcggtgtggttccagctaaagccacgcgtgtcctaaccgaaggcgcgcctccctaggcctgggctggtctcccgcgctgactcagctggggacggccagggcgtggccaagggtggggtccccagggtctttccctcagtctttccggtgtctgccgcagggactgggtggtgattgatggcacagcagcttgctggccaggagcggtctggaggggagggaggcggttccggaggctctgaggcggtgcaagaggaggagcgtgggtggggctacggaggaggagctggggtcccgggtaggcgggcccgagtggacctcatggtaggagtgctttggctgagagtgccatcgtgggcgaagccgacgactaaagtggcagaatgtggctgcgaggaaggaaagttggaagcagatggacacaggctgggtggaaccatagaggaaggggtacaaccccctggaaagagcgcgggaaaggggctgggaaggaaggagaggcgggcatagggtgggtggggcgtggggagaggctgggcggggctggggcgggagtatgcccccggctcctctcttgcnnnnnnnnnnnnnnnnnnnncggagtatgcccccggctcctctcttgccacccccgcccccggccgggagccacttgcgccccgccccgccggccgcaccccagctagggaacctcggagttgggcgtccgagcgtgtgcgcccaggggatcgttgaaagttctacttctgcctggacggctttcctggatcccagaatgtggcctcactgagaaccctctgcctgtggactagggagcgggtcttccgcgcgaactcttgggtgggaagttggtctgcacttcacttcggcaacatgaccagcccagagggcgcgcaaaacaaggaaatcgactgtctgagtccagaggcgcaaagactggtaagagggagacatgattcagacctgtgcctgccagcaaccgccgcctgggtccctcagttggttctaaggtcaaggacagtggccccttcagctaccgtggtgctgctggagtagaggcgagtgggcttgggccactcgaaaatcctgatatagggcagctcctgcctaccatcaggtggttggctgagtgtaaggtgtccgtaggcggagctctgaaaagtacattttatgctccaatgttcctctcaaggacgaaaaggagagtgggctctccctccacccctagtgatggtctttaggcaggctttgcccagctggctggctctggccaggacccaaccgaggtctgagatctgagggtggtgtagagtttcacagggaactgctggtttggtgttttaccgagtacagcacctgggtcctcatccagccgcaccaccttgccatgagtggcttggagggtttacaggttcttgacctcaggaacaccttcctctaggatccagggccccagatccacttcggcgggtgccagaagccacttgtgtctgggcaaggtgcttacgcatattttacttcccgaacttacgtagggacagtggatgaggacgacggtgattgaaaattgggcaccggggagttgggggatttttggttgttacagcctgtgtagtttatagttttggggtctgggagttcaggcaggatccataacccaaactagccttgctctcaggattctcatgtctcaacccttccactatcgggcttacaagcctgcatcacccacccacccccccccacccccgcgcgccttatccatggctgtggttgcttattagtgggaatatttcaaagtaaattgtactctgtgaaaccatgtattttatggagttgataccagagagagggggagacccaaggttcccattttagcaggcttttgtgagaccttgataaaaactgagcctcagccactcattctccaggtaggagttaatcctgtagttagttggtctttaaggaagagtagtcgaggcaaggctgctctgactgggggagcttcctccaagtgctaggaaggctaagtaaacttttattccaatgacagacttgtaaaatgtcagttccttgctgagaattgctgggcttttttcccctgtctgttttataatgtttattctatgtccctacttaaacttgggcagtcaaggaggcttttggagctgtaacctgtaggcctagggagggaacctgcagggccactttggagccctcttaagggaggctcagggaggagagaaagcttctgagacatgagtgttcagaacagaggcccaggcagaccatagaaggcaagcaggaggaggaagtcagccctgggctggttctagcggacaggaaccaagtgcctgcatcctgggcaaaggaaggagaaacaccaaaccccgagaacagggatgtaaagaagtcgaggaggggcccaagaggtgggaatccacttccaactccaagataccagccacaggtccccctactcaatttggagcctgcctgggatccaggcgggatactgttgtagcccagcagtaagaggatggaagcagtggtcattcagcctagcactcattgggctaatcagtccatgtccagaatccaggaagcacagagtgctggatagtttgtgagtgtttacatgtaaggctatggccgaatccatctagcaatgagccctgccctgccccagatgaggttatttttagtctttccttctctctctcttaatgtaatataaccttcatacactgctctgtagccctctctgtgcatctgatggaggcccgatacctaacaaaaagatggtcaaaaatctaacaacgctggattcttgaacgcatttagttccagaagattctagaaggaaattatgaatctttaagaggtttacaaaacagtagcaaaagtttgttaaaagaacacagaaaaagaaacacagtgtggcccctgtttatgaggctaatggcctgctgggcaggaagtgtccagggcatgacaatggccggtgtgttagaaggggggccacccagctgccgtggaccctgggttgagcatgttgctggaggccagcagagatggttacagaatagcttttgtgttctgcagtaagtgtccctggcttgtaggagcaggggcgtctctagtggacgagggccgggttgaatagttgtgagaggaccacgtgggtaagaggaaacagacagacagcgtgatctcctcagtctaagacaatgggcaagactggagcagagtgagatggtgcagggctggacacctgcaaccctggccctcagaggccgctccgaaggaactccagttctaggctagcctggactatctagcaagagcctgcttcaaaacaaacatacaggggttgagaatataattcagagctggagtgcttacctaacactgtgttcaaggcctcagcatcacaaaggaaaaaggaggggagagagcagagttgaggggatgctaagcaggtgagaagtctcagaggctctgcatccacagaggaaactggcgttcagtttgtttgtgtttgtttaatcttacatgtatgggtgttacggctgcatggttgtctgtgcctgacttgccttcctgatccaagtgaagaccagaagagggcttcagatcccttgacgttatacactgcacgctgtgtagatgctgggaattgaatccctgtccttgagaaaggcggccagtggtaactaagccatgtctccagccccaaagtggcatttcttcaacttccggaacttctctgagtcactcgggttgtgtcacctctggtctctttccacacactgatgagcacctaccctgaaagaggctggccaatccataccagggccaggatgcagatagaggggtagaagttagccctgtcggtcatgtgcacacatggctgaatgcgggcaggctgtgaccgtagccctgcacagagtatgaacttactataactcagtcacagggctttgtaagtgaccttgtgtcacagtggagcccctctcacaggatcctgtaccccacacaatccgaaggtcctgaaacctggagtatggactgacattttaaatgtgttgtttctccatgtaaagataaaagtagtgagctctttccttttgagttgtaggtctgaggccatttgcctcatttttctagcctgacttattactgtgtccttgacccaaacatgtttgcacttcttcctcccaacccctcccctccccctccctctcacgctgtgtctcggtctctctgtctctttatctctgtttctctcacacactctcttcgctttgtctgtctttgtctctctttgtgtgtctctgtttctctgtgtgtctgtgtctgtctctgtttctctttgactctctgtgtctctctgactctgtctcttgctcatatgtcaaacaagcgcttcacttaaacggccccagccccagatcctcagctgttggtttcttggctgcctcgttggcctaagtgattaaagatcacaaattgctgacagcatctcggattcttcctttatcgagcttttgcttcctgtcaccgctgctgcttcccatcttgtcattttgggtccaaaagcacctctcagccactcctgccaaccgatggaggttgactttgagagacttgtacttgagactgaattcatgggcctcctggctggggaagcacagagatctgaaagccccgagatcagtcaccggctcccatagtactggccagggcacaggtcagctctccgtcattgctgggagctggacttatcccagtccagaggtcacagctaccaggctcttccaatatcagctcctgagctcaaacctctcagcacaggagaccagaaaatgcagcagcaaagaccttgagctgaagatggaaacaagtgtctttacgagtagtatcatcctttggtgacaatggagactgaatttccctttttctctaggttagtttctgttcagtttcttaacagcggttacatagcggaagcctcctttgtgaacggcataaaactcgaggttcagcccccacctaccccggtgagagcaggaaactgagttatttctggtggccatttcttagtacagctgattgatgttgaacctgcttagagtgagatacttgctctcaggcagaaccaagcgcgtcaggccttggtaccacattggctcctcaaaaggtaatgctcagagaggaacagcttatcccagaaaaatcaggctcagtgagtcagcactgaagccttttgtgacccgttactcagatgccagaattcccaaaattccactcaatttaaaggattaaccgtagagctcagagccctgttcatcagctgtgggaaagggagggctttattacctgactgcttttaccaggggccagcagttccggcttgtgttttacagaagttcgcttaccttcataggatgggtttattggacttattgcaatagtagctatatagttaagtggatttacatctgtctctcagattaaacccagcattagtgtgactacacccaagaagtaactcaggattgccaggtgattgctgaccactgcagtagtcacttgccccaggagcaaattccagaacagctgataaaggcagagacaacacaaaaacaattaaacgctctccttgccagtgtgcattccgtggttggtttatttccctgaaatctaaagtatggctactttgtaataaagaagcaactcagctgggccgtgctgtcacatgcttttgatcccagcactcgggaggcagacgcaggtggatctctaggaattcaaggtcagcctgggctacagacttgagctcccggacagccaaggctacagagggaaaccctgtgtcagaagagccataaaagaagggattcaccttaagtcatgggaggagagtttacttttaatggagacttgcttgtctagtggaaatgttttttcaaaatagcaggtctttttattgttttaacgagtattttttaaaagcatttttactatttaattatgtgtatgtgtatgtgtgggtataagcattgcgtgtgtgagtgcaggatgccagaagacatcagatcttctggagctgtagttacaggtgtctgtgagggtctcctcaccctctcagcctgatgtggggactggatccaaactctagtcctctatgacttttttggccaggctgggggtggatcacacctttaatcccagcacttgggaggcagaagcagatagatctttgtgagtttgaggccagcctggtctgcagatggagttccaggacagctaggactacacagagaaaccctgtctcaggaaaacaaacaaacaaacaacaatgtgtgtgtgtgtatgtgtgtgtgtgtatatgtgtgtgtgtgtgtgtgtgtgtgtgtgtgtgtgtgtgtgtgatatttttattatttcactggaggggaatggagatgtgtgctacagcatatgtacagaggccagaggacaactgggtaaactacccccatcatatgggtccagagaccaacctcagaccaccaggctttcatgctaagcgcctttacccacggagccatcctggtgatttttattttattttattttactttttaggacacaggtttgtactatgtgggcctgacgttcttcatagttgtgatcctcctgtctcacttcctgagtgctgggattgtattgcagataaagaccatcatattaggtccacaacatcagttcagatccacgtgtgtgtgtgtgtgtgtgtgtgtgtgtgtgtgagagagagagagagagagagagagagagagagattgattgattaccctttacaggaatgcacaggtagatgcagctttagaaattactgagaattttcctagaggaagaaggctgagtgggtgcgaggtggaggtggaggtggagtgcacctttccgttgtgtaacctccccagggccactgtgtgtctcttggcactgctgaacttggtgtgaactgccttcgtgtgtctctccctccatcagtaactgtcatagaagacactccataagtcgtaaaagtagctaaatttactaggccccctgctgaatcagcctggtggggtgtcagccattactacataggagtagacagttagctatctccaatttacagataaggagcaaatggggactgaggaagtcaggaggcttgctgagtcccatccgacagggtgtggaggagtcagacccctggtcagctcgcttgaaactagtgctgactgtggcaccactgtatacagcgtgcttcaggctaacttggcagggagcagacatgtcaccatttgcctccactgcagttgctgtcaccaccgacatcagcttctctcagcagctgtggggttccatcactcaggtacccccactccttgtgtttgcttgctttttttttttttaatttaattaatttattgttttacttattcacttcacatccccactcactgcccgccccagtcacccctcccacacacaatcctttctcctccccttcttctctgtgtgggtgacaccccacacacacactccttttttgacaccaggtctcatatagctgacaagatttcttgatcctcccacttctggccccggagtgctgggattacaggcatgtggtaccacacccagtttattacccttttctatgtctggtaattttcacaagggaggatgttgacgggactctatttttctaactaaggcagagaatagtggaagtggaagattggtaggagcctctattttgctattttttttaagttatgctgacatattagatgttacttgtgaatctgttttatgggattgaacgtcaggccctggtaatgctgagggactctaagtccctgtcaggcaggcatcatagtgagtgaggctttatctggtagatcgtggcatctctcctcctccaacccagattgacagattcattgcattagaacgaggcttcttccatagctattcccaggaatgtggatcaaatacgagaaagggtgtgttgtgagaattccctgcctaaggagatgtaacatgtcttcccactcttcccaaggtcccatcgataaatcaaagtaccatttcactacagttcaaccttgggaaccaaagaatttatttagctcacgtatagagatcacaggtgaaggaatatggctgactagaaagcagctgccctggaaggaccttactcagcatgaatgatggcttccctaaagccacgtagatgggagcccctttagattaacctcctctagcctaaatatttcctatatattctagcaccttctgagactcccacagccatgagcaattagggacagaaaatcataaacttggctgggaggagaggcagagatctccagtgactttccacccccttcccattaaggaatgtcaacactcagctccatcctgcctgcgggcccagcttacttgacgaaggcagcagctgttttgcttggtggacagtagtctgctgcaagttgtcacaagctgttccgtgtctggggtctgcagttttcaggcttattcttagaaagagcagtgtcaacagttggtgaaaccttaggagtgggtttctgggaacagtctagaatggaacagacagaggtgagggtctgcctggagagaacccctaaattaagaggaagcggccctctttggtcgaccctgcaagtccttagtcatggctttgctgttgccagtgtggtatgtattgtctccaacccccttggtgccagacatgacctaggatgtcatgtttgttaggtaagcatccggttcctcacgaagcccgtttctcttagaaatggtgtcgcctggttcttacttctggaaaagagaacatgttcgcaactgaattaccaagctttgtcccagaactgtagaactcacactccaggccaggactgcagacaccctctctacctctactcaggaactcttctcccatgagaatctttgactcagtcttgggcacctctgggtctgcctactgggtgccctcaagcacagagcagtgtaatacctcattggatctgtgggcctagctaggagctaaagtaactgatttttcattaaaggataattttagagcctgcaatttaccttagttctttctgatagtgtttttaaagacattctgcaaaggaggttgagctttggcccttagctctatgccctttgtcccttccagtgcactgaggaaccagctgggatcccactaatcttgtggccagagcctagagtcctatgagggcaggtatgttagtatagctgagggccatcagaaggctgtgctcagggacacagcaaaatgctttatagctcaagcacaaggaactgagtttggagtctccctggggcttgctggccagctagtctgctcaaactcatgagctttaggctcagtgaaagaccctatatcagaaaatggagagtgattagtgtcctcactcacagttacagctgttatttgctcctggggaccccataggggagataggttttggaaagatgaccatgtctttaaagaatgggatgagtcacatatgccagcccagggacatgggcagtcagtccctggaccaggccggccttggccactgttgcagaggtgtccagctaatgcctgccctttcctgttccaccacaagcactcacttggctgcactcaatggcagactgtttttagagtctgccgaatataagctgtgggggtttccttagaaacaaaagtcagtagctgctgctgcttcctgtaaccaaggcaactcaggaaagggattctgtcactctgcaacctccaccccggtctggaaaccaccatgggtttgtcggccacactaacgtgggtgtgggtgggtgcacaccagggtttccaagctcccatggaagaaggcttttgttccttctctcagggatggagcacacaccaggacagaggctcctgcctgattctaaaccaagccagcgattttgggggtgccaccctgggcacttcagctccatgacattcccattgtgttcacacgagtgaccttccactgcatccctacaagttttctgaaatggccgtagattataatgtcatgatgcagtatgcccaggtgaaaatgctatcaattctactcaactctaaagcctgggtgtttcaatgaatacatccttagcacagacacttcgtcccagtactggcatctttacatctaagtcgacccatggagcatcatttccataccataagagacagaccaaggaggtgctggtgtcccttgggccccttgtctgtctatctgagacccacaggtctctctgtcaatctcccctggagttgttacatcctgccaccaggtccgctgcaggactgagctgcctgtggccgtgtgcagggagtctgcctgtggacggagggatgggagctggttttgcaggccctaaggcttcctcagtctgttggaggaagcgacctgacaccaaaactgtctcaaccccctttctcaagaacttcctcagggctgtgacacttgcatgtaaatccttccgtcttctccttagactctgtaggacctctggtgtcagtaccacatccagagggggagagggtctggcatgcatatttttcttattaggcctgagtctcaggaaagtccccaaggctcaggactggcatgagctgagcctgggtgctagaggactccccgagggtgaggggtggacctcctgcagacctaccttagctgagcacactgcgtgaatcatgtgtctagtctttcatgaccagacgagctcccgtcaggagcctcaggaatacttatgtgaggtagtgaggttgctcagtgacacccacaatgcatactttacctattgtcaagacgtgccactgacttcttacacaggtgtctgaagcctcctctgccagcctgcccctggggctgccacatatccagctatatagcccacaaaaggcatttcactggacatgatgcctccagctagccagtgaacgagacatttggccaagggagtctgcagcaaaccagagggctggtgttaggggcggtaggtggaagacctgaagccttgggtcagacttgtgcttctctggtgctctccttgccatccttcttacccagggtacatgatgtgtccttggttgtgtatgtctcctccatgatgggtgcgtccctggattgtgtgtgtcaccggggtggatgtgttcctggattgtctgtctcacccaggtaggcgtgcccttggattcgaatctggagccagatcagctttgtggaattgtttaggcagctttggtgatctatgggacctttctggctgtccccaccctcaggagtgcctcaatttaaaagcccagcctataaaagctgtttataggatcccaggcctgggcccacagctgctaggggagtgccagccacaggcccatagaaggggagagaaaactcacattctaaaccagtagctttgggagttctcaagaagttagccagcctgtggcttgtcacaggagactgggcctgtcacctcttacctctgccctgcccatgaaccaaggtggagagccatgatgggcttatacatggacagtttgtttctagagcaaccaacagaaccatatgcacttttcagcaaccagtgaacatgactttggggtttggttccttccttgccaccaccctgtccttccttttctacctttctacatcctgaaaaggaagggcctaatatcccaaggcctacatgtacttccacagggcaaggttcctcttgccattgggaaagcaccagcattgcaaggggcttgtgcatccccggtggtctgggcctctggagcagaggcagcgggtccctgttggtgctcctcaggacactctctacaggctaccggcagcaaggggaaggttgtgccttggagaattttaaacctgtctgtgacctcatgctatggttttgtattctggcaaagcatctgtccaggaaagctttgtgctacacccctgaaggacctgcccaaggcagccgatgacccgagaaccacctgaacagctcagggctttgcactgtgcacagggaatgactctggaggctgggtgccacacggtggaccttggctgctttgtacttcagttcatttcacaactgggtcacatccagccttccctggtgactccgtagggctcatattcatgaccgtcatcctccaactcctgtctgcatgttgccgttcttggcaacgtggccgaataggaggaagtgcgccgctgaggcattggcagtttctttctggcttcaaagctcgtgtgagctgcaccgagtgtaggtagggtttgtctcaggaagacatgcccagtcacatgtagagggtttggatcagtgtccttgtttggctcccctatctgctggtgtttgattgggcaggttccagaaaacaagatgactgccttcacttcctgtactgtgtgaggctctgtctccccacaagtcatgtgagcactgtaagagatgtgggtgccaaaagtggaggagtttacaaggacccacagatgtattgaattacagactagtcttctgaatcctgatatcaggagcagctggcacataataggcttcattcgtgtggctcctctgccagcccaggcctagtctcctcaaggcagggctggtggctctacaggttctagtactaatgccctcaagagcaaggtgcatggtggccaaagtgtactacaatgagaattgtgtcccggggggggggttcttgtggcatgtgcaccccatttgatccagtgccaagaattaatccagatgggatgaagggctagctggccaggcatcctgacttgggatgtgtatgtggtacccagtgtccccagcttagaggaggccagcaagggcaaatgtcatctcagaatcgagggcatttgttggtatgtaatgactacccagagactcacagctttgagtagtgttcatctgacctcctagctctaggggtcaggaatgtaggcctcaaccttgctgtgctctgggtctaatgggctatgattaacagctagccaagctgggttcttttggaccccaggatcctcttctgagctcatttgtgcttcactttcttggaggttatagggtagtggtcactgttcctgctggctgtcacctgagagctactcacatgcctctcttttatatggcatccagatttctcaagaccaacaagaggcttgccctggccttctcttagaggcctcatctaagcccaccaggcatgttctttttgctcaactcaaggtcagcgggtgaaagcccttaatttgtacagttctctctgacatataaagttatgtagggacaggtgtgaccttatcatgttcacaactctgcccacatacactcgagataactccttatcgggtgcctacatagagagagagagagcgagcatcgatataccagtcagcacagtcctggtgaccctcctaggacttgtaggcctttctagaactgtgacagttaaattctctctccctctgcctccctcttatccttttagtctttttcacaaaccttcctgttcctccgtgtctaagctaatggactaatactgctgtcaaaactcttccctagtctctgccttcttagaaaggaacaggcccaggaccatgttaccctctcacccaagggtgagaatctaaggagctttccacacacacacacccacccttggctcttacagacacacacacccacccttggctcttacagacctcaagtaacccatgtgcctggtgtggaaccttcaaaatgacaccaagagccagagttctgacacagccatgacaaggcagtgccccaccactgtgttccagctgcagcccaggcctcagtgttgattaccctttgatttgaaaaacctgggcttggactgataaggggccacacaaagtctgctatgaagtcaactccttggaagtcggaaagaaatcccttgtgactcaatttagattagaattcaacttagattagagttgaatgagatcagggatgggtatgattgtgaactcctgaaatcccagcatgccagggtgtgggagggctgaggcaggaggatggtgaatttcgggttggcctgggctatggagatagcaagaccttggtcttttacaagtacaagaatcaacaatgaaaaaattttaaaagaggaaggaagggaaaaggaaagactagtttgtcttctgatatatatatatatatatatatatatatatatatatatatagtgtgtgtgtgtgtgtgtgtgtgtgtgcatgtatatgtgtgtgtacatatatacatacatacagtcagtcagggaggtagtatgcaggtcagccctcagtacctatcacctatgggagtgtgcctctggggaagccaggcacgctgaggctcttgccacttcctggccagccccactagccagttgagggctgcccagagagtgctgttttaaaatgaccagggaatcagtgagacattgcaaaactccagagttgtgggtagaagaattattgactgtgtatcaagggagcttacctgccaagaaggagtgacttgatcccagagaatacctgaattcttgaacattctgccttgtacttccttcgatgctgggatgtatgagataagaacattcatatggtctatagacatgcaacggggtcaaaatgccatctataaccccttagttggcctagtcagatgtgttctgacagccagggtctctaccatccagagccctccactgtgcccttgggagaacccgagcttcttacaggggagagggaagtcatagggcagcagggtgggccacgagggattggcaggagtctcacagagtagatctgtctgtctgtgaggctgtcagactggggccctgtaggaaccccggactctgatacgggacagggctaaggaatgtgtcatacaacataaaagaagctcttaggacagcatccacctggcatttggttagggctcagtggtcgtcctcctgtcctcaggggacagcagatggtgccaaactctgctgagctgtgtttctcctggacatatgtgcctatgatggatctttatgtctaagccgggcacagtaacaacaatgttgcagaccatggcagtctcagcataggcttttcctttccttttggcgtcaggaactttcacgtctttattaaagggaagtacttctaacctcttctttggcatatggaaactgtcagaatcaccattccctgtgcttgggggccattgctaagtgaaatgagggcaggcaacctcaagacaggttctggctgttgctggcgcggagctgacggtaactaacaggcagatggtggaaactctgggcaaagcgaggcagaacaaaatggtgccggatttgatcacgcggctcagcatcggacatgtttaaataatcctttatttctgagatttcccatgtaaggtttttggactttggtggaccccacccagctaattgaaactagataaaggcggagctccccttcttcctactcctgacaaccctgcctctccggtgcatctgtgaatcacacagtgtgcttgttaagccctaaacaagattttctctctactgtgtcattaactacatgcccggaagttgcctggtctgttctctaacaaggtttctgggtctgtttcaggcggaggccaggctcgcagcgaagcgtgcagcccgagccgaggctcgagagatccggatgaaggagctggaacggcagcagaaagaggtaatgggggctgagtgttccgaggttggctctttctctttcaggactgtgaagacagcgtacctgctgctgttgggcacctgctctcgtcattgtcaccttagtgttgctccagcttggaatgcgtgtgctccttgtagttcttgttccagattagccccagagtgcacacagcatgaatgctggacatctgttccaggttagccctggtgtgcacttagcacagatgctaggcatggctgtccaactggagacctaatggagccagagagatgctcgcagcctgagagcttgccctttagtcgtagttcctaggacagctttctagctgagaggagcttgagaggattgggtttgggcttctaacagggcgttggggggcgggggagtagggtctggatcctcttagaaccagaaaagaccaaaatgattttcttttaatttaattggtcaacttctttcctttaaaaacaaaattgctttgaggcttattagtatctatcaatggttagtgtaaactttggaataagtagccacaggaacaaataaatgtgttctaggggaccggggtggtcatcagtaccttcaacccttcatcttgtctactgtgggtttttaaaaccttgagtcagaattttgttccaacagccagcgtgtgggctctgtaagtacgttagggtcctggcttcttcacaacctttcctgtaactgataaatgatccctctgggggagtatttgcttcagccacatgctactgagcttggccatgcagatttgagaccagctgctggagtcgtcctccatgtacaggttctggttctgttaatggaccccagctgatgctcattgtctgtgtaacttcagatggaagcttgggattccaaattctcttaagaccagcaggttcctcctccagatcagcaagtcccaaacctgtcacgtgtactgtaggggtggcggatccacagcttaagatgttcaccatcctcggcctgggggctttgccatcccaggaggaaatatatcagcagaagaggggatgtggccagacttgatttggggaaggaaacttggagatagcgtgtgggtagctgtagagtgttgggagccacagcctaaaaggggtaaccagagccccagtgtggggaaggcagtcagggcagtcaccacagggagggacctcacccctaccctgtggtgattacagagtgacctttagataggtttggcaagcgtctcctttatgctaagctatgagcagaaaagtaacccagtattggaaaatgactcatttttttctttccggttacaaatacaaatgaaaaaatttcaaaagtgtaatgtgtttagtctttgtgattttacatttagaagttggtacttttgtgtggtttttgtttgtttgttgagacaaggtctttctatgtagccttggctgtcctgggactacctctgtagattaggctggcctcaaattcacagagatccccctgcctctttgcctcccaagtactgcaattagaagcggatgccaccaccacctggccttatgtgtgttttttttcttttagttctctgggaaaagcttggggtcagtgttttcctagcatctgtctcccttctgagcaggtttattttttaaaaatcagaaaataagtggtcctgggttctgcgttaattatttgggctttaccacatgaactgtgattcacagcccctcgagttaactgacgtgcctccctctcctggtctcttggccgagggtcatgtgggcctaaggggagtcaggccaggtaaacacctgtctggctgctcccaccaggaaacaccttcaggaaactcaccagagacaaatatctgggcccacaaatggaaaataggaaaagagcccactgctttgtaggccactgtcacgcacctctgagcgggccccgcccaggcccagggaaccatcccaacttgagctcctcggctaacgtggctgcatcgtacaaactgggccaatttatttggactgaatatttaatttttattttaataaccaagtcccagctatttctcagacctcctgctatcattttctctgtgaaacatttctgctcgttcagtagacacttgtgggcctactgtgtgcagggccctgctaacccttcccattgactgtgggagccacagagtagttgcatggagaggtagatagttctgtggctggaggctgctgtttcttagggttacagagggtagctcttgtcatctgccgagccaagagtcctatgggagcaccccctccaagactgctccccatgctctaggcttctctactatcccctcaccctgattttcccacagtcctttgctctttttttctttctctttttccttttggcagcaatggggattgaacccgggttctcatatatgctaggtattccatactgagccccagacccagccctagcaatctgccaaaattcccagggtgttttgctgctctgctagttctgggggtcagctgcacttcatgtctcactgtccttccagtgcatgatgtgcctccccgctgtctgtttccactcttatcagagacaaaccaagaactctgggcagtggcatacgatgaggctgtgagctggccccacgtcatgctcatactgttaggttgggtgactttcaccaagatgtacaattcccacaaaggtcaaggtgagttgtgtggtatgtctacatgcatccactaagtaatacttgaaactgtattcattcttactgatgggtagcattgattggcatatgtgcacgattatattttttaaagcttctacaaacccctgggcagttagctgtgagtgtggcagtgcccaccaccaggaagaaattagtgagtccttacactttttatttgagcagaaggacaccaaatatcttctcatgctgcttttgaagcagaatttgccagacagagtccacacctgtagcagggaccacataggaagagaagcaatagctgtccatctagctgtcccagatctggcctagtccaggcggtacacatatatgcttacatacatacgtgtgttcagtgtcagcgggcaagtctatagagaagagagggaacagctaacagcccaagcttccagcccaaccccacagcccctcacagaccgctctgcctgccttctcagtccaggctattattagcagcatcagacccagctggagctcataccatctgatagcccagggcactggcattttaagttgttgattaaggagaaatgaatatgctttggatgaccagtgtttagccagtggggttgatattttgttataaaactgggaaatgtgatccttgctttctccgggtcacgctgctgctgagagggaatggctttcatagagaaaagggttggagctaaggcagcctggacgagctgaggaggcctcaagcccgtgccaaagttggggtccctcaggagagcttgcagagcatgaagagagcaaatatgggaaaggcagaagtgctggggtgcaggtctgtcaccaggtcttaggacaatgagcggtattcagacccagggtactctaggtgtccctggtaaggaccgtcagccacacagatggcaggagccaatgcagcagcaacctcaagctgtgcttcaggaccggttgagtagatctgaacttattgatgggctcaccagataggaatagcatgtaggggtattgtgggggtccttggactgatttgaccgagagtttagactgatggaaagacgtgtgtctcgatgccactgactgtatattcatttttggttggtggtgctgcatttattaatagtcgaacgatgactgtgtttacctgtgctttcccatataaatcaaatgccagatttctagttctagtcctggacccttagtaaggtctgacatacctcacggcttgtcaaatgaatgcaggtatccctgtcttagtggagactgaaattaaaagacggttccaaagcaaagcaccgtgttggggagagggagtccgtcttgtctctcagcacaatctcatggctgcagtatttcgccggaatgttctttcctataaatctgcctggaccaggatgctaaaacctctctattaatcctttctgaatctgacctctcaatttcctcacttaaaatttgacacttttctggttaaatattagtgtgaaaggcagttttctttttaaagataacttcatgtttattctttgacgattttgtacatggatatatgatgtattttgatcagaaccccctgccattcccctctctccttcccttcccactccttcctgagccgcttttcctccctccgtgtccccatctcctttaaagtctgaaaaggtgtctttaattcctattgcctgctgtggcaatgggctgtgcatctggtaacagtgggatctgcaggcattgctgtggagcgagtgaccgtcaaccgtcatttaagacagcaccaaacgagtgaagacgtggaccttaatgcattttctctttatattccatctacaatctttgtttttctgtagtatagcgtttattcgtatttctggttgtcacagaaccattctcatattcccacaattttaactgaattctctgtttctccccctgcttgtctcttccatcctttcctgtagatctatcaagtccagaaggtaggccctgtccttcattcctactgcgcatgtgctgctttcccgtgctgcggccctgccacctgcagaacagtgtgttcgctgagcttgccgtgttcacatccacccctgtgcccttgtcagataaaccagtctctcccgacacgaggcagtagccatgcatggaacacatccctccatccctttgcctcaaggaattggaaaactgtctccaatggagaaaaaaaattctaacacaaaccacatttttagaactggaagaagctttttaaaattgcatattaaaagataaaagtctttttttctagatgactgtaagataccagtgtaaattgccacattttaagacattattgggttgcaattccataatcctaggactcagggagtggagacaggaggatcactgaaagttcaaggctatcctgggattatgtggttatttgaaggctagcctggtcaacatacataataagaccctgtctcaaaaaaacgaggggagagaaggagagatatagatagatagatagatagacagacagacagataggatgggcagacaaacagatggagacattagatattagaccaggtatggtagcccccagtacttaggagactaagacagagggatcgaaagtttcaggacaggaaagaataaaaatctagaagaagagagtgaaagattatagattattggaggtagatttgaaagtcttaataaaatgtgaaaaacacaaagctgaaagaacaaaagtcccactgtcctccccacttggaactacagcattataggctaatgccctataatgtcctctcgattccatgacagccgcagaagtgaggatggtgagcagggcatgctgagcactggctgtccacaggcttgcagctcagccagggtggcccccgagtgtggttacagggcttggtaagcctttcctacgtgtgagcatttcctatgggagagcctgtgttctttcctgcacttgttcagtttctgcctagaatggccgtatcttttaaagcagagagtcagagtcagaatatagtctctcaggatcgaaagcacaatggcctcttaagcatgtcactagtaaacctgctatagacgatcctgagctcagtatgatgacccccgcccccagtccatccagacctgcctcaagtgggagatctcttctgaagaggcacagagatccaatgggtagccagctgagtttgtaggcacacactttgtggcctagcgcatctagtatgggaatggaacctggagccagagtcccctgtcttctagaatcgcaggaggactctgacaggttccagtaaggctgaaaagccccctaatggccagtgaggctgcaggacatcacggtcccaaacccagcaaagggccttgatctagttatttcccctcttgtccttccctttcctgttcagcttaaggttagatttttgctgacagcactgagatgtgccgtgagaactgtcagatgtgagctcagatgcagggcgcaactggaagtccactagagtttgtataaacatatgtaagggaaggaaggatgacgaaagacaggagccaagcagcgttctctgctggtcctgcggccactgggccaggtagtttctctgggttcaaggctgctactcaaggccaagagccttgtgcctcagtctagctcccccctgtcttaaccgagagattaaggtcaaatgggaatgaaggcacctatggtacacatgaattagaatctggatgccagaggcgagcgtggagctagcattggccgagtacagaagaggctttagccccagggatttgtagcactggaattgtaattaaaatgtgacttggacaccttgaagagcatttacttttatgaatacactatagctgtcctcagacacaccagaagagggcgttgaatcccattacagatggttgtgagccaccctgtggttgctgggaattaaactcaggacctctggaagagcaggcaaaagtaagtcataagggatttttccatatacattgataggaaaaccatgtaggtaggtgggttagagcagagaagagagatctcattataggttttaggtgctagttggtaacattcttaggcttttgttagttggaggttagatctactaagtcaatacattccaaagactttgattgttaaaggaccagatgcccaggtggataagggacgtcagtgggaactatagacaggaaagataattttggcttttgaccttcacaatcacaacactctaatgggttcagcctgcagaaccttctacacaagtggttctcagccttcctaatgctgcggccctttattatggttcttcatgttgtggtgattccccctaaccatacaattattttttcattacttcataactgtcatttcgctactgttatgaattataatgcaaatctctgacatgcgagccccatggggtcaaaacccacaggttgagaaccgcttttttccagccatggcttctccacatagcttagcgggaaagactgcttgtgtggctttttgcactagtttaacacgcttggcttttcaaggctgtgtgatattctccctccctctggttttctacttaccatcatctctctgaggaaggggcaggaccacacatccaaaatctggccctccttcaaggtggaactaaaccaaatataaccacagcatgctcgagtaattagaaaaccatttaaaaacatccctgtacttctggcacccaggtttatatttctgattataagcttaaagtgtgtaaaatgtgatgtctacaggtttgctgctggttctatgattttcttgctggaaatagagaagaaaataaggggaaaggtcaagcaggttgttaagcccaggttcttacccaacctgggcacaccctagggatggaagcagccattctgacctacttagttgagtctaactgggaccaccatggcttagaataggtagtaaaacctagagccattggctacagtcttttctcacccaaaggcctgctctataggtcctagacatctgccagcagttatgggttctccagcctgcattgggcacaggtgtcagacagcaggaacctgcaactagaagccagctcagcaaagcgcttctcccttccctctctggggccctttcccggggcagcgacacggaatggctctcagcttgggcttctagtagacagcatttgttcctcctgcaaggatgccccaaagctgtgaacagctttgcagaggggcctacagtgagtggttctacacaagggcttctttcctgacatcttggtaggccacccttgccagatgagtgctttgccttgggctccggaggcccgcaaggcaggagcggctaggcaggcctcatctcaggccactacctcgctgcttaggaaatggcctctgtgcagaccccaggtttgtagccactgtgccaggcatgctgcctccctgagtgtgtgtgggggggcgggggggagcctggtggaaccatttcttaagcctttaactgttcaattcttgcctaattttctttcccttctgtctatagaaatattatgggctggatacaaaatggggcgacatcgagcagtggatggtaggccctgaatataattctaagacttaaatggtttataatttaatcctgactgaagtttaattacgccaggagattcctactgcgctgtaatttgatactcagaggtcttcctcagggcattctgcatctggtgtggtgctgttagaaacggcctggccaggcatgtggcctgtccctctgcaggactgctggtgtctgcaggctcgccactgctgctcccccagttctctacatcagaagagtccccagggctgggcatgtgcccttatccaagaacttcccagagaacctcacatcagaacatctcgctgttatagttagaacctgaagaggcgccctagtctgtttgcttcccccatacacagccagctccctatctccccaaaccccacactccacactgtccctgttgcctcctcttgtctcatttgtgcctttgaaaaccccgggtctcctctcttcccaaataacttttcttttagaacccgtctgccttcccagcacaggccagggctcactcagccccagggagcctatcttgctctcaggcctctcaggagaggtgcccatgtggccaagctatgggcaaggcaccctctggtgctttccagtgatccccagagcaaggcctcttattaagccacccacctctttctatcctggctgctgccctggacttgacgcatgcttttggcattggagacctggaaatgtcttcatcagggcttctcactattgaacagcccgagggagattcaaggccatctctacaatcttagatgctatgtgcgatagaaatatcttctgaaagactcatcacgtccagcccgtgtcaacggtcgcagtattgtacgtccctgagacgtctgtcttctcatcagatcccaaggacagttgaaaggcggccactttgacagaacagtaattagctgtgagcagctcagtacctcccacatctattccagagataaacacgcaaaaacctgtttgtctcagagtccataaagcaagcagggtgacatccacattgaggttctctggggaaattgtttccccgaaggagagttagtcctggggggaagagagctgatttaaaagcagattccagagttggggtgggggagtagaaagcagggtttcatttctgcccaagcgcctcctcgttgcttttaaagccaccaactatgccagttattccggttctgaaggacttccccggaggagctatgtcccacagtcctgtagtcagagcttttaaacaaaagcaaagcagcaaatactgatttgccatttagatcggaaatgctagattctgtggcagtgggacgttctggggtttctaagctctctgccttgctatcgctaacctctccttgccgttccatgtgctccggtaggaagacagcgagcgctactctcgtagattccggagaaacacgtcggtcagtaccacgctcctaccatgctccttcactgcaagggacaagtgcacggagccttatttgttcctctagtggtttaaatagatacagtgcttaagagagacttgccattgttgatgtacaactgctatctttacctgaataaagaccgtaactcagccttcagcattttgggctaagctgagtgaaaaaagtgtgtttcgatttttaaaaaacaaaaacaaaaaactggatattgaaccaaggcctcatttgagtttgggtactctgccacgaaactttatctcctactctgctgggaggtgtttaagtattattaatatattatttatgacattgtaaatggcttttcttgttgttaagtaccagtagataatttctatactcacgaagcttattaataaccctccttaaaagctacctgtggcatccagtgtttccataaacagccctaggcaaactgaggcatactgagatcctgaggtcacatcctgtgagatctcagagggtggctggtccattcactgctctggagtcgggtcagcaggtttctttacggtccgttcatggttgtgttctcatcctcttttattaggcttctgacgaagacgagcgcttgtccgtgggtagtcgcggcagcctaagggtcagtaacggggcttgactgcttctgcgtggcacactgtgtgggctagatccccgtccctgcttttagtcttcagatcacaacttctgtgcttactgggtccccacctaactgatgaatatgtatgatatatatggatacatatacaatgtatacatgtaacaatgtatataagttagccaagggcagggtgggctgagctggggagactatggagtgttactttattgctgtagttcactagagagtggtgggcgtaggtttatgctttcaatagttttcccacaacatgaaactatgaaactttggttaatggttgtctcagagtcagtatgatagacaggaacatgaagacacactgcatgcccacccacccacacactctccaggaacgctaaccttgggtaaaccatccataagttggttggacttaggaaatagttcagttgctcaataaggaccctgagttccatccccagaactcctgtgaagaaggccatgtgtggtggtgggtgcttataattccagtaattcagagagcagtttgggaagctctctggctacctagcttagccttcttaggaagtgccaggccaacgagagacactgtcaaaaaagaaaaggaagaaaaaaaagggcatgtctagaaatgacacctaaggttgtccactaacctccacatgcataaacatgtgtgagaaagcatgctcagaagtagccatgagccatttcagatggttctgcagtagctggaggctcccctggagcctgctggctatggaacctttcaagctgtaatgaaggctctctgcggtgctggagactggacctaaagcctcccatgttctaggcgtggtctactactgagttacagccctagccctgaacgctcctcgtgggcaacatcacggctaataaatacagcctttatagctgcattagaagaaaatgtgtgctctgggaaatgaggcagaacggttgtgctttagcttagtaagcatgcccttgtgattagctgcagggtggacacgggatctctaggatgtcataactaggtctccaagcagttgctctgctttgctaagagactttattgagccaagagttggtttattatcactgtgacagttaggacacacaatattaccccttgaataagcatgtaccaggtgtgtgcttaacttggcatgtagcaataaggccctgaagtggcgcaccagccttgtggcttagccaccatcactggccctgtcctcttagcactacgagcagaccctatgtggcttttctggaccgttacatgtgacacaagggaggtgacaccttgctactgggaagttcctgctgcgtgtctttcctgctacagacgatgcagctgtgacttcctcactggccctccctcagacacggtctgcttttaaggaagcaaggtttacgtaagcagaatatacgtacaagctcagcttgcaacatctgtgaccaggcccagccagtgggaggtatcaaaggtctggctcttgaaaccaagaggaggaaggacagttggggaccaggggagggactgggaagggcagaacagaaagctgacccttggacgtagcctcctggtggtgactttgcaagagaacctttcccagaaacatccagcccaagccggaagcctgatgaacagatgtctgaggtagaacacgcaggagatggaagcagaacccaagtctctgggacaatgtgtcatcctcagacctgtggtcctctaggattcccccagggacgaatttcatcattttaagattcctggagggtggggtagagatgtgcatcctaacttcaaagagtttgctgaagtttgctgaagtctagcaagtgctggggttttcattcattccccttccgagttggcctctagtgaactgagtccccatcctggacatctttttcagatcccagggtatctgtcctaaggtttgaaatctcccacaggaagtccacggttatcgagctgaggaggagcacgggagaaagtcactgaatgtcactatcagcctctattggctgcatgactcccccatggtgtacttagtggggaaaggcctgtgccaccaagccgtgccaccaagcctgacaacctgagttcaggccgtaggacccacatgctggaaaatgagagctgacttttgaaagctttcttctgagtttcacttacacctggcacatgccgatcacccccccccaaattagaaacttttttttgtttttgtttttaaaaaactagagtcttaaaaaaattttttttttaagaattggagagctgggatcttggaaataaaaatcaaacctgctattctcatttattttagaacaaagtctagagcgtttagggacccacttgaggtcacagtttttagtgacagtgccagctcctgccttccccagagcctttcacacctgccaggtgtccaaaactctgtctcctgctggctggtacagctttggaaggcagctggcagtcctgctttgtagacacatctccctctaggtctatggaggctggactgtgccgcttagtacgttttaatattctgacgcctttacttagcaattcctaagatggtttctttcagctgcccaagccccttctctacagttttggcagtggtgagaagccctgacagccaggaaggtggttaccatgcgtggttcctgaggatcatcctaaggttttaattatctttatttaaatctgaccaccatacatctccagacttttccatagtttaattagaacatacctatgtcatgaaggaagtaaggcttgaatggttttgtgtttcgtgaactatacaactgttgcatagaagcaatttaatgttcctagactttatgatgactgccattctgataatatgtctgtcttttaagtaaagacgttagaagtcatgggaaatgtgttagtgttaagattttcaaggttgcctggttcttgcctctacgtgtgacttctctctgattcacttgtgccgctcctgtttctgttttccccctccactcttgttccaacaggcacagcccgagctggagtatgggagtccctacgcctgggtgaggtggtcagatcattttgctgtgtgactctaactgtgtgcagtgcagtgacagatcataatcgtggttctttttactaacttcctagatgcttttccaaaaagccaagtccatctgccggtcttcactatgagtcaggagggcatggctctctctagagtgagccttctggcctgtggatgggtccctaaaaccggaactgtatgcagtacctggctcccaatcaccagcaggagctgagtattggctattggtcacctaccatgaactaagaactcctgtgtcctttaaaaggacttaagtgtgaagaaatcactttccttaataaaccccattcttttctaatctgtatctattcaatttaagaggaccggctggcacttttcctgggaaaattacctttgagaaagatttcagttccagcaacaaaaataaagccctttggtctaaacccaatgaattttgcaaacctatagtctcttctctgagattatgcagagagacaattttattctaaagcccctgggcttcatttattctccactttagaattatttggaaattttacttttatgttcatggccatcattaatagtgttgtgcgtctgctgagcatgcttgaatcctccaaggtccacagagagctggatagagcaactgggcgtgggaattcccacccccgtctcacacacggagccgctcaaacagtcctcgcctggtgaggcaggccagctaggaagaagcacaagataaggcccgagattgagattgcagatgtgcccacagtgtccatcctgtagccacagagcacctgtgcagtcacaccgtgacaggagccgttcttggacctttaaggaatcaaatgcatttgaacttgtttctagacctcatcttttgtattttcaactgaaagtccattttgagagctgatcattgggcttcgtgtgcccaaggcattttggacttcacagtgtcttctttctaaaattaacttgagtgcctcaaatgtgccactggcttcatcaacgatcctttcttgtttcgtttaccattttaaagacctctgactgtgctccgtgacttacatagagaaacagacagcacacattgtctatccaaacggctgcatagcagccccaaagagtttagaacacattaaacacatttcagaaatgttttttggaaggttttttacatgctcctgtttcacttagaaactttaaattgtgtgactttgtttttgtatttggggtgggggttttttgttgctgggttttttggtttttttttgagttgttgcaaaagcaggcctatagtttataatgaagattacatgactgtggggttagagtccgtctgtcatttacttatcctgcattagtaccgtactcttgctacactggagtgaggctcacccagtaccttccacaagccacgccctcctgactgctggtgtgcccatcgggtagccacatgtaccttcagacgttaccagggtgtgcaggagactcacagacactcacatgcccctcatcgtggccctggacttgcttcatctttgtgaatattgtcagagctgtggaagtgctggtgtggttgaagaacttaactaagggcacagggcagaccttgcatttgcagtctgagactcaggtctgcgacagataaatcctcttccatctaccagatatgaggccactcttacttttcccgtgtttgaagctgttttggtctctggtgggttctaccttgagtcaacaactatttcctcaaacatggttcctagtgccataaaatagaccgttccctatagagcactttcagatggccatgccttggctcaaggtggcacttcccaaccttctgagtgctgtgatctctccacatgctatggttgacccctccccccaaccataaaattattttcattgctactttataactgtaattttgccactcttatgagtcaccatgtaaatatctgctgtattacccctgtaaaaggctcacatatttgacaccccaggggttgggacccacaggttgagaaccactggcttaggcagagggagagaagagtgccaggcaacttttggatggtttggttgggtttggtttcttcctggaggacacatgagcatggagtatatcttcgttcttatctatcaaagcaaagcaggaagagtggatcactaagagctgcctccctgaggtttgctagtccttcgtgggagacttctgcactccgttgtgggttacactgacatgagttacgcagacatgaatcttcaggacacagcttcttccggctgcattgtccaggccttacccagaatctaactgagccgggcaggtcactatcctctggcctggcgttcagccttcttgaaatctcgagtttccatggcactaacctaagattgaacacaggaaaactgcccagagaaggagtttaccatcaagccatgggcctcacgccacaggagggaatggcacaggcaccatgcttgatgagttgcagtggggtaggaggcatgttggcaggtgtgtgtgtgtgtgtgtgtgtgtgtgtgtgtgtgtgtgtgtgtatgtatgtggcacatgtgtgtgggagggagtgctttctgttgccctggggttacccccattcattcccttcagttcctctgcagagaaggctcagtgtgttcctggataagtgctgctctatggtttgtacctgccctgttaattacactgatgtgacctcttctttctttgttgaaacagactaacggttatgacggagactattgtggatcccagtccctaagtagaagatctggcagggttagtacagcgagcctgcatggcacgtgctctgaggggtcgctgcttctgtgtgtctaaaatacaatgctaaacttagttactttgctctttttgtgttaccctggctccttttacccccctagtgcattctaacattctcaaatgttagtattcaagcattcttagcatgattcgcattctagacgttaacgttaagaagctgataagcattcctaaaaatacccaggatgcagaattggctcgtccactattggcctccctcatatgtgtctgttggtgattcagctctcacgtggatggaagaccaccattttcagtttcccaaatttcaagcttgcaagtctaatgtttaccttaaatgcatgcgtgagatcctgtacttttctgatgagggaaaggaagggaagaggggtcagaattctgatgttttgagtgctcatgggtgagagtggaagggtgagagtgagggcagacatcctagtgaagaaaccagagccagagggaggctcagagcactggggaaggcctgggatctgtcaaggattgttgggcctttcagaaggttaaattgggcacattttaattaagcctcatgatccaaacagattaatctgagttaaatgacctaataccttcctgttcttaatgtcatttttccccttctggaaataagtttcttgtataagatttaatttattttaattatattaaaatagcatttagtcacttccattccatttctaagcttcagattacatacatacacacacacacacacacacacagagagagagagagagagagagagagagagagtaagccaacagtctcggctttcccaaactggctgaacaggttgcttgagccttctggaaacctgtttaggattgcctgtgctttttttatatgtccccttctaagcttctctagttccagacttcagagacctcctagtgcaagccttctgtcctgtcaccctttacactgacacctgagcctttaaagtacctcggggacagaagcctggagtcacctgcctgtgcagggccttcaataatgttgccaactgtgcccaagttgtggctgcagagctggctaccacagccacaacgtttccatgttgactagccgtaactttaaccccaagtttcaccataactgaaggtatttggtagctcttagatccagcttccttccaatgctaccttctttgtcaccctgtctgtctgtggctcggggtggcaatcgagctgtgggtcatacatatatttagtactaatttgccttatgatttagttaaggtttaggcagtgcttctaaaagtcaaatccaaaatagcctgatgataaaactgttctcagagtgaaagtagatgtaaaattggtttaacaaggagctagagagagtcacatgactgacgccttacttcatctaagtcacacttaagaaactaaactcggggcaatctggaggaaagtgtgagtgggatggaggagcttggcagatgtgaaagaagcagacacttgcctgataagagcctgggaatgtctgtctgctctctgcttgatcctttgtgtgtaatgtcaccgctcctgtgcccttcccccacattctctgtggcctgatgctttacagtgtatactcaaggctccctacccccacccccacccccacctccctgctgcaggcctgggagcttctcagcctcccttacctctcttcatcgaggtgctgggctaggctgaagagaagctgacatttcttgcaatagaaagaatttcagttacttaaggagttatgcagaaaggagagagttgagcctacaagggtttgacatgaaattcagtaagcaactggctaataataggccattcaacttcactcacttgctaagagtcactcacttgctaagagtttgcgctgcagactcttcatgtgagccagagagctcctgggtcctaacactggtgtgcctgcacttcccttatgagtgtaaggaagcactcaccgcttacacagtctctctcctttggtgctcagaattccagcttcagcggcggtgatggccgagtctctactttgtcatcctgcagagaggagaagttggttggtttccatttaaatctttcacatcctctcttcagagactgcaggttctgtagcatgcatccttgtacgtggacttctgctccccctccccccaacctagttcacaagctgctcttgaaatgatgttctactgaacttctgaggagtgattaacattcaaccttgccccactgacctgtatttaatgtaaactgtcacatcctaccatgagtgaaccaatgggatgcttgtgtatattgtcttccagttagaactgatccaaagggaaaacacttaaaatagcctggaccttcttaccttctttctgaaaatgatgctaggcattgtgcactctgtcagggatggtctgaccttggcatggaaatccagtctggtctagctatctgtatacactgataggcgttgacctggacaggtgatttctatttactgaggagtcctaccagctggggctggcgtgtcccagttaaggttcatctactcaccaaaccagggaaccagtttaggtagggggaactgagtgggcccagataagccagcagtatgggaacccctcctgaatcttcttcctagaacacagcccatcactggccaggtcccactatcccaggaaagggtcatcagaattgatataagccttaataaagaggagaggctggaggacagctcagcagttaagagcactggctgatcttgcagaggaccagagttccattcccaggagccacatggcagctttctaccgtctacaactcttgttccagagaatccagcaccctctcctggccttcatatgcacccggcatgcacataatatacttatatatatatgcagagaaaacatccaaacacataaaataaaaataagtaaatctttttttttttaatttaagaaataaaaaggaaacaaaaaaaaaatccctaagggattaaaggctatccctaggtaaaacagagcccacgaccaactcaactcacggagctgaaagcatctgtactccgggaattacgtcagaactagagctggctgctcagacatagaccacgccattctccagactggatctcagactcctgatgcttagcctgccagcgtgcctgtctgattcacttttgttgtgtaatgcctaaccagggggtgagacaggaggctgtccctggtgaaatagctatttcttaagcagagtttcctccaccaaatcttaaatatcagatctcaaattacaaagactaaaaaaacgcatcatgatcttggtgtgcatgtgtgtgtgtgtgtgtcattcactcatacactgacttaaagttctaagtatatctggtataaccattctggatctgtcagtgggctgctgtttctctaaccatcctgccctccccctgcccagcaagtgcatgacaaaggctgttttgcctggtgtgtccagtgctaacccacctgtgacatggagtgagttcacctctccccatccgtctgacctgactcaactgttttctctgattacagggactctcctgctccaaccttggccttcccagcagtggccttgcttccaaacccctgtctacccagaatggatcccgggtctgtctgccctctccctgcaaagcgctttgtggccgatgaacgtagagggcagttcaaccccttcagtgtgtagtcacggggccaggcttagggctgtttggcttggcttggctagcttgctaggacttttctctatctccttaaaaaaatgtaatttaggacctaatatggaaaaataggaggattctgtgaaatgtatactcaaagaaacaaaacaaaaaacaaccctcaagccgagagaactggtctcttgggtttctctgtttccagcaattgttcctcatttggggttccaatttgcttttttttaaaaaaaaaaaaaatatttttcttttgtaaacgtgtccaggaaacaatctgccgatctctatgcactccgcctcctgcatcttgggcagaactgggcatttcttggactctgtctctttcctgttttctcaaggccaaggttcaggtccaaaatgggccttcgctgccttgggcttttgagctctgttgcggcacaagggagccgtgctagaaatcgcagtgcacacacttttgggcaagttgaactgttctctcctttgcaggcagactcagcctctgggaggtctgctgtttggccctgcaccctcccctgctctcacctgagcccaatgtctcgggtctgtacgtaagccctgactcacctctgtggctagatcctgtacctcagagggctgcctctgcatcccagcatcgcccttgtgctctgtgttactctgtatcctaggtgtgcatccttgaatgttcatccctgagcagctagcggccttagccacacctttgtgtcttaactgggcctgtgaccctgatagaagtagtcatgccctctctttctctttgagacagggtttctctgtagccctggctgtcctagaacttgctctttacaccaggctggctttgaactcagatcctctggcctctgcctccctagtgctgggattaagtgagtgcccccaccggccaggcagcgatacccattccgatacgatacattctgtctgtagtttttcttctgtgcctgaggggatagttcaaggtccttgtgccatttctaatatctgaatccaaaggtacccatgcccctcaaataaagtggtgtgtcacttacataatataacacacctgcctggggacttgaagtcacccctggctcacacgtgatgcctaacatgtgaatggtgtggaattgttgggacgccgtgttcagaggctgatgcaggcagaatcggccccattcagtacagattagatttttgtttgcttgctttgttttttttatttgattttcagatgtttttgatccttggttagttgaaccccaggaatgctgaaccccagacatggggttgagctatgaggtgcctggatggcagttaacctggcccggtggctgtgtacacctgttggctttgcttcaggtcttcttccagcatcatctgaaaagaaatgactggggggagaaaacattccaaagatgctggggaagtttgtgattttaaagttagaaactgtatggtttacctttcctgtaaatgttgggtttctatctgtctgatcccctgaaaacacaataccttaactttgactttttttttctaaccaccctactatcgttacttagttaccagacctctgggcttggaggtcttattgctattgtctgttgttgttttcccaaggtctaaagcctgtggtttgctttcctcctgcagcccttcgttttgtgcaatgctgcctggcctactgggagttaccgggtgtgtgtgctccccacccctgctgtgggtgctccccactcatactgtgggtgctccctacctctgccgtggatgctccccacccctgctgtgcgtgctcccctctgcatgttgcacatgctctggcacccagcatcctgtttcctgccctgctgggaaagcggctcctaactcacagtcctacccttgtggtctcatcagtcagatctgggctttcccactcctgactgctgacaatcgctgtcaccctgttccatctctcctcttggaagactttttgaaggttcttaggtaggaaacaatgacaacatttacctagtaaaagaaagacagatgactgtattgacagccataacagattctaatccactttgccatagtactttggaaatttccagttctaaatgtaggttcttacattctgcagtaaattaggttttcaaagtcactgtattaataatagctgtgaatttccaccacagtgcactcttaggaggggttaggtatgtatacagggctaagctggccagtattctctgaagaggaataaggaaaattaaagtgtttttaaatggaacagagtttgacaccgcggcctgagaccttgtgattatgattaattgcatacaatttcaaggtaatcaactactgtttcctgtgtaacagtcctgaagaaatataaaatacctaacatataaaacgataattactgtaatgttttgttcccaagccacttcccacaagaataattatgtacacaaggctctcgaggatgctttgaggaatgtcaggatatttcagtcacttgccttcaatcttgactggccattcccgtgtggactgtctctcagaataaccatttctaatgttctcttggagataaaatcgtatgccaatggctacttagacttctctctctttccacaccttcttattctccacggctctccgaagagctgaagagagtggtgtagagcctgcatggtgttttcctgagtctctccctggcacttgtcacccctgctaaccttacctttccctgtgctctgtgtggtcctttgaaggaatgccccgttctgacggtctgttcccatcgcaggcgtccatgctggatgagagcagcctctatggggctcgaaggggaagcgcctgtggttctcgagcagtaaggcgcttttcatgtttcccatcatgcctcactgtgtgctgcatgacccaggggtgtttgctggatggtgactgatgtcacaggaggaaacactgtctgtgttttcctttgtgataaaggtcatggatgatggaatcaggaaattttcgcttgttaattcagtgtcctcctgactcgttggtttgttctaaggtcagggggagactggccttagctgggcattgtctgcttcaatccccgagacacccgagtaacatagtgagtagtgaatttctggacctgagaaaaggaaactgggttggggggggggactagacagaccctcagggttgctgtgacagtgctgatcccactttgcaggacttaccactgtccctgcacacccttgagacagctggtagttgcgtgtgtagtaacctcatcttgacgctctgggaggagtttccagccatcttagtccaaatctaggaggattgtttctaacaggaagtagagacgagccctgcatgcatgttctcttcttcatggcggcacccctgtgtgggcctgtcctaacagtcttcactggtcagtgaggtgagggtgggattcaaactcagagccttctggttcacattagctccccattggccaccctgactcctaggcataggtgacacaggatgccaggcaacatgagtgcgtttcttccaaggggtcatgtcaggccagctagtcagagagctgttctaaggatccttaagtgggaggaacaacatgccatagtccctgtgtctctgtatgtcccacacctgtgggcaaacttgtctttctcaggtgaagaactgtgattggttaggatgcctctgcaggcctgaccacgctggccacagcctttaaaacacccggtgcatttttttaaccctcagtgactgctgggcatgaagatgacgtgaggaatctgcaatcatggtctagctgctaactttcaggaaggtcaaatgaggtcagctagtctgagaagggtcctcacccaggagtcctgggctgacaggaagcagcaggaggcatagtctgtcactaccgtggctagtgaacggccagtcatttgtccattcactcagcaagcctgtctagagtgcactgggcttcatctgctcagtggagagtcactggaaactgactagatgcgtgccctgctcactggggctggctctctggtgggaagacagacagacacagacagactgagagcttgtacttgaaataggatcagaagcacctttgacgatccagagtcattggttccaatgaagatgatgcttgctggcctctcagcccagaggtcagtccagcatctgtcccagggcgcgtggctgaatacgaactgttagaggctacagcctggtggctgtcatcttccttaatcagaagctagaaagactgaatggccaggaagacaggtccacatccagaaaacaggtcctccctggaaaggtgacaaagaagcaagaccttccctgccagcttccatccttactcatttctgagctgggatgcaggcagctcgggatctcaaaaactgccactacatatccagcaggcagtttggtgaacacataagatgtggtacctacccaagtaggatgatgcttggtgttttcctgcatctctaccctgtgcaattgtttcttatctttgatagatgtttacctgagcatgtggcagacatgggcttcttttccaagcctggtttgtcctctaaccctaacctctttttcctttctgctatgtgtgtggctaacccccacactgactgaagtgtgatcttggtggcttttgatctctttgcctctttgctgaccctgttcctttgtttctatctgtgcatcctgtggtggctcggtgacagccctcagaatatggcagccacctcaactccagctcccgggcctcttctagggccagctctgcaagggccagtcctgtggtaagtatgcttcctgccctgctgcccttccacttccttccttcttcccctccacttccctgttcttttcctcttgcccctaccccttatccttctgtgccttagaaatgaccactgtctttgaaaaccagcaaaagataaagctagaagcctctcgttttatttcaggtctgggattgggaaatggttttgagtttagaagatgctcttgggggtaagggtatagtctcaaggactataacagaagggaagttattcgtgatgctcagaaatgaggcttgagagggagagtccatgctgggctgtagcatacatagactgtggctacaggtgtacatgtactattttttacaatttaaaattttggaggcttaactccggaatttagcatggcctttaaagtaatgaggttatcagatcagaccctgacaagttttaaagtacaagcctggaagtgtcttgctgttctcattactgcttaggttacctggtgtcacatttgctcgaaaactgcttagaaagtgtcactgggacccttctctcctatctgtggctcaccacatgccagacatggcagaaggaaccaaggccaaagaacacagttcgtcacccgatcggtggcttcctttgaggctactttaacattatctaaccaaggaattattttgtgtatggttgtgggatgtgtggggagatatctgctatcttgctctattgctgttaacataaatattttgggacagagcttctcaccaggcctggttcttgctgattttctggctagtcagcaagtacccggaatactcctacatggatgctggaattacagctgtataccacaaagccagctgctgcctctactgctgccgcttcctcctcctactcttcttcccccaccctcctcctcttcctcctcctcctgctcctcctcctcttcctcttcttcctcctcttcttccctcttcctcctctctctcctcttcctctttcttctcttcttcctcctcttcttcttccttctcctcgtccctcttcttctttttaaaatgtgttgctagagattaaactcaggtcctcatcatgcctcatagcaaatactttaccaactgagccacctccccagccccttggtttttttcttctatccccaaatggccttgaattcactatatagttgaagatatctttgaattcctatcccgactgcttccacatcccaagtgctgaggctacaggtgtatcatatgcaccacacctgaccagacagttttggctgtggtagggagacacacccaggctatagcatcagtgtgggtggagggaggcccacattttgaaagccatgagtggaaagtgcagacagtccaggccaatctcttttgctgggctcagacataaatacatagtttagaactcagttcctgaacactatactgcccaggattggttcctgcatcccagaatgcagcagacccaagatacagcacttgcatagatgagctcattggatttgttttagtgtagaatcctctttcttgtgcgtaatagtcaactgtacacttgaggaataagtggagtgtttgcaatcaaaagaagtttgtagctttactttcaaagattcttaacaacacctgcctccaccccaccccaccccaccccaccccaccccgctgccccagcaatgactgtctggggtggctgatttgtcatcactaggcgtggcccttggatttatttaagtatcaagatgaggtcatgatgtgggaatgttcatggtttctgtgactggaaagactgaagtcagattcggatccttttgttgtgtgtgcactttccagatctgtggaaaatttacacacatgaaacaagtttggctgttatttcctcacagaggcatgcattgtatgtcttggtctctgcagcctgtgaggcaagagaagtgatctctgtgatgtggggaactggaggtgtggtcatactttcccttctgtgctactgtgagaaatgcatcaatccagcagagctctgtattccctccggtgaaggctgctaagtctgttgcagagataatcagtagatgtcccccctccccttctccagtcacctgtttgtttatttgttgccctaaagatctttcgatcattatttctgttgtcatttagtgagcaaaggtcagcgcaaagatgtgtggaaaactggctggcctcccaactcaacctggcacctcacaacagccaggtacctccacactaactgggaagcctcctgggtatggttctcaggtgcagtgacccctctgcaaatgcagggcagcctccaggaaattcttcagtcagtgggagggtcactagcctttgccaggtccctctcccaggcctgctcctgactactcctccctctcaggcaggaagacccacaagtctgaacaggagcttctgggtttcttcccaccagcaaagctggacatgcttcattgacactttgttaaaagccgatccaaattgcacacccaccttcccagtgcatccatagccctgggacacagaaaagcattatgttaatgctggacctgaatcttagaaacaacagggctgattctattctttctttatgcttttttaggcaccaggatgctgggtttgtcaccctctgtccttggaacaaacaaggatacagtgacctttccatcctggcctctgtgggagacccatgcagtaggatgtgcagcgaggcgggggttaaaagatggagttaacaccacgtcacagctcctgctcctgacttggggcaagtaggcagaaataaactccttcagatgaagtagccccctgaaaggcatatgtttttgcttggtttgagctgccccagccataataggacatagtttttggtgtccatattggttcttggaaaatacccccggcttagtatttcaccaggagtaattaccaggagccaaagacagaagaaaatgcaaaagtcagctgcagccctcaaggctttgcatcttgcatctgtcagacaggaagtgaggcagtgctacacactgggggcagggtggtgcaaccgaagagtaaaagtcaccaaacaaaggaagtgatggttcattcccctttaaaaacgtgaatatacctctgtgtccataggctactgcaagggctaagactaaaggtttggggctcccaatgatacaattcttaggagagccaagatgcatcagcccgaatgtaagtggcaggggacggagttccacctcattccagcaccactccccactccactcccattcttctgtaactccgtccccacctccacttagcctttccatcctaattagtgttaactgtcagcacagcctagaatcacctgaaaccagagtctcaatggagtaattgtctttaccatgttggtctgtaaaagatgattttaattgctgtagggggtgctgcctactgtaggcgataccatccctagacagtcctgggttttataaaaaagctagccatggttcctacctccaagttcctgccctggtgccccctctatggcagactgtgtcctggggggtgcaagccagataaagcttttccttcccaagttgcttttggttggaaagccacagaaagaaatgtaggaagtgcacacatgcgcgcgcaccccccccccatatttttctcatgttaattgagcacctagaatagtctggtcatgagtcaacagtgttaggcaatgcaaacctgccctcgcccttcatgggatacacagactgggctagaagatgttcatcaaataaataacataaacatcagttgcacctgcacgagccatgagggcaggtgcgtggagagaggcagaagctggggttagaggatctaggcttgaaccacagccaagcagagccaggtgacacctagggcatcctcctcatctaagccctacagcccactggaatccaagagagcttccacagatctgaagcatccttcaggaatgtctcgggtggagccaggacttgctgtcttgtgtactcatagaaaagtgctgagctagctgtctgcccattcaaatttgaaaacaaagacacccccccacccccgtgattcatgttgtctaaagaggcaaggcagggtccaggtggagagcaagcctgcacgtatgggtacgagattggatctaaaacctatgatccaccaagtatgatgactcatgatggtaatcccaatactagagaggctgagaaaggcggagcctgatttcaaggctagcttgggcaacgcagtgaatctcaggctactctcaattctgtaaactctgtcttaaaaatagaattagggccagtgtgatggcttagtgggtaaaggtacttactgtcacgcctgatgagtctgaacccaaagtctcacatagaaggagagaccaagccccactagttgccctctgacccctccccaacatgtgtcatgtcatgcacacataccccaaataaataatacacaataaaaccaaaaatccccaccccaacaataagccccactgttacctgcattcgaagggaattggtccttaaaaccggtgctccctgagcagggtttgctgtgtcccttgttttgagagggtcgttgcaatgggagcctgtttgctttccagggtcttgctgtggcccacctgggagctgggaccatgaggctaggttctctcatacccagctctttcttgggtctctctaccttctaatggtgacatgcaagctgatgtttaaaatgtcatcatgtgattctcatcagaaacccactgagatggtgcggactggactcactgtgctaccgtcttcctgtagaggacttggttttagaagggaaggagtctttgctcccattgaagtttcttagaagggacttgtttttaggaggaaaaaaaaatttagaggaagaaaattgagactagttcttgctctggggccaagcatggcctcagagtcaaacctttcttccccaacctctcacatgttagaattacaggcatgtgccaccatgcctggtaaattttagatgtctttgaatacacttagtggcaatgataaaagactgtgccatctggaatcctgttagtgtgtactctcaactgcggagaactggggaatggtgatagaacaactcagtgggtcacaagagtcctatgacttgcttgtcccttgtgcctgctgtggccaacagcagcccttgagctccaccctttctgtggccacctttggtggccttgtctccatggcagccttcacaccggtcacggaacagccgtgaatgtgtgctgtctgttattttcagaggggcagtgacatgctcagagtgaagcattccgtctgggttacttatctgtccctttgtgtctggggctttctgaaaagggtacagctgtctgctttctgggcctgacctgaggccaacctaaccatagacagaccaggctagaccgccatctagtggagccagcgggaatagcagacctgttggggccctttggggcccctggctgtttcaaaaaggctgacaaatagatgcactttgtcaatttgaagacaaaactagatgcactatatgctgaagggtacatttcatgtatctgtgttgagagcaggaacacagttttagatttttctccacatggtctctatatccccaccccaagttttcgtattctgcattaactatctatgttagagcaaagactttaaaaaaaaaaaaaaaaactatgggacatacaaactatatttttctctctattggctttttttgaggcctccacatgcacacacgtgctcccaaacatgaacatgcatacacgaatacatacccaaggagaggggagcagggctcttccattctgtaaatgcatacacatgttcacagttgtgaacattcatacatgtgcacacccccaaggaaaatggagcagggctctttaactctgcagacagtgagatatgactgtccctgccttagcatccccagattgtacagttaggccagtgtgaacttcacacctgctaataaccccacacatgagcagtggctagccgtgactccactggtctgtgcagcagggcccctgagtccttgccatgtgctagttagacttgggacacacctagaaaagaaacgggcatcggaggtgcccactggtcttgtgtttggtgaccattttcacttgctattcatgttgtctgtgctctgtaacctcagagcatggtggttaccattgtaaacctgcacaggcatccacagagtcccaggccactcatatctgtgagtctgagatgcagtgtcactcctcttttggtgaaaactcttggggtcaaagctaagaacttctgaacttggcattaagagggcagcaggttctgatggtgtttcagcatggtgcctgtgtgactgacttcccagaggcccaggaatggaacttggtctcatagtagatgttgagcaaaggaaggcatagtccttaagtcagactcagcctctgtccccaagacaccctctacccaaggtgtgtacatcccttgggacccagcaccaatgcacactgctttcagcctcctaggctgctccaagtcccactgaggcttctatctgagggaaggaagggccccagagaggcaggaaagatggggagagccagagtttaataagagtttctctttttactttttaaattacagcacaagctagcgtttcttgatttgtgcagttggtttggactttttgttgttgttgttgtgtgtttcttttgttttttagcatcaatctccagatcaatacaggtctttgaaatgatcataggagttgtaattcagtgctttgtaatatttgacagctgtccatttcccccacaggtagaagaaagaccagacaaagacttcgctgagaaggtaaggatttctgtaagcctctgccttagttatgaaacgagatggtcttgggtgaggctgacaggaacccagttacttggtgcttaataaagtaatcgaatgacagaggctactaagagggccacacaacatgatgttatatccccaaaggagtccatcatgagttgaaatatgagggacagcgaagagctcatggctaaccagacaccagtgagacagctccgaatgaaccctctttatcactagccagaagtccagtagagaaactgagtttaaaaaagggtgctctggggccagagaaatggctcagtggataaagtgattgctgcacaaaagtgacagcttgagttcaaatccccagcccacatgtaaaaagccggtgtgttcacacggacctgtagccccaatactgcagctggccatctagctcaccgtgcctcacacacatgctcatacacaaacatgatcacctgtggaagctaacattgacagaaaaggttctgagatgttcgacccgttggtaattttggttttacctaatcacatctgatcttcacccattccagggctcccgtaacatgcctagcctgtctgcagccacactggcatctctgggtgggacttcctcccggagagggagtggagatacctccatctccatggacaccgaagcatccatcagggaaatcaaggtaaaacactgggctcacgtgtgacttgacagaaccccttggacaattagttttggatttacagagacttcatttgtgaggttcaagatcagtcccatctcctcagcctgcctaaaacatggtgtgttctcctaacactggagcgagctcaggcagcatccctgggagtcctcctccagccatcatgccgtgctctccagaggccgtgccatctttcaacccatgctagcatgtggatatttgcttttcattagacactggagcattctggtcccctatccccacatccttgttccaggaccacagaaattgcccatcctctagcatcttttccccttgcctggagagtatgccctcccctctgtctgtagcatgccttcggtagactccatcactggattttaatgatggtttttctcttagcataacgcaggcattattctctgttaaacctttgacactgagactggtgccatgtgtttgacgagctcctctgtatattggaaagacacacagcccagcgccgtttgttaattattagtactacgtgtactgttaggtaacttgtgcaactgtgtcccaaacagggaaggattgagggcaggtgaccagaatgttgtgtccttcagagaacagagtcaagtcaaacagagggtgtgagaggcctggatttgtttggctaattttgtgggagagcttcctcatactcaggtctggctcacagggacccagctccactggcggtgacatttgccaggaggacagaagagggcctggagcagctgctggtgttcgacctaaactgcagctcctgtgttttaggaggatatggtttttttgttttgttttgtctgctcccctaaaataccgtgtaccagacctgaacatcctcagctaacagcactgttgttttctcgatgggctggaagggggaggggggaggggagggaatcgttgcaatcccatttagactctgctcttgggcatgaatactgttcatttgcctggcaggtgtttgccaggagattagctcaaggcagatactctccccgggtaccaggcacatggagagaagcagggtggatattgaggtctctgtaactgggatgtgctggcctctgcccccagaagctcactgtcagagttcttttggttagttgatgtttaaggtttattattgtaattgtgtgtgtgtgtgtgtgtgtgtgtgtgtgtgtgtgtgtgtatttgtgccacttgtgtgctgccaaggtcagaggagggtaaaaagatcccttgaagctggagtcacaggtggtcacagagccatctgactcgagtgttgggaagcaggaagagcagcaggctctcagaagcactgagccacctgtccaagctccgcccccacttgcctgttttttttttttaagacttatttattttatgtgtatgggggtttgccttcatgtgtgcctgtgtaccacatgcacaccaggttcccacagagaccagaaaagggtatcagatctcctagaactgcacttgcgaacaattttgagtctccatgtggatgttggtaattgaacccaggtcctctgcaagaacaagccctcttcacccatgagccatttctccagccccaacattttgcccatttttaaaaaatgtacaaacagtgcaagagacacctaaattttataacaatgtgtaaaaacatgtgaattacataaattgtaatgtgtataacactgaaacttatttttgcttttctttaacacctaataaaatacagaaggaaccatgcctcctactgccaatatgatggacccagacataagaaagccacagggctgtgtatgtgtgtgtgtatgtatgtgtgtgtgtgtgtgtgcgcgcgcgcgcgctctgccagttctctcctttgatgtcgtttgccttttgtgcatttccttcaggaacttaatgagttaaaggaccagattcaggatgtagaaggcaaatacatgcagggactgaaagagatgaaggtaccagtttgtgcaagtgtgagcccaagacactaacccaccttaactttaaaaagcctcacagaggtcccatgagcatgctcactgtgaagggcaccggctattgaaagtgtagggtcatgagaattctaacatggcatgcatctgtccctgtcttccaaatgcagtttctgaacacagtgagtccccagtggagaaggtgacagactcagccacctgatatgggatggtccttaacaccctccccctaggcttaaagccaatgtctcactttgaaagcacagcagacagacactagagggttttgcttctctttgctctctacggttctcacatacaagtgtcctcccagtttgctgtgctgagctcactagagccgccctaacgcacgtgcttccgaagcatccgggttactgcatgctgccaacgtttacttaggggaacagcatcggaaggtgtacgtgtgtgtgcactactctcagactgtgaaggacgtcgccataccaacaggaaatgtcctgtccctgttccttaacaacgctgaggtgaacaagtgccacagggaagctggtgccaaggcacacagcagccacatccaggagaagctcaagacaagtctaggatcgagcagtaaatacagatcagttccttctttctcgtcttctcagaaagggcccaagaagtcatccaaactccatggcaacatacaccagacagacaggtggcataagtcacatactaattctaatataatttctagataatagaaaaatgaagaccctggcctttcactcacctaaaaatggaaccacaaatcaactgggagccaatgataccactttgggttgtcatggtgtatacccataggtgggaccagtgctggagtccacagggcctcttcacagctctgacccttgagttggcaatctctttcttagactctgcatagttcaagctggtgactgccccctcttgctctcctggcttcactctcctgacatttaaattttagagcctgcaagagtgagagccaagtttgggcactgccaatattatctttacagcctctttcccacggctgtcctttcaaacaaatgaccttggtcattccaggaactacccagtaagacctgtgcaccttgttttatttcccatgagtcagaaatctgaaaggatcacagctcctttcctggttcccaagcctgaacccagcccagcagtggcttgtggcagggttttatttccatcagtaactggctccttcacattgagtaatgacttcagaaacccactgagctgctatggcctgtggtgggaagattctggctgctgaatcagtcgctggctctgctgccttcccaagcaacccccgtgccccacatgcttccttgtcttaacaagaaaagacattgttgtcttagttactcctattgccaacaaaggcaacttaatggaggaggggtttgggctcacagttcaaagatccagtccatcatggcagggatgccctggtcacagtgcctgtgcagttagcaagcagagaacaagacgtataggtgttccccttctccttcctatgcaagccaagattcctgcctagggatagcctgcatttagggtgggtcttccaggctcaattaacatagtcaacaggcaagccataggctatacttgttcttccccaacagctaaaaggtctttgtcccaaggatgggacagtgtcttctcaatggaaagagacttggtctcctttggcaattttgaaacaccatcctggtttctgcaggactcgctggccgaagttgaggagaagtacaagaaagctatggtctccaacgcccagctagacaatgagaagaccaacttcatgtaccaggtggacacactgaaggacatgctgctggagctggaagagcagctggccgagtctcagcggcaatacgaggagaagaacaaggtaagcatcacccgcctgctgtgctcatgaatgtagggggactgtataaatactgtgtgcattacatttttaagggatttttatttttgttaattatggcgggggggggggcagaggtagtatgtgcatgagtactctggcttgtggaagccagaggaaggtgttggatccccgggagctggagttagagaagtggttctcaacctgtgagtcacgacccttccacaggggtcacggattacacgtcctatgtatcagatatttacactatgattcctaactgtagcaaaagtacagttataaagtggctgtaaaaataattttatgattagggggtcaccacaacatgaggaaactgcactaaggttcacagcattaggaaggtgaagaacccactgggttacaggcggtggtgagcttcctgacatgggtgctggaaaccaaactcaggtcaaataccatgagaacaatatttgggcttaaaagccgagccatctctctccagcctgtgtttatgggtttttttttttttttttttttttaaagcagtgattccccacttgtctggaaagcccagagatggagagttagaacactgtgcatttgtcatacgtgtggtagcaatgcctgtgatcccagcatgtaggaagctgaggtagcttgggctccataacaaggctctgtcatcaaacaaaacaaagcaaccccagaggtgggggagataatttttgctgcatagcggagttcaggcatcagcatctctggaggcacctgcttataatcccggtgctgtggaggcagagatgggggattgatctctggtctttaccaggtagccaggttagcttaatcggctagctcctgactcgaaaggccaaggtgaggttagaaagatggcccagggcttacaaatgcatactgtcacgtaggggcccatgtttggttccaagaactcatgtcagatggatcaccagtgcctgtaaccccagctcctggagatctgatggctgtggcctccacaggcatccacacacatgtgcacagatccacacacgtacacataattaaacaataatgaaataaaccttgaaaaggaaaatagtctagataaatagctcctaagaaatgatacccaatccaaagtgaacttctggcttccatatacctgtgcacatagtgtatggacacatatatgcaaacacacaaataggcgcatatatatgtgtgtgtgtgtgtgtgtgtgtatacacacacatatacgcatatatacatatacatacatatgcatatatatgcttataaaactcagaaatctgtgctcttgaaatgtcagtatgcatagtttcaatgtgctcactatttatttgcatgaaaataaaccaccatgaaaagacatgtatttaaaagaacagacatgcttaaataatgcacaagtaggtgcttccagaatttcatgctaaaatccatttcctgcctttgattttatgtcagcttcctagggtattaattacaaacaacgaagattttagacaagtcatatgttattcctactcatttggaaaaggtagttagttattctgtttcgatactcacaccttctaagcccagaaaagggcagctttatatgcacttcaggatccactgggactcacaagacaggagcggttttgctcttacacactcccagccttcagcccagccgtgaggatcacagcagacccctagaaaaagaccgaaggctgtatctaagcaagagaggacctgggaaacattcatcacctgcacgctcacagattcatcttagaggacactgtcctgctgtcctctgtggagggcagaggaatgagtttgtgttattgcatgccttggaaacatcagtgacatagaaaaggcatgtttgtcccgaacaaagtgtggctcatgagaacatgagccccgagacagaaatatgccatcgagctgcaccctcagcgtcgtttctcacccataggagttcgagagggagaagcatgcccacagcatcctgcagttccagtttgccgaagtgaaagaggccctgcggcaaagggaagagatgctcgaggtgagccactgccttcttcccttcctgtggatccctcgctgttttagcctaggctgcttgacaaaatactgcagacctcgtagccctgacaacaaatgcatatttcctcactgttctgggtaccagagaccaggtcgaggttgcgcacagcaccttcagtgttgaatatgagcactcgtcctatccaccctgggacccgccctcatgcatcatttaaccttaatacttctgaacttatccgcacacactagtcaccttggaggccagggaatcagttacagcgttgcttacaatccagggttcaggctaactttccatctcttgaggagccggcgcctcccactggtaaagagcactctggcactcttgtgcttgtcttgggagatgtgataaaagagtccacatcctagtctctagaagttgtaaatatggaaaaaagatttcaagggtgagatcaaagaccttggtcatctgtgtgactctgacataatcccaggggtagccaccagagggaggcaggtcagatgctgaggtgggagctctgttgacagcagtgggggggggggggggttagagtttgtaaagaagggacacaagagagagtgggcaggttctaggaaccggagtagacaggctgttgatcctctcccccagtagactctttccagtcttaaatctgtcagaaagtatatttatgtgatttcatgaaagttgtggtcatatgttatcgtggctgtaggaaacaggcacaggtatgtgccaggtaacattctgatcagcagtgggacacagggactacagtggtcccatggagtatattacttagtgacattgcagccatcatttgcttactctgtgatgtttgcagaacaacaagctcacctatttcctcacctgtttctcagactgctgtcctactgctaagcaaaacatgactgtgcagggtttggtatttttgtttttataacacaatcaggactgtaattggcttgaggtaagatatcagccaagctggttttcttaatggaactgggagtagaacgaagaaaaatttccacatgctaatgaacttggggctggtgagatgagatacttgttggctgcctactggtcaacctccctatcccggtcatctagcaccgacttcttttctctgcttaattctttgtctgctttctttctgtctgttcctttcctcaggaaatccgacagctgcagcagaaacaggcgggttttatcagggagatttctgatcttcaggaaacgatagaatggaaagacaaaaagataggggtaggagtctcaagcctttgccaaacgcttccgggggggcggggtgcttcacaaatgaggctcttgcagaagctttggttttgggaaaaaaaaatgtttgcatgagagtgcctgtgaccctcatgtgatgcagcatgaatagcctgttggctaccccagcttatccagttggatggcaccagagctgagtatttgcagttgtctccctccctgctgcaccagagcagcctagatgcaatgcaggccatgcaaggagaggctctgggtagctcagtgtggagaatcaaactccagaattttttgaggtcatgtgatgatgtgggtggcaggtaccacaccccacaggttcacattggatctctctccatcctcagcagagaggaagagacagcccgaccacatataggagtgataaataggaccaagtcactgctgactcagagtagcacatggcacctaaaaaacagcaactcatgtggcagggtcccagtacaggtccagaagtgatcataaaaatgatcacagtatggagccccaccattctactttgacaaatttataagctttggctaagagactatgtgtttctctctctctctctctctctctctctctctctctctctctgtgtgtgtgtgtgtgtgtgtgtgtgtgtgtgtgtgtgtatgtatgcatgcacacatgtacaaacatacttttccagaacattttttagacaacaaatacacataatcgatgtctaaaaatagcttaggggcaaaggacagggttgcccaggaatgtgcaagcacaaggacctgcatttaatcaccagaccagacgtcgtgacacatatttgtaatcctggcactggggaggagggagagctagagataaggacattcctaaggcttgatgaccaaccaacatacacagggaactccaggacagtaagagattgtctctaaaacaaagatgatggcatttgatgaataacacctggtcctgtcctcagagctacacacagagacacatggaggcataaacacaaacataaacaggaacataaacacaaaaatgtctaaaattattgactagggttctgtagcagccattctcgttctgcactgattgatctctcactaaaaggactgtgtgattcctgttagctctccagcaccttgttgtaagatgcaaacagagctcacgccaggcagtgatggcacatacctttaatcccagcactgtggaggcaagcgccaggccagccagggccacacattgagaccctatcacaaaaacaaacaacacccctctccaaaaggagaaaagagaaaagaagagaaagccaaactaaacagtagtgggatatcctgggaatgtggctcggtggtagagcacttgcctcctatgtgggaggccctaggttcagtctgcaatgagaaaacaaaaggcaggaatggaagttatgaagcagccttgctctatagcatcccttgcttagaaaccctaatgtgtgaacagtagttggtctagcctgggataaacccaacagcttttttttttttctcactggtgccctggatgacagtgcttcctagaccctgcttcttacttatcttgctatctgtgctaatctctccctctcttcatctctctctccgcccccccccccccgctgacccccctctttctcctctgctgcacgctcaggcattagaaagacagaaagagttctttgattccataaggagcgaacgagatgaccttagagaagaaacagtcaagctgaaggaggagttgaaggtacgaaaccaaagtgcagcgccacggtgacaacttagcttctgtgggtctgtggccatgggcactggctctgttttcatcactgtcatgttaataaagtcgagctttcggttaactatccctaggaagtaggtgtgccagtgcccatatgtgcttctgccggaaccatcaggtctttccaagctgaacaggtctgcaaagtagctcagatttctagctctgaatttggtattcgtctaaatatttttttaaccctcattagaatgtatgtagttccttgtttaagcctcttgtcgaggacttccttagctgaacaataagtggagggatcccacattcccatcagatcatagaaaggacaagttttgcatcttctaagggccatgtcaaggggaatcaagcagacccgggtgggttcccagactgctgcagcagtagcagtgagaggggtgtggcatcccagcagcccccagatgcacataccagtgtcatttcctgaactccgctgtcaaagtcagagcaggaaagcagcaagatacaggcttacagctaagatctaaatgaggctctgtactggctggttttgtgtgtcaacttgacacagctggagttatcacagagaaaggagcttcagttgaggaaatgcctccatgagatccaactgtaaggcattttctcaattagtgattaaggaggaaaggcctcttgtgggtgggaccatctgtggattggtagtcttgattctataagagagcaggctgagcaagccagagcaagcaagccagtaaggaacatccctccatggtctctgcatcagctcctgctccctgacctgcttgagttccagtcctgacttctttcagtgatgaacagcaatgtggaagtgtaagctgaataaaccctttcctccccaacttgcttcttggccatgatgtttgtgcaggaatagaaaccctgactaagacaggctcctagtccaggctgtgtgcagcagttgggaaccaggaaaaaaagtgccgtgaaccaagtagatagtgaggaggtactctgcaacagaggcaggcagttgctttccaggggttggccatgtccttggcacaatgatcgtttgaagaaggaagcatccccttacaaatgccatctttatgcaaactgcactctgtctttccacaacacttacatattccttctttatcctgctctccctttgttattatttatttattgttatttatacaagtacactgtagctgtcttcagacacacatcagaaaagtgcattggatcctattacagatggttgtgagccaccatgtagttgttgggaattgaactcaggacctctggaagagcagtcagtgctcttaaccactgagccatctctccagcccataccaccctgaacactcccgatctcgtctggtctccctttttaaagacaaagtttatgttgaaaggtttgtttacttgatatttcactttcgtggcagcccacaggtcattgccctagtgaaaagaaagcctttttaaagtgtcttctcaccagacaatcagttgtagatctccctgccttgataagactgtgaacatggtacctaggcacttctccatccctgtagagttagaatctacattaggagaaacagcatccctttatagttgacagtttaacctggtctcactgagtgttatgttaaatctgtttttgctcccagaaacatggaataatcctaaattcagaaatagccaccaacggagagacttcagacacagtaaatgacgttgggtatcaagcccctacgaagataacaaaagaagagctgaatgccctcaagtcggccggggaggggaccctaggtaagagcttttccttggctcctttcgttgtttggtcagcgagcactgattcatctttgtacaccatcagattggagtgattgtcactgatcgattaatagtcacgcggcatgcccttcattctgtcacttttagtaattcttctggacaaaccacgtgatcacccacggtgctacgtagcatgtatttttgtctagcgctttccacccatggctcaaggacacgtttcttttttcctttccttttctttttattatttatttatttattttttgcatcccaaggctgagtagaaagaggtaggctcaaagttcagtggtagagtcgagagttcaataatttgggttttctccaggtgtgttccaattacgactttcctcttaatcttgtgatggagttgtggaagctgtgacatgggtgagcaggccatagtttcccgccagcctggcacacttggggacccaccatacaaacatttggaggatgtgaggtgcctaagtgggacacaagacacctggtgggtaacctggtagccctgatgctgctgtccccaccctcacaatggaaggcagccaaagtagtggggcgctccttgctgtaagtggggtgtgctcaccaggggttggaaatcacctaccttattcagaggggctcctctgtatgccacagttttagcttctgttaagaatatatacaattgtgaaatctaatggattatagaaatattttctataattttcacagataaaatgatttacaaattaatgttactcctaacttatggctttgggataaatttagttgctaggtccccaccccccccccccgcccccaaggccggagtctgtgactatattgcaaggcagaggcttttcttttgtcttcttggtgtttgtgaccatgtgaaagtctggaagcctcgctcctcaattcctaggagcttccacagcccttgtgattgttagagcaacgtgctcttaaccagtgtgagttgtcaaaacaggaagagtccgtagtttccaccattcctccaggacaaccccactagggattggtcctgctcttcttacctccatatacagttgacatatccctaatagtcatgtaacatggctgaaagaagagatgccactttgtcagtgaccttccccgcaaagggttttgatgctgtacccagtcagacaagtgctgtggggacatcccggtctgcttattttagatttacctatgtctgatgtttctttgacgtgaggttgctacatcaataatcatacatgatagtagaaaaatgtaaagggtgaagttaagtggcctctaaataaaggccatatatttttccatcattttcctggcatcagagatccactgtggagattttccagttcttagaatgacaggctttctcttccagcaaaataatgtccgtgaggctggggttttattgacctcttgatgaattaagcattcatcttgatctagctttgccttttgttgggattaccaccctcttgaggatgaaagatcctatgtgcccgaaggggaacattatctgaagaagacatgccaggcagcaggacctggactgctgtctacctcatagggtttaccctagcagcatcttccttgagactggctttctagctgagtttcctaaacagaatgttcttttgagaaaatgtgggggctactgttagggctgtgagattctgagtactcaagtagctgagagtatgaggggctgggactcggggttagggttaggggactggaaggaggactgagcatttgagaagactttgtgtggctgctggcatgtggctgcctgcctgttccacagctctgtctgccaactaagtcagaacctcacctttaaaagtcattcctcccagatggtgtcagtcactctggccttggtggcagtggccctccgcttaccaaaaccaacaagctaatgcaattgctgctttgacacacaggcccagcaaatgcttgtttcccctctcaatatctcaatatctatctctgtctctgtctctgtctgtctctctttgtctctgtctctctcagtgtgtatgtctgtctctctctctctctctttctgtctctgtgtgtctgtctctctgtgtgtctctttctctgtctttgtctttctctctctctctctctctctctctctctctctctctctctctctctcggagaaagttgggtggtaactagaacatgtatttgcatttaaatatatattaagtgcccaccacatcatggggtcccttcaattctctcaatggtcttttaggaaaagccaaagaagtggaggtgaaaaaggaaattgtggagaaagtggggcaaagagaaaccttacagaattctgagcaagaacagcccaaacccaacacaggaaaggattgtgtggacagaggggtgtcacatcctggtgagaaggctgagaaccagagacccgctgaagacagtgccctgtccccgggaccactagcaggggccaaatgtgagcaacaggttcagagccaagatcaagagaatacttctgacctcaaaaactcagagcagatcgagtcacacaaggtcacaaacaagtcagatagtagggccagtaactcccctgaacagtccagctgcctggaaggtctagacagtgaagtgccagggcccactgaggatttgaaaacagatttggggaaaggtagctttgaaccatgtccagactacattttggggcaaacagctgaaattgacaaggtgacctgtacagactcaagaggcacaggtggaaaccaaagggaggatgaggtacaggcaggggacaccacagttgaggaccaagtagggacagtggcttctggacctgcaaagcaaagcaaaggcaccgagaatcatggtgaaagttgtctgaaggatgggctgggacagagctcagagagagaactcacccaagaagtagctgagcctgaggaagccatcgttcagatcccacaggccggtggagagaacactattaccaaggcagatgatgccgaaggaagggatgagaagcccatccaggcagaagcccaggcaagccctggagctcccataaatcagagcggccatcaggacacaacaggaccaggcagcaccgatgcccagcgcacaccacctcatgcaaaagagcgcaagaaacaagggaagagcgagcagcaggcagaggccttggattcaccgcagaagaagacgaagaacaagaagaagaagaacaagaagaagaaagctgcaactcccgcggaaacctgcagagatgccaatgaagagttgaactgtcaggacccagatgtgggtgacatggaggaggaagagcggctccaggtcactgacaagaaacaggcatcaggaagcccagagcagaaaatcagagcgggaagcagagagcctgtcgaagatcctcaaagtgggtcgagtggaaaacagaacaaagtggaagaggatggtcccacggaaggtcccacagacatcttggatcagaacagtccccagtgtgaagacagggagatctccccagtgggagagaaaggtccccaatgcgatacctctcagataggtagtgaagagggacatgtgacctcccaacacggtggtcaggcagttgagaaccacaacctagataacagtgacctgtcagggcagctggagggcttcaattcagaaagtggagggcaggcaagagaggaggttgggaatagcaagaataaggaggactgcaccatgtcgtgaggaggcagagcaggagacttagcccagtaagctccgtccctcagccacccactatatcagaacctccatccttccgctccactgccctgctgaggtttattgaatgttccagtttctgtggatgctccatgtgtccatcaccaagtatcaactacttaagtcttagactgttacctgtagatttgtactgaaccactgatcgctgagccagtactgttttttactagcagttctagctgagaacattccattagcatcaggggacaccaggtgtgcattccagcctgaaggttaaaacgtagcgtttgcttcaggccaggacgaatgtggatgttcttgaccaaatgcatcagtatctggttgaaatgaccaaatggggtgttcgtagatttctgcattataagcagtgaatattcaaatatgtgttattcagatagatgtattttcatatttgatcttaatatgtacacatagcctgtttggtattaaatttaaaggagtagactgataagtagcatataggtcagtgggtgagaggagctacatctagggtggagatttatcactgtagagattcagatacgttccagaaaacacagggagaccatgtgcctttacctcacataaatactttattttgcaccaatgctcttggatcttgttgccaatggtacccaaattaatattatcaaagacttttattttcactttatgcgggtgatgtaataaattcattttatattgaatattttatttttactcttctctgctaatgacacattgaaattatatttcctactttagtatcaaggagaaacagccattatttttttttaattttaaagttatctttctgcccgaatgtctacttaaaaattgcaaaaggctgttcttatacaaaaggactcattagattataagccgacattttgtgtttgatataaatatttttatttgttgtttcttgatattttcttattggaaatttattattttatctgcctgaaggaagtatgtattttctatctaaagaagcatttagaaaatgactgtaaagttgaatttaaaagtattagtaaataatcacaagcggatgcactatgtgactgctgttgttgacatgttatggagtcatgtgaactcgtactactgttacaaggtagagtggaatgcaaaataaccaaaacctcagtgaaatttgagtcaaactgaagagtcatatcattgaaataaaagcattttctaattttacaagcctactggttgttctggtctttgagacccttgacctctaaccctggtagctgcttgctcggtgcccacatgaagtcacttctggcttcgagctccctcaggggttccagaaaatccagttccaagtgccttcatcattagcaagtgagccccactgctgagaggctgccctggcgctggtgtggaagccgagagagcagccccaaacccatccctgtactctgaacgtgcccatgtgttccccactaaggaaggcttccattggtgctctgctaaagtgtgccagtgcagagctgtttgtggaagagaataaaagtggtgaggaagggggctggagagacggctcaatggttaagagcaccgactgctctttcagaagtcctgagttcaattcccagaaaccacatggtggctcacaaccatctgtaatgagatctgataccctaatgggatccaatgccctcttcttgtgtgtcttaagagaaagtgaggaaacactggctgtgtgtgcatgtcctgagaaacagggcagacgagctgctgcatgctctacacctatgccatgaacatgaaataggagggaggctgcaggctgtgccccagggctctgcagggccagaaggctgcagtcagtggctccagcttcggccaagcccccagttatacttcaactcaaatgtctactctcactcagtgcctggaaagctacctctaggggtgtttagagggcttggggttcttgttttctattggttgctaactttctgagaggccacctggtctctttatgccaaggggaacatggtaaactatattcccagtggcctgcctctgaaagccaggaggggtgttttctgtgctggggcagcatggtggtcatgcttagacaccgttttccagggaaaaggcattccacccaccccttcaccgcttctgctgccccttacacgcttgcccctttacacacacttggctataatggccagtggctgaaggagggaagtcccctgtccatgcacaccccttgagtgctgtgataagaaaagagaaccagttaagccacccttctcttttctggaaggaggcagcctcgggaaaggtggaagctgccattgttaggttctgtcagagaaggtaggaggagggggcttcgggaaaggtgcagccagtgcgtttcctgggcccccaccatcacatttgagcatacagggggacaagtcccttgggcaatgggggtgggggacgtgatagctaaaattatctcatacagtgcaaagtacatgcggaagacattcgccacaaacaaatcactagacttgggaaagcttccttttgcctatggaagaagggagtcccagctttcagagttgtggattgggtattttggccttgagtgatcctaggatggagtgtctaagatacccagacttcaagatgaccaaaggaatcaggagtttggagaatcccagcacttgtttgggtgcctcaggaattttctagaaggtgctaactctctgcttcccatttgggggtctcaaaactatagcagaaagtttgctaaaatttaacatactagaaaaacagattttaaaaaaaacctttaatgagctaaagataacttgaatatctaaccgactcattttaacatgcgtaagttaaagtagaacacgaaagggtcagacggttgttaattcttgacaagtaccggctccaggggcttgggggggatggggaacttgggttaggatcccttaaatgaaaacgaaggcgggtttcacgtgtgtgcattttcacccacaactcagccaagttaactactttctggacagttctgaaggaggcaatgtggggacacgttcatgctggggatgggagctctaggccaggttttaagggttccactgagaggttcaagtcctgacctgagaagcccacggacagcagtggtcaggaacaccctaaggctgtgatcccttaggcgttaggagcatcacctacccatcacactgggcctccccttcatctgaaggtcaatgcaagatgcctgttcatggggaccctgggctttggaccagcttgtagcagataaactggaagtggccacagggtcttcataggcattcagcatccaacatcctgattttgcattcgggtattcagggtcagttcttcctgtagatcagagagtcatttagtactcttctagagagatttggggggctgactgacagacacacgcatacacttccttctattccttctgttccatcctgttggaggtgggaggagttaaaggaattaaagccattactgtgcttttcttactaaaaaaaataataacagcatattataactggcttggtggacatggtgtcattggctggggggttgtaaagagagttaaaactctgacatcgggtgcgtctgtgcgaacaataggtgtggagtatatacatttggaaagagttctccttgaaactttagcgctcatgaaacagcaaccttgcacattgctaaaccgtgaagcctgtgagatcttgtgttgcagcgtgtttccctagcgttcttgcatgctagcctaaatagaagagcagcctgtttgcatgagcccggaggctgccccaatgagaagcatgtcgggaggctggcaccaccctctggctgagctcctccccgtcctgtctgtggcctcatccatcgtggtacgtgtttaacctacactccatccctcattccactaaccgatccgtctgttattctgttaggggcatgctaagaggccaggatacagattcacctatatgtctttctgatttcttcagacgttaggttgaaaaagctcattgatgaacgggaatgtctgttggaacaggtaaccgtctttctattgttttacaacactttgagtggggtacctgaaactgtgcacctcctcccaacttccttcctgctcactctggagaccccaaaatatgtgcttgagaacaaggctggcttgatgattcgatccaaatggagcagcgttgtcacacaaggcttagggaggccttggagccatagggcagcctttgggacattccacatgcattgctgcttcagacgaacgttgctgtggagggtggagatgctccattgagagacaggatgggacatgtacgtccacttgtacctgcacctgggctttgtgcagcaggcatgtctttgactaactgatcaaaattggtttgaattatcattttctctttattcttgagagtttcatacatttatgcaaggaaataagatcatagccacctcctatttccctccttcaactccaccctcaatccacatgccccctctgaactgtatgttctccctgcccaataatgcactaaggtcaattagtggctgcctttatgtgcatgaatgtggggccatcggagcacaggaaacctagcagcaggaacagcctaaaaaactgaatgattcttccccagatgctatcactgagtcccaatagctctacagtaagggttggggcctagagagcacctccccctgcctatgctgaaattctgactggctagatctcgtgcaggcaacacagctgctctgagttcacgagtgaggagctagctcacatccagaaggcagcatctcatgcgttcctccccccatagcccagttcctacattcttttcgcctcctctccgtgacattccctgagccttggggagtggtgggttataaagatattccatttcgggctgagctgtcagtctcagcactttgaccagctctgagtctgcatcgaggtctgctgctgcaaagagatgcttctctgaccaggcctgagcgaagccccaggactataagtattaacaaacatgtagaaggtagcattgtttaaaccttgaggtatctccatccctctctaacttcaggaaatgatgagggctctgtttcatcattcctgtctgcgggatagttaaagtgattccccagcctttccccagggaaccatctcctccaacatttcccgtagccatatgggtctgctcaccttttacagttgttatcctttcagaatcgaattaaactgtcagctgctcttctgaccccgtatgagagagaaatcctgtaagaccccctccttaaaggttgaccagtgcctctgggacaccgagcagcttgaccaggttctaagcagaagcatacagttttactggggacttcagtcccatattcctgcacgtagggacctcttttatatctttgtgaataagcatcagcatcatgaagagttaccaccaactcttaaatcaccattcaaagtctgtgtgtgnnnnnnnnnnnnnnnnnnnnnnnnnnnnnnnnnnnnnnnnnnnnnnnnnnnnnnnnnnnnnnnnnnnnnnnnnnnnnnnnnnnnnnnnnnnnnnnnnnnnnnnnnnnnnnnnnnnnnnnnnnnnnnnnnnnnnnnnnnnnnnnnnnnnnnnnnnnnnnnnnnnnnnnnnnnnnnnnnnnnnnnnnnnnnnnnnnnnnnnaagtggaaacaggtggattcctggagctgactgaccagtggataagctaggttcagtgagagaccctgcctcaaacaaacaaacaaacgaacaaacaaacaaaggagacagaaagaaatgaaaggaagaaaaatatggttgaacataatggcagaacacactcagtactaacctctggcttccataagcaaatacctacatatacaaattctcatacaaacacatacatacaacgtacacaaaaattattgtccactaggttataaaagaattcatgctgaagttataaagtctttgcctcgcctactcccttctgagatgagcgctggccctcagatgcttttagttagtttatttggattggcctttattaaagagaatccctctggccggtggagcacaggctagactgtaacctttccatgccattctcccctatactcctgcgacccctgcctctaacacgaccccggggtcatgctaacagcaaggcagtagcctgatgtatttattctggctaagacaggctctaaactcagctcttcagtttccttttgaaaaaaaaagaaacaaatctattttattggggtgttttcagattaagaagctcaaagggcagctggagggaagacagaagaacaacaagctggaccttcttcgagccgaggacggtatcttggagaatgggacagacgcgcatgtcatggatctgcaaagtgagtattgagccctgtgtgggagcgcacgcttttgtgtgtgctgattgtaaacactcggggtaaaggatacccagcattccctcctgtccccgaaagctcctgggttccacagcacagaaaccttttctgtgagtaaagcaaagtggggagaaggcggcataagcctgtgggatggagcaggtatcccaggatgcacaagtgggtgtggtcagaaacacatctgctttgcttcgtgtgataggcccgtgttacgctagtcaactaaaacagatttgcaggagatgagattatgctcagcccctctccttcgtctcctttgtcacatctctgggggttccttcttaccttggtcttctacgtacacataagaagtacagacatgctcccagccaacgcccagagagggtgcgccttgtctgattctgtggaggctgagattagactgtgaagactttgtgaaatgatgattcccaggaacagaatgttctagagcctgagaaacttaacccgtgttcctttctttgtcaccctttaggagatgccaacagacagatcagcgacctcaaatttaaacttgcaaaatctgagcaagagataactgccttagaacaaaatgtatgttgactctccgcagtcctgagcagtctggatggatgggtggttgtgtggggtctgaatggccgagggccaaaagcaacagagcagtggtcctcaaccttcctaacatggtgacacttttatacagctcatcacgttgtagtgacctccaaccataaaattgtttttattactacttcatatctgtaattttgttagttatgagtcttaatgtaaatacatgatataatacaggatatctgagatgcaactcctgtgaaagggtccttcaacaccctagaggtcatgaccttgcaggttgagagcctcttcaagagactttgcaaatcaaatggggttctagggaggcaggaagatgaccctgagttcagattccccagctccatatgagaagttagggatggcacagcatgtctgtattccttgcctggggacagaaggatctccagggtgtgctggccagccaggctacctaatctatgaagttcaggctcagcgagggactttatctcaagtataagatggagagccaatgaggagggtgcctgatgtcaccctctggtctcacatacccacaggtcctgatgacgtgggttaagaaagcaagtctcttaaggcatctattggctttagtcttttgttgttcttgagacagggtctcaacgtggcccaggctggcctcaaactcactatgtagccaagggtgacctcaaactcctgatctacctctcctgcctctgtttcccaagtgctgagattacaagagtatccccatgcctggctttcaagacgttgcttgcagagtcgggaagggaagttcaggacaagttgtttattagaatctaagttgtcacagtggtactcatgttttataatggctgtaataacaaaacagctcctgtcaatgtggcttgcagatgtttcaaactgtattatttatgtgggggtgtggctcggtctgtaaagtacttgtaaggcagcctgaattagatcctcagaacccacatgaaaaggtgagcacagtggccagagcctaccattccctgctagtgcttgcagccagccagcctcgctgtaggccagtgaggaccttgtctcatgaaaacacggtggacagctcctgaagaacaacccccagtgctatgcacccgcatcacgtacacatcaatacacatatacataaactaatttaaatagttgtttattcaacatatgtcttagggttttactgctgtgaacagacaccatgaccaaggcaactcttataaggacaacaactaattggggctggcttacagcttcagaggttcagtccattattgtcaaggcaggagtatggcagcatccaggcaggcatggtgcaggaggagctgagagttctacatcttcatctgcaggctgctaggagaatattggcttccacccagccaggtgtggtggcgcatgcttttaatcccagcactcaggagacagaggcaggcggatttctgagtttaaggcaagcctggtctacaaagtgagttccaggacagccagggctacacagagaaaccctgtctccaaaaaaccaaaacaaagcaaaacaacaacaacaaaaaaaagtccacacccacagtgacacacctactccaacaaggccacacctaatagtgccacttccttgatggagcacatacaaaccatcacagcacactttatgcccacacatctttttccttgagcttctagcctttctccccacagccagatgaacaaacatggggccctcccacctctgcatcctgggtccaaggggcagcctgtgtcccattctagggtgaggaggacaaaggaggcactatcccctcaaatgtggatatacgtgccagaccttttcataaaaacaaagagtgatgctatatattcagcctgatcttgaattttgatcctcctacctctgcgttccaaattctaggatgtggacacacaccttcacatccagctatggacacaccctcacatccagccatggacacaccctcacatccagcatgggcacaccctcacatccacacgaagcctccctcctctcttacgctgtcattactggccttccctggcagcagcctaggagatgagccaaggtccagccagcatcatctgccttctgttcagccaagaccagggaacacaggccagagggcaatcagtatcttgctctcatgcccagctttttatttgagttctgagatttgaacttgggtccttttgtaagcactttcaagtcccatgagggggttatgaaagcaaaggggccttttgctctcaagatgggggtcactccgaaatgctactagacgagttagtcagagagagctgaagtgatgtccagaatgccacactgtcactcacaccacgtattttcagtttcattaaatcgcatcctttgatcgcaaataaagcaaacagcaaaagaaaacagtgaatgagtttgtgtcagtggctttcttattattacctttcaggtaataaggttagagagccaagtaacgcgctatcgatcagccgccgaaaatgcagaaaaaatagaagatgaactaaaggcagaaaaacggaagctccagagagaggtaaacttcccaggccctgcttttactcctttggaaacggaatgtttaacttccctgaggagatcgggccaagttgttcacttggaaaatagtgcatctgctcggcaggcggctgcatgttggagtgaggtcgcggttaataagtgaatcattcccatatatattataaacccagccttctctgttccgtcccgacagctgacatgtgttcagtctttgaccattgctctcctcactcaccagacagacacccaaccaccatcaccatggtttctcctcactcaccagacagacacccaaccaccatcaccatggtttctccccacttaccagacagacacccaaccaccatcaccatggtttctccccactcaccagacagacacccaaccaccatcaccatggtttctccccactcaccagacagacgcccaaccaccatcaccatggtttctccccactcaccagacagacacccaaccaccatcaccatggtttctccacactcaccagacagatacccaaccaccatcaccatggtttcttcccactcaccagacagacacccaaccaccatcaccatggtttctccctatccaagctcagtgatttgtgaggttgcttgggagcctgaggaaggaggtaggaggtggagtcttttttggtttggtttggtttggctttggttttggtttggtttttttttttgtttgtttgtttatttattttttgtttttggttttccgagacagggtttctctgtatagccctggctgtcctggaactcactttgtaaaccaggctggcctcgaactcagaaatctgcctgcctctgcctcccaagtgctgggattaaaggcttgagccaccaccgcccggctaggaggtagaatcttaggtcctggaaccccagccacctgcatgggagctggtatggaaagcagagccatgggttgggtcccagcaactgacagctcctctagaactacctccctaggaccagccctctgccctgctgtctgctggcctcagagcaacctgctcacatggctatctctatggtacccaagccctctgcccctggctctaggctgggactgtttgagactcttgacattcaagctttaaatttccaactacagagaccttggtcccggctcccccacaccagagagttaccttctctagctggtccaggctctgctccatctgtagttgttggctcactacattcatcatttctgagtccatcaagacccacaggatagggcaggtctggagtcgttccagatgaggagcatctcctagttaagaacctagacctgaagtgagtcatgttttgttattcagttaagagtcacacacagatcccaagcagtcagtctggagccgcagcctgtgaatatctcttcatctctaaccatgcctactagccagagctgatctaatgctgctccatcaacactccaggcccctgcctacccacttgctattgaagaggggccttcaggctctctcctatctttctgccccatgactggtgtgtgatattgtctgtgaaagctaacatcccttccccccacagccaattaacaaatatttaagggaaggggtggagaaaagaaaagaaaatataggtcatacttctgatatttgattcattcctttggttcaaaccatacatgaaactaataaaaaatactcttctgggagcctgggacccatgtcaggggtggattgcacgctgagtatacacatggtcctatgttcaaatcccagcaccaactttttttttaagtttagaaaaatattcttgcatgcaacatttattgtaaatcatttgaatttattttacatcctgaagagtaaatacactttttctttgacacaaagagaaagaaagaaaaaaagaaaagaaacatatatagatggagagatggctatatggctaggagtactggctgctcttgcagaggacccacgttcagttccctgcacctacacaacagctcacaaatgtctgtaaccccactttcagggattctggtcctatcttcttgcctctgtgggtacctgcatgcgtgtggtgcacaggcataagcttataaatagaataaaataaactcaaaacaaaataaatgaaataactttcataagtaaaaatgtgaccaaatatttttaaaagtgaaaaagaaaagagaaacgtgcacatacacacaacttttcagattccagtgtggctgggtttttgcagtgctttctgatagggctagctgcgtggccatgcagagccccgccacgttgggagaaagcaagctcatcgccctctctccttcttccagcttcgctctgcactggacaaaacagaagagctcgaggtgagcaacggccacctcgtaaagcgactggaaaagatgaaagccaaccgcagcgctctcttgtcccagcaataaataccagcagcaagtgggcacctctctggggactcagatgcccagcctggcttatgagcttttatctgtactgtcgggagcattgcatctttccctgcctccgagggaagaagtgcttccatgcaagggtcacccggggagcccagcagcaccagatgcctctgtctgcagacccttgccctggccgggatgatactcagagcctgcaggtttcttcataagcacactgggtctcacgagagctctggacttgatgcacaggggcctcttaatcccaccaacaggggtgactgaggtgggggttaaggtgggacttgatttttcttttgtgtcttgctgaaggttaagggagaatgttccagtgttggggacgatccgtggtggaacctacagtcccaatgactccagtagtgtctcttagtctctgcttcccatacacaaaacactgtggaaccacaagccattaccaagcaaagctcctcctttggagtcgaggcgatggtctagacgtaaagtgaccttaagaagactctttccaggcaacagatgaagcttttctaagggacttttgcattggttcagttataagagtacttttcccagggtcattaggctacggtagcttcaccgaaaacaacagcttttcatttgcattatttaaaccttatatttgaaattgaagttgttaacttcttttaaagaatgtactgctagaaaaaaacattttaaaaatgaaacgttaaagagctgtgtgggttttgttttttacttttaaaagattttacttttatgtgcatgagtgtttgcctgcatgtgtgtatgtgcaccaccatgtgtgcagtgtcaggagaggccaggagagggcgctgtatcgcaggactggatttacagctggttgtgagtcaccagaattgaacccaggccctgcagcctgtgctctgaactacagagccatcacttctatccctgaagtcaagagagaactgaacagaagacagggtttagatagggtttcaggagtggccgggtggggatggggagctttccagggtgaggcttggtgggatttcaagtcctaagcttgggttttttactctgtagggtggggtctgggtctggccattacacctggcagttggaggtgctcaggggaggggcctggccacttgtgccttgaggggctgctcagtccccctggggaacctctcctaacccttctgggccagccaacctgcagtaagacagtgtgtgtttgactgtcttgtgggttctcccacactatcttaatataagttcatttaaccattaaaaaagactggataattcataaagtgctggccattgcaaacccctcctgtggcacctggacatgaaatccattgttttcccttatcttttctcatttaatttctatgatgacatcatgcagtgagtatcattgcagaaactcaagagtctacatcacacccagaggaacctagaacacaatttcaaagtttatcccataggaaagcctttcctgcaggtgacgctcttagggaattgctgctagctttttccttccctgagacccagccttcctctaccttggctctgtttataagctggtgcatgcttggtcactgaggtaaatattccagacactacagaatgttgagctgtgccctgggtgtctaacctcagatgctacaggactgcacttgaaatcactactgtcaatgggcaccaatgctgtaaactggattttaaaaattgagagagagagagttgaaatcttgcatcagaaccactgttattttttacaagttatattgacttacagaaataaaatagctttaagtcagagaagcccattgaaaagcacaaacagggccaggtgtggtgggagacagaggcaggtggatctctttgagtttgaggccagcctggtctacaaagtgagtccaggacagccaggctatacagagaaatgacctcaaaaaattaaaattaaaaaaaaaaagacccaatcccattcagactgtactgagatggcattttccactgtatttcactaacagctaaaatgtcaaccagaatctactctgggcctggggcggtggtttagtgtgtaaagagcctgatgtacaagcatgagaacccaagttcagttcccagtaccctcatctgctagacatagtggcatgtgtgcctgtaaccccagcactggggacagagcaggaggatcctggaagttagttggccaacaaggctaaatgatacagcaaaatccaggttcagtaaaattatggaagcaaccaataaaagatctcatgacatcaacctctgacctccacacattgcctcctgggggaatgcactgttgaatgtgtgcacataccacacccacccgcacacaccaccttttcatggatttgtctgtctgtctgcttttaagggtctactatttggagacagggtctcattgcataaccctgactagcctaggacttgcgatgtagaccaggctgtcttcaaacctctgcctcccaagtgccaggattaaaagcatgcaccaacacacctggctattgatatcttattagttttcaaatacagaattctggtgagcacaatgccacactcttagggaatggtaaagggatatccaccataaggagatggttaaggtaaatattatttggagtttttatcccaccttagatcatttagttcccaaataaaatacacaaatcctttaaaataagccttaaagcactagagctggccagatttcaaccctctatgctagtttgtccactttcctgtcaaaatcccagagacatcacttgccccattcagcctgggctgctcatactccaacagccgacccccatgaccatggctctcacatccacctaccccacgatgccttcttccttcttcctccatgtcccctctcctccctctgggtccatgcctgagaccccaaacccaggaacctcactctaccctgtctcttctgcccagcccaggctgtaagcatcctttttaaccaatcaggaataacttggggaccaagttttacacaccaaaagctggtataggtgaggacctcctcatcttggcgcaaccggatcttgaggtacagagtttagcatttgaatacagaacaacaccagaccaatctgctacaggagactgttctcagtggtgagcagggccatctcaaaggctgcccatggtgggatggaaaagcatcagaacttggctgggtggaaccagcaggtttggaatggggcaatcagatctgttggtatcactaagtatcacaagcagatgtggcacgtgtatatatgcctgcgtgggtgtttagggtgatagagctgctgtctctgacatacctggcttccttccctgcagctgcacaaagctgccatctgatccctggtgtggaggatacttggggctagaggatccctactcaggaatcagagtcctacccgggagcctcagggacatgtccttgtcatgtaagggatagacagttgtcccctagtcatggcctgtgtctagtgccactagttgtctgagtgctgtacccaacttctcctccctgcctcttcctgccctatactagagatgccacatcactagctggtcctacctggtccctaggggcaccgagtgcttagcaggttccaggggtcttggtgaagtgagtgagtgtctggctctatccctctaggtggcacagttgtgagagcagcagagacttaaggagagggttcagaagcaggaccatgtgaagcttcaggtgagcacgtcctatgttcccaaagctccctatactatgattagcatgggagacaacaaagtggaagagaggatgcctcaggtttgtctttaattctcccctctagctctggattcactaacccctcccgggggtcagcagaggtcatcaactctgccttccaagagtagctcctatgcccaaccctannnnnnnnnnnnnnnnnnnnnnnnnnnnnnnnnnnnnnnnnnnnnnnnnnnnnnnnnnnnnnnnnnnnnnnnnnnnnnnnnnnnnnnnnnnnnnnnnnnnnnnnnnnnnnnnnnnnnnnnnnnnnnnnnnnnnnnnnnnnnnnnnnnnnnnnnnnnnnnnnnnnnnnnnnnnnnnnnnnnnnnnnnnnnnnnnnnnnnnnnnnnnnnnnnnnnnnnnnnnnnnnnnnnnnnnnnnnnnnnnnnnnnnnnnnnnnnnnnnnnnnnnnnnnnnnnnnnnnnnnnnnnnnnnnnnnnnnnnnnnnnnnnnnnnnnnnnnnnnnnnnnnnnnnnnnnnnnnnnnnnnnnnnnnnnnnnnnnnnnnnnnnnnnnnnnnnnnnnnnnnnnnnnnnnnnnnnnnnnnnnnnnnnnnnnnnnnnnnnnnnnnnnnnnnnnnnnnnnnnnnnnnnnnnnnnnnnnnnnnnnnnnnnnnnnnnnnnnnnnnnnnnnnnnnnnnnnnnnnnnnnnnnnnnnnnnnnnnnnnnnnnnnnnnnnnnnnnnnnnnnnnnnnnnnnnnnnnnnnnnnnnnnnnnnnnnnnnnnnnnnnnnnnnnnnnnnnnnnnnnnnnnnnnnnnnnnnnnnnnnnnnnnnnnnnnnnnnnnnnnnnnnnnnnnnnnnnnnnnnnnnnnnnnnnnnnnnnnnnnnnnnnnnnnnnnnnnnnnnnnnnnnnnnnnnnnnnnnnnnnnnnnnnnnnnnnnnnnnnnnnnnnnnnnnnnnnnnnnnnnnnnnnnnnnnnnnnnnnnnnnnnnnnnnnnnnnnnnnnnnnnnnnnnnnnnnnnnnnnnnnnnnnnnnnnnnnnnnnnnntgccccccacattcttttgaaaaatgtgaatctaatgtcattccaataccataaaaaatgtattgttcctcctctcacagaccgtttgggtaatgtgggatgactgtgactaaagaaactagctttgtttccccacatgtgaggatagcctggcaagtcgcctcaagagtcagcatagctggaatttagcaatgaaacatgggaatgggtacacacatgagtcctgatggtagggactcactgtgagttatagttacaacagggaggatgaaggagaactaagcaggtatggagatcagaagtgaacggatctgctgagcacactaaagctgatctcagagaagggagtgcttcctgggggagcactgaggatgcccattcagggaggagcatcctgggggatcactgagcatgcccattcagggaggagcatcctggggggacactgagcatgcccattcagggaggagcatcctgggggagcactgaggatgtctagtcagggaagagcatcctgggggagcactgaagatgcccattcagggaggagcatcctgggggagcactgaggataatgagtcagggagaagcatcctggggggacactgaggataatgagtcagggaggagcttcctgggggagcactgaggatgcccagtcagggaggaggtcattagcagagctgacccctgcaagcagcagagatctgtgtgttcactacaatgtgtggaggtaccagaggacaacctcatgtgtcatccctcaggaatactaaccacctttcccttgagacatggtctcttattggnnnnnnnnnnnnnnnnnnnnnnnnnnnnnnnnnnnnnnnnnnnnnnnnnnnnnnnnnnnnnnnnnnnnnnnnnnnnnnnnnnnnnnnnnnnnnnnnnnnnnnnnnnnnnnnnnnnnnnnnnnnnnnnnnnnnnnnnnnnnnnnnnnnnnnnnnnnnnnnnnnnnnnnnnnnnnnnnnnnnnnnnnnnnnnnnnnnnnnnnnnnnnnnnnnnnnnnnnnnnnnnnnnnnnnnnnnnnnnnnnnnnnnnnnnnnnnnnnnnnnnnnnnnnnnnnnnnnnnnnnnnnnnnnnnnnnnnnnnnnnnnnnnnnnnnnnnnnnnnnnnnnnnnnnnnnnnnnnnnnnnnnnnnnnnnnnnnnnnnnnnnnnnnnnnnnnnnnnnnnnnnnnnnnnnnnnnnnnnnnnnnnnnnnnnnnnnnnnnnnnnnnnnnnnnnnnnnnnnnnnnnnnnnnnnnnnnnnnnnnnnnnnnnnnnnnnnnnnnnnnnnnnnnnnnnnnnnnnnnnnnnnnnnnnnnnnnnnnnnnnnnnnnnnnnnnnnnnnnnnnnnnnnnnnnnnnnnnnnnnnnnnnnnnnnnnnnnnnnnnnnnnnnnnnnnnnnnnnnnnnnnnnnnnnnnnnnnnnnnnnnnnnnnnnnnnnnnnnnnnnnnnnnnnnnnnnnnnnnnnnnnnnnnnnnnnnnnnnnnnnnnnnnnnnnnnnnnnnnnnnnnnnnnnnnnnnnnnnnnnnnnnnnnnnnnnnnnnnnnnnnnnnnnnnnnnnnnnnnnnnnnnnnnnntctttttgcctctgcaatcaagctctcccaattgcagaaggatcctgttgtggcacctgctttgctggcgagtcgggcgctcacagtggggtggttggggaggactgtagggaggactcaagacaggttttcttttgtaggtagccttggctgccctggaactcactccatagaacaggctggtcttcaactcaaagaaatttgactgcttctgccttttgagttctaggatcaaaaatgtgtgccaccaccaccaccttaaaaatttttcttttatagttttcttttgttattttaattctccatatctggagccccacatcatgacagacgttaatggtttacatctggttctatctctagctgaaatttattaccagacataatgggttaatagatagccatagcctgagtccatccttgttaggttgaaccgacacttctttataagtgtttgaaaatttgaaagccctttgaaataaaatggatccaagctatctattggattttctttctgtcaaatgactcacttgaaactaaagaaaagtgattttaactgaaaacctttcagccaactgatctatatgttgagaaattcagtgaaatatcttagtctttcataattccctaacattctctacagctaaagtgatttctggtctttccagttcaaggtattttatgtttggcaactttctgagccttttttttttctccttaaagttataaagcacaagtcctatagaacatcgcttacaaggctgagccagccaggtggcacgggcctgtcatacagctacctggaaggctaaaggaggattgaaagctcaggtcctcaggggaaaagatgctttgccaccaaatctgatgatctgagtttgttcactggaactctgtcttagttatagttttattgctgtgaagagacaccatcaccaaggcaactcttataaaaggaaacatttaattggggctggtttatagtttcagaggttcagtccattatcatcatggtgggagcatggcagcatccaggaagtcaggcatggtgctggaggagccaagagttctacatattgatctgaaggcaaaagagactcttccacaggcagccaggaggatgatctcattccaaattgggcagagcttgagtgcagacctcaaagcttaccccaatggtgacatgtttgtttttttttttttttctaacaaggtcacacctactccaacaatgccacacctcctaataataccactcccaatggccaagcattcaaacacatggatcaatgggggtaaacctattcaaaccaccatcgatccactcctagaaattgtcttcctacctccacaagtattctgtggcacacatacacacactcactttttaaaaaataattttgaggtttacctaggcaactttgtgagaccatgtctcacaataaaaaaagtcaggcatgttaagaggcaccattagtccccacacttgggcaacagaaacaggtagatctctgtgaatctgaggccaacctggtcaatatagggagtgccaggagagccaaggcaagacagagagaaccccctttaaaaacaaaattaatcaggcaggtggtagtagtgcacacctttgatattagcacttagaagacagatatagaaacaattatgggtcagaggtgtgactgtgagatggcagccccatcatccctcacttgatgtcctgtcttcctgctggaggtgggcactataagttccctctccctactgtcaggcgtttcatctaagatccctccctgtgagtcctgggagtctctcacctcccaggtgtctgtgaattctgggggtcccccaacctcctatttcttgaggttgccagtttacattctttctgctggccctcagggcttcagtccttttccctcaccagatcaagttcccctctccccgccccctactgctcccccaccccatccactttccctcccaagtccctccctccctccctatttgtgattgatttcttctctctcccaagtggaaccaaggcgtcctcacttgggcacttcagcttgttgagccttttgaattctgtggattgtatctcacacctctgacccataattgttcctgtctgaaagaattacagggatggaaatggagaggagcctgaggaaaagaaggtccagcaacaggcccaaagtgggatccagctcaaggggaggccccaaggcctgacaccattagaggatatggagtgctcacaaaaagggatctatcatgactgccctccaaaatacccaacaagcaactgagagagtaagatgttgttgaattagggaaggctgaaagaagctgaggagaaggacaaccgtgtaggaggaccagcaatcttaattaatctggaccccccccaaggagatctttcaaacactggaccaccaaacagacagcatacactggctgatatgaggcccccaacacacatacagtagaggactgctgggtctatgttcattcagagatgatgtacctaaccctcaagagactggaggccccagggagttcagaggtcaggtggcatagggggtgggggcatccacgtggagccagggtggggtggggaggaggtatgggatgtggagcagtcgaagggtggatggaggggtagggaatggaataaggagtgtaaaaagtgagttacaaataaaattaaattacaaaataaggaggaggaggaggaggcaggataggcagatctccaagttctagtccagcctggtctacaaagcaagctaaccaggatagccagggctacacagagaaatcctgtcttgaaaacccagccaaacaacaaacaaaaacaaaacccaaaattaatcaaaacccctgaaggctggggatgtagctcggtgggaaagcacttgtctagtatgtagagtccctacattctttttcccgtattgccccccaaaatataaattgtttcccagacatttaattctgaactcaggtaatgcaatttgtctgttctgtttggactactgtgaggaacttccttaagttcccggtgtgagttagttattgctcggtaacaagttaatctaacccatagcttccctcccgcttctgtgctatcaggagtctgagggtgacatagctggatagttctggttcaggatcccaaattcccagggactcttttccaaactcaaacacttgctggtgcccatcacttactgttagaccactggctcaaggccctgatnnnnnnnnnnnnnnnnnnnnnnnnnnnnnnnnnnnnnnnnnnnnnnnnnnnnnnnnnnnnnnnnnnnnnnnnnnnnnnnnnnnnnnnnnnnnnnnnnnnnnnnnnnnnnnnnnnnnnnnnnnnnnnnnnnnnnnnnnnnnnnnnnnnnnnnnnnnnnnnnnnnnnnnnnnnnnnnnnnnnnnnnnnnnnnnnnnnnnnnnnnnnnnnnnnnnnnnnnnnnnnnnnnnnnnnnnnnnnnnnnnnnnnnnnnnnnnnnnnnnnnnnnnnnnnnnnnnnnnnnnnnnnnnnnnnnnnnnnnnnnnnnnnnnnnnnnnnnnnnnnnnnnnnnnnnnnnnnnnnnnnnnnnnnnnnnnnnnnnnnnnnacaaacagtctggaagccaaacctgccctgaggagtgatgtgtttgttctcaatgagaaggaactgagctccatcacattgggcttgtttgtttgtttgtagtctgttttatcttgagataggatctagctgcactggccaccctcactgtttatatagtttgcctggtaacatataacaagaccatgcacagtgtgggccctgccctctagggccaagacagcccatctccccagatcccagaggcccttcatctagatgatccactgtcttctatgatctaaaatgcagacacatgaaagctgacactttctgcattgtctctttgggtagaaggggacagagtgagcatttgacatatttctgccagcccaggaaaaaaaaattccaaaatatctaagtgctctacagcagtcagtgggggaagag

SEQ ID NO: 1010 - DNA, 2759 bp, Mus musculus
aggggatcgttgaaagttctacttctgcctggacggctttcctggatcccagaatgtggcctcactgagaaccctctgcctgtggactagggagcgggtcttccgcgcgaactcttgggtgggaagttggtctgcacttcacttcggcaacatgaccagcccagagggcgcgcaaaacaaggaaatcgactgtctgagtccagaggcgcaaagactggcggaggccaggctcgcagcgaagcgtgcagcccgagccgaggctcgagagatccggatgaaggagctggaacggcagcagaaagagttcccttctgtctatagaaatattatgggctggatacaaaatggggcgacatcgagcagtggatggaagacagcgagcgctactctcgtagattccggagaaacacgtcggcttctgacgaagacgagcgcttgtccgtgggtagtcgcggcagcctaaggactaacggttatgacggagactattgtggatcccagtccctaagtagaagatctggcaggggactctcctgctccaaccttggccttcccagcagtggccttgcttccaaacccctgtctacccagaatggatcccgggcgtccatgctggatgagagcagcctctatggggctcgaaggggaagcgcctgtggttctcgagcaccctcagaatatggcagccacctcaactccagctcccgggcctcttctagggccagctctgcaagggccagtcctgtggtagaagaaagaccagacaaagacttcgctgagaagggctcccgtaacatgcctagcctgtctgcagccacactggcatctctgggtgggacttcctcccggagagggagtggagatacctccatctccatggacaccgaagcatccatcagggaaatcaaggaacttaatgagttaaaggaccagattcaggatgtagaaggcaaatacatgcagggactgaaagagatgaaggactcgctggccgaagttgaggagaagtacaagaaagctatggtctccaacgcccagctagacaatgagaagaccaacttcatgtaccaggtggacacactgaaggacatgctgctggagctggaagagcagctggccgagtctcagcggcaatacgaggagaagaacaaggagttcgagagggagaagcatgcccacagcatcctgcagttccagtttgccgaagtgaaagaggccctgcggcaaagggaagagatgctcgaggaaatccgacagctgcagcagaaacaggcgggttttatcagggagatttctgatcttcaggaaacgatagaatggaaagacaaaaagataggggcattagaaagacagaaagagttctttgattccataaggagcgaacgagatgaccttagagaagaaacagtcaagctgaaggaggagttgaagaaacatggaataatcctaaattcagaaatagccaccaacggagagacttcagacacagtaaatgacgttgggtatcaagcccctacgaagataacaaaagaagagctgaatgccctcaagtcggccggggaggggaccctagacgttaggttgaaaaagctcattgatgaacgggaatgtctgttggaacagattaagaagctcaaagggcagctggagggaagacagaagaacaacaagctggaccttcttcgagccgaggacggtatcttggagaatgggacagacgcgcatgtcatggatctgcaaagagatgccaacagacagatcagcgacctcaaatttaaacttgcaaaatctgagcaagagataactgccttagaacaaaatgtaataaggttagagagccaagtaacgcgctatcgatcagccgccgaaaatgcagaaaaaatagaagatgaactaaaggcagaaaaacggaagctccagagagagcttcgctctgcactggacaaaacagaagagctcgaggtgagcaacggccacctcgtaaagcgactggaaaagatgaaagccaaccgcagcgctctcttgtcccagcaataaataccagcagcaagtgggcacctctctggggactcagatgcccagcctggcttatgagcttttatctgtactgtcgggagcattgcatctttccctgcctccgagggaagaagtgcttccatgcaagggtcacccggggagcccagcagcaccagatgcctctgtctgcagacccttgccctggccgggatgatactcagagcctgcaggtttcttcataagcacactgggtctcacgagagctctggacttgatgcacaggggcctcttaatcccaccaacaggggtgactgaggtgggggttaaggtgggacttgatttttcttttgtgtcttgctgaaggttaagggagaatgttccagtgttggggacgatccgtggtggaacctacagtcccaatgactccagtagtgtctcttagtctctgcttcccatacacaaaacactgtggaaccacaagccattaccaagcaaagctcctcctttggagtcgaggcgatggtctagacgtaaagtgaccttaagaagactctttccaggcaacagatgaagcttttctaagggacttttgcattggttcagttataagagtacttttcccagggtcattaggctacggtagcttcaccgaaaacaacagcttttcatttgcattatttaaaccttatatttgaaattgaagttgttaacttcttttaaagaatgtactgctagaaaaaaac

SEQ ID NO: 1011 - protein, 563 aa, Mus musculus
KYYGLDTKWGDIEQWMEDSYSRRFRRNTSASDEDERLSVGSRGSLRTNGYDGDYCGSQSLSRRSGRGLSCSNLGLPSSGLASKPLSTQNGSRASMLDESSLYGARRGSACGSRAPSEYGSHLNSSSRASSRASSARDVVEERPDKDFAEKGSRNMPSLSAATLASLGGTSSRRGSGDTSISMDTEASIREIKELNELKDQIQDVEGKYMQGLKEMKDSLAEVEEKYKKAMVSNAQLDNEKTNFMYQVDTLKDMLLELEEQLAESQRQYEEKNKEFEREKHAHSILQFQFAEVKEALRQREEMLEEIRQLQQKQAGFIREISDLQETIEWKDKKIGALERQKEFFDSIRSDDLREETVKLKEELKKHGIILNSEIATNGETSDTVNDVGYQAPTKITKEELNALKSAGEGTLDVRLKKLIDERECLLEQIKKLKGQLEGRQKNNKLDLLRAEDGINGTDAHVMDLQRDANRQISDLKFKLAKSEQEITALEQNVIRLESQVTRYRSAAENAEKIEDELKAEKRKLQRELRSALDKTEELEVSNGHLVKRLEKMKANRSALLSQQ

SEQ ID NO: 1012 - DNA, 172751 bp, Homo sapiens
  misc_feature (1)...(172751): n = A, C, G or T/U
ataagaggcataaatgttaagtgtgcatttgcacatgcaacttttggcaaacgtgcacatgcacaccatagaggggtccagttttaaaactaaagtcccatccttcgggaagccccttacacccagataaactgcatggctggtcaccccacataaccacaacctcaatgaagatacagaatatttccatcacccccaaaatttccttgtgcccctttgtagccaacccacccacccaccctccaaaggtcacccctcttctaaactctatcatcatagcataggtttttcctgctctagaatatcatagaaatggaatcattccatatatatggttttgtgagtggcttctttcactcaacacgtttttgagattcattcacattgctgcctgcattaggggttcatgttattgccacatggtatggcatccgtgatttaggataatttgcttatcccctcacctgttaatggacattggattgttttcagtttttggatattgtgaatcagatttccttgtacatgtctgtttatgggcatgttttcacttctcttgggtaaatacttaggagttgaatgactggatcatatggtaggttatgtttccaagaaactcccaaacagcattccaggctggctgtgcaatgttccactcccaccagcaatgcatgagtgttccagctgccccgcatcctcaccaacatttggtcttgtcagtctttttaactgtagacactctagtgggtgtgaagttatatcttactgtggttctattttgcatatccctgatgataaagatggtgagcacctttctttatatctccttggccatttgtatatctccttatatgcggtgtctgctcaagtctccaagtcctttgcccactgtctaaatgacttgttcatctttttcttgttgactttcaggaagtctttatatattctggagacaagtgcttgatcacatctacatattgtggagattttctcctggtttgtggcttgtgttttcattttcataatggagttttttaaaaggcagaattctaaaattgtgatgaaattcaagttatcaattttgtattttctggccgggcacagtggctcatgcctgtaatcccagcactttgggaggccgaggcggacggatcacctgaggtcaggagtttgacaccagcctgactaacatggtgaagctccgtctctaaaaatacaaaagttagctgggcgtggtagcggccccctgtaatcccagctacttgggaggctgaggcaggagaatcacttgaacccgggaggtggaggttgcagtgagcctagaccatgccattgcactccagcctgggcaatagagtgagactccgtcttggagaaaaataaataaataaatagttgtattttatgactgtgctttttgttaattgtccaagaaatctttgcctacctcaaggggtccaaagatattctcctacatattcttccagaaacttaataatttttgcttttaagtttaggtctaaacttaactctatacacaataagtatcctgatttacttgttgtgtgcagtgtggagtaagcannnnnnnnnnnnnnnnnnnnnnnnnnnnnnnnnnnnnnnnnnnnnnnnnnnnnnnnnnnnnnnnnnnnnnnnnnnnnnnnnnnnnnnnnnnnnnnnnnnnnnnnnnnnnnnnnnnnnnnnnnnnnnnnnnnnnnnnnnnnnnnnnnnnnnnnnnnnnnnnnnnnnnnnnnnnnnnnnnnnnnnnnnnnnnnnnnnnnnnnnnnnnnnnnnnnnnnnnnnnnnnnnnnnnnnnnnnnnnnnnnnnnnnnnnnnnnnnnnnnnnnnnnnnnnnnnnnnnnnnnnnnnnnnnnnnnnnnnnnnnnnnnnnnnnnnnnnnnnnnnnnnnnnnnnnnnnnnnnnnnnnnnnnnnnnnnnnnnnnnnnnnnnnnnnnnnnnnnnnnnnnnnnnnnnnnnnnnnnnnnnnnnnnnnnnnnnnnnnnnnnnnnnnnnnnnnnnnnnnnnnnnnnnnnnnnnnnnnnnnnnnnnnnnnnnnnnnnnnnnnnnnnnnnnnnnnnnnnnnnnnnnnnnnnnnnnnnnnnnnnnnnnnnnnnnnnnnnnnnnnnnnnnnnnnnnnnnnnnnnnnnnnnnnnnnnnnnnnnnnnnnnnnnnnnnnnnnnnnnnnnnnnnnnnnnnnnnnnnnnnnnnnnnnnnnnnnnnnnnnnnnnnnnnnnnnnnnnnnnnnnnnnnnnnnnnnnnnnnnnnnnnnnnnnnnnnnnnnnnnnnnnnnnnnnnnnnnnnnnnnnnnnnnnnnnnnnnnnnnnnnnnnnnnnnnnnnnnnnnnnnnnnnnnnnnnnnnnnnnnnnnnnnnnnnnnnnnnnnnnnnnnnnnnnnnnnnnnnnnnnnnnnnnnnnnnnnnnnnnnnnnnnnnnnnnaacttcgtctcaaaaaaatatatatatattgtttctcctgatttcaactattcagaattgtgaaagtttttatttatttatttatttgtttattttttgagatggagtctcgctctgtcacccaggctggagtgcagtggcgcgatctcagctcactgcaacctccgcctcctggactcaagtgattctcctgcctcagcctcctgagtagatgggattacaggtgtgcgccaccatgcctggctaatttttgtatttttagtagagacagggtttcatcatgttggtcaggctggtcttgaactcctgacctcgtgatccacctgcctcagcctcccaaagtgctgggattacaggcatgagccaccatgcccagccccaaaaaattttttaaagaaaaaagttttttcctctctgtccagtttgggtaatttttttgaccaggcctcaagtctacagatcctttcatctaccttatctgacctgttgttaatattattcaataaatttttcatttcaaatattgtaatttatagttctacaatttccacgtttgcaattcccagatctctgctgacattccctatctgttcatcaattatatccatctttcctatggttattttatatgacttatctgctaattccaacatctaggtcatctgtgagtatttctcagttgactatttttcctcctgccccaagtctcattttcctgattcttcttgtctaggaagtctctgctgtgctggacatggtgggcaacactttacagaggatctggactctggactctgttcttttcttctgaagcgtgttgaatttggttcaagcaggcagttaataaatatacctccatcatgcatcttgccttgatcttactgagacttggttctaggtttgtgctccttttgttttgttttgttttgttttgttttgttttgtttttctgagatggagtctagcccttgtcgcccaggctggagtgcaatggtgcgatctcagctcactgcaacctccacctcccaggttcaagcgattctcctgcttcagcctcccaagtagctggaattacaggcgcctgccaccacacctggctaatttttgtattttttagcagagacagggtttcaccatgttggccaggctggtcttgaactcctgacctcaggtgatccacccaccttggcctcccaaagtgctgggattacaggcataagccactgcatccaggcccatnnnnnnnnnnnnnnnnnnnnnnnnnnnnnnnnnnnnnnnnnnnnnnnnnnnnnnnnnnnnnnnnnnnnnnnnnnnnnnnnnnnnnnnnnnnnnnnnnnnnnnnnnnnnnnnnnnnnnnnnnnnnnnnnnnnnnnnngaattcctgactttatctccccagcactgggctgaaatcttgaaatctctgctcagctttttcaggcttccagctgttggctccttctgcatttcctggcatctcaccgcacacatgcgtagttcgggacttagccatggattctggataagttagtacacaaatcttgaggcccaaccttctatggtccctcttctctgggatcttcccacaatttccagctgcacttatagccccagacccagacatctaactcctcggtccagtcattctcaaggcctcccaatgtgccttgcaggctggggtatgtcctctgggaaagcagacgtcttcttatttacttctcttccttcaaaggttgtgtccactccagtcccagtgtgcatttgtttactctccacggcctccagagggctgttttccagactttgtttgaggttcatgattgttagaaggagggttagtttcctataatgtttatccccattgctgaaagtcctgtagctgaaagtcctgtcactttttttcttaaccaattgaattaatagttaataaatcccacgttaggtgaaaattgattacattgctagtcaataagtacctacatttgcatcattactcttccccaagtaaaaagaaaattggttttcacatcctgtttgatatagtaccttaagaaaggactcttcattcagtcaagccacattttctaagcatccagaataaggctctctgagggacaaaaaggcaatcttggtcccagctctcaggaagctaccctaagagagctacttgaaggtgctctaggggtttggctacagaactggcactgtgtgccaaggacccaccaccctcagcgagcttcccagaggcacacatggcatgtgatcatcccaagcctgacatcttcctaccaggcactttcctgctgcgaaattcctggcacccagtagcacttagtgaaggtgaaattttatgacaataacatttaaagcaaataatctcacaaacttcagcactgtgactatcactcatcacaagtgaactgatgcatttcgcacctgcttttaccctccagaactgctgcagcagccgccctagagccattctgcagttctgatgcacagcatgatggaagcatattgcagaagattattctggcttttgtagatagtggattaaattgggacagtgtagaatgggaattcagatagcccatggatggacttcaaaatatcaccctctaaaattggactcaaatttcatgttcagatgcccgttttccccactgcaagaggaatccaactttcatcagatccttgcatcaattaaactttctttactgcaaaaaaaaaaaaaaaaaaaaaaatgaattcctggtctagaaccctttttttttttttttttttttttgagagggagtctcgctctgtctcccaggctgagtgcagtggcgcagtatcagctcactgcaagctcttcctcctgggttcaagcaattttcctgcctcagcctcccgagtagctgggattacaggcataagccatggcacctgcccttagaacccagatgtttttgataatggaaatgatccgcaagtatttttaaactcccacaagtatttgcatatttatgtacaaattatgttcctagtttatcatcattagttaataaataaaggcacaatatccacttagaatgaagttaatcattaatgataggaaatgtaaattaatgtttaaatagttttgatggttactaaacgttcttatcctgtctaataaccttatactgaggccagtgaagacctcctgcctgaactaagaaacaagtctctcattttcttgtttatttgtggcttttgggaatcttttaaatcttttgaagccatttatctactctttgagttttagttaaaactaggttaggcaatccataaatccttttaacctggtccaccgaaatatatcaaaatatgcagaaaatgatgtaatgagagagcacgccactgccagcccctgaaatgctttgagtgagtgaccgcttgaaataagcttatagaccaaaaattagtaacattggatttctaatttttagttgaagatatatataacagaaattctatatttgcttcccctaccccatagattgtctcagacaccctaccctggagacaccaagtccagaaggtgacttatgctagtaatccacagatgagggataagggggaccagctgcagagcttggtggtatcagcaaacatgccaaaggaggatcaaaatgatcagatagagatgaaggaaaagaccagctgggtatttgatcagatttagtagagaaaggagaaaggatttcaaaatggttccaaggtttttactccaaaaaacatgaaaaagttactggaagtgatggtgtcctgggaaggaagaggcatttattggggcaggcatcatccactgatttattttggaagtgctgtgattgagctactgaaagatgcacctgaaaacgtccagcaggacaaaggagacaccattcacctcctgagcaacacatagaccctgacctcagccagccccacttctgggcagagtgctggctccaagttccatgcgtgagagatggctctcctctacgggtccttcagcattcctgggggggggctgcagttctcctgccctgctccagctgtaatccaaagcagggctttccatcctctgggaactggaagagcaaggctggagtgctggtgaaagaggtttgaggtaggcccacgcggatgatgctctcaatggacccagagtgagtcacgttatggcccacatgatggctcagatggctctctgcctgagaagctctgagtcctcatgcagactggacgcccctccgtagctgctcatcaacttcctttcccagccagcccccagggcttgcccactgagctcctgaaccaaggcaaacttgcgctggggacggcgccgctgtgtggtttcccttgccaaggcttccctggctgcctccactttctcgtggaggcttcctgaaggtggcatctgtatttttgtgaagggacttggtaccaggcttggagatgaacatgttaattctctggccctggacatcagatctgtgatatagtttctcaatttcctgctctgaagtaagccctggtgggtagtgtcaccatctggaataggaaaagggctagatgggaggggtcagtagtgctggtggcagaggccagtcttctcagtggaaacaggctcatgcacttccacgcagggagggccgacggtcaagggtggaggaaaagccacaatttttcggtgaacccatggatcagcatgatggagtcttgcaggtctttatcttcctccaggaggcaccccaagcacggagaagacccaccaagctgcctgatacctctgtctacctcccctctgcccagacaggaactgctgttcaccattcattccagacctgggcctttgaggacaggagctgtaaggatgattgatcgattgcctgtgtgtgaagccctggaagggctcttgcctagaatactgtccctaccctgacaaggtagaggccatggtctggatggcggtggcccccccattcatatgtcaaaacctaaccctcaatgcaaggtggggcctgcaggtgaccaggtcctgaagcagagacctcatgaacgcgatgagtgcccttacacaaaagcctggagggagcccgtcttccaccatgagatgacacacagaaggcaccatctgtgaggaatgggcctcaaccagacactgattctgctggaggcttgatgctggacttcccagcctccacagctgtgaacaatacatttccgtggttttataaatgaccctgtctaaggcgttctgttacagcagcacaaaggaactaagacagtgggcacccgtatttccatttagaggcggaaactgactctgaagtgagaaccggtccactctgagagcacatcgccaggggaagaggactgtagccaggaagttgttatgtcatggggtcatgggaggacccagcaatgttgtttctgatgatttctgaaaggcggctcttttctggaagtggacagatgatgggggaggggcaggaagctgaattcaccacagtgtccgagaacactgtctaccagcgggagctgttcagacacacctctggccagtccccacggcagtgaatctcctgtctctggacaacaatccaacagggaaagtggggaggagggttgggaactgaactctgttccacaagttcaaccactgcactccactaagcaactggcacagccagtccctggtgaaggcttaaagatgaggaagatggggtcagcgcctgccctcctggcctcaacacatcaggatggaggatttaggtgttagcaaaaagtggctcaaagttccaatgaaggacagggagcaaagggagacttcttttagaaaggagacgttggaacttggatatggctttagttaaggagctccaggcatctcaagtcagccctgagaggcagcagccgtgtctgcctctcggacagctatgccccagcctccagctcagcagctggcaggcagcaggtgtgggtgcaggaatgagtgaactcatggggaccagcctcggcaaagacgcacagtccccacagtgccccaggggctgggaaacagtgagcagccaccagcaagaccaaggcagtgcaagtggccacggctcaaggtttcccccaaggaggactatgtcacttaaggagtatggcctctgaagtaatgtaaatatggcctggaagattcagtcaacacctatttccttagtgcctacaatgtgcaggtgcagtttctgctcccggagttcagtcatgaacaatgccacagtcagccctgccaacccacctgcgtcagctcaggcacccagagcaatgtcacctggatctgccctccctcccatgtcactggactcgctgtcttttccctgcaatgaaacctccaacagctttccctgccactgtgggtggaagggccctcttcctcttcccaccttcatacagcttccaggccacctccttaagaatccaaagcaatctggtcacaccacttggtgggaaatacaccgaaatgttaactgtccttatcactgggggaaaaaaatcacaggtgacttcagtacagcctcctctcctctaccatcactaccctccctcccatccttccccaggtccagccacactgaagttctccccataccccaaacacaccagtaactttcccacccggtgctcctgccgtgccctaggcaggggcttttaacccctacctaatcctccgatttgctttacttttaaatccacctctggagcatagactgtgagcttcagagagcacaggtaagttcattactttttcaacaactaggagagagctgcgacgcacctgccccgatcctagaggctggggacccaccagagaagtgacaagtccttgatctcagggggcagacagcggggagaaggatggatgctagcacggagaacacgcgtgtaaagacagaaacgcacacatccacaccatgccgctgtgaagccggcgcccaggaggctggccaaggtcacaggagcggcggtggcgggcggatccgagcacctctcggcctgaccccagagcctagctctcaccccggcgagggacttccaccccgactcaccgcggaatggggagcgccaggctgaaccaaatcctgtgctcacccctccgtgcaaacccctcaaggcaactcaggcctctgaaagccttcctacccccccgctctccgctcaggtccccactcaaccggtgcccaccgccctggcgcgcgtcgctccgcgattaccggcccgccaaacagtccccgcaaagtccaccctccggggctcccggtccctcaggtcccgcgtgcccggccctgggcatccgcagcgtccccgtggtatcggacccccatcgtccctgacacctggcgtctccgccccccgcccccgtcccccgccccgccgtccctggcccctgcagtccctggcccgcgctgcggacctccggctctggcttcccccgggtccccgcggcccccgtccccccgcgtccccgcgtccccggcccagcgcccgctgacgccatgacgccgcggcggagggaggggccggggccggggccgggccggggcggcgcgagcggctggagcaacgggccccgcggcagctgcgggcgacgcggtcgatggacatgggcacccagggatcggggcgcaagcggctccccaaccgggagcggctcacggcggaggacgacgcgctcaaccagatcgcgcgggaggtgagcgctccgggagggcagccggggggcgccgggcgggcgcgggggccggacggctgtcagggtctctccggcgtccgtctgtcccgctgtgcgtctgtgccactgcgcgtccggctccaggcgggtgggccgggcaggcgcgcgccggggcgctgatccccaggcgctgcgccccggccccgatctccgaggcctgcggaccccgcacccgttctccagccccgggcccagcccgcgacgctgcgcgccctcccccaccccggccaccgtcggccgctgcgccctcgggagaggagccgggcgccgccagcgcgcgaggtggcccgggctggccgggtgggggcgagcgccccgctttgttgtgcggcatgggaggaggcgggggcttaggcccgacctggaggcagtggacggtcgccggaggccacatggccctgctgaaatggccgagtcgctcaggtgaccatttgtcatccatccatcgatgtcactcaaggtgcagctcagagatgaacttggggatcactgtgatttttctttcaggactgagcctggaaacgggtccaggcacactgaaacgtcttcattaaagtttcctggacagagtttattgtaactaagatcatgtttggtgatgaactttacctgtgacaaattgaaggcgcactagaatgggtatttgtacaaatgcctttttttttttccttccgcaaggattctaccttaaggctaaagaatgtacatgacatccagaaagccgtacagggacagagagcagcagcttgggaaaaggggagccaataggttgcggccccagggggacaaaggaagcttaatttttgactgtgttccctttgtaccatttgaactgtgtgccaggtgggtgtatgaatgcaaagaaagtctctgccttgtaacccgcctcacaggttcttttccgtgttggcttttccacatgtgattcttcccacaggaaacacctccaagccatttggactgtggtgtctggctgtatccgtcagatattctgggggatctactctgtaaccaatccttaggtgtttgtagttgtaaatacctgattttgctcttacggacatgtggcagtcactcagtatttgttgactactgagtgaataaagacttctgtttttctctgtatgatacagaaaagggctttccaggcaaacccttattcattcctggaagcccactgtgacctccaggagaccttccagactcagccctctcacatcgcaccaggcctaagtctccctggctccacggccctccatggcatgcccgcgcctggcatggcagtcaggataccttatcattatttgtccacctgtagaaggtgacacccagacaggaaatatcttacttttgtatcccaagagctcagcacagagccaggcacatactaggtgtttgtctatgtctgttacattaattaataaacaaaagaagtacaaggcatttaaaggacctttggctaaatatagacatttgctaaatatagtagcttgagtataactccctcctgtgaagacagtcacttatgtatgcatttgaccacagtgccttacaagtgttccctgcaagggccagaggtggccagtgaatcgcaagccttgtcttgatgtcagtggttatggggcagaagaatgagaagaatgaaaatttccagagtttgccttttatccactggtgtttctttcttcttttttttttttttttttttttttaacacagtctcactctgttgcccaggctggagtacagtggtatgatctcggctcactgcaacctccacctcccaggctcaagagatcctcctgcctcagcctcaccagtagctgggattacaggcacgcaccaccacacccggctaatttttgtatttttaatagagacggggtttcaccgtgttggccaggctggtctcaaactcctggcctcaagtgatcttcccgccttggcctctcaaagtgctgggattacaggcgtaagccactgcgcccagcctatctgctggtttttataaaatagattgaaaaggaaggcaagggaacactccttgggttgagagccctgaggtcctccctcccaccgagggagatgcagttggagttacagagatagacttgtgagtcagagctgggctttcaaatgacatagttcttagccagctgtgccatcctaggaaggtgagttactcactcttctctgggcctctgttttctcgtctctaaaatggagaagaagaaacctcccctggctgtcagaattaaagaaagtgggtagcaatgtaaagtatgtaactaggcggtgggtaaatatgagagcttcttacacgcccctcccggtaaaacccagccgtaggtgcagctgttactagtgctgagtagcacagattgatagggttggagggagcaggtgtgacatcttatgttttagtacaaattaacttctatttctcaactgtgaaaatgaaaatcactattcaaatggcaaatatctactccttgaattcatcagggttcttatagaaatcaacaaaatcgtcttgggttcagtactttcttattcactcattgactcaacagatacaagccatggtatccaaattcctgtcctggggagactggagagtcagggaggaacccggcgaggacctgcctgccctccaggagttgggtcagaaaggggttgacacctgtagatcaataatgctaaccgaagacaggaagggatctgatataaaaagggcgtagacagtgttctgaaggtttggacatgagagagaatcacagccggccagtggtctcagaagtggcttcctggaggaagtggcattttgagttcttgaaggctgtatgtaccagtcaagatgctttggctgctgggacagaaaccctgactggactgacattgacaaggggaagtatattggctggagcacagcaagcccggaggcagggcaggattccccgccagcctcaccagtggctccggcctctttttcccacagcacctgcgcagctggttgggctgggccatcctctgtgggtggcctcatcctcaggctgacttgcttcatggaggccagctggccttggctttcccgggctgccactgtggagcccacacaccgtctcttctggtggctctctccagagagctagcagtatctccctggtaaactttcatgagtctgtctggccactcctgcaccaagctctttgacaaggaccatggacttaggggctcagtgcctgtggcaaaggggggtgggtctaccctgtgacctgtcagactcatcctgggactggggagagccggcctccctgaaacacttgggaaggtgggggcctgaatggaaactggggaggcttcaaggaagtgggagggagtgggctgccacttgggcctggcacccaagaacatgccttctggagagtaagtggaaaattctgggctgaggtcattgggaagcctgagtcacctggcagggacgtgggttccagttcgctggagcgaggggaagagctaggctgccctgtgcaggcagggctttgcactcttctgggtagaagcaggactcgtggtgggggcagcctttggagggtgcatttctgcttctgcagccggtgtcctgcttccatgtgatggtttaaactctaggcaagcgtgtatagtaaagggagttatttgcaaatgctgtattatcgcaagtcaattatttctcactctcttgttgcagtggaattcaggcgggatgttatcaggagaaaggtttagtacgcacttgcagaagctcattagcaccaaaggcatgagctgcgcctcccacttctggggaggggtgtttccaacgcagatagattttcctctcctaccgcatttcacattctactggtgcattttggtagcatcccaaacttctcattcagcactctgcagctgagtaaagcgatactggtctcaccatgcaattcaaagtattgctctcaaatgaagaatgtttttcccaacaggaacagtcatttgcgcaggctgcattaggaactcaccgtggggccttgagacagtgcggtgagcttattatcccctggtggtgccataggtaccccttcctcacccagcaggacggaggccctccccccataactgtttctgcagcctcctctccaagctggcccctctgtggcctgcggcctcgggccctgatccatggcaggggcactgctgccccacccggctgcttcaccggccccaagttgactcgtgggcctgcgggtgctgttggttcaggcctcacagccaccgcctttcacttgagccacggccacacaggagtccagttgcggagaaggggtcgcactgcccccaaggagtccagttgtggagaaggggtcacactgcccccaaggagtccagttgtggagaaggggtcacacagcccccaaggactccagttgtggagaaggggttgcattgcccccaaggcagcctgcagccatcaagtaaccattttgtgaggtcacaaaatgtcccccaggcttgtttcaagatgcaaccaattctgtggtacgtttcctgctccggagctctctgcgggccaggctgaggccaactcctgccgagaccacctccctccccagcccttccctgactggcctgcccccctcatgcccctgctgggacagggctcacatccagtcctgccatgggctctgcttctggaacccaacataaagccatgccccttgtttcaggtagttcgtaaatatcgggtcttttcatcctaagtccccctttcattcatcttttctccctgtccttcccaaatagccctcctatatcaacctgtgcggagggagcctgtctctcttctcctcaaggctgttggagaaccaagctggggatggggtgcacgtgttcttttccagaacagcccagaagtggggttcagtgtggaaacttcgctctacctctctccagcactaacctgacctggctcctctggggtggagagtccaggactgagcccagctgcaaagatgcaaatctgggtccccaatgcagtcccttgccctctggtgaggtgaccctggggccagaattcacctgcacgcaaccaagatgtcagacttgtccctaggcttatttcacttgatttgaaagtgaatttcatgacttttttctctatgaatttgcttttctgaggctggccagcagattgcacaccaactgagtgctgctggacactggtttgccattggggctgggccctgtccctttgttccacaggagttgggagaggtgagaggcgttcagtgcccggcaggacacaggactgtccagcctgaacaatatcctgcctccagttggaacccagccgcagtggagtcactgagggctgttctgcagctgattctcctaagccaaacacccatcttggcagatcgtctacaaggttttaggaatgtgacaagactggtgttccagacggatttttaccaacagtctgagctgttggagggcgcgaacaatgtgcctgtgaccttgggctgtttgtgcgattcccaaaagatgcttctgggtttctgagtccacagaaaactcagctgtggacaggcctgctggtccccaacggccctgggccccaccccacagctatttctgtcagagggccagctgtctcccttcttccttttctgggtgactcttgagccactcgttggcctggtactcagggttgggatgtgtgtgtggagaacatgacctggcttctagccctgcctgtcccccgtgagccctgcccgtccccagtgagtgtgagacgggaaaggagagaggggcgaatggaggttgcttctaagacccaaggtgtgccaggtactctggaagctttactcccatagtttgtttaaatcctgtgaaaagagttccgagtctctctgtttgacagagagaaaacagactcagagacaccatgggacatggctgaggccacctattaattaggggctgccagttcatggcccaggctgcttcctggatcagcccctcagctccctccaagaccccattcaggctatgtcctgcaggcaagccaccttcttcctatccctggcacatgtcgtcccccactgacctgtgaaccaccaggggtgacatttcaggagagagagtcccatatctgtctctgccttactgtatctctcatcttctttttccatcctttcatctttaaaaaattgatttttatttcatcagagtaatatatgtttttacccatattctcaggccgttccccacacagtaggctgggcagtccttttaaaatatgtcagatcatgccacttctctgataaaaactttccaagggtgtcttgtatcactccgtaaaacccaagtccttaaacaagctacaagaccctcaatgatctggtaatgatctccttgtttataaataacatacatatgtattacacattagtttatcaattgcagatgctgtcagctggctcctgcattgaaggacgggacttggtgtgcatgggcccagttcaggccagctccctactttccttctctgcatcacactatagttcattgtagtgtggggctaaatgaatattcactggcaggacagactgcttaagaatatgggtgctagaatcagatttcctgggttcaaatcctgattctgtcccttataccatgacttagggcaagttacttatcaactttgtgcctcagttcccccataggtaagatgggaaagttttaggagtatacttcacccagggcagttatgagggtaaatgagatctttcacaaaaagacctctgaacaatgactgtcacatagtaaatgctcagtaaatgctggtgatgatgatgatcttgccagctgtgtaaataatgtcaattgcagagccaagcagtgtactataatctttctttccttatacaactttctgcttcttctagagttaatgatttattttctttttcattgctcatctgcctacatatctagcttatctatctatatatctacatatctccataaagttttcaatagaacccatcaaaatgctatgttctatatgattaaacaaagcagataatctatcaattccattttattctcccatggaaatctacccactagagacctctgtcctctagatccagtctggtctggatgttctcctcagggtttcctgcacctgccattccctctgccaccattctgagaatttcttttaccccctttttattgttgttgttaggtccctattttctggattccatattatctgccttcttggattgctgtcttattttgctggaacacatccttcagtagctttcggagcaagaatgccttttctaagtattcacatgtctgaaaatgtctttattctacattcatacttgattgatactttggttgtgtatagagttctaggttaaaaataattttccaaaaaatgatgaactctgtgtcttctttgacataatttccagtaagtattgttaattggaaaaagtaatatacagaaaataaagatagcatgctgttccttgtgtgagaaaggctgcaattttcctgcatttgaataaaaatcactggcagaacacaatgaaaggagtgtggggatggaggtggaagcaggttgtcaagtgccactcttcatgctcttgatatttgaaccatgtgactgtattaactagtcaataaaataaactaataaatatcaaaaaagtaaaattaggagccaggcattatggctcacacctgtaattccagcaactcaggaggctaaggtgaaagaatagcttaggaccaagagttcaagtccagcttgggcaacaaagtaggacccttcctttaaaaatatattttttttatttagctgggcatggtgatgcatgcctgtagtcctagctatttgggaatctgaggcaggagcatcgcttaagcccaggagttcaagaccagcctgggcaacatagtgagacccccatctccacaaaaaagaaaagaaaaagtgagtgggtgtggtggctcatacctgtaattccaacaatttgggagggcagtgagtggatcacttgagctcaggagtttgagaccagtctgggcaacatggtgaaatcccttctgtactaaaaatacaaaaattagccaagcatgatggcttgtgcctatggtcccagctagttgggaggctgaggtgggaggatcacttgagcccaggggacagaggttgcagtgagctgagatcacacccctgcactccagcctgggttgacagagcaaaactctgtctcaaaaaaaaaaaaaaaaaatttaaaagaaaaagtttggaaacttttaggatcttctctttattctcagaattctggatttttcccccacttattgagcattcattgggttcattcaatctggaaacttgtatcctaaaattctgggaaattttcttgaattttttcctagccccatcattttttctgttctgtcttacagtaatttctgtaagacagaacagaaaaagaagtaatttttcattttcctttcttttcttttttttttttttttgtcttttggtaatacttcaaggaagattcttcaactttaccatccactccctctactaagtttacctgttttatattgaattgctaagtttttttattgttctttatctctatagcatcctttcttgactcactaatgcagtaccttttcttactactctaaggatattaagcaaattcacttaatttgggggttttcctgaaaatttttttgttccctgcatcctggtctgtttcttttcctcctttgtgtgttttggcctctgtcatcttggagcctttctcagatgtgtggtgatcctcagctaccctttcatattttagagggaggcactaaacatggtgactacaatttgagcaaaggccaggaagagagatgtcacaaagtgtgaacaggaagccacacagggcggctgaagtgttggtaccagacagtggttcctcaggcaggggcaagcagctctgatttgaacccagtctcttgcctttgaggccagtgcccttgaccaccatgtcagtgttaggaggaaacattgcttaatgttaaccagtcagacttctctaatttggtgcctgcaggtggagttttgtttttgattaagggactagtaaggctggaaaagaaagttgaaaattaatctgagacatacaccagggaagaacggctaacctctagtgtctacacagctcaaacaaaggaacccatcattatggtattcttttactgagagcgaaataaaatgtcaaattagctgagcaaataaagatagtaaaacaaaaaaatatgagattttcatagcttcaggcatcaagaattgggctgggcatggtgtcttgtgcctgtaatcccagcactttgggagaccaaggcgggtggatcacctgaggtcagatgtttgagaccagcctaaccaatatggtgaaaccccatctctactaaaaatacagaaattagccagatgtggtggcttgcacctgtagtctcagctactcggggggctgaggcaggagaattgcttgaacccaggaggcagaggttgcagtgagccaagatcacaccactgcacgccatcctgggcagcagagcgagactccatctcaaaaagagaaaaagaagaagacaaaaagcaaaggaataattcatttatttgcttggaaagttctctaagatctgagatatactttccataaaacaaataaaatacctggagagtttaggtaggcagaatgtgatatggccttggcagcaggtaaactcttggatcagcaagtctctgagagccagatctgttcagagcctccactggcatattatattacaaactctccatccactcttggcttggggagtgaatgaaaaatcacatagtggtcatgatcatatttaaacataaagaaatcaggagatctaaagttgttcatgtatttttaacctccatcatgtaggtttatcaattttgccctcattgtccttgatttctttcatttttatttttcactttctttgatgacattccttaggcatctgggaagatgtggggttttccaggttgacactcatcgtggtttccatgctgaccaaacagctagcatggctctaccctgtcttccctaagacagcagcccccaatctttttggcaccagggaccagttttgtggaagacaacttttccacagaccagggtgtggggatggttttgagatgattccagcacattacatttattgtgcactttgtttctattattgttacactgtaatatataatgaaataattatacaattcaccataatgtagaatcagtgggagccaagagcttattttcctgcaactacacggtcccatctgggggtgatgggagacagtgacagatcatcaggaattagattctcataaggagcgcacaacctagatccctcatatgcgcagttcacaataggtttcgcactcttaagagaatctaatgctgctgctcatctgacaagaggtggagctcaagtgggaatgcgagtgatagggagtggctgtaaatacagatgaagcttcgctcactcacccgcctgccgctcacctcctgctgtgtgtcccagttcctaacaggccatggactggtaccagtctgtgccccaggggtaggggacctctgccctaagatattgctttaaattacccccagcatatttttaaatcacccaaagctgtgctgtctataggactctgtgctctgtgtctgtgcagtgcactgtggtagccactagccctctgtaattactgagcacttgaaatgcggttagtacagttgaggatctgcatgtcaaattaactttaccacagtgcatttaaaggtaaatagccatggaagtcttggggctgccgtgtcgaccagtgtagctccagagcaattcccttgtggaaatacattgcaatagaggtatgttctgcaatgtgggatatttattgactgcttacacatggggctgcataccactcatgaccaatgcaggtagactggactgatcgatggactgatctattgcaggttggaacctttgtggggctgtggcctcagagacctgtgggtcagcctttttaagttgtgtgaccgtaggcaagtgaatgcagcccagtcttcttttttttatccgagaaagaggaatgctatcgtgtggggcagtcatggtaaagagctagagcccacaggctgcagggcgtgctgcctggcacctggtaggtggcaattaaatggtggtggtcgtttgctaccttcaggtggctgtggttagctctagaaggaggcagttgtgcttcttgactggttgggatgtgccccagggctgagatgggggttgggtggagcttgtgagaaaaatataggaaagatgatctcccatgcccaagagggacacagacggcccttgggactgatgaaatgaactcagaataaaagcgcgaatggctgtcgctgtaaatatgtgtgtctttagtgtcagcgtccctggggacttcttataagtttgaagcatgttaccattcttggcattgagacagccagtgtcacttttacttcttggtcttgaattcaagcatcaacagtaaggtaccatcagatttttcaagctgcttcaccatcaagcaacctagccttggtgcccaggtctttggttggcttcccagaaataatgggccacttcaccccagccttgttctgcacggtttatctttgggcttatctgacctcttagaagctactaaattacccgcctatttttaaccaatgcctggagccggctccagaggaattgccacatgagttgagatgaggtgatgaccacatggtcttccaactcttcatttcaacatctgaagttttttctttcttttgtcttgtgttagggtttctcaatctgggcactactggcatttagggctgggtaattctctgtcctggggggcgctgtcctatgcattataggattttgaacggcatccctggcttctgcccagtaggcgccaggagctcctcgctattcccagctgtgaccaccaaacatgcttccagacattgtcaaatggcccatggggaacaagatacccaactgaggatctctgtgtcaggtttcccctgccacactgctgggtttgtaccttgagctctgaaccactcccctcagctagagaactctgagtctgacagtgactacgactgtttgccctcctgcaaggagggtaaaaagccctagctgaccacattacattcttggcgtttcctgcatttaaacctcctggaaattagtacagagggggccacataccctggaagctgagatggggccattttagaagtcggctgcaggctcagggaatggagacacgagctgccaatgtgattacactttgctggctttggaagtgtgcttgagctgacagtggggctggggaccgtctataacaagataccacagactgggggctttagcatggaagttgatctctccctgttctggaggcaggaagtccaagatctaggtgccggcacattcagcgcacacctcttgtctgcatcttcagattactcaaaatccaggtgtggctgcaggagaagggacagggaagaccctcaactttagtctcacctgtggaggtggggctggagacccagtcgtccttcaccccccaggaccaccccccagatgagaagggggactggatgttggacaacagaaaggtcagtgactgccacatttccacaggattaaaaccgtccccatatctcccgtaaaagcacattgccgaacttcttaaaatagatgaccagatcattgtcttgttcggaatccctgctgcctcagccctgggcctccgcagctctctgcacgatactctcctcatcacctctcaactgatctccagaaagtactgtgtggcccccgcccctccactcctgttcccagcgagagaagcccgagaacctgcagtctctatccaaagactcccccttccaacccctggcctctcttttcgcttggccaaaaggcgtgcatctcagcctgctgggatgggacaggaagggaccattaaccatgtgaatgttccagcatattcacctctgtggtttctacctcttgcttctgtttttatgtacaatttgcaaaggaaaacacccacatacactgtccctctcactaattgaaaattcagctttaatattctgtttggtttcatcaataatattcttttaaaaaatggtattcctcccagcactttgggaggctgaggcaggaggattgcttgaacctaggagtttgagaacagcctgggcaacataacaagaacccatctctattaaaaaaaaaaaaaaaaggccaggtgcagtggcttacaactgtaatcccagcactttgggaggccaaggcaaccgagtcacctgaggttaggagttcaagactagcctggccaacatggtgaaaccccatctctactaaaagtacaaaaattagccaggcatgttggcaggtgcctcaggaggctgaggcaggagaatcgcttgaacccaggaggtagaggttgcaatgagctgagattgtgccattgcactccagcctgggcaacagagtaagactctgtctcaaaaaaaaaaaaaaaaaaattgtgttccttttggtttaagacttagtcaatcttttctccttggatttctgtttttgtgattggtgttaaaatttcaatctatttttctttcctaaatatcttttccaatttttccctatatagaacatgatagttaataaattatactgaatatacgtgtggtgggaggactgccttgcagatccacaggttgcactctgtattaccaatagcttgtttttttaaatatgatttttaaaaatatgttaaagtataccaggtgaaaataacatataacatgcacaatatattgtacagttttgtgtcttgcttttaaattttttgagttatttcagataaggatactcctgacacttgggaggacttccagggcgtcgtcttagatggctgtgtgcttcctttcttgggcccttgcagagttcaggtttctgttggtgtgaagttttcctcctaactcccatgactggagacacttcgcacacccatgagagaatctttggggtacccagggagagtgtggtgtagagggtcagcattgggtgctgcggccaggcgacctcctcagacaagcgacaagcatctctgagtctcagtgtttccacctggcaaggggaggcgatactgggtggctgtgaggagtctatgaggcaatgcagacacgaggcttaggatgggccttcagggaatcatgctggccaaggaccgcgtgtgtgcagttgctgctgtctgccacctgtgctcaaagactttcagactcagaggccgaggcctggcttctgtccccagcttcactccaggttctaggctgcacgcctggttccaggctctaggcctcaggttcccagtcccaggttctaggctgagggttttggttctgggttccaggctccaggttccaggctaagggtttcagcttccgggttccaggctccaggctccaggttccaggctgagggtttcaggttccgggttccaggctaagggtttcaggttccgggttccaggctaagggtttcaggttccaggttccaggctccaggctccaggttctaggttaagggttcccagttccaggtttcaggctctgggataaggcctcccagttctaggttccagactccaggcttcaggttctaggttccatgtttcaggtactaggctaagggttttggttccaggttccaggctccaggcttccagttccaggttccaggctaggggtttcaggttccaggtcccaggctaagggtttcagttgccaggccccaggttttaggctaagggttcctatttcctggttctaggctccaggcttcaggttctgaactctaggttttcgattctaggctccaggttgcagggtctggactcatacaccagctccaggctacctggagagggaaggaagggctgcagggccaagtccgcccccgttttaccacctcctctataaggtgggataaatccgcctgctaacctcacagagttcacatgaggtcccgatgaggcaacatttgagatgatgcacataaagcctaaagggctttgcagctgtgagatggtggtgatattattgtcagaaaggtttaaaataaattcttaaacactcagatgtttcaggctagtttgtagctgcttctgaacatgcagcagtgtgctcatgggccacagggccgccgcgcactcgctacacctcttttggcaacgctgttgctttcctctccaattggaggagagctacaccacccagaatttgctagaaatgctgggtcttgagccccacctgtgctactgactcagaacctctgggggtggagccgggcatttgggcttctgacacacccccggacgattctggcgcaccctcgccttcagaagttctgccttcggtagacggatgccgttggtgtatctggctatacagatgggagaatccatttactctgatgttcctgattagcagagggtggctttttcctgctcagacggctgaggagtgaatgacttcggtcataaccgttaccattgctgtgaccttcccgctgggcgaagctgctagttgaggatctgctccctctcataggcctccctcccttctcccaggggagagcctggccagggcccccagcccggtgggtctgcacttggcacacagcagaccctggatcactagcgtttagtggcagaaaagtgagtgagtgaatgaatacaggaacagatgaatgaatgaatgaatgaatgaatgaatggacttagcttgacttcacataacatttggaaattctgattgttttcaaactagaacaagatttgaaaaggcttgtcagaaatcgcttacatataagtgaaggtttaaggaagcgggatttaatttggccaggtgtgggttctcagaaatgttctttttgattccccttcactctggccagggtggtttgcgaccttacccctccttcatgtaataagatatagaggggaaaattaaagcaagaaaccaaatccttttcctgtttactcctacagtttttccctctttccagttccttgtttttatggtttttcctcccttgtgtttctccgttggcttttgttgcaatgtatgcacttggaaaaaatcttctgaatgatcctagtgatggggctttggcctcattgggcgttgtgtgcacgatcgggttgcattgcacactgccggcgcgatgagctcgcactccctaaaaaggcaatcattgtgtccaggaaaactctgctaggttaatggcacatgcccaggggctgaagtcacttggaccaaggtttgtagaacatgctccgtgtggctttcctgttggggcagggggattgggccagaggaatttaggtgtattaacacagcctgccaggtgcaataaatagccacctttgcctgaccttaacctcacctaagcgccatgctcctcaagagccctgggcaccccaggagtaactgaaaacctttggaggagagttacgctggtgttcttgggttagaggcgggtggcaggctggagaattaggttggaaataaaaatgagtcagtgttggtgatgcgttttgtgaaaccggaaagcttagttagaatgatagagaatacataacctgttctcagcaactttgttttaactgacaacaggattttcccagttttcccactaatgtctcttttctgttctaggatccatctgggatccacattgcattttgtcatcagttcaccttggactcctccaatccatgacgatttctcagtatttacttgtcttcccgacctggtgcttttgaagagtagctcttaggtatcttgtagaatttggatttgtctgattagactgaagtcttggatttgggggaagaatcgcacaaaggtgaagcgccctttccctcacatcctacagggacacacggcaccaatgtggcttcttactgaggatgctgacctcgatcaccaggctgaggtggtgtctgcaggtttctcctctataaagttactgcttctccctctccctgctctggaagcaagtcactaggtccagcccacatccagggaagtggacttaggctgcccatcctggcaggaggaggatcaaagaattagtgggcctgaggttagaaccatcaccatcattagtaaatttggagagagatactcagaggctatgcagatatcctgtgtcaccctgacgtattcatccatggataggtcattcttcttttagtgtgagtatcaaaagcaggttattcggtgcaaccagtgaacttgagagcagggactgggaagccctggagttgtcgtggctcagccccgtgcccctggctgtgttccttccctcctcactgccaagatgctgctgagccctggtctcacaaacacctttgagtggtctgctcactgctggggacatggactccgacaccttcctacccctcaccgttcccctctcctccgacttgccaccgccaaagccagcagtgacaaaggaggtgccaggggcagctgctccagcaggagctctctctgtactccggaccctgacatggatgaaaacaagatatgcttgggagataattctgttaactttgtcttcttttgggaggtgtggtggctaaatacttgaatgaaggttttatgatgggtggaaagagtaacaactttcttcatcctaactcaatgtcactcttcatgatgtactcagttattcccttttagaaattatcttaaacaagggtgagcaatggaatgtgagaaagatcaaagaaatgcagagcagactaagaaagatgaaacatctggattgcagagaagggtgacctttccctagaaaatatcaacactaaatctttacaaagccctgtccactgggttctagggagcgctgcaaatggactggtccctaagctctggcctgcttctccactcctgtgagacagttaacttttttcttttccttagctctgttcctcgccgtggggactctggataacaacagacaacaacagagcccgtggtagcagcagcgaaggagttaatatgcaccatgtgtctaagcccttttcattttacttctttgtaaatttttaacatatttatttaaaacataaacatcgatattctgattagttcgcaggaacaattattgtcattagggaagatggaaatttactagctattttcctcctttcatttttaaaaaaaaatatatatgtattacatttttttcttcaacttttattttaagttcaggcatacatatgcaggctgtgcaggtttgttgcacaggtaaatgtgtgccaaggggatttgctgcacagatcatcctatcatccaggtattaagcccagcatccattagctattcttcctgatgctctccctccccaccccaccctccgacaagccccactgtgtgtgagaacatgcggtgtttggttttcctattctgcgttagtttgctgaggataatggaagccctttccttaactcattaaatgggtaaatgtttgcccccacaagcccgcattcgtattttgaagccctaacccccagtgtagctgtatttggagatggggtctctaagaaagtaattaaggttaaatgaggtcataagggtggggccctgatccaatagaattattgcccttgtaagaagagacaccagagagctcactctgcctccgcatgcacacacagtgtgggccgtgtgtgcacacagcgagaaggtggccgtctgcaagccaggaacttgctggcactttgatctggaatgttccagtctccaaagctctgagaagatacatttctgttgtttaagccacccagtctgtggtgttttgttacagcagcctaagcagactgagacaggcagatactatcattcccatatgaaaattgaagagactgaatcatagaaaggggtcgcttgctgtattgctctgttgatttttccttctaatagttttgctttctacatttactgtaatgttcagttcatcaaggctcctgaccatgatggtttgttgtaaacttccccacttaacagtatcctctgcttcctttttcctcatttgacgtttttcactttgaattctcctttctccaatgttagcatctgaaaccctttgtgttgggcaggataggccaagtctgatgctgttacaaacattctgaagacccataggcctacagtgaccacagcttctctcttgggcacactggaggccattggcggtgtgcagggcctctgcttactgtagtctcagtccctgcccaatgggacgtggctctcatggcttctgctgtcagcacagactcattcactggctcttaacacttctgcccagaagtggcacagatggtggaaaggtgccaggtgggctcctctagccaatgtgagggcctttgtacaaaggagaaaaggggaaaaagagcccacccactggtgcagggctaggagagtagagggtgtcccttccctcagatgggtgcccccccaccctgcagcagggttgagggagcagaagcggggtcctgccctgttgcctggtggccgggcactcgctgcatgcagggcggagggataaggagcagagtcctgccctgttgcccagtggccgggcaatcactgcacgcagggtggagggagcaggagcagggtcacgccctgtcaccccgtggccggccactcactgcaggcaggtggagggagcaggagcagggtcacgccctgtcaccccgtggccggccactcactgcaggcaggtggagggagcaggggcagggtcacgccctgtcgccctgtggccggccactcactgcacgcagggttttgctgtctttatgtcttcagggcatttccatgagaagtggaggctgctgccaagacagcatttcaaaccattcttgaagcaggaaccacatctgcgtgtgaatttttccagaatctgggggaagaacttacttgtttcttcgatattctaaataatcagtacagcttccgacagcagtggcctccaaacctgaaatagaggcagtgtatgagtccacgagtctttttgcttggttttgccttgcttgctttacttggattctgacactccactcgcgtgtttccacattcaattccatttgaatgactttggtgcttctcagccagctgtggacccggcagccctgagccctagcccttcccctagcagccaactcagcacccgtgttctaaggacgcaggagtctagaaatagctgcgattcagagcatgttttcccgacaactgctgattctctcctgacaccctaatgctgctctttccctattttagggattgttctttgctgaaattatgtggcacacatcaaaagtgttctacaagtgtccggggtgttcattgtaatctggtataacaagatgcctcacggccaggtgccgttggctcctgcttgtaatcccagtgctttgggaggccaaggtgggaggatcccttgaggccaggagtttgagaccagcctggtcaacgtaatgagacccccatctctacaagaaaaaaaaaaaagataccgcagttcacgcagttcaggtatttgttccgtgaacttgggggagtcatataaactcaacttttctttgtctctcttgcctgtgatgagtaacagaaaccatcttcccagaaactatccccacccacccccagcccagcccgagcagcccagacccaggaaggaggtcagagcctgcgtgactgtgtggcaaggatccccctcaaagcaggcagtgatccccctcaaagcaggcagtgatgaccaggctccccaggggaaggaaaaatggttgattaccccacctcactttctcaagttcctgaaagcctcccatcttttcaggatgttttccttctgcttcctttctggggtgatattgcaatgcatgtgtcagtcccattgttctagctgccttgaaggagttccagaaacaggcatggctggtgtgagaggaggcgtccttgtcaccatcctttgttgcctcccatctgtggtcagcacggaggctgccctgggtcttggccggcccctggagctggaggaggtgctgggccatggtttggaagctcgcatggtcccagcctcagagccccgttctctgtgacctggctgggtcaaagcctggccccagaacagcccctccctccccacccacagctgtgcccagctacgaacactgtaggccgggcgcgatggctcacacctgtaatcccagcactttgggaggccagggcgggcagataacttgaggtcaggagttcaagaccaacctggccaacatagtgaaaccccatctctactaaaaacacaaaaaattagccaggcatagtggtgggtgcctgtaatcccagctactggggaggctgaggcgggagaattgcttgagcccaggacgtggaggctgcagtgagccaagattgtgccattgcactccagcctgggcaaccaagagagattctgtctcaaaaaaaaagaacactgtggtgtgagaggcaattgtgggtcagcctgagggcacacccaatataactttcacaggtgttttgtttttctgagaagaaggtgacttttcccggttgctgtccatgcagactgtgagggatgttcacatgtcacatttctcaccggagtcctcgtcccatcgcctcctctctccctgccgcggttcggaagctccacgggggccagtgttgttcaggcctcaccagtccttggtcatgccacccgggctgagttcatttacctgctcattcatgtattcacttttcctccgattcaacaaaaaaaaaaattgattaccccccggcatgtcctaatatactgcagccttcgaaagagatgtagtcctcatctgaaaggtcatcctttcaagtgtccatccatccactgggcagatttttacttagcacattccctgtgctggggacttccccgggcactggggacactgtagtgcacaaaccgaagtccccacgctctgtgaccctgaagataaactgctgagcagacagctctgtaacatgccaagtgttggaaagggctccagaggaaatagggtggagagaggaacaagaagggcaagtggggaggttgctgttttctgtggggtgccagaggagggctcctgggaaaggtgatgttcatggcagtgggaaagacagcaggtgcaacagtggagaaggatgccagcctgacctgtctgactctcagcatgggggctgttgtggctgagcagagagatccgaaggaagagtggggagaaatgagggaggggagacagctgggggcgagactccctggggctgtgtaggcagcagtaagacttggattttccccctagcaagaggggtggctattggacagctcagacagaaacctggctgctctggcctgtgttaagaggattcctcctcgcactgtgtggaggacagccctggatggccgggcaggttacgcactgcagaagccctgggagcacccttcacactgactcctgtgtgaatgaccatcacagcctgggcggggctggctgtaggagcagcagaccagcaggggcaagagcagaagccagagaccaggctggacgttggcacagtgaccgcaggagagaagaatgttgccagaccagagtggagccatgggctgcagaggtggagaagtatttgcattctgtatgccttctgcaagtagagcctgtggggtttgctgatggattgaatatgggatgggagagagagggagatcaaagatggtcccggggttttcccctgcatgaccaaagtggatgttgaggtttgacctgtgccagtgtgggaagctgggtaaatgtcgggttctggggggaaacctggttgcctctgctgggcactcggccctcaggcctccacatcctccttgaaatgcgtatcgggtcactctggggtatgggtttctgattaggggagttcagaggcttattcacagcccctaaggtatagactaaaattaatttatgtaacatgtatcatactctttaagttggaggttttaaaaatgaattttaatttaaaaattgtcaaacataccccaaattagagaggctagtacgaagaacacctatacatctgtcacccagattcaacaaggttttaccatattgctttacctggctctttctttctttttctgggtgtctttgctcacagtattttgaagcacattccaggtgcagggtcacctcgcttttcagtgtgcacatctaaagcagcactgtgttctcacacaaccacaatgctttcacatctaatcaaattcacttgaattccttggtatcatctaatatctaaaacataataaacttttttccaattatgtcaaaaagtgtcatattacaattggttggtttgaatcaggatctagagagtccacgcatcatgtctgggtgttctgcctcctacacctccttccatctgggaagctccctccctgccatgttgctgtggaaaccaaggcactggatcagtagagcaccctacagtctggctgcttgcttccctccagtgtcatttcacttgttcctctctcctctgtatttcctgtaagtgaaaattagctctaggacagtgctgttagaaatgtaatatgagccacatatgtaatttaaaattttatattagccacatttttaaaaagcgaaatgcataaaatctattttaataatatattttatgtaaattgatacatcaaaagagcatttcagcatgtaatcaatataaaaaattgttaatgagagatgttacactctttttattgcattaagcctttggaatctggcatgtactttgcacgggtagcctctcagctttagttcacaggctcgggcgctgcccgtggctgcattgggctgtgcagctccagcgtctccaccagattctggcgtaccttttgctcctaggtggtgctgtgtgcttcctgttgtgtggcactgggaggccctcagtggtcgtcccatgtttagtgaaaagtaggtgcaggtggtgacggcggatctttccatcataaacttgtccatcatgaaagcagtggcgcccccactctctggatggagaagactggagagaagtcagggaattaaaagccccaacttgcaccttacctttcaagttcctatttgacatccacagggaaaaataaactacacagttggatctgagtctggaattcaagatctgagctggagatataaatttgggagttgtcagtgtgtcaatgatgtgaacacggctggatgagatcaccaagggcaccagtgccagtgccgagaggtcacagagatgcagaaccagcaaagggagttggacattgtcccagaggccaagtgagatgagaagtgcccaatggatataaaggttacagcaaccttgatgagagctggttcagtggagtaatgcggtgagcacctggttgatgtaggttcaagagaggagattcctcaaaaaagtgaaatagaattaccatataatttggcagttgtacttctgagtgttcaccgaaaagacctaaaagcagtgtctcaaagaggtacttgtacagcagtgttcatagcagcatatacactagcaacaaactatccaaaaaagaaatcaagaaaacaatcttggctgggcacagtggctcacacctgtaatcccagcatttggggaggccaaggagagaggactgcctgatctcaggttgagaatgttgtgagccatgatcgtgccactgcactccagcctgggctacagagtgagaccctgttatgtggtttggccctgtgtccccacccaaatctcatgttgaattatgatctttgtgttgggggaggagcctgatgggaggtaattggatcatgggggcagatttctccctttctgttcttgtgatagtgagttctcccgagatctggttgtttaaaagtgtgtagcacttcccccttcactctctctctcctgccgccatgtgaaagtgcttgcttcccctttacccttccaccatgattgtaagtttcctgagacctccccagccatgcttcctgtatagcctgtggaactgtgaatcaattaaatctcttttcttcataaattacccagtcccaggtaactgtttatatcagtgtgagaacagagtaatacaccctgtctcaaaaaagaaaaataaagaaaagaatcccatttacaatagctacaaaaaaagcactttaggattaaatgtaaacaaggaggtgaaggatctgtacattaagaactacaaaacatgatgaaaaaaattgaaagagacacaaataaatgtgaagatatcccatgttcatggactggaagaattaatattgttaaaatgcccatgctacccaaagcaatctacagattcaatgcagtccctatcaaaactccaatgacattgctcacaaaaatagaaaaaataaaataaaatttgtaccaaatcagaaaagactcctaatagtcaaagcaatcttgagcaataagaacaaagctggagacatcacactacctgattccaaaatctaatgcaaagctgtaaccatcaaaacagcatggtactggcataaacagaaacaggtggaccagtggaagaatagcgagcccagaaataaatccacgcatttccagtcgattgttttttgacacagttgccaagatcacactatggggaaaggataatctcctcaataagtgatgttggggaaaactgtccacctgcagaagaatgaaattagaccctcatctcattccatataaaaaaatcaactcaaaatgtattaaagacttaaatgtaagacctgaaactataaaactagtaggagaaaacataaggcgaaagctccatgatattgttccaaaaacaatgatttttttggatatgactcaagagcacaggcaacaaaagaaaaaacagacaaacgggattgcactaaactaaaaagcctctgcacagcaatggaaacaacagagtaaaatgacaaactaacctacggaatgggagaaaatatttgtaaactgtgcatctgttaaggggttaatatccaaaataaacagtaaatataaacaaattaatagcaagaaaacaaataacctggttttaaaatggacaaaggacccaaataggcatttttcaaaagaagacatacaaatggccaatagatacgtgaaaaaaaaatgcttgacatcattaatcatcagggaaatgcaaattaaaaccacaataagatatcatctcacacctgttagaatggctatgatcaaaatgaaaagagataacaagtgtcacaggaaatgtggagaaaagggaaccatcgtacactgttggtgggaatgtaaatcagtacagccattgtagaaaacagtatggaaattcctcagaaaattaagaagaaaactactatatgatacagtgatcccacttctgggtatgtctccaaaggatatgaaatcagtatgttgaaaatattccttttttttttttttgagacagaatctcactctgtcactcaggctggagtgcaatggcgcaatctctgctcactgcaacctccgcctcacgggttcaagtgattctcctgcctcagcctcccgagtagctgggattacaggcacctgccagcacgcctggctactttttgtatttttagtagagatgggttttcaccatgttggccaggctggtttcgaactcctgacctccagtgatcccctgccttggcctcccaaagtgctgggattacaggcgtgagccaccactcccggcctgttgaaaatatatctacactcccacattccctgcagcactattcacaataaccaagatatggaatcaacctaagtgtctaacaacagatgaatagataaagaaaatgtggtatcgagacacaatggagtactcttcagccttcaacatgaaggagatcctgtcattttcaacagcatggaggaatctggaagacactatgatatgtcaaataaaccaggcacagaaagacgaataccacgtgatctcacttcttttttttttttttttttttttttttgagacggagtctcgctctgtcgcccaggctggagtgcagtggcgggatctaggctcactgtaagcttcgcctcccaggttcccaccattctcctgcctcagcctcccgagtagctgggactacaggcatgcatcaccatgcccagctaatttttgtattttttgtaaagttgggtttcaccgtgtttgccaggctggtctcaaattcctgacctcaaatgatctgcccacctcagcctcccaaagtgctgggattacagacatgagccactgcacccagccgtcactcatcttctaatggaaagaatttgcatttataaaagaaggattgacatttgtaatttttctaagaaatggaatttacagtgccaatatagatgactctcaaatctcacatcgctgagtgctaagtgaacttcctgttgctgtgaaagttagctacaaatctgtcatatttgaagtgagttagaaagcatgtggggaagattgactacatctcctgaatccactaaagctgatttgggtgctcgttttgtgattggatatatataggacatctttttaactccctaatatgatataaccaaaaccagttctctgtattctctgtagaaaacaacacgacaggccagtgttgactgaaacccaaccacatgaacaaaaagggcaaagcccaacgctgttaaccctcaatggagataattaaagacaaaacaagagaaatactgctttatttcttactaggctgctaatgaaaaagactcacaattccacaaacagggtggacatcgctttccagtttactcttatcttttgaaatgtgagttattggttcccagtttgagatttattcactgaatcaactgtcagtcttttcattggggttattttcattttgtttcattttgattttgaccttaacttctggaaactataattggggaataaaaggtaaggggtgtctcctgataggaattacatatgtaacgtaaatatatagatacatctatctatctatatgtaaggtggcaatgcatatatgtatttaaaaaactaaataaaacaaaaccaagattgtctaggcaaatcagtgctatgtatagaatttctctttggttatttgggattgtaatcttgtctttatgcaattcaggattacactgagaaaaattaaagaaaatgtcaaaagctattatactgggcaggggtagggcatgagtttaaagatatttgagtattttcaatatatccaaatcatatgtatgcatttgtttctgcccaatttgtgaaatatatggtttatcatgtctatctaaatacttgctgaggaaggtaagttaactagtatttactgagcaactgtataggtaggattttgtctcaatttccaagcagtggttcttggctgtggccctgagctctctcaagaacatggtgcctggtattcctgcgtgcacactgagcattgtctaggacagagcaccaaatattttatggaatatccatgtgactcacgtatgattattcataaattacacattaactaccacaatagaagttaattcattgtacaatataaacaaaagtaaatttaaagaggcaaaaaatataatcagaagagcatgcattttacttcagagaactagacaaaaattaaatgtgccttgtgtcagtatgtatttttactttttaaacatttgtaagtactatttgtgattaataaaatgcaactgctcctaaaaacattactgaatttatatgtcaatggaagttcactaatataatgtgacattctgtggaattttacaatgttacgaagataacataattcatgatagaaaaccactattctaagattttcatcttcatcaaagtaaacttacccatgaaggggcattttctgaagaagagcccccaaacccttgtttgcagtggtgggaaaaggctggcggtggtagggggcatccttgcaccattttggtttcagttacagtggagctgaggttggatgaagaatcacagaaacaggtcaagtgtgaggatgcacgtaccagccaggcaggggagcgaagacagaaatgggaaacaggagcaaaatgaaacagaaataaagagaggaaaataatttaacagtgagtagacaggcaaaggcaacatatgtaaaattggagtattctaagaggaaaacctaaataaatggaacaatgaatattttcacatatgaattaataaggcattccataaagaagagtcgaatctccaccatgccccagaaaacatagagatagtacagtcactactgaaacagtctaatcgtgttttcagatggccatgataaagaggttcttgagaagacaggcaaaaaacaacaacaacaacaacaaatcaagatcaaatgggaaaatatccaacctggcctcaatttctccgtggcaacattcactattagaagaaagttatggcaatgtctacaaagccttaaggaaagaaagcgtgacagaattgttcacgcttcaaactgtcattcaaaaataaaagaggagaaaaatatatttgtttatataggcatataattccctagaaggatatgtaaaaaaatgaaattccatttttaaaaaatgcaaggattcaggaatatcgtccccataattccttcttgaataaactattgaagacaatgtcttccacctgacattgttccatggaatcactgagatcctttatgaacctgtaggctcaagccacagcccatatgaattaaattagaagctcggtgatagcactgaattatcaatacttttttaaaccccaaggttcagaacgagtgcaaccaagagataagtgaaagaagtacacaagagaactggcaatgagcgttatttaactgtgggactaagacaagcatggaaatcctaaaaccaaggagaaccacctaaaaaactgtgacaaacagtacaaggatttaggaaggcagctgggtataagctactgcccagaaatcaatagcctccatatattcatgcaataaccagttagaagacagaatggaagaaaaggcttcatatcaatagctataaaatatataaaataccaaggaataaggttggcatgagtgcaatttatataaagaaatctttaaaacactactgagaaaccaaaactttcaacagcagaaatggcataccatgttcttggataagatgacttaacactataaaaatatcaaacctcaccaagtttatctacataatgcaggtcccaataaaaatattaatagaatttcttttggtaccagatagcctggttctaaaacttgtatggaaaaattaacaagcaataataaccaagaaattttttcaaaaagattagtagggggctgtgcattaatctgttttcatactactgtaaagaactgcccaagactgggtaatttataaaggaaagaggtttaattgactcacagttcagcatagctggagaggcctcaggaaacttaaaatcatggcagaagatgaaggggaaccaaggcaccttcttcacaaggcggcaggaaggaggagtgccgagtgaaggaggaagaaccccttataaaaccatcagatcttatgagaactcactcactatcaccagaacagcatgcggggaactgccctcctgtttcaattaccaccacctggtctctcctttgacatgcggagattatggggattatggagattacaatccaagatgagatttgggtggggacacaaagcctaaccatatcagtgtggttagcctgaaggtatgaaaatattataagtctgtaattaataaaactatatggtactagcacatctcatgaacaggcaggtcaatggtacaaaacggaaaatgcagaagtagatccaaataaatgatgaacttttctatacagtaaaaggggcatttcaaaccagtgggaaaagataagttattattattattattatatctttttttaatgagacagggtctcgttccctcacccaggctaaagtgcagtggtgccatcacagcttactgcagcctcagattcctgggctcaagcaatcctcctgccacagcctcccaagtagctggtgctacaggaacacaccactacactcggcaaatttttttttatttttagtagagatgatgtctccctatgttgcccaggcttgtctcaaactcctggcctcaagcaatcctcctgccccgacctcccaaagtgctgggattacaggcaagagccactgtgccaggcagaaaaggatatgttattaaagaacagtttggggacagagagcaaaccatgtggaatacactaagttaatgcttcatacctcataccaaaataaattacaagaaagtcaaaagctggcaaatggaaccacaaaacaacaagaagaaatcaatttttaccaaaaaaactatatataattttatatatatttatattatatatgtttataatatatttatataatgtatattatatatttttatatacatataaatatatatattttagagacagagtcttgctctgttgcctaggctagagtacagcggtgcgatcattgctcatcgctgcctcgctcctgggctcaaggggtccagccacctcagcttcccaagtagctgggactgcaggcatgtgccaccacgcccagctaattttccttttttgtagagatggggtctcactatcttacccagcctggtgtcaaactcctggcctcaagcaatcctctcccctcagcctcccaaagtgttggtattacaggcgtgagccaccgcaagtggccgagaagtttaagataatattggaaaatatttcgtgtaagttacaaatcccataagttaccccagaaaagatgtttagctttgtcttacatagacattaaaatatttataaaggcaaaagccaatgttaaggtcaaaaggcagcaaacagggaaaaaatataatatttgcaacttgtgtcactaaaactaattttcacaagaggaactctaaaaagttattaagaaggccaatgatacgcgagaaggcaaaagaaataaaatagtttgttaaaaacaaaaggaactacacatggctctaaaacagaaagaagtccaaacttcacgcatattagaagtattcattaaaactactctaggttaccatctgcccaccccacgccccagcacactagcagggattaggagatggcttggcaactcactgcgtagtgtagatatggggacatagggacccctgtgctgatgagagagtccacagcagctatctccacagagtacagctggccagtgtaggtttggggacatagggacccccacagtgctgatgagagagtccacagcagctatctctgcagagtacagctggccagcatctgtccacttcaaaaggcacatgctgtttaacccggaagttctacctctgggaatttatcttgcacctctactcccatgatatgaaattccaagtcatttgctgcagtcttgcttgtagcagaaaaatgtggaaacaaacaaatttgtctgccataaaggactggtcaaacctgttgccatccatacaaggagtgccacgagctcctgtgcacctgtggaaggagctctgagctagattgtttagcaagaaaagcttcaacacacaagttcagtgaaaaaagcaagggcagaacagcgcacggtgctacatgtctgtggcagaaaaagggagaaaagcatgcgtttttgagtttatatattccatcaccttcaatatacagcgtcgggacacctgaccacctgcaggacccactgtcatcctgggagagggaggaggaagctctcggatctcctcttgtgaaagaggcgagattattgctcagcctggctccagaggcacgcagtccctgtgccccgagaaactaacatgccatctctgctctcccaccgcttcctgggttgggctgcggggagaggccttgctacagtgggtgcctcatcagcactgtgaacaaacagggaaggatatctggggccacgcagggagaccctgggggatcctgggcagaagcccctgaagtgattgagctgtttcctgggccctctgatgattctccctctgccttggaggcttggcttcccctggctgctgctaattctggaggacacagtggggtgggccacataatggaggctggactgtgtgtccagtccacccagatgccaccatgcctgccagtccctctcctccttagagcacaagccctctgatgctcccagacagtggaaactttttgttccccaaagccctccagctggccgggctgccctccccagactccctccttccttccagatgtgagcaaatccctttccttccacctcgctctcggcccctggttcaccttctgttcctgcccagggcaaactgccctatgtgcatctctgtcctcatccatgaaaccatccttgtcctcactgtcgatggaatttttcagtgatacctaacatctgtcccagagccatgcacgttccgaaagcacattccagggggacagttgtgtccctggtgcaacacgggagtgggcacacattctctgtgctgtgcatggggacagctccaggaagagagagggcactgttttcctgtttcctgagtcaatccgctgtagttctgtggcccagctgagtggcataggctctcctgacccaggtacctatcagcccccaaaataggtgttgccatgattcctttggacaaaatgtaaaatctggctgaagactgagtcctcgtgcacctagcgtgacccatgacagcatgcaggtgttggtctgtagggatgccataacaaagtgccacaaactgggtgacttaaaataacagaactgtattctctcacagttccggagaccggaagtccaaagtcgaggtattgggccaggtgggttccttctggaggctctgaggggaaggtgttccaggcgtctctccagcttctggtgctgctggcagccctcggccctctggcttgtagacacatcacaccaggctctgcctccgtctccacgtggccccctccctgggtatttgtgtctctgtgtgcaaatttctgtttccttataagaaagtcattgaatgagggcccaccctaatctagtacgacctcatcttaacttgattgtacacgcaaaaagcctatgtccaaataaggccccatccacgggttctgggtggacatgaacttttgggggatgttactgaacgcagtgcagggttcttacattctcaccatcacgtatatgattttattcttcagggtgctaaggtgtggtgtgtgccatgtgctcttaaccccttagaaaagataaggacaatttttttttcaggtccaatgtctgaatgtattttttttctttctcttaggatttgaagatatataacaatatgtcataaactgacctgaaatccttgtttgttccgcagcgaaatccattaataatccctataactgggacagttttatgttcccattctcggtgtggctatttatagtgaaacctcactttccctgtgttggttaacattaaaaactggaactgcttctgaggtaggaggcgggacttgactccagaggcggggcttggacactgggccagattgaggactagctaaaacaggcccggtggggaaagcagtcttcaatcagacacgcccaccagcgctatgtcaatttaccgttgccatgacggcacccaggcattaccgctcctttccacggcaatgacccagtgattactacctcttccttgcataaaccgctccttaatctgcatgcaattacaagtgagtataaacaggactgcaaaactgccctgaggtgctgctctctgcctgcggggtagccctgccctgcgggagccggcagggagctggaacactgacacttcagtaaagctgttttcttctacctatgacttgcccttgaattctttcctgagcaaggccaagaacccagatgggctaagctccactttagggctcgcctgccctgcatcagtttaactaaactattagaatttttagtttaaaagaaatgagtaagattgtgagcattctgtgagatgcggagtgaaagaaggtgctgtagtctgaacgtttgtgtctcccctaaattcatgtatagaaatcctaaccaccaagctgactgtattaggaggtgggagcttttaggaggtgattagggcatgagagtaaatgagattagtgcccttataaaacaaacccggggagttctttcccccccatcccgccatgtgaggacacaatgggaagggggccctcaccccttctatgaaccagaaagggggccctccccagacactgaatctgctggcaccttgatcttgggcttcacagcctctggaactgggggaagttaatttctgttgtttataagccacctagtctatgcccttctgctacagcagcctaaacagctcagccttaatggacgaggcacatggaatgacttccgggcctctgacagggtgcttggggaggatggtgtgatgttgcgttatcactcacagacactgtggaactgactgggttggtggagcggggacccggggaagagttcagttctgttctgggaatgttgccttgaggcagctgagcactacccacagggaaaggtctggcaaaggttcacgtgcattcgcctgggccataggggagaggggagccgtcagcggtcagggtggtcaaagccacatagttgcatgaggtctcctaagtaggtcagtggagcagagtacccagggtggagccccgggaacctcagaaacaaggaaggggtgagcagaggaagggtcgccctcagggcactgggagggaggagcagggtgaagggtgggggcagaggggaaacagccatgtccatgctgcagagagacccaagggagacccggggaagaatgtcacttgcaccttgcaaaagggagggtcctggcggcctcagccagagccgttttagtgaagtcatggggagaaggaccacagaggcttagtcctggctggggccgcagtgggactggcagtggagaggagggggcccaagccagggagattgagttcttggcaaagaggccggcggcgttctccactgcgtttccatccgcaggtgcgcctgccgcctggcctgtccacagtgtgctggttgctggtattcagttctggattgtacctctgactggactgaggtccatcagcaaatgacggggcctcggcggtgtggcagtgtgttcagctgctggcatgccgcctcgggaacagaaaagtcacgttgttgtgtatgcgggtaacagctccagggaggcgtgaagagaacttcctggcaaggagtgctgctccaagactgaatggactttttttgaagtgcaagggtctggcctctggaagggtgtttttgctgccacctttgaacttctctgtgagtttttaaattttgagcaaatcgccttttataatcattctatatgtactttttctacccaacggctgcatagtgttctcttcccacagctgatgtacttaagccccatccttctctggtataaagaacgttgcgatgaacatccactggcaatcatcttcctactcatctttgattgttgctagaagggaaattgctgggttcaaaggatgctgaccacttgttaagactcctggagcacccagatttccatccttcttaatctcgtgttccattacattgcagaatgtagtgacagccaagaatttccattcataaaactcaatgtagggttttctttggaagctaacaaatgacttcaggcttgtcatcagaccattgcactgtgctgactctgaagaatttgtaagttcttcacatcactttaagaatacttataattttacttattcatgaaagcatttaaataagcttcttactattaaataatttcttattgtgaaataaaccatttacttcattaacttatgttttttaaaatcaatgaaactaaaattctaaggttaaagaaaaaattctaaggttaaagtaaaatacaatagtaatttagcttaaaaaaagaaaaaatgctgattttcttatttactgatgtgaattctcaagatgtttttatattacttattgaaataatgttaatttctgagcctgtgattttgaacaaaacatgtataattgaagtaatctataatctgtgaaacaggtatctcaatttttctcaaaggttttaattagaaagtcagggttggaatccactcttcacgtaagaatgagatggtttccagagataccaacaagccaacacatcttaatttgatgcctttttattatcagcaaaatatttaaaattggggttttattctgagtaacttatttcatgctatgaaactgccaaaaacaactacaaaaataaaatgaatttatgttctttataaaatgttattaatatgaaaaccggacactatgtgaaagcgatattgtgtttatgtagggagagtgtgttaacatttttttcagcatggctgagttggctgtttttgaatttgaaacttctgcagtctgggtagacagtgccacctccctgcagcaaacatgggcgtcccttactgttctgaagaccctcaagctgcagtcaacactggggtcgtttgtggaaggattctttcttgctgtcttgatttgcaagaacacctctgaaggtctttgaatagtaaatgctgtttccatggcaactgcagtctggcttcagtgatcccttaacctgtgtgcctttggctcaaagcacccaggagctcacggccttccccaggggcgtccccctcggtcctgttcacaagcatggactctggcatggacggccccaccctggctgcaccaccgattgtccacatgacctcaagcaggttatttggcctttctgtgccttccttggaaaaatgggtctaatacgtgggcttgttttaagaattaataagagaactggcacacagcactcggcacagtgcctggcacatggaaagctcttgagtcgggctccatcccccaaatcgagcacctcagttgtctgtaaatgggcgcattggcagtcctgtgcagcaatgcaagatattcttggtttttggtttcttttaaattctttttaggtttcttttaaaatgatcagcagtctttgatgatttatgagcctgtgattttgaacaaaacatgtataactgaagtaatctataactgtgaaacacagggatcccaatttttctcaaaggttttaattagagtcagggttggaatccactcttcacctaagaatgagttgcttcccagaggtaccaacaagccaacatgtctttggtatgttattcttcttgctcctcttcttgggtgtggggattttcatctctcttcctggagacagggaggccctgagaggtctcggtggtgacgggttgcaggcaagaggagtgaagcaaaccctgctggtactgcagaagccacacggagtgaagagacatgtccttgacgtcatagagtggagtgcgctttctttcttttgttctttcgttctttcattctttcattctttctctttctttctctctttctctctgtctctttctttctctttctctttctttctttttctttctttctttccctccctgccttcctgccttcttttttctttctttctttctttcttctctttctctcgctctgttcctttcttttttccctccctgccttcctgctttctttctttctttcttttttctttctttctttctttctttcttgttaaatccatatcacaaagcattttcacagatagcttgtttctagttgttttttttttcactttaagttctgggataggtgtgaagaacatgcaggtttgttacataggtctacacgtgccacggtggtttgctgcacctgtcaacccatcatctagattttcagccccgcatgctttaggtatttgtcctaatgctctcccttcccttccccctgacctcctgacaggccctggtaagtgttgttcccctccctgtgaccatgtgctttcactgttcacctcccacttatgagtgagaacatgtggtgttctgttcaccattcactcagagaacatgttggttttctgttcgtgtgttagtttgctgagaattgtggcttccggcttcatccatgtccctgcaaaggacattaactcattcttttttatggttgcatagtattccatggtgtctatgtgccacattttctttatccagtctatcattgatgggcatttgggttgattccaagtctttgctattgtaaatagtgctgcagtaaacatacgtgtgcacatgtctttacagtagaatgatttataatcctttgggtatatacccagtaatgggattggtgggtcaaacggtatttctggttctagatccctgaggaatccccacactgtcttccacaatggttgaactaatttacactcccaccaacagtgtcaaagcatggagcacacgtttgttcattcattgaccgttccctgtgtgtggctttcatagtattcatttgggatcctgacgtgaaatggcctaaccagggtggagtggcagttgtgttcccggcacaggactggcccagcccccgagccctgtagcttccctaacaccattcactcaggctccgtcagcctctcccgggttcctgggcttctctgcttgttttcatgaggtttgcgcctttctcctatgccaatttacagtacaccctttagcagctgcagccacatttggctttacaacccctggatgccctcatgtcctgcccagacccttcttttgaactccacctgacaacttgacacccccctttccccaacactcttcatcaccctgccagcagctgctcctcctgcatttctcatccccccacctcagagctgcctgagccggggctcccccgagcttgttcccctcccctcctcggtgaaatcgtgaagctggctgaggcccctcccctcacatagtgacctcggcagcctcccagtccatctgcttccaagattggccccaccacacctgcatcttcatcttggtgtcctagtgatcctaggacatgccagccttgggattgaaaacagcagcctctctccccaggacaaggccccgtcacagctgtccctgtgcctgtcatcatggccccctgaaataaagtctgccttaccatcttcacaaaaggagaaagaaaacacaaccctcatgctatggttccccgccttaccatccttaatgactcccatagcttccgggatacattttaaagccatatgatggcaccaggggcctcttagccccctccttcctgcctctctcccatgggggtcttacactccagttgtaccgagctactgaacagcgtttcccatcattttccatccttccagcctcagttccccctcctccaggaagccctccctgacttcctcggctggggtaggaacattcacactagctgcttattatcctcacagcatttttcctgaggtttagcttacaagaagtctttctgttgaataaatgaagaaatcagcaacaagggtaattgttgctgaaagaaaatatttattatattaaacgtaatacatgtttattatagaaaaataataaggaaaattcaggcaatagtagaaaataaaaattatgcctcatacttgaccaagcacaatacctgttaacattttgtttatttttctccattcttttatctgtgacttttttttaacatagtctcaattatgtgtctctaaatagcgcatttttaaaatctcctttttttaaggaaagaaataagcgtaactcttgtatcaaatgctctgtaaaaatgttttaatggccacaaaatatggctttgaggatgcaccatcacgtcctcacttccgtattgctggacactgaggcttttgtgtttgtttactgcggtgaatagcattgcagtgaacatctttaagagtgaggtttttctacttcaaattatttccttaaattagaatattagaagtgcaatttaaaccccaaacctacaaacacggttaaggacctggagctttgctttcctgaaagggtgtatcagtttacacttgcatttgtgttgtctgagagtgtcttgttcatcacaggattaagtactgtgattatctcagctttgtaaatttgacagctaaaaactggcagctaactgattcttaggtatctcaagttctttttcaaatcgtcaaaacgtgtcttagagtgagtgttgatattttcttgctgatttgtggattgcttattaacctttttcatagttgttgcaaatattttttttcagtttagattaggaactgaatatcttcctcatgtctttaaagaaatatgcctgaccaggtgcttgataaccctaaacggagtttcctgccgggctttctcttgtatgatgttgaggccgtcacggtttgttgagcagaggagtgagtgctaaaagctggagttcagcagaaccacagtgacgcctccaccccgggtaaatgcttaaccacactcctccctgtaaaaataacggtgtcattaaacatggaccggctgttccatgagctcattcctaggaaacagtggctgagtagcagaagcctgaccggtctccatttccgcccaaatgtgggatgtgtgcacgtggcataaagcctcgcacgtcgcttttgggagaatcagcttgagtcaacttctggcaaaagattggggccgtctttggacagatttgaatattagacaccatatcatctaatgaaaaccagctgggaagagtcagttttcctgtgttcttgggcatttgacaaatggtgggagatagttctaattttagaaaggaaaacgtaatgcatattctcatgatgatttgtcaactggatattttgcagagaggaaaacgtctgaaatgtcccaaataaagctatctgctgtcatgagaacacagctggcagggcagaaagcagtgtcgatcaacgggaggtcgtcctgcaccgggacgtcagtgccccgacacctcggtgtgtcccttggctgtgtggccttgggcaggtcactggtcaagcctgagataatgacattggtctgctggggagcagcggccctaggccagatgtactaggaggccccttcctggctgtgattttaagatggaggggaaaatgtttatttgttctgtgaaagccaggggtggggtaggacagagccagcaacaccgacagcccatcatgctgagccagaggtctgctgagctgaattgaagctgcgtcaactacagtacgtgcctcaccgagcctcagtttccacattggtgctgtgcagatgataatacagactttgcaaggctgttgagacttacctgcactaagacatagaaagtgcccaacacagcgcctgcagggccagcactcggtggcagtctaaggaatgtctgtcacagcgctcccagatggcaggtcctgcctgcctgggcccagctctggctgtgtggctcaggactatgggacctctgcaggctgcgtcccctgcctgcctcagtttctgcgtctaagctagaaagcatgattgttcctccccgtggggccgttacgagaagcaagcacatggaagcgtgccaggcattttccgaacgtctggaacatcctcagcggcagggtctcctcctccctctcctcctcctcacttagaaatattttccctgggagtcccacggaggtcgtgaagatgacagaggctgctggcactaacagctgtgtggggcagcccaagcccctactttgaaagttccattccatccctcgcatttcatctgaagagcgctatgttctccctggggagaactggcctgttgcatatgaagagtccagagattttgaacaagggaaccccttcagcttcgaatgaccattaccgttgatgatcccagaagttccctttccaagcagtgacccatggacttgtgtccctcgtgtgataacctgcactacacacatatcctacaagtgtccatagtggttataagctgccacagccatacagatctgagagccagaggccttcaaaccagctaaggctctgaaacacttcaactccacttaagaaaacaaatcggagcacatccgtgatcccacaaatgctaatttgcttgtcacacatcagaaacccaggaaggcacagaatagatgctctcttactggcttataggttgggtactttaaagttggagacgtttaaatcagagataaacctattgtaacaatacatttcatgtcatgtgagccttttgtcttccagcaactaaagggaactgtggtaggatgagctggggtcacagggacaaggaagacaggtaaggggacggaagccggggcagcaaggagtggctcaggagctctcaccctgcagtgggcagctcatcacccctgctccccgtgtctgtgtcccttcaggagaagctggccagggacagggccaccactcatagacagctcctcagcctactcagcactgctttatgtgtctgtgtgcacacacgtgtgcatgcctgtgtgtgtgcaggtgtgtgtgtgcctgcatgtgtgtgtgcacatgtgtgtgtgtgcctgcatgcatgtgtgtgtctgtgtattccttttgaaacatactagatgccctctctaagtaaatcacatttaactgctgtaactaacccgtctggcaacatcttttcttaatgctttttcactgttcaccgggttgagggtttcttttccttatttccacttctgcttctttaacgaaattatatgacttgatacagtatcattcttttcaaattcagtgtttcagtaaatagttcttttcagcagacaattacttaggcagaagtagtttaacatagcatttgtctctgaaaaaaatgttttttttcctttctgtctagatcctttaaaatatataatattgcatcatatacaatattggcctgtaccaagcacctgtatccagaaaagtaaaaaagctaactggcttaaaccacagcagaacctgccttgctgggtcaccttccttcagttccttctcatggtttctagaattccttgagcgcacacagcaagctagctctacaatcactttagagagtgaggatcgatgccccagcttcttgttttcttagtggctttttaaaaaatagtagacagtatatagctatctactggcaataggaatctcttaaaatcaaggtgagaaatgtagttcttttgcaagagagtcagagttttgtgttcaatgaaaatttaatatttgaaaaataaaagatcttaaaactattagttttccattatgatcagatggctctgtcaaaatggaaagaaagcagggaattttctgtactcctcaacacaaagtttatcttgttcctgaaaaaatattgaaccattttttcaatatttgtccttgccaggatttcaccctggcacccgctgttggtgtgttttaaatttggtttccttctgattcttctaagagaatatctactttatcatattttgaaataagactttacagtatccaaatgtggatgatatatccttttaactatgtccctgatattgaagctctgaacataacctctcaatttgagtcatctgtgtttccaggtattgctatagctaagccacaaaatactgaattttggcgtcttatatagatggttgcagtgtttccattcttcacgaagcatgagaaattcttttacaatacgatgaccgtgctccgtcgttttaggcgaagaacagacttaccacacactgtgctttctctcactttgtgagacagtgaaggagggaccttctcttcaggtgaaatgaaacccccacacggattagcctaacttcttcagctaagggctgggccttcttttattacaaataccgttgcatctttatacactgtttcagtgaaaaaaaaataaacatggcaattccctttccaaggctctaagtcaccaccaggcggcataacagacctctgtgtccctggtctgtaggagatgggacaatgcggggacagcgctgggagggcccgcaggcagcaggatgccagggcctcgccaggaagccatggtaggcgcccggggggagtctggacgtcaccccattctcaaggtgaagcctcgccagggtctcgccaagagagctgaggggtcagattcaccttctccctgcacctctgcacttccctctgggtttcctgtctgtacatccagtgccgcgcgtggcgtggggcgtggcgtggggtggttcctcacagttaccctcgctgggtgtgcggttgtctgacatcagtcctccccagaaagtgcggctgcccccggtcggtcgttctgtctgtagctggcgtggtatctggcacggcggaggccctgggtccgtgtttgtggatggaatgaatcaatgtgtgaatgaaggaagtcacattggcagcagtggcggggagggtaccgtttggggacaattcagatcattctgaggagacatgctgaggcctgctctaagacagcagctgtgggagggcacggagtggcattaagagaggaagctgactcgatgacgggcggagaggtgggcggaggctgtctcaggagcgccagcagctggcagtgagtggtgggcgtttcctgacactaaggctctgtgcagagcgcgtctacaaacactgtctattgtctcgtttcatcctcacaacaaccacccctatgaagttgtcactattattgtctctcctttacacatgagtctgggcacagggacttcaagtgaagcctgctaggaggcactgctgctgcccccgcgggaaggaaatgcagggaagggactcagggggcagcaggaattctgctttggatctgtcacatttgaggtgcctttggggcttccaggaagaggtgtccagacggcaggggctgaggcttggaggagtcaggattggaaatatgaactgggtgcccatcaacatctaggtcgtggtcaaagtgggtggtggggtattacaggaaagagctctgcagccccccagaatcctagcctgcgcccgcagatgagcaggggcaaggacgcaagggcagttgtgcattttccttcttttctgtggcattcagaaataggcaaaatgtgatacactgcaaaagtgactgtttgctatctgcaggagtggccatcagtgttagttaaatgagagctgtgcagaatggcatgtgtttgtcctcttattatttttgctttaaaaacctgttttaaaaccctggtatcaatggtcaattatgtgactttcaaaagcaaaaattaaggaagacaaaagaactgcatttgacaccttgaaaggcccagagggattcttaaccttgggtccaagaattcccccaggggcctttggatagatttccagagatccccgaaactgaataggaataaaagggtagcattaccttccattatgaatgcgggcaaaaaccttcggtagtattagaagtgtgacctcagcaccaatagaaaccacaggtatttctccgtcactttcgggttgttgctgagagctggggaaatggtttcatgcatcactgtcagtatttggtggaataaggacgtgcacgcacgtgctggctgttgaactgttgcctctccactgcaaaccctcccttccttgctgcagggccagagctgtgccctatcgggccctgcccccagagagagcctgggcagtgggaggagggagcccggagcacgctgcttcctgcctgcttcctgtttctgtgagcgtcaccccagcaacgggatttcaccctggctgcagttgttggttctgtttctagtgtttttcacacgcccagacaccaccctcaccagtccctcctgagcccccgctctgaggtccgggtccccactccaagccttctgggaccatcaccccggtctttgtctccagccctagctgttcctgagatgacgcctctgtggtatgaggcctcctttgctttttcggccaagcaacacctgtttaggggctgcctgtattgcttctattgaaatcactgctgtaatttctttttctcctgacttggctctgattgatacactatatcaggatttaaaaatattttttgacaatgtgtttcagaataatcagtttccttcgtaaccctatgtttcgttacatgcgtttaaaaatattattccaagaatgctccacaggcttcaccagcctgccagggggatccactataccaaaaaacagagagctgagagcagttgccagcctgattaattgccgtttcctgggctgggtttaaatgcctctaggaacacaaaacataaagggttttctttctgttcttcctccctttcttttcgaatgaagttatggaaggaaatgaactttgttattttccccctttaaaagtagtacctgctcatggaagaaaaaagaacactggaaaagaaaagtaaagaaaaaaatatctctatcttccttgtgacataaaaacacccatggctccattttgatgtatttccttagggccttaggtgttgtttatttttgcagagatataattgtcataatctttgtcataagcatttccaattctacttcatacttgtcttaaacactatttttatagctggacaggatgctgtaaagcagtaggttgacctggcccttttcttataatgtaaaactttgaccataattttattgtgataaaatatttctaagatttaccattttaaccatttttaggtgtaaagttcagtggttttaagtgcgctagtgtgtagccatcaccatcatccacttccaaaactttttcatcttcccaaactgaaattctgtacacattaaacactgactccccaaattcacagagctgaaggtggagtgggcattgctttccccagcccttggcaactcccatgcaactttctgtctccatgaatttgattaacgtaaatttttactactgagcttcgcttttccaataaaagttcaaggtacatagtttaaatgtacatactttaatgcaagcagtattgcatgacaccagcctgccttctttcgtcctttttaaaaaattagaccagaaactgttgttgaatcccatgttgccggtcctgatggttatctttctagtgagacccgaaaattcacgtggggacatgacagctttccattttcatgaattgcaaatgtggagggctcatggtagggagatggttttatttttgtgggttttgtttcgttttgttttttgagacagagactcgctctgtcacacaggctggagttcagtgacacgatctcggctcattgcaacctccgcctctccggttcaagggattcccgtgcctcagcctcctgagtagctggaattatagatgggcaacatacctggctaatttttgtatttttagtagagattgggtttcaccctgttggccaggctggtctcaaactcctggcctcaagtgatctgcccatctcagcctcccaaagtgctgggattacaggcgtgagccacagtgcccggcccaggagatggttttaaaacagagatgtgccctggttgccttctctgaaagtttctctccacacagatctcctgacctttggtgtggctgatttcacgtggagtctgttggattcgcaccatctggctcctgttttctggggaaactctgcgctggctttcgtcttcctccttttgtgattacataaacaaaagggtaaattgttttcttaaacgttagttttaaattgtgctaaaatacacataacaaagtttgccatcttaactatttttaagtgtacatttcagtgacatcaagtatactcaccctcttgtgcagccagcaccaccagccatccccagaacttcttcatcttgcagaactgaaactctgcccccattaaacgctgactccccattctcttctccatccagccctggcacccatcattctactttgtcttgatgaatagtatgaggtacctcatctagttggaatcatacagcatttgtccttttgtgactagctgatttcacttagcatgatgtcctcaaggttttctcacattttagcagatgacagcatttccttcctttttaattctgagttaaattccactatgtatctatactacattgtgtttctccattcagccatcagtggacacttgggttgcttctacctacaaaagaccaaattattttgtccatttaatataagttatttgaaggccaggcacagtagctcatatctataaccctagcactttgagaggtcaaggcaggaggatcgcttaaggccaggggtttgagaccagcctaggcaacatagcaagaatccaatctctacccaaaaaactaaaaactacataattaataaaatgtgaattatttgaagtttcagtgcagatcccttcttatcactgtattatctgatattatcgagccaccatgaaacctctagcacagcctacctgtggtaccgggaggccaccctcccagccacatcggggtctgcctgatttctgctttcctcactgcctgggtccttctgccttcccccagagacgaagatgctgcaagttagacttggagctctaatattgtattctaaatgtagggcatatattttaaataatcgtagagtgttagagctaaaaaggtttaatatgctttatattaaaaacatatttatcttgttaatactctgagtccattgtgtcacctcgggcggaccatttcccctttttctaaaacctacaccatgggagggtctctttgccaaaaaggagaagttcatgagcttccattgcctaatatcattctttggaggcacagtcatagctccttatctggctctcgaagttcaagtccagctgtctagatcataactttcaactaggaaatcaccgggtgccttaaaaaaataaccagcgcaaagttcaggcctcttgttctagaaaagtagtaaggttactcctactagagccacgggatgtagaattccagttactgttggggttgtgtgtgttttaacaggcacacctctttccctgcagcagggggtacacagcaggctgtgcagagtagggcaaggtagaagccctggggtatgcaggaaggtgggtggggaggggctggtgtgtcagggacaaatgtcagctcccacatcccttggtaaagtgtgactgggtacatcagatttagattaaattatcctgaaactatttttttttctttttttgagacagagtctcactctgtcacccaggctggaatgcagtggagtgaggtcagctcactgcaacttctgcttcccaggttcaagcaattctcctgcctcagcctcctgagtagctgggattataggcacctgccaccaagcccagctaatttttggatttttttagtagagacaaggtttcaccatgctggccaggctggtctcaaactcctgacctcaagtgatctgcctgccgtagcctccaaaagtgctgggattacaggtgtgagccacagcaccccgcccctcaaactattttgtagcttgcattatatagatcaaacaccttcattgcacttacatctctagtattgtatttacttaaataatgattatcaatagcaactcatttaatccttataaaccctgggaactgggtaccattatccctcccattttacagatgaggaaactgaaacacaaagagaggatatgtaacttgcccagcgctgaagactcccaccaggcacagcgcgcctagaatctgtgctccctgtcaccacagtagacaattgtactccagcatcaacaatgaaaatcacttttcactgacttaagtattattccttctccaagttgatcttccactggtctaacttagattctagcctttaggcaagagtatcttgttatgagacgtgtaatttgtttcctttcaggtgccttgcaacacaactctgtttatctcataagcagttttaaatgctatttaaattctgacaaggctgagtcctgtactgtgtgattacagagcaagcactaactcacaaagctactgtgtcctgattatttctctaattgtagagtaatttaaggaagaaggaatatatcagcaataaccgtaaaatgatgatgataatggcagttctgatgttcatacccaacaaagaaatcagcaatataactactgaaagggtgtagataaaatttgtaaatacttgcggattatgtgtatgtctaatccaaaaagtcagtctcaaactgagagttcagtaagatagtttgtaataacagaaacaaaaaaccaaagcattcctatatcctaccgtaatgatttttttttgagacggtgtatcgctcttgttgcccaggctagagtgcaatggcatgatctcggctcactgcaacctctgccaactgagttcaagtgattctcctgcctcagcctcccgagtagctgggattgcaggtatgcaccaccacgcccagctaattttgtatttttagtagagacagggtttcaccatgttggtcaggctggtctcaaactcctgacctcgggtgatccacccgcctcggcctcccaaagtgctgggattacaggcatgagccaccgcgcccagcctgattttttaaataatggaaaaaatgataaaatcccactcaatgttgcatgtaggaataaagaaaaatgcagggcctatatgaagaccataataatttactgaaggacatagtcagttgaaaaatgcagagagcaataccttgtctctgaacaagaaaactccacattaaaaagacacggatccatccccaaataaatgataaatacagttggccctttgtgtctgtgggttccacattcatggattcaacccatctcaaatcaaaaatatttgggaaaaaaaaaggctgggtgcagtggctggccaggcacagtggctcaggcctgcaatcccagcacttgggaaggccaagatgggagggtcgcttgaggccaggagttcaagaccagcctggtcaacacagtgaggccccattgcaataaataaataagaaaatatttggaaaaaaaatggatggttgcctctgtactgaacatgtacagacgtttttcttgtcattattctctaaacaatacagtctaacaactatttacatagcatttacattgtattaggtatgaacaggaacctagagatgattcaagtacacaggaggatatgcacaggttatgtgcaaatactccaccatttatgctcagagacttgagcatctccaattttggtatcccagtggttggaaggggtcctagaaccaatgccccttgaataccgagggacaactgcataatgcatttcaaataaaatctcagtttagaggggaaggttggttgaaagcttaacaaatagactctaggccagcgtggtgacacatgcctgtaatcccagcgctttgggagattgaggtgggcccatcacttgagcccaggagttggagaccaacctgggcaacatggtgaaaccccatctctataaaaatacaaaaattagccaggcaaggtggcacaggcctgtggtcccagctactccagaggctgaaatgggaggatcacttgagcccaagaggtggaggctgtagtgagccatgatcacgccactgcactccaggctgggtagcacagtgagaccctgtgtcaaaaacaacaacaacaatgacaaaaagaaaaaaaacaaatagactcctgagttaatctggaagaataaatggagaggctggccaagaaatttttgaaaaaacataacaggggtggttttcaacttttttgtagcccacagcttctttattcaaacacaatctcacctccctgttcaaatactttcagtgggtcctttactgcttcctgaataaagtccaagttccttaacctgcgtactgtaaaaagagcattctgacaatatccaagggtgttcaaaaagcaatgtttacaactcccacagttctaccacttcggcagagcagccctgtgtttattctgcatgtccttctggtctttgcatgcctatgtcttttacacagtcctattcttttttttcttttttgagatggagtctcgttctgtgacccaggctggagtacagtggtgtgatcttggctcactgcaacctccgcctcctgggttcaagcgattctcccacctctgcctcctgagtagctggcattacaggcccatgctaccatgcctgtctaatttttgcatttttagtagagacggggtttcaccacattggccaggctgatcttgaactagtgaccgcaggtgatctgcctgcctcagcctcccaaagtactgggattacaggtgtgagccaccgtgcccggccgcagtcctattctttttttttttttttttttgagacggagtctcgctctgtcgcccaggctggagtgcagtggcgggatctcggctcactgcaagctccgcctcccgggttcacgccattctcctgcctcagcctcccaagtagctgggactacaggcgcccgccactacgcccggctaattttttgtatttttagtagagacggggtttcaccgttttagctgggatggtctcgatctcctgacctcgtgatccgcccgcctcggcctcccaaagtcctattcttaattgtgttcatctgaggactaagaactccacaagcttggctttgggaatagcagtaaagcaacaacacagtgctgggctcgaagacggacagctgcctgaaagacggcagaagctccctgagtgtgccaaaagcactgatgaagttttaaacctagtccaagctaactgagtgatgctagaccttcccgcaacttctctaacctggatgtaaattgtaattctagagccccttgttttgcgggaaaaaaataatctgtgtatggtcaaatagcagatggaatgagctgccagacggaatcttttgccagtgcaacggaacaaagtacttgttcatgccaggctcaggtcccctgttacttgcagtcctccgggcagtcctgtctgctggctgtctctctccctgctttacgtaggaagctggaagaggtcaggggatttccttgaaattacaggctagtgaatggcagaacaggagctcgagcctgattatctgctaaacctctgctttggagctttgaggccttctgcacaggtcacttgcattctctgtgtaggggtgcagggttgttttctctcccatcggcttactcttggattgggccttcccagaggtgccgagaagcaaaacccagttctttgatcttctcacttcagctgttctttcttccagccaacttccaggattacatcccttggtgtgaccacaccacatctgaaatctcaactccccacttcccacccagtgacctgcacctcctgtctttcaatgctcctggcgctgactttcttgccgtccctgacaagcagccctgccttcaagttctcactggatgaaagaagaaggcaacagatgttagatgccgtgtgcacatattcccatcttgaccattctttctgtgcatgctttgctgtggaactgttggggccccatccagctgtataagctgagacatgaatgtgcttccacagtgtgggcacctcggatgcaggtacaggcccctctagatccagggccacttggcaatgtctgagatatttttggttgtaacagctggggtggagagcgctgccagcatctggtgggtggagccaggaacgcggctagccatcctgcaatgcacaggacagccgcccacgacaaggaactgtgcaaccccaaacgtcaggggaccctgctctttatcaatcctagggtttcccaaaaagcccgacagcacatttgatacagatgccaccaacggggtggagacaaggggcgagggcttcagtggaatctcagcaactaaaatcaagccgacggtcaggtcagagaagcatttggaaagcctccagtgcgtttaggggaccacgccctctcatcatgccaaggcagctgcccagtgaggtacagggtataaaggtgacgtggtcaggagtggctatttgatctccagttattccagaatttccactctcgtgccaagcatgtctctccaaatggctgctctctggcgttcctcacactccccctgaagttcatctaagatcttcattcttcaaaggtgaggcttgtatgttctatgtccaagtcttctctaaagatatccaatttgtacacatggagaacattttttgtactcgaatagttgatgactttgctttgagctatctctcaagggccaaagtgcaaaagggcaaacccttctattagagtgtgggtctatgtttttagtgttatgccgaagtgtgttttagcctttattttcctttatggaaattcattttcttggaaagatcattttggggatgctgttttaggatttctgtaccttcagctggaaggatgctcaccgttcctgatgttcatgtctgcccttcagtcagggagcctggaagccaagttgcttagtggcagtgctttacttttaagccttcgaatacatcttgagtaccttaaacttctctgtatgctatgggtactgtttaaattcagattatggagtcctattctccccacacttcttttttttgtgaatgacatttatcaatgacatttgtagcgtggtggattctgaagttttcagctagtagcgtaaagatttatttcatggctctgactgtcaggaatattctcttttctagaatgttaaactcataggcaggattactgaggcaaagccacataaatgagggaatctctggaaaaaatacattgcttttattttgtactaaaattgccatttttttttttttttggccaagtatagtggctcacacctgtaatcccagcactttgggaggccgaggcgggtagatctctcgaggccaggaattcaagaccagcctggccaacatggtgaaaccccatctctattaaaaatacaaaaaaaaagtagttgggtgtggtggcacacacctgtagtcccagctacttgggaggctgaagcaggagaatcacttgaacccaggaggcggaggctgcagtgagccgagatcacaccactgcacaccagcctaggctacagagcaagactatctcaaaaaaaacaaattgccattttctattcctaagtatatattgaagcatttgatttatttcttctcagtggggtatactgttagctggtgaatgcagttgttgaggatgaagcttatttccccatgtcagcatctattctgaacattttaaatgaactattctgagagcatgtatagattttttttttcttcacaggagagctgccttaggaggacttttcagagtttgtgcctgtaagactgagaaatacataatggattttagctgtcgtgtttttagaaggtaattggtagatatttgcagtgcattgtcttcatgaaaaacaaaattgggcctggtgcggtggctcagacctgtaattccaacactttgggaggccaaggttagtggattgcttgagcccaggagttcaagatcaccctgggcaacatgctgaaaccctgtctctgaaaaaaaaaaaaaaattagccaggcgtggtggtgcacacctgcaggcctagctacttgggaggctgagttgggaggatagcttgagacaaggttgcagtgagccaaggttgtatgtagtgagccaagattgtgccattgcactccaacctgacactcaacagtgtgagaccttgtctccctaccctcccccccccacacaaaaaaaccccaaaaatcagaagtggttttcttagagatgctttactggaggtgtttgtggccatttccttggctactgtgtatagaggaggttactgtggtcactctggtatggacttaaaaagcatcaattctgtggaacacactgggaaagcggatacatttaggattgctatagacttattcctagacactttttgagatgagtttaattccagagtaaaatacattagaaattattttaagtatgcctcagagtgtatcacaaaacaacatttaatggtgtaatgtaacgccatggaagggctctgagctcaggtacagtgcaccttgactgggacacatacagctctgaggcaggtccttcaatattgggtcctcctgctccttatcctccctcaactctgccatccactcttcctgcacaggaagctctgcatctagttatctgccctctcctggccactttggtgtcctcattcccatggagctcacaatcggatcaaatcctgagtcagtacaagatgccagtgcctgcagctcccctccccgctccccacacccagcctttggtcggcagcccctcaggccttgccccacccactccatcttttctcactgtcctttcagcctccagacaggctcacatctcttccatccttaaaaaccgacaaaccatgaataaatctcccccatgcaaagccttttccttggtcccgccttccttcaaggctgccgtctaccatttattacacatgcacaaatcacagaaaatgtttaattgccaaattttaatggcagaatgtaatgaccagtgtttttctagttgcaaattaaagtctttcctgaccttgctctcttcactctgtggcttccaggagatgtctctattttctgactctctaactaccccttctctgtcttgacttgttcttacacacctcttatccttcccatgtaagtgtctcaaggttccttccttcaggctcctttctgttctgtgcatgctgcctgattttatcaccacctttaactaatcggtagtgtgtgctgaggtgcctgttagactcctccactgaggctttctgcctccaattcaaattcagttcaatcaataatcaaacccatcaccttccttagaaaatctaaagagatttaaaaagcaaaaacaataaaagacctattagatgaaaaataagtgtgatgaattgctgggtgctaggtagttatgaaaaaatatcctaaagacatgtcatttttaaaagagtttctattcccaattgctacagaagtataaaatactgaagatcaatgagaattaatgacaattcatcaaagtcctccattttgttaggaaaaccattcatccatctatccatctacccacccatcatttataaggcacctaccatgttccaagcagtgagaacatgcttttaatcgggagagcccattcataacctgggggtgggggctgagggaggtggtgggagaggttcagtacccaggtcacagggcagctgtgggaaggctgcatgctgccatatgtaagcccggcactggagctgttgtggatgctggagacaagctcactgttgctttccagacgctcttgctcttctgtccaccggaggcagtcaggaccctggcctgagggccaagaatactttgtgcctgagctggaccagctggccgtggggtaccaccttctttgcagacagcaggcagggtctggatcccctgcttgatgctcctaccagtgcccctagtcttactgggagatccggctcctggcattgacctgggtgtgtgccctgctttgccagtgcccctggagtgggaggtgtggtcactggtccaccaggaagacagctaagggcattcgttgagtccacgtgatgactttctgctctgagtgaggcccctggatggctgggaggaaggaagcagctctgcgtcaggcggcgtgccgctggtgcattccatcatgatgtgctaagggctgaggagacctgggttgaaaacctagcttcgctcttccaatgtgcatctgtggacaagtgctataacctctgtgagcctcagtgtgtggataaagtctgttgtaaactgaaaggtgctgtgtaaatttcaagtgatcatttcatgagccacacgtataacagatgtgtttttagatattagtcaaagggatccaaataggccaggtgtggtggcttacacctgtaatcccagcactttgggagggtgaggcgggtggttcacttgaggtcaggagttcgagaccagcctggccaacatggtgaaaccccatctctactaaaaatacaaaactagctgggcgtggtggcgcacacctgtaatcccagctactcaggaggctaaggcaggagaattgcttgagcctgggaggcggaggctgcagtaagccaagatcatgccactgcactccagcatgggtaacagagcgagactccatctcaaaaaaaaaaaaaaaaaaaaagaggtgatccaaataaagcaataacatgaatgtaagctcatggtttgtagaagtaatttactgacatttattctgctgtcatgagtatggctagtgattcacgttcatgaaaaacagatgttagggctctgatttagaaaaatgacttcatgttagttatctgactaatggggaggctgagagccactgtgtcctccccgtctgccctcagccttgtgttgtcatccctgtaagggtttgtctctgtagccccaaaccacagtgggaggcgcagctagtgaaccttgcaacagactaacaccatggagacaaagtaaaccatgtttgggtgtggccccaaattggctaactgttctggcattttctggttagctatgattctgatgttcctagaacaaaattagaccatgctactggcctttcgttcttttctcaggagtctcctatacttctgagaatggatttttagatttcagacatgtaattttcattgagagggcacagaggaagacaaagttatatcacaggcctggcaacttttaaggatgccctctgaggcagtcagacaaaacccaaagtaccctctcagtgcagagattctgggcttaaccagtgatgtcgggaggtcagttctgtgtgtctacaggccattaactgcagtttggaaggggccataaattccaaggcacttgttagaaggggctgtccctggatcatccttaccaaaagaaggaggaagtcaagccctggtcactgacctctcagctctttagttaagaccctgggccccatgctggtatggtccagatggacccccttttttttttttttctttttttttttttttttgagacagagtctcactctgttgtccaggctagtagaatgcagtggcatgatctcagcttactgcaacctccacctcctgtgttcaagtgattctcatgcctctgcctcccaaatagctgagattacagatgtgcaccaccacacccagctaacttttgtatttttagtagagatggggttttgtcatgttggccaggctggtctcgaactcctgggctcaggtgatccaccctcctcggcctccccaagtgctgggattacaggtgtgggtcactgtgcctggccccagatgcaccctcttccgaggaaaccccccacccccctgctcagacctttccaaggtgccctcggggttttagttttgtcttcgaggtgtatgatttaacgttactctgccaagccatctttagagctgtgagtactgggatgaacattttgtgtatctccatgtttctataaaatgccacctttcagagccacacccacaccctgacttctgacccggccttcccatgcgtcaagtttgtgggttccagtcacccattcaccaccctcacaattgaccttgctctacgttgaaaaaaaaaaaaaagactgggggtgggagaggggactacctcagaagggggcttcaagaaggggactttaaagttacctgtattatttaggttggcgtaaaagtattgcatttttcgctgttaattttaatggaaaaactgcaattacttttgcaccatcctaataaaactgggaggcaactgtggatcctctgcattttattcctggggctctgggatctaaaaacaccaagaaagatgtattagcattcaacttacagtatagactttgctcttgagctggggatggttctgagacttccacctcacaggactggctgggctgaaacccaagtcagaatgtagcatcctctcatctagaagggtgtcaggatggcagttttctttaatatgctactacttagcagaatcagaaaccagccattattttattgctggtaatgttcatttgttcctgggactaagactcatcagctcgctgcttcttactctgtgagtgtcctggcatggtcccctccctgccacctacatcctctgcagcagccccttcccacagctgttgtggcaggcagtgggtttgttctctttcctgggctgcccacagtcttgctgcctggcccatcccagttcttggtctggtgcccagcttccttcctgctatggaggaggaggaggaggcctgggcaccttgagtcagggcacctaccaaggggactctatctggaaaagaggggactccagaggcagcaaggcaggtgctggtttgcttttactggactcccaggacactaggcagcaggctagcagggcagctcaccctgactgtgcccagcgggatccccgtgttagagcctttggtcctcaccctcacagcgggcactgtcattatcaccggcatgttttgggtaagactccaggcacagaagctaagtaacttgctcaatatcccttagtgagtggcagggccaggaactgaacgaggtggcttaattccagagcccacttcttaatcccttccctgtatggttttcagaagctggtaactagcaattgactggcagcctgggggttaggaaaatgtgtcttgtggcaattacaggtgtcttcaagcattgcctcagggacatgccaagggaacggaaaccagtcccagtaccctgctctgggagatgtggtcacagggttcggggtgttgagtagctttagaatctgcctatctagatcagaatattcaaaatcaagtctcagaagaagagggctgttttattaatgggttatcattctcatcagtgaagttgtgaccactggtaaaagtctaactgctttctacaataaattcccagagaacatttaaaattattttctccaaataattgcactttaaacaatcaagaattgtgataggccaggcgcggtggctcacacctgtaatcccagcactttcggaggccaaggcaggcagatcatttgaggtcaggagttcgaaaccaggctggctaacatggtgaaaccccgactctactaaaaatacaaaaatgagccgggcatggtggcaggtgcctgtaatcccacctactcgggaggctgaggcaggagaatcgctggaacccgggaggcagaggtcgcggtgagccgagatcgcgccattgcactccagcctgggcgacagagcgagactccatctcaaaaaaaaaaaaaagaaagaaagaaagaattgttataacaacatttaaataagcgttacagggagaaaacaagctattgaaaggtaggcatttcattatctttgaaagttgcttttgtgagcctgagatgctgtcaatcaaagacagcttggcctctgttcatcttaagttcaacgtttcttccccagcggttctctaggcctttgctcggcccctcttttccttctcccctatccctcccaagtcgtccttcggctcctcagcacccattttccctgctgcacaccctcctgacaactcctgccctgaagccctgggcccgggtcacggcgggaaggtgagtgctcacaggcgcgagctcacgttaccaagttgggtcagcgtgcagagaaaagggaattgggaattggagggctgtaaaatgtaaatgtgctttaaattttacatttcctggcgtggccaggacaggctgaccttccgattacaatccgcgtcatcccgtcgcttctgcccccagcctggcgaggtcgggaaccgtttcccgcaggactttcattgggagttacgagggcgccctgtgcctggaggtggcgcgggctggagccctcccggaggagaccggcgcctggcagggggtcgtcgcggccgcagcctggacggtgtggaccccgggttctgcgacgccagatcggccccagcggcccgcacccgcaccctgcaagctcgttctcccctgcgggccgccgcaccgggccaaggggggctgtgtgcacgcagctgcgtcgtcctggaagtcggcccttctcgggatgccgcgttagtggggtgcccggccggcaggtgcagcggtgctggggcctaggcttccgcgtccaggaagctcagcgtggcctgagggtgatggatgtgggggagccgggaactcataccctcgcccagccccgggcaggtccccccccggaggggaccccctcttcgggtcgacccctactgggcgcggcatcctccccggagcgcccgcttcccacggcccctgcgggtggagctgcggccggagcctgaggggtcttttcctccaggtcctctttccggcgggggccggaggggtggtgatggacagcccgggaggggcggggcaggaccaggaagatccttccgagacggagcgcggggggcggggcggggctcgcgttaagggagcgcggaagggcgggacaggccgtggggcggggcctgggtggggcggagccggtgggggtggggaaaggggcgtaaccgggagggaccctccgaggcggagcggcgcaggggggcggggaaggcgggtcatggggcgggggcggtggggcgagtcatggggcggggacggggcggggcgtagccgggagggcccctccgaggcggaactgcgtggggggcggggcgggccgtgggacgggcggaggcgcccgagtcccgcttccccggcgcccttccaccccgagcccgactcagcccgcggccacctgcgccccgcccctgtcggccgcgcccgagcccagcgccgcgagccgctccccggcgggctggctcctggccccggaagcgcgagcgttcacttagcggcgagtggctccgtctccgcggacagagcgcgcgccccctggcccggcccgcgaggggctcccggcgcggtccccgagcatttcccgccgggtggagcgggccgagcccggcaggatgaccagccccgcggccgctcaaagccgggagatcgactgtttgagcccggaagcgcagaagctggtaagaggaaagcgcttccgaaactttctttcgtgactgcggcggggtttcaggggcttccagctcgttccgaggtcaatggcaggcgcaggtgcccgggaggcgtggggtgggctctggcgggaccccagcgcggtgggagcgggcgcagtgggcgcgggtccgtgagtggcccggcgagcggcgtccctcatgcgctaggaagcacgctttattgtgggacgccacctccaaggacgaaaaggcacatggtctctccccgcccgaggtgatgggctgcagacaggctctgaccaggtctgcgcctggcctggagtcacagggagctgctagtttgctattttacaaaatacagcatcaaggaccgggtggccagagccggtgccctcacccgctgttggaaccaccggggagcggctggggtgctttggagcactcaacccgctcagcacctggggaccacctccgccgaggactccagacgccaaatccactttggctagtctcccgggtccgcccagcgcggacaggatcctgcctctaggattttgccgttgtccagctcaatatgcagtcgtggggctacggctgtagtttggcattaaaattgggcaggggatgaggcggagagggtttgcaaatacacattttcatgcagcttgtggttgaacatgaatgggaataaaagtgaaagggtgcactttggaaaagaaatataaaaccctagctttccacttaatcaggtgttcgtgggatcttggtaaaagtatgagccccaaacaatcactctttcatcaggtagaaattaatcatctactgggtgtgtgtgtaagatttaagatgaatcagactgccttgaccttgggagagcttattaggaaatgccagagagaggtgtagaagtagagtctgatgaactcatactgaaaagccagttctttgcttgtcagatggttgctgttttttaaatgtccattttagtgtggtttttctgtgacttcgtttaaaactctggcagtgggccagccctctggagccggtttttaccccttcaactaattagttcctaggggcctgggaagagagacccttgaatcaccatcagggaagggttcttgaaagaaggaagggtgggaatgtggttgagcggtgccagtgttctgaggagcagcctgggacaccatagatggcaggaggaggatggaggtgaagagctgcctgctggacttagagtccttggagaagggaagagtaaacattgagaacaggatgtgaggaaactagggacaggctaatcagaggagtaggtagaggcacacctggagcagctaaggcactggctacagggtctattacttaaggctgggagcctcctgggcgggtctgggttcagatgacttcgagatgctgccgggaggaagggagaggaaagtctggactgtgtccaactgagtagttatgtgatcagcccaggcccactgtccctcacccccagttccagaacccaataagctttgaagaccggaaggtttgtgttttgttttgtttttataagtttgtggcagaattttggcagtgagacttgccctgtccaatggggggctagttttggtcttcactgatccctctgagtgtgaattttcttacgtttctctgcagtcttgttgatgtctttgattaagggctgctactctgggttgtaccagaatatatggtgtatgcatcttactacgtttctaatgtccaaaaatgctgaattctgaatcatggccccaagggttttcagagagaagttgtgaacctgtaggagcttttcttggtaaatggtagcaaaaactgtatcagagtgagacatggtgaacaaaagcaaaatgcagttcctgttaagaggctaatgttcaggtagggaaggaaatgtgctgagtggtgatgggaattgggggtcatcatgggtggggggtagggcgtcacccagcggctgccctgggccatgggctgggtataggcacaggaaagtggttgtgggtgtttcacactggtttgtgccagttcttgctctgcattgtgtccgtgggttcagggatgggtctcctgcggaaaggagggactgggggccgcacccatgcagaggagagccgggttggtcagaggaagtagatttggcaagctccacctcaactagaagacaaaagcaggatctgagtgggagcctgggcttcttcagcaagtgggcaccagccctggagctgtaggagagggtccgatgcggacagtggagacactgtgcatttctgcagcttttgtaacttccctgtgtttgcgatggcttgtgtcaccccgctctctttccacatactgattagcattcagcccttctaaatgaccagcactgtcccaagaaagggctgttaggggagagcgtggacacacagtctcccaagtcccatctcattataggtacctgggccagggtccccaggtgtgggagagtggagtcttgaccaatatggggatgaatcagttggcacgaggcgggctggccctgctctagctcagtctgagatggtggagcgtggaatcatatggtgtgtgttttaggcatgtcatttccccgggcaggtaagacataaatatagtaaggtaggtcttttctagtagtattgagagtgtcctactggggcaaagatggagactaaatttccctttttctttaagagtcagtttctgttcagcctgagttaatatcccacagcggaagcctccttagcaaatttcaaaaaaccctgcagtctcaactgccacttatgctgagcacaggaaatcaagttatttatagttgcagaacggtgtttcagcgaagttgattggagagttacctgattatagtgagattcttatccaatccctacagaattgtgagactaaatgttggtgcagcatgtttggtcctcaaaaggcaatgtccaagaggaacttcttatccccgaaaaatcaggctgtgtgactcagcaaaggaattgtttatgactggttactcatatgccagtgcttccagaatatctgctcgtatttaaaggagtgatcttgaagccccagaggccataatgtttagattaccaacctcttcaccaatcagtaagtccattacatctcactacgtgttagacatgggacaggagaagaggatttttattacctcactgttattactggaggccgcccaaatttgttttttgttttttttttttaaataaagaagcttgttttcatggaatggacttactagaacttttattattcagactacctagataaaattaagtaaattcgtttctttctcccaaattaaatattttgactacatgcaagatttaatcattcaaaattgccatgtatttgattatagaccagtagtataatccccctgccccaggccagattccaaaacaataaaccaaaacacacacacacctggcaacagaaattatatgtattccgagactcattcattcattttggaaagggccagtgtttccagtggtttctccttgggattgtaactttacaactttaaaactaggtaagtagttttcccttgaatctaaagtataactactttgtagtagagaagtaatttatcttaaatcactataatgaagatttactcttaattttaaccaaaatgtttcatttatttgtgtaatgaagatgatcaaagcaacgccacctgtgatccttctgtcttttttactgtatgtggcacgtggctgtgtgattttcctagggaaaggagtgggctttccctgtgggttgagaacctctgtccccctcctctgaagtttccccagtttttcctgcttctctgctaggtgggtgccttagcatgcttgtcttctcatcgtgcttctaaacttctctgaaccggatttatactcttaggtcagtagctgtcaaagaagacactaagtagtgaaagtagctaatatttaccaaacccctgctgcgcccacctggtgttttatgtgaaggtcttctctaacccttgctgtaacctcatggggagcagatcgttttctctcagtttttcagataaagaggaaactgaggctcagaaaggtcagggactttccaagccctcacagctagtcagcagtggagccagttcagacccaggcctgctgactcggaactggtactgataactgtcaccactgtatgcaatgctgcaggcaggggctggcaggtagtaaatgtgcaagatatagctgtggctgccacggctgctgctgctgcttttgtcgctgttgtcagcttttcttggcagccctgctgtctcataccccagtattggggctgaaggatttctttttaccaaagctgcctcttaggacagaagtccttgtcttgaatgcatactgggaagtcttcactctgtcaaacttttctgttctctgcctggtaatttccagacagaagagaacattcaaagaacgaacttactttccttctttttttttattgagacagtcgtgcttgattgcccaggctggaatgcaatggcacaatctcagctcactgcaacctccgtttcccaggtgcaaccgattctcctgcctcagacctctgaagcagctgggactacaggtgcctgccacctcacccggctaatttttgtatttttagtagagatggggtttcaccacattggccggggtggtctcaaactcctgacctcaagtgatcctcccatctcggcctcccaaagtgctgggattacaggcatgagccaccacacccggcccaatgagctttacttttctacataaggaaaataatggtagaaatgaaatagctgtgaaacttgttttgctatttttgtaccatgctaaaatgttaactactgcttatgtcggcatacacctgagagctgctgtgatttaagcctttttatttttctgggtatgatgtaactcctcccctacctcatccaagtagataagttcatggaggataaacatgacagctgctgtttcttttatagctggttccagggaatatccactgaatataggaaagattgtcagttgctgtgtgctgccctggtgctggtggagctttcagccttcttctcagaggaaacaatttaaatgtttttgtgaaaccctagaggtctggggtttgtaggacagtcttgagcagagcaggcaaaggtgaagggagtggagcccagacgtgctgcctggagggaaacctgtcacctggagaggaaacggcacaggggaggcccagccgccctcgcctctcagtcccgcacgtctctgttagtggtagtcatggttcttgtatttccatcatgttgaggcaattgaaggaaatatgaagattcattcatctcaggaaaagcaagaaatgtattaacagcaagagtagaagttcacttgcatggaagatactgtatagcgtatttatttcttagcgccagtgggagtagctgctaagcccaagattgtgttgtgaggtttgaataggtcaatgtgtgagtcatcaataaagtaacatcaatcattttgttcccgattaatacgtttgctattttaggatgcgaaggactttaaagaagcttattattctgaaaagcaaagcctggagatttccagtagcaaaacagacacagtctgtggacaatctcagtgtacaaataattcacctctggcatgaacccaaagaatttcagaggggaaggaagctcttaaagattacgtcccctcctacttctttaatgagggctggggttcaaaaaccgagtaacttatccaggctcacataactgtaggtgacagagcccaagctggaggctgtggctgggtcttcagactcctttcttgacagtctgcacctgcataaactcagacctttactgagaacagtgcagccatagctgagagaagcagtcggcacccagcatttcttggacttgtctgccaggtcccccgagtgcagaggacagtgtgctggctcctggggcctgtgggcccggccaggagcagccttgtaagctaaagccttctttgaaggtggccgtcttaccgtaaactttcatggtaatttcagtctactccataatttgtctgagttaattttgatggaaacatagtgttttaagtaatcagttaggctttgatctctaactttatgccatccaaatcttcatgatggcctgagcaccaggcacccagacctgtgctctgaattgtgccggggctggttcatacagtgtgatggagagacgagagatccacactggagttctgaagctgtggttctcaaccctgtctttttacaagttccttaacttccttactagcctgaaatgaaatgcataggtgagaaagtcaaccagcgcacataatttcgagtcaatataacatttccttaaaaaataaaatacaggtagtttatagtaacataataagaattttgatatagaaatactcaagaccaagtacaccagcagttgaatgcagtgatgagacctgcacacacctgtgcctggcgtcacagggaggctgacacaggtgtgttgcactgagacccacacaccacccctcatgttgctgtctatgacgtgacattctacaaagttgactaactctcaggaaagttctgaacaaagccaagtatcatcatcttccttcaatttccatgtcgattgcattcctggaatagttcatgtatatttgaactgtgtaaaacatattttgagtttatatgtaagttgcaatcagtttgtaaatccaaaaattaaaaatagtggtttttcttttcttttttttttttttctttttttttgagatggaatttcgctctgtcgcccaggctggagtgcaatggtgagatctcggctcactacaacctccgcctcccgggttcaagtgattctcctgcctcagcctcctgagtagctgggattataggcatgcgccaccatgcccggctaattttgtatttttagtagagatgggatttcactatgttggtcagactggtcttgaactcctgacctcagatgatccgcctgcctcggcctcccaaagtgctgggattacaggcgtgagccaccgcacccggccaaaacagtggtttttctatcttcctgagcagtcaagggaaaagttcttcccatcgcaggcgtgtctgaatgcgggatggttggccgacctggccctgcccccccgccccaatacccttagcttcttcccaatctttttgacatcccagtccccccaacatttccaaaatgccctctaagtcaacacttccgccactgccagctgccaccccagagtgccctgtgcctggtaacgatcgttctcacagtcatggccgtagggaaggctctttgtggttcctgggggacttcgtgagattgcccacatgagcatttcttttggaactgagatacagtgcacatcgcctctgggggacatggggtggtgggtacacggaaccgaggtgagcctcccttgcgttgcggaggtgctagccttgtgccgtccgttcttgtccatgtctgtgcaggagaacatcacccggcccacttggttgctgtgaatagcaaactttagaggccactgcatctgagggttggggggtttgcagagaaaacaaaagttggtggctgtggctacttcctatagcaaagtggctcaggaaagggatcccgtgtcacagcctgggtacaccacggcccctccaggagcttgattccttcttagctcaggggaagaatcgcacaaggaccgaggcccctgcttgtctgtgaacaaactggcctttgtggccacttcaggcttcggctgcatcatattcctgtcacattcacgtgagtgaacttgaattacatccttaacacttttccaaaaaggttataaactagactggtgatgtatcatggggcctagaaaaataatgctgctgctttttcacttctctgcttgacgctaaaacctggaggcgaaaatgaatgtgtgtaattaataggagaacttcctcctgtttgcagagtgctttacagctggcaaacggcttctctccctgaacagccccgtggggcgtcatttccatctgacatctgaggagagctgctgttcatggtccagtcctctgtccattggcccactgggtgtccctaatatgcgctaacaggctcctggcaaacggcgggcatggcagccacgaatctgcacatgagctgtatgccctgggtctcccctgggctctgcggggggaggtgggagccgcctctggttcacatgcggtgctttccaggctgcagggccttctcagcctgggtggaaggagtgacgtcagagtatttctcaggaactgcctgccctaaagttgtggctcataaaccccttccagcttctgtgtagaattctggacccctagggtatcaccacagattttaaaagcagagtaagaacatttcctgtgactgtagggtgagaggccctgggatctgtaattctacactaggctggaatcccagaaaagcttcaatgctcaggaaatgtatgagcagtgccaggatcccctgaaggagtgtggggcttttgaagcaagctgcccagcgagcctcccgcagcacctgctgtccctttgccagcagtcagggcccctgccccaccagtgttggttgtgtttctgttctttgaggagaccacatgatgatcttctggtaggagccacaagaaggatacaaatgccattagagctgctagagccccagacgtcactggaattggggttcagggtgttgggctgtccccacccttaggcagtactcccactgcctacaacacctccagcgcaggctgaggccatgcgaggatggaagcacatgtgggctaggccaggagggcgtgcgggagggctctccactctgcgctccgctggggtttctccttgtgtcctggtcaataacttcttctctctctggttctccttggcctgagcccccagcctgagccgggctgtccctgagttccctgacccggaagaagggacggccattatctttgggtgactgtcttcttatagctgggaatctctggggctctgagcgggaggcccatggggagccctggaagaacaggcatgggttagactgtttacctcactgccctgtgtgccctgccccggtagaagccgtttctgctgtgtggttctgtctagaactagagcccctcagggccctctgcatgccgtggggtccctttgcaaagcacctcctaacatgtgcttttatctgtggctcgggatggggatggtgacttcttcacgcagtcttctgcaggcctctccagcctggctcccgagatgtcacgcatgggtccatgcagcccagaaaagaccctgcagggggagaagggtcactttggtgcctatctccccagctggcctgtgggctgggtgcctggcagatggggctcccagggaggtgcccccatagacttgggctccacagcaggctgtggggctggcattaatgtggctgggagagcctggctgtctttttagccatttgtttcggaggccctgggggtcatacttgtgcttcctcgtgtatttttagatctcttatcaccgtacacaccacctccctatcagagggctgtcatattcacatatggtaaaataagacgcaacaatagaactcgagtcgtggttcggctttctaggattaggacaaggaggcaactttgatagtaaatggaatctttttttcccagccatccccaccctcaaagagtatcttgctgtaagacctagttcctgtaaaactctgtctgtggggtccctggccaggatgggtgggatcccagggaaagggccaggctgtgtgttctgaacaggaatggttctggaccaaccattgtgggcattcctgagaagccagggagcctggatcttgtcagaggagctcctccctctgctccatcctaaccccgcgggcagcagcaggaactgagagaggacacggtgggggcagcgctgcaaaacccagcagcgggccaccttccagcagcagaaagcatgagttttggttttggggctcttccatttccttccttcttttctttctttttaaatttttgctctttgttatgaaacagcagccagaccgagctatgcatgtcctgctgcacggcaggggcccttatcttgaacgactccacatactgggcaaggaggtggcagggggaggggcttgtgggaacccagatctgggatgggactcagccaacagtttaaagagccctgtgcccccactacccagcctcaacaattgttagcttatagccgtttacaccccacccaggttatttgaagacaagtcagagggagataatttcactgtactcctaaatgttttagtatctcagcaaagattgtatgggcagagaaaggaggcttcagggtgtaggaccccaggagcaggcaagggcttgctctttccctgttggctcctgtagggtggggacagaccagcccccatgaaccctagcgagggccatgccaagaagccgctgttctaatctaatcagtggaggatccagcaagctcggatgggagggaaagaatgactcaacctgcaggccgtctggggtatgcacagtctcgtctcctgagttctctgaagccctttgcagtttttgctttgtatcctaaactccacaggcccgaaccctggcactgagcttgatccgctgcagcccagcccgttcctgtccccatgctggaagcagcctgtcaactcacttccttggtttcctgttgctcttcccaccccatacctgctccccacatttctatcagagccctgtttctaaaacaaaagtcagattccgctgtgttcttaaaacccttcagtggttctgaattctttcaagacgaggttccagatacggaggctgagggcgagggtctgcaccccaggcgtctgcactccttgtcaccagctcctggtcgcagccaccccggctctgcttgtcctgtttcagggtccggcttagggctcctgtcctgcggatgccttccccagccccccggggttgggtcaagttctccagagcagcccccgcccctgccacacgtttcttcccccatgtggtcctcatcacatgtacattgtcaccaggtgctttgcctgtttccctggagactgggcacccaaaccacatttcagaaatccctcccactgtctcaagcagtgctgagacagcatggcacgttcacagcacagtgcattcctgtggcctccccgggccacggtcagcccacaggctactcacagaaagtgacaggccgtgttcagaagctcttcaagcagtctgacgtggctgtggcccgtcatgagattttatattttacaaaagtgtcagtcgataaaggatttgtcctgcgccaccggagcactggcctgaggtgccctgatccccgagaacccctgcctgcacagtcagcgctctccccaatgtctgccatctgccgtgccctgtcaggctgctgtgccattcttcgcagtgtctctggggaagaattttgtcgaaactctgcagatgttcttttttttttttttttttcaaggcagagtctcgctctgttgcccaggctggagtgcagtggtgcaatcttggctcaccgcaacctccacctcccaggttcacgtaattcttctgcctcagcctcccgagtagctgggattacaggtgcccaccaccacgcccagctaattttttgtatttttagtagagacagggtttcaccatgttggccaggctggtctcaatctcccgacctcaggtgatccgcccacctcagtcccccaaagtgctgggattacaggtgtgaaccaccgcgcctggccaactctacggattttctctcaggcatcttaagcaagtggcaagagttattctgtggctaagtgtgtagttttgtgttcgtgaagatggtcatgcataggttttgtgccagtttaaatgctggctcatatatttgttggtgttgagttaggcagattccaagaattgcctgtaagctaagttgccacttccggtattgccagcactttgttttccacatatgagtcatgtgaggatcgtaaggggggtagatgttctagaaggcaggggctgcaaggatttggaattgtattcagtgacaaatggacttctttctgaattctaatgtaaggtggagatcgccatagttgacctgtcttggaggtgggcttgcgtgtgtccccatgaggaattgatgccctaacatgattcatccatggggttcctttatcagcccaagcccatgtgcctcccagcaaaggtcattgttttttagtctttaaatgtcattatccccaagtgagggacagggtaaacctgttaggctgaaggtgggccatgatgggaaccttttcctgggtggagggcagacccccgagagcagcggggtctgacagggcattgttttggaggcctgcaagtctggagcaggtgcaatactgcacgctcaggcaggcgagctctgcaaggacctttggccagacccgagcagagctaagctggaatagggtggggtactgagcaggcaggcggggaagtgggtgggcgtgcaggtgcctgggacccccctcagctcacagagatactcgccctgtgagagcaggagtcacctcagacctcctctccttctgttatctgctagtgtgtaataaatatccacaattcagcggcttagaataacacacagttatgatctcacagtttctgtggtcaggagtctgggcacattggccaagcgcagtggctcatgctggtaatcccagcactttgggaggctgaggcaggtgagtggcatgaacccaggagttcgagaccagcctgggcaacacggcaaaaccctgtctgtacaaaaaaatacaaaaattagctgggtgtggtggcacctgccctgtagtgccagctacttgggaggccgaggtgggagaatcacttgaacctgggaggcagaggttacaatgagctgtgatcacgccactgcactccagcctgggcgacagagggagaccctgtctccaaaaaaaaaaaaagagcctggactcagcctctctgggtcctgtgctcaggtctcacaaggctgcaaccaaggtgtcggccagtctggggtctttctggagttcaggcccctcttctgagccacgtgtttgttggaagaattcagttccttgtggttgtaggactgtggtcactgttcctgctggcgtcagtcagccaggggctgctctcagctcatcgaggccccctcccactgggcagcttgctttctcaaagccagcaaggacactgacttctagaccctcttttaaagggcttgcctgattagggcaggcccataggataatctgtcttttgagcaaggcagtcaactgacgaaggattttaattatttttttaatactttttgccatgtaatacagcctaattacagtggtgtcatccattatgtccatggtcccacgcactcagtgggagaggggtatgcagggcaggtacactagtggtgggagtcttggggaccaacccagaattccacgttcccacacagtgggagaggggtatgcagggcgtgtacaccagagtcttggggaccaacccagaatttggccgactgcagttgtctctccctctgttcccttctggtggcccttctttcccccaaccctttcctctttcttacatctcacccctctgctcctcttcttcttcttgcatggcctcccttctcttttcccggcccctcctctctgttcctctgccccccaacccccaagctggtgggctatggctgctatgaaacctcgtacctgctctgtactggcttagaaactgagccaatggcacagagccacctgccttaccaggaagggctgcacttggcgtggccttggtcactttgctggcccattggtagggccgtaggacgtcactctaatgcctttccttctctgtctcctccctctttgcttttgtgtagacccaagagtcctttcttttgtttgagacagggtctcactctgtcacccaggctggagtgcagtggcacaatcacagctcactacagcctcaacttcccaggctccagtgatcctcccacctcagcctcccaagtagctgggaccacaggtgtgtgctaccacacctggctagtttttgtattgttggtagacacagggttttaccatgttacccaggctggtctcgaactcttgacctcaagagatcctacctgccaccgccttccaaagtgctgggattccaggcctgagccaccatgcctagcctggccccaagaggcccttcacaccatgtaatatggtcttggaaattgaaaatggcaacaaggtatcaaaatcctgatgcagttgtgatttttgacaccccttgatttgaaagacatggggtgggttgataaaggagccaagcgaatagaacaaattcctcatgaggacacaaccaggcaacctcaagacgacagatcaagtgtggccagtttgcaacttagattaaaactgagaaagaaggtacatttgtaatatagtgtaagtctaggatgggagagagggacgtccctgtcaggaccacccccatgccaggagcttgctggccacctcggaagtcccattttaatattatctaggagccggttgtggtggtgcaaacctgtagtcccagctactcaggaggctgaggcaggagggttgctagagctcaggagttcctggctgcagtgagctgtgatcacacctgtgaatacacacacacactgcacttcagcctgggcaacagaacaagacctcatccccaaaggaaaaagaaaaaaaaaaaaaaggaagaaaaaaaggaaaagattatgtaagacgtctgaaaactgtttatagaaccattgttggaaggattacagacgtattctcaaaaaacacttcagtagaaagagggtggggtttgtttgataccagaaaacctgcactcagtaacacttatgccatcgagcttacggggctgtggtatcacatgaagcagtgaatacgcatgcagtttttaaaatgacttgtaagttgtttgtagaaacagttcagatgccaggctcgatagcatcatgtccattcctgctcaagcatttgaaacgttctcacggagcagaatgtggcagaacagctacaagctgaaaaatacttatatggaggctgatttttttagtgcaaggaaggactccaacagctagaaccgttctgctatgatcttcattgtgttgggaaaaggtggactcccagcacggctgtgttttaaggggaagctgagggtgcgtgtgtgctgagaagtgactggacagcagttcgctgggattacagtcccagctccacgccagccagccctatgacctcagatgggtctggcagcctctccaggccttcactttctgctctgtaaagcgaggggttgaactggaaacctggagtagcatccagctgttaacactctgctccatgcatctgtcagagctccagaaggaggctgactgcccagccctgccacctacaggctgtgtgaccttaggcaagttacttaccctctctgtgccttcgttccctcatatttaaactggggatggtaacagtctcggcctaatgaggctgttgcaaggaatacatggcatcatatccataaagctcttagaatattcctgcctagcatgtggtaaggacttgataaatggtagcagttcttataactatttctattgctcctgaccacccttttactctatgaatctggaatttattgctgtatatctgttaaactctgaacaagattttctttccgcatcatcactgctgaccctgtactgggaaggtgcccgctgctctgtcctctaataagatgccctgtccgtttcaggcggaagcccggctcgctgcaaaacgggcggcccgcgcggaggctcgcgagatccgcatgaaggagctggagcggcagcagaaggaggtaacgcttggggctccttgttgggtcttttcacagtgatttgcgtgctgggcccagggtgcaagtgcaggcacctgttgctgcagacgcacctggctgtctcacgttgctcacggtcagagtgcgtttgcgcctgtgacttctgcccaaggtcaggccaggagtgcgcatagcacggataccaggcgtgcctgctcagacctgctggctcctgagaggggcttagaagcctcttgcctgcgcagatcgtcgtttctagctgcgaggagccaaaatgttcagggtctgagctttaaggtctaactgttgtactagaatctagatcctctggattaaagtggaaaagaagaacggattaatgagtttttaaactggccaaattgttttatttaaaaatatgtcccccgtggtttgtacagtgttgatcacacacgggctccaggtttcaggatatctagagcccgtgtgtgatagagagacgggaatgaacacatggatgaaacagccaggaagaaattcctccctgggaaaatggctagcaatgtgttgacacacctgctcaagccatttgcaagttattttcatcatcttgagctggagctaggagtcatttctgacagcataagggttctttaactcacagttatggtgtgactttttctgtgacctcagagacatagaagctgagacccccactcagtccatgttctcccgtgggccatgccctgtggggccaagggaccatccacactgagcccacccccaagagcttttcttcttaagaagatgtgaatttattttgttagacagaagtaaccagctgccttccccagggttgattttaatacacaggttgttgtttggcttacatagccaaatttaaaaaggcgagccagtgtttaaaaccagtgagatttcggataaaaatctgaatttccagattctcttatggtggttgtagattccgccacattcccagcaaagaccaagctggccacataccctgcagggtcagggccctgccacaggtctaatgtgctcattgccctccgctgctaggagtttgccgctccatgtagaaacctgcatgcagaggctaggcagtgtcaccaagccctggaaccatcctgcacactcaagctctggtatccatagtggtgccagaggccactagaaggaatagtgcttttattctgaactggtttttaaatatgtatatgtataatttttttttttttttgagatcaagtcttgctctatcgcccaggctggagtacagtgacatgatctctactcactgcaacctccacctcccagattcaagcgattatcatgcctcagcctcccaagtagctgggattataggtgcgcaccaccatgcctggctaatttttgtatttttaatagagacggggtttcaccatgttggccagactggtctgaaactcctgatctcaagtgatcctcccgccttgacctcctggcctcccaaagtgctaggattacaggcatcagccaccacacctggcttaaatatatgtattttaaatgacaaaatctcaggtgctttttcacactgcccagtatcagtgtctctgtagaatgtgtctgttcatacagacacatttagataaaaacgtattgattgtatccttttttttttctttttttgagacagaatcttgctttgtcgcccaggctggagtgcagtggcatgatcttggctcactgcaacctccctctcctgggttcaagcgattctcctgcctcagcctcctgagtagctgggactacaggtacccgccaccatgcccggctaatttttttgtcatttttagtagagatggggtttcaccgtgttagccaggatggtctccaactcctgacctcgggtgattcccccgtttcagcctcccaaagtgttgggactacaggtgttagccatcacaccggccccatattagaattgatttaaatatatacatattgatataagatataaccaattagaattgatttaaacatatacatattgatataagcagcttgttacaaagttgttgggcaaaagttcttgatttaaaaataactaagatgaattaaggcaagcagtcatcgatttgaatggccccctttaaaagcaaagcatccctttattcctttgattgaaaggaagcccttttctgttgcattttaattgtgcagtttaagaaccatctgttgctggactcccacgtctctgttgtaatattcccagccacacgaaaagaaaaataaaaaataagccaggcgtggtggcatgcacctgtagtcccagctactcaggacactgaggcaggagcattgcttgagcccaggagcctgaagcaatgatcgggccatgattgtccctgtgtgtagccactgcactccagctggggcaacataatgagacccctatctctttcaaaaagtaaaaaaataaaaagtagttgctactccagatgggaaaccaagtcttgggcatttaattttagtatcatgaaaaaggggtgcagggcagccctcactgatgcttctgatgagcacaggccttgcggagaacatctgatgaaatcgggaagtctcacgtaaaacgccatggtttgccttcttcagcatgagtacagatgtcatttgcttagtagatggcattcacattttgaaattcttctccctacagcatggttttatcataaagatatttcaggggtcacaggggtcaagatatctcgccctgttgcaaattcggcggaacatccgccactgagagcggtggttttggtctgtgctctcaccagcagggaccggaggagggggtggtgtcccttgcaggcagcacctttggccaacgtcaccttttgcacggtcctctgtggatctgcagtctcggcttcctcatcaccgatgcctgcacttcttccctcacgaccgtggcttgcggctgtgacacagggcgggcgtcgtgggcgcggctgtggactcctgcctggggttggtcacggaccaggagccagagccacccaaatttaccaggttgtggaatgagagcctgggaaggtgggggacatgtcaggaggggcagagaaatgaacgtggccaagatggtgagtgaggacaccgagtgaagcagctctaccggggggtggggaagccactccttgtggcagcagaggatggacatggcagacaggaagctgccctgggagacgagagccagacgaggaagggccagcccagtcagcccagcgcagcacgcgttcctaacggcggcaacggtgccttcatgaatttcgggtctttgcaaggcggcagcattcctgtttaaagtttatgtctgcttcttcaaaagagggatcgaaagatcttaaataagatagatgtgtatttcgtgactagtcagagaagcctggggcggggggacatcccagagctcctgccgtgtggcagagctgggcttggtgctgtcacctaccactggtgacgggcatcttcccaaactttacaggtgaggaaaacaggccttagggagatacacagttttccccaaatccaagaaaatagccaagccaagattcaaatcagatttgaccagatacaaagcctgtggtcttcctagctcacccctctgtctcaaaatcagttctgtaccaacaataaaaacaagagtggaggagggagtgaatccgtgggccatggggttgaagttcacattgaggacgctggcacgcacagcaaagggggaaacagaatgatccacataatcctagtcactttccaagtggaagcatgccttgaaaaataaagttctccttggtgtggaatttgaggcacaggaatatgaaacataaaatatacaattttcttagaattttctataaatacagaatgagtagctttcacctagctgtgcttttatgtgacccaaagggtggggcagaggccaggaggaatgtactcgtgtgtgcgcacgcattcgtgtgtgtgcgtgtgcatgtgtgtgtgcatgtgtgtgcatgtgcgctcacacacgtgagcatctgtgtatgcatccagagggaagagtgagtcgagctagtggggtctgagcttgcacgtcttcgggccatgcctggaggatttgggaaggtgcactgacgacacctccctcacgctcttctttgcatatcacatctctgggcctggctattattagaaccagctaacataatttgaggttatacaatctggtagcttggggcactggcattttaagttgttgattaaggggaaatgaatacgttttggaagaccagtgtttaaagggtagggttgatactttggtgtaaaaattgagaaacctgatccctgttttcatcggggtcacaagccatcccacctgcatgcaggcgtttctgagcaggctcagggttttcttgagggggccgctctgagaacaccgagaagggcaggaagctgaccggggttggtatcccccaaggaaagcatggagcgtgtacggagaggggaggtggcgaggagacaccagtgtcgggggcagccctgtccccacagcattatcagactccaggccagctctagcccaccctgagctctctttcttgaatggttcttttcagcacacagacggcgagaacccactacagcttactctagctgcgttccggggtctgtttaaaaggatatgagctcttttttaatggatttgttaggggagaataatgtacatattcttgggaaattcaagtgaaccttgaacttcttagggagaacctacactgatagaagaaaatggtgatcatttctcttttcttgctgctgacttgataaacattttggttagagatgctttgtttcttacagtcatattgttggatgtagtcacatgtgttcccccatataagactagaaatgccaacttcttggtctcgcagttttggcagtgccttcaataatgcctgatatgacaaatgtcttaatgaatgaatgaatgaatgaatgaaaatgagtagctatctcagttttatctagtgattactacaaaattaaaagaaacctctgaagcaaacgaatatgtcaatgtatgataataacctcttttaggaatatttctgttatattctaatgatcactccatttagctggaattttcctgttattctgtgtgtgtctgtgtgaatcagaacatcaaagcctctttcttcattatttgtgaatttgaccagttaactttccaattaagtttctgtactttttgattaaacttttattaccgcaaaaagaaattctgaattaaagatgaaggaagtactttttctcattgatggcaataggttatacagacttctgtattagaataatagcagtatttttggtaagattcgtgtggctatgcccctatttccccaatgtatctaaaatgaaatgtaaagtaagtgataaaattacaaactcttgtcagtgggacctcacctgttttcttattcacattttactgtattcgttgtgacttgattcatatgtctagttacttacagaacctttcattctgatgttactgcttctttaattggattttacatttcttttttcttctgtccttctctatagatctatcaggtccaaaaggtaggctcttctttctttattttctaacttgcatgtactgttttttccttgccaagggcctggtcacctttcagaaataacaccttgcactgaagatacatagaagttcttactgtttattttactactttgtgtatgaatttgtttgaacaagaatgcctagatcctcatcttgccccactcaaagcaacagtcagacacatttctgtgtactgaatgcttttgtcatctgcattttcctcaagaaatgtaaaaattgtttctttgagaagaaaagtaattctaaggcaaaattatatttcagaatgtggatagccttctgaaattatgtatggaaagaaaaagatgattttattagaaaacttaaaaaattccatacaaattaccacacattgagagattattagatattgagttaaaaatctgagtaaaaggacagtgatgatataaaatgaacctgccattcatccctaatgctcagagatcataaaatgacgtgcctctctgtttcctagtattttgtagaagcagctgaggtttagaagtaaatacactgggcaggccagatacagaaaataaagacaagcaagtcagtgattcaagatctagcaaaaatgaagtcagaagtgagcgagttccttgagaatttatagaatttgtatacacgggagtctttcccataaatgaatttagtttgatacttaaaacatctgtgatagtttccttttataaatttagtttctagacaacaactgtatttttctcttagagcagatgagaaaatcagaataagatcacttaatttcggaggttagagcacacaggcctcggaatgcacgggcagtaaatttaagagcctgttgtgttggattcctgtgctggccatgatgacgaatcgccttccctgctggagccctgcactctgcatagctgctgtcccgaagagtgcaaagaaatttgttaagtagatgccagaatctcttgtgcttgactagtgtttccagggcccaagtgtagaaatggatattgcagctggagttcctggtcgtcctcagagagcctcgggaagaactggacaggtgcaaggccaggcggggagccctccctgtaactgacagcaggacgctctcatccaaaacctggaagaggggctctatctggtcgtttccacttgcattcatgcctttcttgtgctaggtcacattattttctttttactaacgtgccagggatacattgtgagaactttgtcagaatgtgaatttgtgtagaatgtgaagctagaaggagccccggaaacctgcagtggaggagcagaggcacagttttgtagtaaaggtgtgcccagggaagggaaggctttcctcattgctgagatgtctggggaggagaggaggcggcgattgcgcctccggcccagccagctgctttgcggaacagtttctctggaatcaaagctatttctgaaagtagcgcggctcctgcttccctccgcatggcttccggatcatggtagtgattgacgtttgaaatgtttgcccttcctggactttgctgtgctagtgctgctggctaacccaggaactactagttaattgcacttgctgttactaggggcgttctctccccaggaatgacatggaaatgcagttacagtagccacttataagaccacccatgaacgaggtgaaagattttcagaactggtcctttgtcatgaaaagagcaagttagagtgtgcagatataatgggcaaaaagaaatctatgaaaacagaaaaactgacagtacagattcttttggaatttaaataattttattgtgaatttatatagcccccatccttctaaaaacatattttgcttccctctttctagttaagccaaaaaataagggaggagtgatggcatcatattttacttgtgaaaaatctggaacttggcaggtgctaacattaattgaatgcaaaatagctttaagctgatgcatttccctgacattgaagttaaaacatgactttgggatgtttgtttttatttcctttctgaatttatattccaagggaataacctacagaaaaagatatggctcatgtcctttttgtcttttttgtcctttttgtactcatgtcctttttgtattattgaatttttaaaagtattgttaaattctccctcctaatttctgctcttccaattttctacttactgtcacctctaagagaaagagataagaccgtctgaaaactgcttatttttaaatctggccgcccttcgaaatgaaacaaaaccaaacatagcaacagcatgtttttggttattgtaaaacaatttcaaaaatggtcttgtatttctagcacctgattttttctcttgattataagattttaatgtatgaagagaaaactcacatctgtgttataatgatacggaagtttgcttagttgtttcttgattttcttactggaaattaaataaaaaggagagaagcaaaaccccattatttgggcccatgacctggcttcccacctacctttgggattccctgattgagtggcagcagtagccgttctgaatctgcttttctcattttaacttggaccactgaacaggataaaaacatggaagtataagctaaagcaagcttgtccaacctgcgggccacatgcagcccagaatggctatgaatgcagctgaacacaaatcgtaaactcttttaaaacattatgaaattttttttgcaattttttttttttagcttatcagctatcgttagtgtagtttatgtgtggcccaagacacttcttccagtgtggtccaaggaagccaaaagattggacacccctgagctaatgtcacctccagacatacataacttgtgggtctgcatatttttcttctgtacaaagacctcttctgtaggtggcagtcatctctccatccctgctacaaagacagcaaagtctatgaattctcacaggcctagactcagcatagacatcaggcagctagaacaagcgtcagcacgcagtttctccccttctcctctcagtttccctgaggtcccaacaccggaatggctctgagcttctgcttctcttcgatggtgttttattccttcatcgcgtttgctttgaaggcatgagcagcctgttggagggggcgtgaaggctgctgggccggctttactgtcctgctctcccccgaggcccttcacctggggaagcttcgtcctgggctctcttgctttgccgggatggggtgggctgggaggatctctcttcacagctcacagcctgcatgactgcacgggtggcggtccctgtggagaagccaggcctggtgccgactgctttgccttggcgtgttaccttcaccacacggctggatggcggtttggaaatgcatgtcagaacagtgccttagacaactgcctttttaagaaatttcacttcttgcctaattttctttcccttctgtctatagaaatattatgggctggatacaaaatggggtgacatcgagcagtggatggtaggccttgaatataattttgtttttactcttccctccccacttgaatacagtgttgagacttaaatggtttataatgtaattcttacgcagtttaactatgtagatagattcctattgcaccataatttaatactgagagattttcttccggggatttctgcatctggtctctgtttacatccccaaacgcagcctgcttagaaacagtcctggtcttgcctgtttggtagccactgactgctgatgtctcctggccagcagtttggggaggtctccactaccacagccgccctgatctcctcgagcacagggctctccaccaggactcgggctgggcatgcgcccctggcttgagaactttccagagaacattcccattggcttcgcagctcaccaggctgtggttggaacctgagaggtacattatgctccatttccttcactcatgattacgaccagctgccccatcgccctcatttagactttatctgcatttgctgttgggttctctcttcatcttgtccgctgtgcctgccgaaaccactggtctttggtaagaaaactcctttaccttctccacctgcttcctagaacagcccctctgccttcctgtggatggagagctagcctgcccctgatgatactcctgtccttctggctttctcaggaagcagcggcacccacatagggaggctgcggaaggggcacaatctgtgtgctttccactggtcccgagagagagtggcctggcccttctcgttagttcctctacccgagtccttctacctcttcctgtcccttttgctttattgcctggcctcgtggacttcatcacatgcttttagcatttgagaacctggccaggatggaaatgtcctattaaatgttccttatacataaaatgatctgaggaaaatccaaaattatttcctaacatcttacgtactgggtataaaagaggttcgctcttcagatatacagagcacacacttactgtattgaaaatatgattacattcagcctaggcaaaccatcattttaggcttacatgacataaatgtatttttgttaaatcttaagacatttctgtccacaggcatggtgatataagaaagagaaaaaaagaaaagaaatatttaaaaaatctttacacattctttgaagttgtatcattgttttatataccactgagaaagaaaaaatgctaattataactgagcaacttggattataagatacatccccagcttcagagatgtccaagtgtgaaaaaccgtgtgtgtcttagaatccacaatacatagtagaaagagtgacatccttttcggatattgtgtggaaatgatttatcttctgattcccgaagagagtgaggttctgaaagtaaggggaaaagtagattgatttaaatggatcagatgatagaggttagaaaaaaattaagacccagcttctgccccaaacactgtttttacaacaaaaatgaagtatgcaaattatttttgtgcttaagaacctcccaccccagaaaaaaacatttttacccactggtttaattaaagcctttaaatgaaggcaaagaaaatatttatgtgacatttagatcagaactgctgtattatggtgcagtgggactacctaagcttttttaaagcacttttcctgtgtccatctgtctctaaccttttcatgctgtttcttcattgttaggaagacagtgagcgctactctcgtagatccagaagaaacacatcggttagtaccgtgttcattcattacttgggcaatttgattgaattctaatttatgcttgcagtggctgaagtatatataatatattcaatctcttaatgatgatatcatctcttaaagaaattaactaatactattaatgatagaatactgatattattacctaaataaagactatgaacttagcttttagcattttgacctaaatttgataaggagagtgtgtttgagaaatttttcagtattaatatattcatgacagctgtagtgctttttgtgccattgaatacccataaataatctgcatagtaatatacaccaatgctgtgtatttatattacccgtgagataaagaatactacttggatgaaattactttttttttttttttttttttttttgagacagagtctcgctttgtcacccaggctagaatgcagtggtgcggttttggctcactgcaacctccacctcccaggttcaacaattctcgtgtctcagcctcccaagtagctgggactacaggcgcctgccgccacacctgactaatttttgtatttttggtagagacggagtttccctatgttgcccaatccggtctcgaactcctgggctcaagtgatctgcccacctcggcctcccaaagtgctgggattacaggcatgagccaccgtgcctggccctgaaattactttttttttgagatggtgtcttgctctattgcccaggctggagtgtagtggtgcagtcttggctcactgcaatgtctgcctcgtgggtccaagtgattctcatgcctcagcctcctgagtacctgggattacaggcacgtgccatgacacccggctaatttttgtattttttgtagagacagagtgtttcgccttgttggccaggctggtctcaaactcctgacctcaagtgatctgcctgcctcggcctcccaaaatgctgggattacaggcatgacaccacacctggccctgaaattactttaaatccatattgcccataagcagacagagatccacaaagcccatgctgtggaggacctagactggtgtcccctgagatgtccaggggtggctggccccctcactgctgtgggttggggtcagttcccagcatccccctgaaacttgggcactggttcttcatgtatgttgtatgattccttcacggttgttctcgtcctttcttttaataggcttctgatgaagacgagcgcatgtcagtgggtagtcgtggaagcctgagggtcagtaaccagaatgatggagtttgcatggcacagtttctggtccaagccctttactttctcatccccgcattctgatttcttcttcattatccccgtggtctgatagtcaatatttaaccgatgagatgcttacttaaaatcaaatcaatgggggatgtttctttgttgctgtagagagatgatttatatgcataggcacgttggttgtttctttctcccgagatgaagtcatctttttttcaatacttatccacatcacaaagctcccaagccttgattagcacagttgtctcagcacattggtgttccacaggaatgcaaaggcgcgtctgccctttagtaagtctgtatccactgacacccatgctcctggtaaaatcggaacctctattaaagtagctgtaagttaattattattgagcaatgttttggcatagccactatagactgcctgctgaaaacctggaccaggactggatccgtaaggtctgccttcagccgcttttccttgtatcagttataattagatctctttaccactgataggcttaatggttaatcaacacaaatatggacttttccttaaacattccagaaaccttaataattatacttgaaaaaagtgtgagtttggggggaagtaaaatagaaaaactatgttttgctcagtgctttaaatcagtgaattaacctgagcatgtcagtttcttttactgcaggattgaaattacatctcaccgctagtaataaataaatctcaaagcagccactcgctttattaatccttagggaccacatagagctgaaggcttgtttctcttcactgtggcaattaaatcctattactccttgacttcttatacatgcactgagtgtgcatgtaatttggcccttcccaatgataaaatgcagaggtgaaacacggttgctgtgctgtgaagccactctgtccttgtcagtgtccttgcagtgccaaaagcagatccgtagtgattttgccaaaaaactgtggttcaaatgtgaggccccgtgagggcttccttgctgtttgaaaccttctcctgagatgtagcctcagggatgctgttgtaaccgttacctcgggaccgtctgaccccactcaccccagaagagggaagatttatggatccaaaatagaataaatgcaaagctcaattgacaaagtctgtagacaaggcccagacatcacagctgttgagcaggcccaggagaagcttgagtccttgaaaccagtgaagaaaatgctgtttcagggatgagggggagcgaccgagagaggaggaaactcagacttagcggtatagaggatgtcagtcactttggcaggagaacttttaacggaaatattgagggcaaaacctggttaatatgggttcaagagagaataggaggagagaggcacagaatcccaaactgtctctctcaaaatgcatcattttcagagccacaccctcctgaaattgtaggcacaatttcagatgtaagatgtgtgcacttacattttcctgggaaaagaatgttcagtttcttcagattctcagagggtctcctgaccctgaagagttgaaaaccattgcaatatgaacgagtattacggtgttatgtaacagcattcatttcattttcaatgatttttaaccagaaataagttgcatctttctgctggacaccactctttgccgagatatcaagtatatttgttttaagagctgaaatttcctataggatgttcaccattaggacagtacataagatggggaggaagtggatgggattttcattttcagccacatgacactttcccatcaggtacttgatctgaagaaatatattcctcagaacttaagaacttggatcctggagatgagagtcaaacctcctaatgtttataggcaccaaacaagcccagagtggtgaagaggcctgcgtggggtcacagttcttaggaacaaggccagtgcctgctgctcagggccctggtgggctgtgtgtcctccgtgcgctgggttccctgggctctatgcttgcccctttgtaccaccgaacagggcactccccagagtgaggactggcatctcgctctatttctatgcggggccagtttctactgtttttatgtattttaatattatgaactttttacatttttgattgtaagatcgtatcttttatttattgactctgaaaacacaggccttcttcatttagctagaaaaaatgataaaccctaaaaaaggtggggaggtgatttatactactctggaatttgtatggatgcctcctcagaaagtctagattttggattttctagaatttctcgagtttagattttctggaaaatctagatttttaattttcctttttgaaaattgatgacagtgcatctgttaacctttgcccttttgtaactaaaatggattatgtagaagaggaaataagatttatcaaactgtttcagactttgtgaattatagcagcctttgccatggaagtttattgaatgctactggattctgtggtagctaccattctgacataattctttttgtaaatacatattagatcctagaaattatggaaaaatgcatttttgttaagattttaaagattgcttgtatttatgttttacttagcttttaaatttacttttggcaactctctttgctgttgttttttttttctgccatctttcttctgacagtcgcagcctgacttggagtatgggggtccttacgcctgggtgagatggtcggatatactttgctgtgtgaccttaactgtgtggtgtgaccataataacctgtggtatttccacgaatctcatgggtgctttgtctccagtttttgcctggggggctatgaggccaggagggcaggcttaccctgcagagtgagcagtcttcctcctggggcctccagggtgcagccctgatcctgccggaggggaggagcccaggcatctgtgcatgaacactccctcaccagatggcctttgagcaccagctgtttgccacgccttgtgttagcagctgtgcataccaagatgaaaaagatagtgtctgccttcaaggaactcaaatcagatcaagaattcccaaggcctctacatttgctttaaaagattaaatgtaaagccattttacctaatgaaaaatccattattttccagtctatatccattcaaattaaatgtacaatctgacttttttttttttttttgccagaaagtattctttgagaaaactcctaacttccagtaacaaaaactaaggctttagacataaactcagaattacttcttatatgtctctgacagtttctgtgccttatgctttctaaaagtctgtcagtgttatacttcaaggaagaaaaagttctcagaaagcacagctcagcattaaagtgattcgatactgaagttattgtagcatattatgtactatttcacctgaaggactttacctaaaagcagtttgtgcttcatttgctccagtgcatttcaaaattatttagtaaattcttgttttaaaaatgtatttttgtgtttgcaattatagtgaatcaatagtagcatacatctgcatagcatatttggtgccctgagcctcctgtgggacggctgttctgctcttaacagatacaagagcagaggctggagtgagtagctcgggagtcaggacaggggaaagcacaaagacagggcgttagattcagaaagcgctcttcacagagtatctgttacttacctacagagcactgcaagtcgctctggcaggtgagggcatttctgtgacactgtaactccagcaactctcctgttctttaaggaattcaatgtgttagcaacatatttctagattattactctttttatgttaaattcaaagtaaattttgtttaagagctagcccccagtgggataaatgtatatgttagcaatggtcaggaacacattttggattttttttttcggtcttaattcttttttaaaattcaatagaatgcatcagggatcgaactccagagttttgacgtcaccttccttgtttccttttccatctctaatgccctttacatgtgctctgtcttttgactcatgtagaaaagacatctaacattattcatccaaaaagttggcagtggacttttgcgtggtcccatgggaaggtcacagacgctttgataacactgcgtggtagccattagcattcggactagtcacaagttaccgttttcatagggcatttacccttgtatcttatttatcctgtattagaacatactaacttatgtgtgtcctctttattttattctctcttatggcagtgtttctggagagcttgttagagtgcctgttcctgagccctttctgtaggtatcctgattccctaggcagtggcccatgcttgtgggaagcatgccaggtgtccaggaagcaggtgtgagacccagcctgggagcatggaaccagcaaagtgaacaagcctgtgtaccacttaaagctacacagtacaatagagcgaagcttgttgaacatcagagacccaacttaagatgaagttaatatgctgcctatggacttttgttctaatattgttcagttaactgtcaatgccccttgccctcttatgccacgtaaaaacagccccacccatctaaatacaacacaaaaaaacaccatccaagaggagaaagttagcagtgttctttaagaaggtcaaagtacttctccctatggaggtatagtcaacaagatcctatagatttgggaatacattctaggaacatagcccaggaataggttccttatgatagaattccattaccacagacctggtcatggaaattgctttgcaggctttcctgcaaagtaacagtttttcccaggttttcgtagaaggctgtaagtggaaaggtgacaaatgagaggatactgtcatgcttccagcttgcccagccttctgctccgtcgctgcaggctgagctggagaactacagtgcaaaggacagggttccgccacagagctatgtatttcataagcagcagtggagagccagaggccttgcttatgtcatacatttctcttcctcatttgttagtaaagtcaaagtcatctaaaagtgattaacattagccttcattattttattaatttcttctggaatctagtttctgaagacataacaagggattgagatctaaaatttgcaagtccttgacatgcattttcatgtcaaataatcttgttgctgaagacatgaaaggaaattagtctgagtaaaactcttgccaatctccaaagatttttactattaaatttatttcagaaatgttttaatgttactcatagagttctcaaatttaatatggaaggatttctacactccttttgtttcagaacttcaaattgatttcttgatttgttttgagttacagcaaagataaatatatagtttgatagtcaaagttttatgaatctggatttataatctgtctggaaattcaatttttttttctactttaatgtcatggctgcaaaatatgtgctatacagcacccgtcccccggataaggaaccatgtttagcacctcccatatgccaggccccttccatgtggattcatgtatccacccagtcagctggtgattcatgagggcactgttctaggtgcttgagatactcattttcatctcatttaatcctcacgatggctttgtaatgtatttattattatgcacattttcacggctgagaaaacagatgttcaagtgcattaaataattacttaaggtcacatgacggagcttctttgtggaatttggactcatgcccaggacctgatggcgtctccttccatttttaccagttgtgtagactgctcctcctttttctgtcccgagagctggttttgtctctgatgcttgacagctctattttgaatcagcagaaatttccttatagatgaattaagggacatttagaaagcccatgctttgacttaagggaacctgggctgggaactgagaagagagggatgataggcatgcacttagtagaatcattctcctttattctggaggacacattatgaaattattaaatatgtgttcaaatttcattttgaaaaataaagtaggagggctggatgaataaaaaactagtatagaggatataccccacgatgaacttttgcgtttaactatagattgactagaaataatttctgaggccgggcgcgatggctcacgcctgtaatcccagcactttgggaggccaaggcgggcggatcacgaggtcaggagttcgagaccagcctgaccaacatgatgaaaccccgtctctactaaaaatgcaaaaattagccgggcgtggtgacgcacgcctgtaatcccagctactcaggaggctgaggcaggagaatcacttgaaccagggaggcagaggttgcagtgagctgagctcacactactgcattctagcctgggcgacagagcgagactctgtctcaaaaaaaaaaaaaaaaaagaaatgatctctgaatcttctgaattatggcccatagcatcacaatgtgccataattttcaaagaccctgaaccaggaactgaaaactcattgactcaggctgaatcactacccatcggcctggcatgtggcttcttgcaagcagaatgtccacagagccaccataaaaccagaaacagcctgacaaggaaatggccacaccaagcccaaatgttccaccccgtggagggacttggtgccactttaaaactaagagtggcatgtgacatgaagcctactgacttggttagcttgactgctgttccctcctgagctgcgggggagcagacggcggcagggatgcagtttgggagctgccaggacttgtactgtcctggactggtcattcatccgctccacaagaaaggtcaccttatacctggctggttggtccctgctgatttgtacctgtgaattcatttgtgtactgatgtcagtttttctcttttcttcattgaaacagacaaatggttatgatggagaattgtatggatcacagtccctgaatagaagatctggcagggttagtatagtaaatttgcatggctcaaaattcaaataggttgtttcaaagcttctagaactaaaaactaattgctaaatttaaatttagcttctttgctgtttttaaattttaaaatcggtctgtcttttttttcctagcacatgatggaatgaaagataatgtttttcaactagcaaacattctgagaatgttagccctccaacattctgattgttagtataaggggtagatattgataagaatctcaagttttaaaagatctgaaattaaagattaactctttcattactgtattcccctgggtgtatgtatataatgtgtgtattaagtatattcagctttcaaagatactaaatccaacattttcgcagtctccacatctgtcatttgtaattttaatgtttaccttaaaggcatgtgtacaagcacctgtgtttttctggagaggaaaaggagaataaaacaatgcagatgcttggaaggctcccagttaaggggtgggaggcaggaaggagctggtggaaggaaagggtgctgctctagggggagagagagggagtggtgccagtggcaggggcattagggagaccgggcgggggtggggagggctttggattaatcaaggacaggaggtcattggggattttagaaggttacactggatacatttccattaagcttcacgatatcccacaggtccattctgtgtgaaatggtctaaaaatttcctgttctcatgcttcatttttttcttttagtaatattcctaattgtgtaaaatagtatttcttttcatttatcttaattatgttatattaagatatcatgtgtatgcttaaattatacttttgggcttcaaatgagtgaccccacccagaccttcttccctctccccgaccaaagccgtctttagctttctgaaaccagctgatcaagttgtttttacttgctcattcctatttacctatttagcattgcatgcactttaattatttattttttgagacaaagtctcgtgccctcacccaggctggagtgcagtggtgctatctcagctcactgcaacctctgcctcctgggttcgagcgattctcctgcctcagcctcccaagtagcttggattacaggcatccactaccacacctggctaattttttttgtattttttagtagagatggagtttcaccctgctggccaggctggtctcgaactcctgacctcaggtgatctgcgcacctcggcctcccaaaatgctgggattacaggcatgagccatggcacccggctggatgcgacattttaaaaatgtatactcaagacacgtaaagatggccttcagggcatttgcactctgtggataagggctctccagtggacgggtggcagcaggctgtcacactccacccacctttctggcaccccagggctgagctatagcccgcaggcgggctgggctgaagaaagattgaaaattttgcaataaatggaattttagttacccaaggagataagacaaggagtttactgacaacgcagtgtgaaactcagtaattacgaatcgtgctagggatatgagattgtgaaaagcagtactagatacacccctggcatcaccaagacacaaacactgaaggtgaaaatacagcttagaatctccagttgttaagaatctctgctgtactgtttgtgcctcgcgtctttagataaactagcgttcctgggctcctagtgttggctcggttgtgctgttccatgttcgccttttgaatgggatgggggtgcttttggagtcgtaaggaagtgcttgtcacttaaacgtgttttcttctttggtgctcagaattccagctacagcggtgacagcagattctctactttgtcatcatccagggaggagaagttggttggtttccatttaaatctttcacattctcttcagaaaccgcagattttgtagcatgcaatcttgtgtgtgtggattcagctctacttttctctttcggtgtctgtttgacggatttttgtttgggtagctgtgttattgacgtgaaaagcagcagttaacatgagctccttcattcagatgtactccagtgtgctgcgtttgaccacaccagctcgaatgtgaattgtggcattcagctggctgcaatgaaaggacgtgtttttgtgtatattttctaattagaattaatcaaaaggaaaaaaataattagaagaatgctcttgaattcttgagagtttctgaaaacagaactactttgaagagtacatgcaaactttgtggtggtttcttgggcatggactagacttggaaggaaaatccagagtctcatccaaatccacatgtttacacaacagagttccttcccattctctacaaacatgcatcggtcttgataaacataatttctaaattgtttaagagccctaaaattgctaaggcttgttggtgtttgtttaggttcacatttactcagcaaaattgggactagtttaggtaggaaaatcaagcaggccctgggatcacaaagctaagcagaggaggtgggtgctctccaggcactgacatctagaacagaagccaccggcaccggagaccagtacaggagtgaacagatgagtagatagaatgggagggagacactggttttgccaggaaaaaagatgtgagctgaaccttaataaataggaagggccaggtgtggtggctcacacctataaatcccagcacttcgggaggccgaggtgggcagaccatgaggtcaggagatagagaccatcctggctaacacgatgaaaccccgtctctactaaaaatataaaaaattagctaggtgcggtggcacatgcctgtagtcccagctactcggggggctgaggcaggagaatcgcttgaacccaggaagcagaggttgcagtgagccaagattgcaccactgcactccagcctgggcgacagagtgagattccatctcagacaaacaaacaaacaaacaaacaaacaaatagaacaaatgaaaagaataggaactaaccaggtagagcctagaggggaagctcttcaaggtaagtagccatttgagcagagcagaggccgcgcagaatgggcagaacccaggagaggtgccatgtggctgagcacagggtgctgttggagctgttccgtgaacctggtgactccagtagcagctcccacgctgaaatcagaaaatgaaatctatgcaattcctctgcgatttcctttagccactcccatgtatcattgacctcattaaaatgcttctagaagaaatagctctgacccttccccgccctgtccccaatttccagcccctattctcgtttccctcccggggggttggggggtatctttttcttgccagggcacttcttcctcacctcttcaccccttgtccaaccccttcatgtccagggagactgcagaaggtgctggcagctccatggcgcccactgcttgccacctttctcaacccttcccatagtcccccagtctgtaataaatccccccactgtaagctgatggcccttctgtcccccaatacgtgaattttgactcagtatatgatcagctgtgaacaccaaagcatcggtgggtttaacaccttgaaaaaggctttgggcattttcttaattcaagagattttgctgttgcagagggcacttagtcattaagaaaacttcatttccaactcattttcgataagctgagttacttgctctaaaataaaagatggcaataaatatctcatctttggatatgaacgattcacccaagttcagcctgcatctgactcacttcagtccatttaagagaaataacccacatccaaagggttaaacatcagaatgagagctgactcattcaaacagggccacatgtgaactcgccctgagccctgtgtgcccgtgatttgctgcccgagggctcttgtactcacccaccctcagaaccttcctggaaattgtgctctgtagacatctattgctgcccagtacgtggtgcgtttaattttatttaaatataataatggaaaggtatcagtgtagaatgtagtattgatgactcttcctaatatcaattaaaatttatttcaatatttaatatcaactaaaattaaatatttttttctgtgcgtgaactcaaaagtcctaatttggccccatctcctagttttgtcagttgcctggcccagccgtctttatttccttctgaccctcgttctctccctcccccgtgagtgcatgcctgttactgttttggttgtataaggtaatcgtctctgaactcactggactgatgtacctttgcgatgccgtgagggtgtgagcctctctctcctctctgctgcccatttgctctgattacagggactctccggctccagccttgggcttgccggtggtggcctggctcccacacccctgtctgccccaaatggaagctgggtctgtctccttttcacatcactttgtcgctccttccctttccttctgtgcatcactttaattgctgattacatttagtggatagttcagcctcctctacacaaagtcacaagagcaaagcttagcaactgttttaattggcttgactagtttgctaagacttttgtcaatcttttagaaaaaccatgtcaaataagttagaacctatatagaaaaggagacttaaggaaaaggagggttttattaaatgcatattttcaaaaactcgagtccaaaaaattggtctcttgggtctctcctccttttccagcaattgttccccatttggggtttcatttgtttttttaaaaatattttttctcttgtaaatgtgtccaggaagcaatttggaaggtttttgtgcctaatctgcctccttggtccctgagaagtggacagaacagtgttattcctttggctgggtctccccgctgtttcctgtttttacaaggtcaggttcaggtccggccctgaggtgcttggcctgttagctataggtatcgagtcttattctaatccaaggaagtcggtgtcagaggtgaaagtacacgtcctatttggaggttgaactgtccctctcccttgcatgtcgactggagctgctgagtgatcaccgcctggccgtgcaccttgcctgacttgctcagtgtgccctggaaatgagtccagattctgtcccgtggcacagtctctggacactgggagctgcccttgtgtcccagcctgtcccttcaccagcactgcctccccctgacgtgtgtgctaggcaggattctcctttgacagggctagaccgcggctcctctgggggtgcctcccacaccagctgaggcagccttgcagtgactccctttgtgtcttgaagactgtcgctgggcccctggcatagaaataaagactcttcctgctcctgtcttcatgtgtggacatctgcgtattgaatactgccaagtgtgtcgttaaccttggatttgagctgtgggttttgttgctgttgttgtgttgaccttgtcaccattctgtctcatcccctgaccctttcttccaggaatgcctgaaatgactagaaatgatcgtgttttaaagatgctgggaagtttactgttttaaagttaaaaatcatctcagttatctttcttgtaaattttggatttgcatctatcaaatttgcagaaaacacggtgcctcgatcggtttgtttctgtttaaccactgtacagcagttggctatggtgaatgctgaaactatcgtgatggccttttgctgtcatttgttgctgttttttcaaggcttttaaaacctgccatttgctttcatcctccagccctcctgtctgtacagcgctgcccggccttcggggagttaccgggtgcgtgtgctgcccaccctgctgccccgcaccccctcccactgtgcatgcaccgcccccaccaagcccagagccggggatgtgcctgttcccagccccctgggggaagttgcaccttcacgtggagcttacatgtgccagtggggaatgtctgtcccctttggccagatctgggttttctctcccccgattgttgactgtagctgccacactgctctgtctccaggaagccttgtgtttgctgggatcgttaggcaggaatggaacaacagcaatgtttactttacctattggcagaaagaatggtggctttttaatgctttggtaacctggacagatactaatccatgttactatattactttggaaatttccagttttaaatataagtacttatgctatgcaagaaacgtaaagtaaatactcaaagtagctatattgtcttgttaataaccttttttttttttttttttttttttggagacagaatctccctctgtcacccaggctggagtgcaagggcacgatctcggctcagtgcaacctacgcctcccaggttcaagtgagtctcctgcctcagcctcctgggtagctgggattacaggcacgtgtcaccacacccagttactttttgtgttttcagtagagacgggtttcaccacgttggccaggctggtctcaaactcccgacctcaggtgatctgcctgcctcggcctcccagagtgctaggattacaggcatgagccaccacacccagccattaataactttctgaatttccatcagattgcatacttatgtgtttgatatattaataaatggctgagcaaactagtatgtcctcaagggaaaatagggaaattaaagttcctttataccgggcaaagtttgacatcaccatttgtggcagtgtaagctcctgtttacccacgttgattaattaagtagcattttccagttaaccaattactctttcttctacttagcaacttttaaagggttataaaatatttaacattaaaactataattaacataatttgatattttatcccaaagtcacttcacataagagtaattttctaagcatcaagtatgagaatgccatgacaaaattcaggatgttcgaattatctgctcattttaacctggattaacaagttttcacttaggcctgggatgttttccaaagtaatagatttaaatggtctgttggagattacattgcacacctcctgacaacgactaaaaccggtctctcctcatttccttgtcgcactctgcaaccctttgaagagctggaaaggtggttctcagcctcccctgcatgctttttcaggtcatgctcctggcacgtgtcagtttttcacagctcacgttttcagcactttctgggcactcttggagaaaggaagagcgcccatcctgacagtctcttttggtcgcaggcgtctgtgttggatgaaggcagcttcggtgggacccgacggggcagcacctccggctcccgtgctgtaaggcgctttcggtgatacctcctttcccccgtgcctgctgcatggcctggggatgctcgctgggcagggtccagccgtggggggtgactggccattctcaggaggaagcgccgagtcaccgggctaaccgccaccttccattgtaatgaaggtcacaaataatgtgaatcaggaaacctctggttgttggtttcatgtcctcactcatcagggagagtaacttgcactgagtttcatctgctctctctgcagcacgccaaccatactaacaggtggtgaaaccgtcttcggttaataaaaacgggaaaaggacaacttgacagaccacacatcattctcgtccctggatagttgaggaagaggaacaaattttaaaacttggaatgttacgcatatttcattccctgtttgtattttgttgtctctctacctctttcttcaatttgaaatgataggctcagctatgagggtaaagatgtaataggtgcaccataaacatttgtgaatgaatgcgtgagaaaagcaacaaggtagaaaaatgagatggaacccgtggaagtggggagacgaatttgcgtgtcccagggacctgtggaaacggagcgttcagtgctaaccggtgctccctggcggtggatctcctgtattcagaggctcctccccaatcctataaaaatgtcttcaagccctccaggaaatagaaaggtttactaagaaatacttgaaatgcttttataattttgcttttgaagtttatcagctacttacttgactaaatccagttttatgacttactatgctatttgtccagccatcatggatattcatgaattcttatggtgtaagccagtctaacctacagttttctttaaaatgtaatttatgaatattaaatccagtagttgacatagcattcgtttttgtcgacaactgattacacatttatcaacttttatattacataagttgttcagtattttgcagcccactatataacatatttttcccagttggtaaacattttcataggccattagaaagctcataaaccatgcatgaagaatgaaatagccctgcctatgatgtgatggataaagcacaactaatgattttcttttgtcagaaaagagggagaatactaattcaagagaaatttcccccaagcaccaggtggttttctggtggcttcagtagagagtctaagatctggcaggacggagggctcctgatgctctccagatgctactgtgtcacgtctgagatgggcttcgggagtcgtcagccctagatccttggccttcattgctcttctgcgagcagtgatttctgtgcttttagcccccacaagaattgcctgggagtgatggccttagagagttaagaaaacaggaggtcatcttgtcctgacagcacagctgcctaaaatagggatggtcagctctgctgtgagcaggaaattagcaccatgaggaagacggaagggacaaagaagttcctgacctcccaacctctgccatcgtttccctggaaccctcacagttcccctccaagtggatactccgttccttatgtttacaggagggccttgggagagagccacccctgctctcggtccagcgtgtagggaggttatggcccaggacggtgtccagagcggccccggcgcccaggcctgaggtcccagccccaagtggtcgtgacctcagggtccaggcttcccccaggcctgcacagacagccctggtcctgctgtggaggatttgccctgcccctggaggaccaggaattgcccccgcgcagctcctgagtgtgaagtgactttcttcggtgttgtgacaaagctgggacgtagtcatcaccagtggcattgtctgatccaggagccgaggaagttgtttctggcagaaagtggaaataagaagcccaacatgtaccccctttcctagtcctcagctcctccatttggcccacgtccttacttccatgtcacagatgccgggctaaggaacttccacagccacgtggccaacaagagatggagccatgattcagacttaaagctttctgacttctgcacattagccacataactcctaaacataaggtgcacgtggaccgtggcgatatagactttcactttgttcttttctgcgtgattaggtccagttggaaggtttgagagctgcttttgcttagggaagctggggtgggcagtaagctctattcacaacagttcactgtgtctttgcaccataaaccagggcatgaatggcataggatggagaaggatttgctgcaggatgaagttttcctctctcttacatcaggaaaccctcaggcaaaattcttctgctttaaagtgttgacattaagtgttttccttattttcaacaagaatgccaaaaagtgaggctagtaatactggtgattttcttgtatatctcaaatgtggcattgatgctttacatgtgctgtgtacacagcagtattaatctgtgaatctgaaacaacgtcttgcccctgagtgtaagtgtatagtaaacatttatcaaataaaatagaggtggatgggtctggggaacttgcccatcttgtccacagccctgtacatttaatgctttcaattgacatttgatggttattttagtctacagttgaaatcattcgttcattcaacaagtatttcttgagtttgccaggcctcatctggtcactagccctggtgaggaaacaaactaagagatggtatttgacatgagatcatgagcacccctgaagatctatatgagatcacaagcacccctgaagatctggatgagatcatgagcacccctgaagatctggatgagatctggagcacccatgaagatctggatgagatcttgagcacccctgaagatctggatgagatcttgagcacccgtgaagatctggatgagatcatgagcacccctgaagatatgggcttccttataattcgcaagcagggcacttcggcaggtccccagcagagcctgtgaggccagcagagggttctgtgcccagcacagtgcagggtgtccaggggctggaatggaggggccttcagcagtggcgaggcttgctatatggtgctgcgtgggtctctcttgaagatgctcctcaggacatgtcgggatcctaaatagtgttcaaatcctgcccccgccccaccatgccttgctcaggaagaatatgagaatgtttataataacgtgaaaatgtatctaagactagcagatgtgaacataaatcaaagttacaagggcgtagcttccagataatcgagttgctggtattttcctttaccagaagtgagaaagttcaggtaaatggatagacagatgtgtacatagcaaccacccaggtagaaggtaatctggcaatttaaaaagccatacataattttgtattaaccctaactctcattttgcttccacttggaaagatagtggagaagcaaaatttttgttcccttgctaaagcgccaagcgccctgtgcaagtcttcagtttctgtgccggaaggcagcttaagttctcaaaacagtcatttccacatccacggggtgactttctgtgtctacactaggtgtgactgcacacccaattgaacgggtgctttgtgttattttcttcttcctaactctgagaaattctgtgttcctctgataatgtgattggcttttttattcttagcgagcactgatttgaatatgcgtttgctgtctaaccctaactctcttttccttgccgtgcgtggctaacctcaccacttactgcagcatgttttctgtcggcctctattctccttgctcctttgctgaccctgttcctttgtttctggctgcgtgtcctggcggtggctgtgtgggcagccctcggagtacagcggccacctcaactccagctcccgcgcctcctccagggccagctcggcccgggccagccctgtggtaagtcggcctcctggccttgctcctactcagtgtcaccctccctcccccttcccttatcctcctcttccaacgtctccaaatttagaatattactctgcggtgatattattaggattacattgctcaacttttcaaggaccgtaaaagaaattgttagctgtgcttagagatggggatcttagaggaggcaaactttatacaaagggagaaaataatatagccatgtgcacggatgtgtggttttctttttatgatttaaaaatttgaagtattgactgttaatgctttgcttgaagtgttacctgtgatcagaccccgacagtgtttaaggtaaagcgtggcctgtagatcccgggacgctcccagtttggccccaatcattcgttaccctcctggttctcagatccttcgaaatgtgcagatttgcagccctgcatcctgcttgtcactcagcgtggcccaagttttgtttcagaaaataggagccctattaggtcatccccagcttgttaagtctcattattgtgtgttttcccctgggttgttggaatttgacacagttttacctgatgtgatgcttgaaggcgaccctatgactctttttaaaggaagagtttgcaggacggttttggactggggcttgtgggaatggaggaggggaggtgggcacatggccggggaaacagctccaggctgcacgaccagaccagcgttcccaccctcaagagccagtgagaaaccttggggagaaaaagcaaagatgggcaaggcttccctgttcgtctccactcatatcaaaatttccagcctgagctgggtgtggtggctcacatctgtaatcccagcgtcatgggaggctgaggcaagaggatttcttgaagccaggagttggagatcagtttggccaacatagcaagaccccccatctctaaacagtaaaaaaaaaaaaaaaaattagccaggtgtggaggcacgcatctgtagtcgcagctactcaggaggttgaggtgggaggattgcttgagcccaggagttcgaggttgcaatgagctatgagtgccactgcatttcagcctggacaacagagtgagaccctgcctctagaaaacaaaaacaaaaacaaaaacttctcccagccatcgagaagttaaaatgtggctcttaagttagttactgaacaccatacttcagcgtgctgatccctacaatttctgtaacgttcctagtaatcaaccaagaagtcgcagcgctgagacctcctgcttgcgtggatgtaccttttttggcgggcttttcctattgtggtgctggtggtttgtttgtgttttaaattagatgcagtcttttaaaactgtgaggtttcctacctcgcacctgatacctgcattcaggtatcagcaaatgcaggtatcagcttctttgggggaagaaaacccaggatctctggccacttgactctgaggctgccttgcagaactgcacagcctccaccccacccactattttcgtgaccccgaggccacggcccaggtgccattcatcactgtgcagcatggctttcctgtgctagaggaatgtttatctcctccatccagccatggagagcaggaaaatagagttcaatatgggtgggcattgcaacgccagcgcctctttctctgggggaagactctcccctctgtataagttgcagacacccactcttgtcacacatttggctctgcccacctggcctcacaggcatttgagtttgtgttccacccctccccatcccagagcccagcagtcagcagtgagagaagccaaatgtgtgcagggagtgcgaggcggcagctaccatgcaaactccaggggcacaccgccccccagtaatctctccccagagtgcatcaggcaataacaggaagatactcagctgttcattatgacatgatttcccattttcaaacctgacaagttggtcttgatgctgttattcaaataactgaaagtaaatggttgtgaacaaggaatttcagatcacagactcagtaagcctggccagcccccaaggctgtgtcttccttaaagttgggatctctgtattatctcatactctatagtagagcaataaacataagctgacttatgtgatcacttaaaactaccaggaagaaacattttccgtaataaatttagtgtaggattgctttgtcttctcacactcacttttcagaaaagaaaatgtaagtattgccaggcgcggtggctcacacctgtaatcccagcactttgggaggctgaggcaggtggatcacttgaggtcaggagttggagaccagcctggccaacatggagaaatcccatctctactaaaaatacaaaaattagccgggtgtagtggcgcatgcctgtaatcccagctacttgggaggctgaggctgaagaatcacttgaatacaggaggtggaggttgcagtgagctgagatcgcaccactgcactccagcctgggcaacaaggcaaggctccgtctaaaaaaaaaagaaaaaagaaaaaaaagaaagaaaagaaaatataagtatttacaattgacagaagaatgttgtggctttactttcagtgaatcccaaacacgcttaatgccctctgtaccctctgcctggttccagtgagacatgacaattggattttgttaagcattgtctttattcaagcatatgatgaagtctcaaaataacagggctcaatatagtcacttagagattgaaatgacacaaatttctttgtcatacgaaattgaccgaagagactgaaatgatacaaattcctttgtcatgtgttttctaaatttgtataaaatttactcacaggtttattagatgatcataaacagaaagatgtgagttcagccttcctgggcgtcctgggacctgatgggggtgggtgatctccttgtatctgctcttccttccctgaatcgattgctcaactagcaaaggtcagttgattgcgggctggttggcacgcttagggaacaaaggtcagtcccgcagtgagggacaaggctgtcccccatctcatcctgggtgccttacatctgatgaaacctcccgtatgtggttcttagaatgcagagaggtctctgtagagtgcagggcagttccctcgcggatgtgttacggtatcccttgattgatcgtgtcgagaatagaaagacggtgagcacaggcagcatccctggtatctgaagagagcctgggagacagaactaagctagctcatttccataatttccaaaactcatggtcctcttatactaaattgactccatttctgttttctgtcttgggacatttacaccattgctggtatattttggatctcctgggacaacagaaagtgctagtggttgtgtttggccttgttgatgggaagaagccaggagagcctggataggactccccggtccttctgcctgggagggaggagcaacaggtcttgggcagggcctggtgtaagcgtggtggcaaaggtgaatgaccctccagtctggccttccttgaggtcatatggagcaggcagtgctctgaggcagggagtttcagaacccgggttcagatgtcacagctctcattcctggcttgggacatctagctgggcacataaacttcttgtgcttcccctggaaagaggggtcatgatacccttaaaaagcaaaaagaaacccccccaaaaaaacaaaaaaaaaacatatggttactttatttctccttggctggggttagccagggatgggatacagttgttgtagcgagagctcatgggaaatgctcccaggccggggacttcgtcagggacacgtatccagggccagtatgagtgaggacagaggacaagaaaaatatgaagtcagggtcagccctgcaggctctgtagggagtcccgccctgggtttgggagatacaggtgcacaggtgagtgtgtcacacccatcagaggggagggagggagggtggtgctgttaaagggcagtagtaaccagaatgaaggaagtgactgcttgtcccacttcgagaaaatgaaaatgcttcagtgtccagagaccaccaccagggacaagacttcaagttttctccacccacttggtcctcccagggtccttgggaaagcagagagggcatcagccccatctcaagacaggcatagaatactgttcacctcattctcatcttctcccatgctgtggatgagctgtgttttcttcctctccagcacgaccaggatcttctccttgaggaagttatttcactcattcattcagtgtttattgagcacctagaatgttccagaaacagggccgttgtatgagcaaatgcagacttgccccagccctcatgggacgcacagacaggggcagacggatgcttgttgggtgatcacacgttgtgaagcccagcagcgggggtgtgaggggaggcaaaggtgcctcgagagagctgggatccagaggtttgacggccagagcttgggccacacccaagcagagtgactccacctagtgaagccaacagatctgggtcatccaggccccaaaatctcactgggaacctggtgaagccatcacgtttctgaaacatccatcaggaatgtcccaagggcagcctgggtccatatcttccctcgtgtactcagagaagacaggagcaatgaactcagatctctgcccatttggactagaaaaacaacactattttgactcatgttttttgttgcacaaagaggcaggggcagggaccaggtggaaaaacgggtcttgaattacaaacaccagagttcaaagataagtcattcaggctaaagtaaatattattggatttaaaaccaaaaaccgtcaccctagtggtggactgtgctatcatttaaatgtgaaggaaaattacccttaaaatgggtgttttctgagcagtgtttgctgtttgtttgtgtctcaagaaggacctcgcaaggatgttgcttcggtgatccctttttccatccaagtctggtgttgcctggctgggtgttgaggacaggttccttttgtacctgggcccttgagtagggtctctctgggtacgtgaacaggtgccacatattctttctttaggaaaatggcaggcagctggaacatggaaaacttagcgttttagcctcaccaggcatcgtgtgtacaggagcctagatagcaaactcctttagacacagtgttagaaagttggaattaataaaatatttaatgtgctccttgaagcatttgtttttgaaaggaaacttgacgtaaactaaacttccacagacgtgttttagaagtgactgtttccagtagattttcaatgatgtctgtatacactcagctgtggctgtaaaatacaacacacatactttgtaaacctgttagtgtgacgttttcaccctgacctgaaatgtttagtatcactcagaatacgagagtcatgaagctaacaggctgcaatgtgttcggcgctgtcgcccttcccgtgcaggaggccactgtctgcggggtccggtgctttcccgtcctgggctaaggtgggtgggcagagcagcctggaccgtctgcagccaccatgtcctctggacccctctctgcaccatgcccacctcctccaggcccccacaccatgccatgcagtggccgtgacagtgtttagaatcctttcttgtcttccatttcttcatcattttagggaggaagtgctgtgctttatgtcaagatgaaacacaacatctgattccttacctggctctgctagggcttaggaaagggggcttggttaaggtggactctgctgcctgcggcttctgtccgggcccggcccctgcagctgtgacacactgccatctggtggacacgagtggggctgcgtggctttccacggggctgaatagccttcctgtgtttgaggaaagctgacaaatcctttttcattcggaagacacacaaaatgaaatttactctactatgtaaaatagagataggttagacgttcatttgccatcacctttcaacaagagcttaatttttagtttttctctgcatggtctctacttaaaaatatgcccagattttattttgagtccgttgtgttcttcggagcaaggacttttttaaaatgataaaaacagcaaactatggtttttggggttttttcccttatttgatattttacaaattataaaaacaaatgatgtagacggttacaagcaaaaccatgcagaacaaagatgtgttaaagccctgcccccccaaaatcaaggtttgtggaccccgtgtgttttctttctcagctttcttgcaagaaataccagaaagaaaaaagggcttgggtgggcccttcttttacggtctcagatatctttgtaggtaaacgaatgcattcctggagcttcatttatttctccacagtatttatccattgctgaccagcagccagaaaacatacgttttacaccgtggagcaaacatgccacaggcttttcagtggtagtttggcagtctattaaactggattttcatatcccaccaagagttaaactagcctctttattttcatcttattaatatttgttcagcaaactaacttactctaaggaataaaaggctttgggcccaggagatttaatgaatttattctccagcacgctaagtgctagatagatagttcacatttccttgttctttgaaattttatttattttattttatttattttttttttttttgagacagagttacactctgtcgcccaggctggattgcagtggcatgatctcagctcactgcaacctctacctcctgggttcaagagattctcctgcctcaacctcctgagtagctgggattacaggtgcatgtcaccacacacagctaatttttgtaattttaatagagacagggtttcgccgtgttggccaggttggtctcgaactcctgacctcaaatgatctgcccacctcggcctcccaaagtactgggattacagacaggagctaccgcgcctggccttgaaattttgatttgaaaaatatttcaggaatatttttctttccatgtgaagttgagaaccacacttgaattgctccaatcatcctcacaactcaacatggctgcagggcttctggggctctgccaaatgagatggtgcccatctgatcagagtctgccttcgtatctgtcccatcggagtctgccttggtactcatcttatcggagtctgccttggtgcctccaagtacacagttaggctgatgtggcatgcacatccgaaaaaataactctagatgtgcatttcgacacatcagcaaatgcagatggtatgggctgcagatggtatgggccacagctggagagagccgtcttcactgcggtatagctgggctgcacccaacgtgagaatggacatcagggcagagagccgtaagcagctgggattgtggaaagcgcccgtgaacacatggtcttggacagggcctcaggtgggtccttagcagctgtggctaagtgggcagagggaccaccccaccaccaccctgcccaaagggcttatttagcaaagaggggagagaggccagcctgcccctgactgcatcccactggcctgagggatgtggcctctctgcccccatttccactcctgctcttgggacacaggagactggttagatgagagtagaaagtttatttttgaacacccaggtgtggggtggctgggcgagaccatctgatggctttgggagccaggccgcagggtttagcttggatctgttgagtaggagacccttaaacatggccaccctgagctaagagctggtcttggattttgctttcttttggattaaccgagtattttgtgggattccatttgatcccttaactggctgaccagctataactcctggttatgttgttttagtgttgctccaggtgtcgttggaggagaagttgaaggtacaaggagtttgcaggagggaaggtggcagttaatgagccttcctggtgggaccggatggtgagggcaggggcatctggcccagcgtggactcgggccatagatgggaagtggtcatttggaggtcaccatctctctgacaccctgaccatagcacctgcacccctgtgctgagctgcaggtccccggcaccagcgtctgtgcagctcaggtgttgctgagccgtggcctccgcagctctccatcaggatttctcaagcttcattatgaattatctctgtgtgagctcacaacggtgactgcagagtcccaggtcatctctcagatcttctgaatcaaacatatggtctgcagttgccgcgcatgtctttggccgattttctgacaatcaaagtgaagaagttctgagctacgggaagttgggttgaaggcatgatggggaaaacatgattagttgacagcttttcccagagagtttttagacaaactcaaccttggtaaccttctcagtgggcttatgataagaaccttcaatgtgccaaaaaataaaaaaagcagcactccaggtagttaatctttgtttaaaaaacccttccccccacccagtcctgcaaacaaacaaacaaacaaaaaaaggagaaaaaaagaaacctgtcttttgttggatgctgagccgagaaagaagtaacaccactgccggcctctgcctcttgtcccgagacaccctcatggtgcagggctctctccagggtccgttcctcatgtgcaccctctcttgtagttccacagcccgctgtgggtcccactgagactcctacctgaggacaggagaagagggtcctcagggacgtccaaatgaggacaagagaagaaggggcctcacagacatccaaataggagaagtgtgaaaagctaaatttggagtgtcccatttttctgcttctaaattacaaaggaagcaaatgttttgttttgttttgtttatcattcatagccccatcttcatgttatccatttaatgcttttaaagtatttaatattttgtctgttttcgtctacaggtagaagagagaccagaaaaagattttactgagaaggtaaggaatcgttcataaacctagagggtcccaaaagttgtggatgaaattgataagaaaatatgttgcttggttttttttaataaggatgttccccagcgagggaactggactagaaagcggcccacctaacctggtatcaccttcccggaggtaggccaccgggagtcctgtccggtgtgcgttagatcctgtagagcagggaggcgtttataatgggccccaccatggagtttagggttaatccagctaatcgcagagcatccaggaggtgcctggaaatgatcccctccttacagtttactataagcccatgaagagtttccaatttggaaatggaattaaagtaacagtcctgtgatgttagatttatatgcagttttggttttgtctgaaatcgcatctgtgttagtccgttctcacactgccataaagaacttccctgagactgggtaatttacaaagaaaagagctttaattgactcacagttccgcatggctggggagacctcaggaaacttacaatcatggtgaaaagggaagcaggcaccttcttcacaaggcgacaggagagagaacatgtgaaggaggaactgtcaaacacaaagccatcagatctcctgggagcccactcactatcacgagaacagcatgggggaaactgcccccgtgatccagtctcctcccaccagggccgtccctcatcttgtggggattatggggattacaattccagatgagatttgggtggggacacagagctaaaccatatcagcatgtgatcctctcaacgttccaggggtctcgtaacatgccgggcctgtctgcagccacgctggcctctctgggtgggacttcctctcggagaggcagcggagacacctccatctccatcgacaccgaggcatccatcagggaaatcaaggtgagatgctctcttcttactgacaacttgagagaaccttttgtaaaaatcagtctttagattaaaaaaaaaaaagttaattcataaagttctggatctttcttcttggtcctctctccctcacctcccctaaaatacggtgttctcctaacatcaagacccagctcagatagtgtctcctgcaggaatctgatcctacccactgaccccccagcagggcggaccgtgtgccggccccctgcgcccctcagcacccggggaataccttagtgagagcacttggcacgttgtgttgatgcacttggtcgtctctgtatgcttggtctgcatagacattcagtccacaagtttggacaccagacggctttacctactttcacacaacccctccccactaagtatgttccccttcggcctagaacttgccctttcctttctctttgtaatgtgcctttagtagccctcatctttgtattttaatgattttttttatcccactgtagtgtaggtattattctctgctctatcctcagcacccaggacagtgccaggcatttggtagtattctgtgtgtgaaagagaaacacggtgctatttgttaaagtaactagggacagtgcatctgaaaacctgaagactggaagggcaggtgaggtgactagacctgtgtcctccagggagcagaaccaagacagaagcagctgaaaggagccagaactgactcagattctgaattttctagtgctttaaactaggtttaaaagggaagcaacttccactggggatgtctgagcagctggatggccgtttgccagggaggacggagagggatttaagcatccaccagagtttggccagggttaccttgaagatgcttccaacacctatgttttataagtttacaaaaccagaagagccatttcccatgtgccacccctgggccacctgcagctccttgttgcttccctttttttttcctttttcttttcttttctttctttctttttttttttttttttttttttttggagacaagagttttgcttttgtcacccatgctggagttcaatggcacgatctcggctcactgcaacctccacctcccaggttcaagtgattctccagcctcagcctcctgagtagctgggattacaggcgcccgccaccatgcccggctaacttttgtatttttagtggagacggggtttcgccatgttggccaggctggtcttgaactcctgacctcaggtgatccacccactcggcctcccaaagtgctgggattccaggcgtgagccgctgcgcctggcctgttgtttccgtttctacagcagagcagcagagttggcggcagtcctgatgtttctctgcccttaggttgcgcgtgccgttcatttgttcaggtacttactgagaggctggctggtgccagatgctgtccccggcaccaggaatttggcaaagtagagacttggagctccataaatgcagggaaaaagtgctactgatttttgcctctagcatcttactgtacattgcacagagtaggaactcctagtgcttgaatgaattactaaataggagttgaaataacctgtaccgttttccgaggctctattttgtctgttttttaaactgtgtaaaatcatatgagatacactaaaattgtataaaatcatgtaaaaatatcatatgggatacacctgaactttaatctttaaatattgaagtttattttcccttaacgcttaataaaataaaaaagaaaattgggtgctcagactacccaaatagaaactaccctgaagtataaaagatttagggaatcacctgttttcccttgacatcatctgccttttttgccatttcccccaggaactcaatgagttaaaggaccagattcaggatgtagaaggcaaatacatgcagggattgaaagagatgaaggtaccaattcacagacgtgtggtctcacgatattaacccaacttaacttaaaaaaaaaaacaacatcctaaagaagaaattcaaagtgcatgcttactgtaaataggctccagggtgtagaagaactcacaatggcaggagtgccggcatgggtgtacactcaccattttcccaaatgcattgtttgaaccaagattgaaaatgtaactgcccagtagaaaaggttactaacatactccctgatgcatgccttagacttaccatccttcccccaggcttaaaaccagtttctcatttcccataggcgtgtgccagacacttgaagaaggttcttggttttcttcactttttgtagtagttgtatacaaaaatgcttcagttgatttgcttctcaaaatatctgatgtctactaataaggccgtcctcacatgccacacttttgaaacatcccaattatttgcaccctgtaaaatgctactaattgaagtaaagactgactatggcattggctttcttggagcgtgtgcacactgcttttagagtgtgcagtgacttcattgcaccagccaggagatgtggttgccctgttccttgacagtaaggtgggcaatcagtgactgtcttccttaggcagcagcggatcatggatctggaagtgggtggcgtatctgttacttccttttcagccccctagaaagtacctgcaagatcatttgaatttaatatcaaagggcaccagacagaggaggtgacatcgatcatgactaattcactatcttcatatctgccacctttcctgaaagggggaaaaataagactctggctttcaattcatgcgaaaaggagccacttggccaggcgtggtggctcacgcctgtaattccacactttgggaggccgaggtgggtggatcaccggaggtcaggagtttgagaccagcctggccaacatggtgagaccccgtctctactaaaaatataaaaattagccaggtgtggtggtgcgcacctgtaatcccagctacttgggaggctgagtcaggagaatcacttgaacccggcaggtggaggctgcagtgagccgagatcgtgccactgcactccagcctgggtgacagagcgagacactgtttcaaaaaagaaaaaatgctgctggggagccactgaaccaaccggagacccgctggtcccacgtgaagcagctgtcctggtgtggaggtacagagctagaccagcactggtccctccagccccctggtagcctctgctgcacctgaactggcagctcttgccgctgcctttagctctgcatgtatgcgccctgaaggttctgcctctctgttttggaatcgccttcccctcctcatgtttggggacctgcaagggtgtgaggcacgtgagggcatcgccatgcgtattttacaggcctctttctctggactgtccttcaaagggaatgacctttgtctttccaggacctacccagtgagatctgcctgccattttcctatgagtcaaaaatctgaactcactactgctcctttcctggttcataagccagagtagggctggttggcagtcactggcttgtggccctatgtaattatctcagccatcacacactggctctttcacaagggctggtcacacgcctcgagtgattcttcagaaatctgttgaacagcctgacacccagccctaggacgccgtgctggggggattccccagctactgagtggggccagagactctactgcctctgtgaccacatccctttccatactggtatctcgtttgttctaatgagtgtgtccattgcttttaatagtgaattttctgagcaatgagaatttgaccaaattgaaaagggggatttccatgcatttgaaattgccatgtgtttcttcttctgatccatttgctctaagaaatatagtctaagtttaggactgagggtttttttttaacagaatactgaatgattctttgttttgatttttttattgcaatttcaaaaatatgacctgctttccacaggactctctagcagaagttgaagagaaatataagaaggctatggtttccaatgctcagctagacaatgaaaagacaaacttcatgtaccaggttgataccctaaaagatatgttgctggagcttgaagaacagctggctgaatctaggcggcagtacgaagagaaaaacaaagtaagcattagtatgatacagaatgttaacaataggctgcgtgcagtggcccatgcctgtaattctggtactttgggaggccaaggtgggaggattacttgagcccaagagttcgagaccagcctgggcaacatggcgagacatcatttctaaaaagaattaaaacaattagccaggtggtacatggctgtagtcccagctacttgggaagctgaggtgggaggatcacttgagcctggaaggttgaggctgcagtgagctgtgttgacaccactgcactccagcttgggcaacagagaagacactgtctcaaaaaaaaaaaaaaaaaaagggaatggtagggtgtgtgtgtgtgtgtgtgtatgtatgtatgtatgtgtggatatatcgtgtgtatgtatgtatatataatgtataatttacattatgtatttttatatttttaaacaatggctctccgcttatccaggaaatccaaacatctgagaataaaagtaccatactctttgccaagtgacttgaaatattgatacgtataatttcaacatgtaaactggagacagtttttctaggagaacatctaagctaaaagcaaaaccatgaaaaaacatacctatgaaagagccaccatgctcagataaggtgcgatcagatgcttcaagattttcctattcatatgtattttctgatttttattttgttctctctcaacaccatagggaaatagttatgagtatcaaagattttaagaaaattatattattttctgctgattgggaaaagacacagttactctacttaagaattaaatatatcaccaagctcagagagagagatagtcttatctgagctttcattaggaaccactggaactagtttgttaatagctgagatcagatataatttctattgagagtctcaagcatgagtcatgtgttaagataagtaatgacagcggactgattccacgaaggctgggcttggatgttctttagatagaaagcaaggaatacttttttcatacttttaggaattgtccaatttttcagagattctgagaaaaacagaaaatgtaatgtgtgagtgtcgttgttgttgttgtttttaactggctattatcctctaaatccaaagggttaaaaccaaggtacccttgacaaccttcaggcctgcttcttcgactgctatagaattgagttggaagctgaagaacattttacgcacaaagttccttatagctgaactctgcaagaggggagcttttcacaagactgatgtcatgtgggaacggaggagtggagagcacagcccagccccccttcgggtgggggcctgtaatgcatatgcattcctcctggaatgctgtcattaggcatcattcagtggactgaaaactcccgagtctcactccagagaagctggatggtgctagaatgctgtcccgagatggacacaggggccatgcaaagccccacaggagggcccttgtcatagccaggagggcaccagccacccccaagctaaaggaagtgggcgaacagaagtgccagggtgagcagaagctcaggccagatcccatctcagatcacccgcctgacaggtctagggaaggagcgtcctgcaggcctgtaagctgtcagcaaagtgagttgggtctcaggccgtcaccagggattgcgctgctgtgactgggcaggaacacagcagagccgagctgccagcttcctgggctgagcctcaggtggggaggccaggcctgaggagcagctaggttttgcaggctctccatttgctcccccaaactctcctgtttttgtctcttaaggggcagccctgaagcacagagctggccaccagctgttcatgagagatgctttagtaggccatgtttatctcctttttatcccaaagagttttccttgtcatatttcagcaggggccattttatggtaagtccttgcagggcagcctcacccaggctctcagcacagtgctgtggaagacaccaggctccctgggggggcccttcgtcggctcttgcttcactgtagataagaaatcagaaaatccttgttgattgcatcaactcctcaggttaatttgacagtaagtcatcaggcatcatctataaagtccagaggaatctgtttgtgttgtttgaaagggcttgaaggccaggtgcagtggctcatgcctgtaatcccaacactttgggaggctggggcaggtggatcgcttgaggtcaagagtttgagaccagtttggccaacatggtgaaacccgatctctaccaaaaatagaaaaattagccgggcatggaggcaggcgcctgtattcccagctacttgggaggctgaggcagcagaatcgcttgaacccaggaggcagaggttgcagtgagctgagatcgcaccactgtactccagcctggacaacagagcaagactccatctcaaaaaaatatataaataaaaaataaaataaaagaccttgaagattgtgatgatgtagtagcaggtgatttgttccacagaaactataaatcgtgagagcctgaactggcatgccagaaacatgggattccactgctttagtgctgtttttctcctttacaggaatttgaaagggaaaaacacgcccacagtatactgcaatttcagtttgctgaagtcaaggaggccctgaagcaaagagaggaaatgctcgaggtaggtagcattctcctgcttttcttttccttttttccctttggagcattttgtcaggccatgactatcttagcttaggctgcagtaataaaataccatacacagcatggcttaaacaacagaaattaattttcttacaattctggaggctgggagtccaagatcaaggttgggttcaggtgaggcctctcttcctggcctgcagacagccaccttcttgctatatccttcctccaacggtggagaaaaagcaatgtctctgatgtctcttcatataaggacactaatcctatttgatcaggaccccactcttatgacctcatttaaccttaattacttcgtaaaaaccctatctccaaatacagtcacattgggcattagggcttcaacagatgaatttagagggacacaattcattccatggcaattactaaagttttcagttttcttaaatctgagagtttaggctaactctccatccctagatttacgaaacagtccctctcattggtgaacattcctattctttggtgatcttgtatttgtttggggaggtgtggtagacagaataatggtcccccgaagttgcctacatccagatccctggaaactgtaaatatgatgccttacatggttaaagggcccctgcagttgtgatgagagaccttgagagaagggattatcctggattatttgatggaacaagcatccttctaagaggaaggcaactcaaaggcagaagtagaagatgtgacacaggaagctgaggttggagcgatgcgagagaggggccatgagccaaggaaagcagctcagtcttagaagctgaaaaaggcagggaaacagattctccctagagccttccagaaaggcttgattttagcccataagactcattttggacttctgacctctagaattgcaagagaataaatttgtgttttaagctgctgaatttatgacgattcattacaatggcaataagaaactaatacagggttggtttttaattttttgacttaatcggttctttaactgctgccttgaagtgagaatttcacccaaagcaggttttcttcctgcacttcttgaagccggaagtaggacaaggaaaaaaatcctagaatgctgacaatgagttcagggttgatgaggtgaaagagtgcttgcggcctcactcactgtcccagctctcaggttctctctcgggctggggtttttcttcctctttaaccctttatctgctttctgtctgttcctttcctcaggaaatccgacagctacagcagaaacaggcgagttctatcagggagatttctgatcttcaggaaacaatagagtggaaagacaaaaagataggggtaggattcccaagtcttgaaaatctactcaaatgggcagcctgcttagcaaatagagttttttcagagtctttagtttgcaaaaccgcttgtctgagtatgcatgcaactcccacgtgacacaaagtcgtattaatttatttaattttattaagtagtgaatacactaacttatccaaattgatatgaacttggattgtgacacggactctccatggagggtcttgtgaatgcgtagctgtgcgctctgcctgccccgtggctgggccgggccggtggttgttgaaacagctggagtgaggaggacactctgaggaggtctgatgtgtgcaagtccagacgtcttgggattatctgcctggtggtgctttgagaaaaaaaatctaagcaccaccaggcagatatccccactttgaaatcttccccagggaaggtctccacatacccttctccctccacaagaagaaaagaggcagttctacacttagaattgaaggatagggggaacagaaccccacaaagtagttgtcatgattggtaacaacaaatggtttccccaaaatggtgattcctacacatagctctaataaagacgtcgagatacctgcacaaaccatcggcacgttgactcaagccacactgtgtttccactgtcacgctcatcagcacttaggagtgtgtgtgtgtgtgtgtgtgtctgcatgcacgcacactttaggaccacttcatttatctgagatgatggataccaagaatcagtgtataaaaatagtctaaatggctacaacagccgtcctgggaggtgcttaagcaatcccttttctttactgacccctcattcaagtggagactttgcgtaactctaacgcagctgtgaacacgcagacaaagctagaaagtgatgcaaatatagtaacctctggggccccgtgctgtgtccgtgtgcttcaagatgcgcatgtctttcatggagtatgaacagtaacatttcttggattatatatactaagcgaaaagcttaatacttggattttgttagtatctttaggcagagtctctttaatgtctagagtccactagtgttttagatggtagaagcctccttctggttcctgcttctgaagtaacttgctcatctgtgcaaatcttcttctttctcttggctctgctgcacactcaggcattagagaggcagaaagagttctttgattccgtaaggagtgaacgggatgatcttagagaagaagtagtcatgctgaaagaggaattaaaggtatgaagccaaactacagttttatttaaaaaaaaagaaaaaaaatccaggtgacaacagcaaattttgggatgctgtgaatatgtgtgtacataattcattttatgtcatttagttctgttaataattcatatattgggttaactgacagcgatgagatgtaaaataaatgtaggttcagtgggtggtgcccaaggccttttgatgttaataaacatagccaatcttgaatgcaagaattttttgatacattatctaaatttttctcatactcactagtaaattctccaggatattactcagacttagagaattaatttgcctctttatattaaaacccccaatttaaggacttctctagaggaacagtgacttgggtaagtggtttgggcaaggatcccgctaattagactttgagacctactagattacaggtggaagacggttccctgtccttggtgggccacgccaaggcgtcttcagccgctgcttgacacaggtgaagcgccagtggcagcactctgggtgggggggttcctgaaccgtcaccatctgctgcttggcctccagggtcaaagccagagcagtgagccagccagctacaggcttagagctaagattcgtaattctgctccttgaagaggcgatcagttcaggggagttcctcacacacaagggagagagagccacaggcggcaggagggcatgggtgagtgatgtctgcagttgggaagtgctgctgttttcagtgaattctgtttcttttgaatatactgaacattctagccacctctgaattccttctttaacataagtttcgtgtgtctctttcagaacatgtatatatttctttctttatctggtttctctttttaaagaatgcaatcagggttttgaaatgaaaggtcacttggcagtgacttgcttactgctccacttgggggcagcccacaggccactacctgtagttaaaaaggatgcctggtggaagtagcttgtcaccagcaaatgaaagcatggattggaacatctgagaaagaagtagcctttggaggacgatatcccagatttgtgtgtgttgaccgaatatttacgagtgctgcaccctagcatttctcttgtctctgtggagttaccctgtacttcaggaaaaaatggttttcttttttattattgtattaaaacagagtttaacctaatatcactgagtaaatattacgatgagcctatttttgttcccagaaacatggaataatcctaaattcagaaatagctaccaatggagagacttccgacaccctcaataatgttggataccaaggtcctaccaagatgacaaaagaagagttaaatgccctcaagtcgacaggggatgggaccctaggtaagtatttgctttccttcggctcctcacacctttccactcagcattggttcaccctccatgcactgctggggttggagccaccgtcgctgatgggttaacagtcaccagcatgccatttgtttcatcacttcatggtaatttccttgcccacccggtgtggtcacccacgtgttgtctggcatgcatctctgtgtagtgcaccatcaatggctcaagtgaaccttttcttttgctgctcaaagctaccaagcaagactgtgaaggcaaaaggaaaacagtctcaaaattaagtaacaatgtggagagtactatttggttttcctcagacacatatatatctgtacctataaagtgtggctttttaaaccgattctatgacagaattatcaaaagatcagaatggttgaggccgtcaagtcagttggccatatttgcaagccaacatcgacatcctgggcagcattcagcgctttgagggtacggggtgcctgtggacagcaggtccgtctgtgttgcctttttcaagccaccgctcgaggtgggcaggcggccgtggtagtgggtgtggcggtgctgagagtctgagtatgcccacctttgtcagaggggatcctcctttgtatgccacgtgtttgcttctgaaagaatataaaactggggaatccagtagatcagaggaatattttataccattttcaatgatctgatttgtcataatttgtcataagagttggctttgggagaaaccttcagattctggcgtgcagcctgaagttgcagcgtgcaagtgaggcctcatctgtcactggtcaccctctgcgttccagtgttttacaaagaggctggaataaggtcagggtccgtgacttttcattttaatgtagaagctttcatcttatttctttttatttatggaaatgtagacacctccaggccccatcttctcaggcctcgcattccagggaggtacctcattcattatctttatgactattaaagaaacacagctcttttcaattgtgtaaaaaaagttgtggcctagtgcagtggctcacacttctaatcccagcgctgcgggtggccaaggctggaggatcacttaagaccaggaattccaggccagcctggcaacctagcaagattccgtctctagataggtatgtagtatctatataccgttgttgagaaaagataaattaatcaatttccatcatacctttatatgagctacccgaacagctaggaatctgattacgctgctcttactcaaatacacattttataaatctttgataaccattgtgaaatgttgtaagaaccagaaatgtcagttttgaaagtggccttcaaatgacttttgatcacatattccttcagcaaagaattgtaggatccaatatgtatgtttattttaaatctacatatgtatactatttcattaatataaaatgtacgttataaaatatatgcaaagatatgcaaagaagttttagagtaaaactctaaatagaattcctaatatttcccccattttccctgggatatgggcaccccaccatggagatcactgggctataaaattatctagctttgactttcagtaacatagtaccatatctaatctgctggggttttgtttggagagtccaaaaattccaaaacagtttgatgttctttagacgatgaataatttatcatttaatttagtggtcatcttgatcttgaacatttgcctcctgctggtcctctctccctagtcccttagggaatggagcagaggtatcagggcatggacacagggtgttttctcaggaaaacaatagttgagtggcagaagatagatttcctttcatatgagctatttcaaaagcatcttccttgagactgaccttgaggctgcatttctaaaagtgcactgaatattctttttaaaaattacttgaaagctgcttttagggctgtgtgacatggagtgcagtttgacagctgcaaaagtacaagttgtcaagttgttcattgagaagtgagagtggggaattgaaccttcagtctgttcctaaacccatcattgtggattgtttggctgcctgatccagagttctttctatttgttgaaacttaacgtcacctttaaaaatctgtccacacaagatggcaccagcagccactctggcctttgatgtggtggcagtggccctcactgacccaaaatttactaatgcaactgctgctttgccgcacagaactggcaaaggcttgtttctcatgactctttgatgactctgtctttaggaataggggtgggtgggatttggaacgtgtgtttacattctaatgtagattatgtggccgccacatcatggggtcccttcaattttctcaatggtcttttaggaagagccagtgaagtggaggtgaaaaatgaaatcgtggcgaatgtggggaaaagagaaatcttgcacaatactgagaaagaacaacacacagaggacacagtgaaggactgtgtggacatagaggtattccctgctggtgagaataccgaggaccagaaatcctctgaagacactgccccattcctaggaaccttagcaggtgctacctatgaggaacaggttcaaagccaaattcttgagagcagttctctccctgaaaacacagtacaggttgagtcaaatgaggtcatgggtgcaccagatgacaggaccagaactccccttgagccatccaactgttggagtgacttagatggtgggaaccacacagagaatgtgggagaggcagcagtgactcaggttgaagagcaggcaggcacagtggcctcgtgtcctttagggcatagtgatgacacagtttatcatgatgacaaatgtatggtagaggtcccccaagagttagagacaagcacagggcatagtttagagaaagaattcaccaaccaggaagcagctgagcccaaggaggttccagcgcacagtacagaagtaggtagggatcacaacgaagaagagggtgaagaaacaggattaagggacgagaaaccaatcaagacagaagttcctggttctccagcaggaactgagggcaactgtcaggaagcgacaggtccaagtacagtagacactcaaaatgaacccttagatatgaaagagcccgatgaagaaaagagtgaccaacagggagaggcattggactcatcgcagaagaagacaaagaacaagaaaaagaaaaacaagaagaaaaaatccccagtacccgtagaaacccttaaagatgttaaaaaagagttaacgtatcagaacacagatttaagtgaaattaaggaagaagagcaggtaaagtctactgacagaaagtcagcagtggaagcccaaaacgaggtgactgaaaatccaaaacagaaaattgcagcagaaagcagtgaaaatgttgattgtccggagaatcctaaaattaagttggatggaaaacttgaccaagaaggtgatgatgtacaaacagcagctgaggaggtactagctgatggagacacattagattttgaggatgacaccgttcaatcatcaggcccgagggctggtggtgaagaattagatgaaggtgttgcaaaagataatgctaaaatagatggtgccactcaaagcagtcctgcagaaccaaagagcgaagacgcagatcgctgcaccctgcccgaacatgaaagtccctcacaggacattagtgatgcctgtgaagcagaaagtacagagaggtgtgagatgtcagaacatccaagtcagaccgtcaggaaagctttagacagcaatagcctagagaacgatgacttgtcggcaccaggaagagagccagggcacttcaatccagaaagcagagaagataccagaggagggaatgagaagggcaaaagcaaagaagactgtaccatgtcctaagctgaggcaggcggcaggcgcggtgcacaggaagtctcagtgtgaaggggtcttttctctccactgccaatgtaagtagaatgttctaaattcatagagaggcactgtatgacaattaccaggtgctctactgctttaagttatagactgttacttgtagatttccatgtaatcattgaggttatcacccagattagaaagacatatttgttatcagtgtacgttctaattgagagcattccagtagtatcaaacaataatgtctactgtttatagtccacttaataaaaatagaggcatttactatttgccttaggctgataggaatgtgggttttcttgaccaaatatatcagcatctaattgaaatgaccaaatagcattcttagacttctgtattatgaatataattgatatttaaattaatgtcttgttcacatatgtgtactttcatatttgattttaaaatgtacattataacctgtatggtattttatttaaaggagataaacagccaaatagcaaataggtcactgaatgataagatttgcaccttagaacaataatcattttaaggataacaagtaaatgtctgaaagcatgaggggctttatttgcctttacctcatatgagtctttgatcttgaaccgatacttttggatctcattgttgatatacctgaatttactttgtaagagattttaacttcacttcatgctgatgatgtatcaaattcattttatagaaagatttaaagtttttttctggaagtgatatatgtcaaattacatttcctactgcagtatttgagcagggacagtcattttttaaatgtttttggccgggcgtggtggctcatgcctgtaatctcagtacattgggaggccaaggcaggtggatcacctgaggtcaagagttcgaggccagcctggccaacatggtgaaaccctgtctctactaaaaatacaaaaaattggccgggcgtgatggtgggcgcctgtaatcccagccactccagaggctgaggcaggagaatcgcttgaacctgcgaggcagagattgcagtgagccaagatcaagccattgtactccagcctggacaacaagagcgaaactctgtctaaaaaaaaaaaaaaaaacacacacacacacaacacaatgttttcacgcctgtaaacctagcacattgggaagccaaggtgggaggattgcttgaggccaggagttcaaggctgcagtgagctatgattgcacactgtactctagcctgggagacagagtgagacactgtctctaaaaaaaaaaaaaaaaaaaaaaaaagtttttgaaccttaaaatactttgtttgaatttctaatcatcattcaaaagagcagtaaaaaatggttacttgttcttgtacaagctactaattagactatagtaggatattttaaagagctgaatcacttttggtattttggtataaatattttcatttgttatgtcccagtatattcttactggaaaattcttgttttgatctgcctgaagaaaatatctgttttctatataaaaaaattttttaaaataattgtaaagttagatttaaaattgtaaaatataaaatcacaaaggaatgtaccttatgaatgttgttgacattttatgaaattatgtggattcatattactgttacaagatagaattgaatgcaaaaagaccaaaacctcaataaaatttgaggaaaacgtgttattatgtaattgaaataaaaacattttataattgtgcaagcctgtggttccactctttgggctgcttgaagtctgagtctgactactgttgtatgtaataccacctttgagtaatatctgcttgggggttgctgattcctattggggttccgtggaagacccacgcctgatgccctccctcagtaaggaatgcacttccctcctggcatcgagcctggggctagcatgggcattactgggagaactgagacgattgtcacgcaccatcccctgtgatctgtggttctgatgtgcagcctcagctgaaaacggtcttcacctgtggctgtgcttacctgcgccactacttacagtgttttgaagagcaggatgaaaacggcaaaaaccttgactgtttctgctcaagtgtcctgaagtagaggatggtggggatgataaatgcttgctaggaaataagtccaagggctctataggacttcacagggttttagtttatgtctctaactttagcaaagctgcattcctattggaatgcatactggaaacagctctcattcctacctttaaagggctcttggaaagcagtgtgacaaccaaggtcactaaatggtgagatcatcaagccattttaagttctttctcatgttattcaccagcaccctgcaggacgttgggcacacatcacatccctcagctcagccatccagccgtctcagtgattcaccactcatttgcttaattaatagacaggtttgatcactttgtacatggaaggcactgtgccagtgaacaagcagttggacccagccctccagtagggaatggacagctgaaaatccatgagcaagaaagaaggaaaaagaaagagttctgagcagccaaaccatttctcgatgatttcagagccttcattctgagcatcagttatatgctctccagtgtaatgactttatagccaagcacagtaattgatattactgtgaaggcccttaacttatcaagaaatggttgaggccgggcacattggctcatgcctataatcccagcacgtgggaggccgaggcaggcagatcacttaagcccaggagttcaagcccagcctgggcaacatgatgaaagcccatctctacaaaaaaaatatacaaacaattagccaggcatggtggcatgtgcatgtagtcccatgtagtcccagctacttaggaggcagaaacacctgagcctgggaggtcgaggctgcagtgaattgtgctcacaccactgcattccagcctgggtgatggagtgaaaccctgtctcaaaaaaaaagaaagaaaagaaaaagaaagttgacttagctatactccatataagaaggtatagaaatatatagagcaatttagaaagattatagtgtcaaaagattcaaactcagaaaagaattgaaaggttgcctgccagccatatccccagacgaacctagaccactggggtttcactatcatacagaatagagaaaaacattggttactgacacctgaaatcaaaaagcttggatatttttcagtcccaaaccagaacatagctcccgtatataaatgtaaatcttccttcaaaagtataattaagtataattatgggtgtatgtcaaaaatatagaggaagatggatttttacttataggttgttatacaaagttgggacagcaatcaaatttttaaacagttttcaagaatgtatgaccttaaaagaaatgtgtgaccctgatcactttccatatttgtaattaaccggagacctaatggtctgaacacttaagtttccactatcactaggaccctgaatgctaattctggggagtttagatggtttggggctcctgttttctattcatagactccctttctgggagaccaccccccaaccctgtacagcgtaccacccgtggccaccagccaagggaacacaacagtaagatttgttctaaacgtctgggcccctaagggaaagggaggggtgtttgtgtgtgcatgtattatgttcagaatatgtacttgttcagtgtgatagttgtacgtggagaaaactttgtctttcaagaggaaaatccttttgttctttttgtccctatctactgcctctcttaaatatttttcaacatgtgaatggctggtggctgatacagggaaaaatttcccagctatacagacactataagtctaccggtgatgtgccactatttattcaacaatatagacttggtggtttttaacgctacgaaaactagtactctttattttcttcatgtcaaattattttgcttcatttctttttccattttcttcaaactctttcgttcttgttttcttgtccaagtctcctttagaatttctcttcctgaaaagtttcttctctatttataatgttctcactatacaactaaatgtcagattacctatatcaattttgcttgcactcttattacattttaacacttattttctagtgcttatgtagaatatttgaagttttctagaagaaaacaataacaattgtacaatagatacttgagcttcaagatcacattctggtgtattcagtgtttcttatgacgcctgtagtttttgtatgtaggagtattaaaacatgtaagaaaatgaaaagtgatattgggcaaaagaatcaggttcataactgcaaaaatgttttgtttcaatgttgggtgggttatgggggggagcgagtaaaacatctgtcagaagtaatttgactgtaaattaaaatagaactcaaaaggatgataaatttaatttatattgtgcttaacattatctggtgtttactgtgcctttcaaaacaacttaggatctttggaaaacataattagagaaaaatgtaacttggattagcatgtggctagatgattttttaaatgaaaatgaagatgcattttatatgaattattttcttttcacatggctaatcaaggttagtttttcattctatgaagaatctggaggtaggccgcatgacagcagtgtcctagtgagctaagagctttgagtcagggtctgactcgggcgtgtgagtttggatctggaaaaacagcgggtgcagtgtttaggggagtgttcccgtggctgggccgcaaggcctgaagaaacttgcttagtggttctgggcctctgagcctcatctatagaaggaggctatgatgaagcctacccatagggcttctggggctgaaacgagctaatgatgtcgaagctgctagaactgtacctgtgtcagagcgagtgtgcagcatacgttatcatcactgtcatcactccagcattctgactgtgcctttaaactagtgtgggattttgcccaaacctctaaaccctcccctagccgtggtttcccccgcagtctgaagactctaatacttgacactcgttcagagagatgtttggggaatttatagacacttaacatttatgcatccttatatatcgggtccaggaggaattacagacacttaaaccattactgccttcttcctcaaaagaataacagctttggtaactgggttagcagaggtgttagtggacttagggttgtaaacagatactcatggcactgacatcgatgagtctatgagggaaattagaaagataaatacatctgggatgtaaactcggaaaggcgaggctgttcaaaatgttggtgctattgaattgtgattctcggtgtttgtacattgctaataatgttaaaccatgaagcctgtgagatcttgtgttgcagcgtggtttggccctagcgttcttgcatgctaacctaaggtagaagattagcagcctgtttgcatgcagccggatgctgcccctgacgtgaagcatgttctgggaggttgacccaacctcctttggctgtggcctcattcaccccgtcctgtctgtggcctcattcaccgtggtacgtgtataactacttccatcattcatttcactaacctgaacgatcattcttcagtttagcaatgtgctgaaaggcgcggcacgcggattcacctaaacctgtgtctttgtgatttctttagatattaggttgaaaaagctggttgatgaacgggaatgcttattggaacaggtaacaatctttttattactttaccggttcatgaacagggcacctgaaaccacctgcccatccttccttcttgcttactcagaaaacccctaagttaatcatgtctgaaagtctttatcaagccaactggtgttcttaagattgctatccaaatagaacatcaaagttaatattttcatccaaagagaacatcctgagtcatatgaggtttaataaggatgtctcaaagacccaaagccatggaattgaatttggtacattttactgaattgctgcttaaaataaatataaatgttgattattaataatattaatgattaactgttgagagacaagagcattactgagtcattccaaatagcacttctcttgtccatatgggttgtttgtccataaaagtcagttttgtactcttggtgatcagcacccctctctcacaggtgtttctttgttacagctaaacaaagttgttttaaccatgtttatcttcattgctctctcctacctcaagaagtagcaggccaggtgcagtggctcacacctgtaatcgtagcactttgggaggccaaggcgggcggatcacttgaggtcaggagttcaagagcagtctgccaacatggtgaaaccccgtctctactaaaaatacaaaaattagccgggtgtgatggtgcgcgcccgtaatcccagctactggggaggctgaggcaggagaatcgcttgaacccgggaagcagaggttgcagtgagccgagatcgcaccactgcactccaacctgggtgacagagcaagactccatctcaaaaacaaagaaacactgaacagttatcctatctgatctttttatatgcaggatagtgattaaatcactctacaaccactttcctctaatttctcctcataagcctaatcaaatgtatttgccttacttcctaccattctgttgaagattctccgaaaattggagaaagcactaaatatggtaggaagattctcttgaagttcctgtgatcttttgaaactgcattcctgagttctatccttacttccttaaagcagcatgcacttttggtttgttgttaatcaggggtctcctgtgcttggtgtgtggggtaggaaggcaggtgatcacctgcaacaattcttcacagattggaagttaaacatgaaaagcccccggagaccccacgaactagatgccagaaagttctgcagtcattgactgttaactgcaattccaactatacggtcagccctccatatccatgggttccatatccgtggattcaaccaacatggattgaaatattccaaaaaaaaaaaaaaaaaacccataaattccgcaaagttccaaaaagcatagcttgaatttgccctgcacggagtcctgcactgaatccacacaaatgaagtgagttgtaggcgttgggtattaaaaggaatctagaggtgatttaaagtgtaccggagaatgcaggtaggtttctgcaaatactgcaccattttatatcagggacttgagcatccacagatttggtgtctgaggggtcctggaaccaatccccccccccccccgcccagataccaagggacaactggacatgtttctgtcttgcttagagaggggaaagctagctagagaccaactccctgaaagctggcaaaccgcctctgaacacacctgcagctggcctggacgctgagaaagcactcgacttttgggggacttaattacaatatattggagcccagaaggctccaagtggccctttctggtttcttagtaaataaagagaaagtgaatagcatggtgacttactgagtcttaaacattgcaggtatttcatgtacagtctcctcctgagtcctagaagaatttcactttagaaatgacttttctctcagagttacagtgtaattcatttttcattcattgtacattgaattgtgtttctgagaagagtactgatggacacaaagtgccttctgtcatttgacatgctgcttcctttctgatgggctctaacttcagcttttcggtctcattcagagtagagaaattaacagattttactggcgggtgttttcagattaagaaactcaaagggcagctggaggagagacagaagattggcaaactagacaatcttcgatctgaagatgatgtcttggaaaacgggacagacatgcatgtaatggacctacaaagtaaatgtcaattcttgtgtagaagtaaatgctttcacatgtgctgttttagtatacttgtgctggcagagaaaactgtcacggcaaagaatgccctcattccctcacatccccacaaaagcccttaaaaataaaagcacaaggaggggtaggtagacagaacaatggtgtttctctctgagcctatgaaatagaacaggtacccaaaaacgtgcaccaagataccaccacatgttgtgccgatggaaaccacatttactttgctggatacagcaatctttcgatctgttgattgtatgaaaaaaaaaaaatgaaaggcttttttcatgctaataaactagaaacagtcttaagggagataaaattatgcccagtctctctccgcccttttccctaccccctaccatctctttgtcttcttcactcataggcactctcttgcctgaggtttcctgccccaagcacaggggcggaaggcactttccctgggttcatggggagagagtgccttctcctactctcagctctgggaggttgtggaggcagggccagaactaacagatttgtgagatgattacaaagtaagggcttggttcccagtaactattgttttaatatttgaaaagcccaagagcttaacagattttccttctctttcaacctttaggggatgccaacagacagatcagcgacctcaaatttaaacttgcaaaatctgagcaagagataactgcattagaacaaaatgtacgtgtaagcaacaacgggcagaactgatgattgactggagttttacttgctagaaatagccctgaaaggctgaggaccagaaaaagccgagatttttagaaccaagaaatgtcctaagagggataagttaagacagcaagtctttccatccgtttcttacagagcaagcaggaaggaaagaattcttagaatttaagttgttacagtagatactaatcctttatcaacaacagttagttgtagaaaatagctaatgtggcttgggagtgttttaaaattttgttctttaaaattaatttagttaattggccgagcgcagtggctcacacctgtaatcccagcactttgggaggctgagatgggtggatcactgaaggtcgagagttcgagaccagcctggccaacatagtgaaaccccgtctctactaaaaatacaaaaattagccgggcatggtggcaggcgcctgtaatctcagctactcaggaggctgaagcaggagaatcgcttgaaccagggtggcagaggttgcagtgagccgagatcacgccactgcactccagcctgggcaacagcgagactctgtctcaaaaataaaataaaataaataaataaataatgtagctaattaaaaaaacacatcatactgggacgtccctcttgcctgggcttttagcctttctcttgcagcgaggcccgccctccctggtgtctagacatggggcactcctgcctctagcaccctgggccctagggcaatttgtgttctagccagaaagagagaaaaaaaacaggactgtttccccctccattgtgggtgtacttggctggaactttttagaatgtttatagaaacaaaaatgagaacagcacaggtagagacgatgtgtgcttttgattgcggcagagtgaaggtgtccagcaggccttcgctgctgccgtctttcatctcagaaccttggctggggaatgccatgccgaagccgcctcctttcactcctcgccctgtcctttcctcctcccacccccgccaccccaggagagattagactggagctgaggtcgtggcggaacacgtcccttaccagcaccattctgcctgttccaacagaacagccccacgcagcgggagaagaagcaggcagcaaggtgccagcactgcagaaaccaccctggtggacggggtcagaggaaatgggtccccatcatgtcagcacagggtcgcccagaaatagtaaccaagaatagcttgcttggctcaaacccacaccatagtccaaaatgttataagtatttacatggtgtattctcccattttattaaatcacactctttgatctcaaagtaaagaaactgaagaaagaaaacaggcttatcaatttatacatatggttttttttctaccttttaggtaataaggttagagagtcaagtatcacgttacaaatcagcggctgaaaatgcagaaaaaatagaagatgaacttaaggcagaaaaacggaaactccaaagagaggtaaatttcctaggcaatttctaggaagagaatggctgccagtatttctctagtggggacggtacagagaggatttactactgtgacatctgcccctgggctggtcattgtcagatcatcccacaccactctgcagtgccggtgtcttaataaaggaaggcatggcgcagccagttagggcttagggctagacccttgctggcatcaactagttcatctgtcagttttgagcatctcctataggtcttgtccgtaaacgtcaagagaatgagataaaggagtagccaggcctcttatgctccgaatattttttgtgtcatgcagaatgagcccaggtggaggaccaggagcccatgggcctgctgtggccaagagctgggtgtggcaccagggccaggccacagctgtctcaggtcaccctatggagagtgcccttgagaagccgagctgctgttactccacctgctggtcacactcccaaattaccatgcttgccaattaaaacacatactttaccttactgaagacacttggcaaagttgtttgttcaacaaatatttacagcacccgttgcatgccgggcacgggttcaggtgctggagatgcagctgtgaccttacagacaggagtctccgcctccatagagcctgtgctctggaagagggaggtccataaaagtgaccacaggcaggagaggggctggggtgcggaatggcccaggccagggcagttctaggtaggtggccaaggaagactttccttcttgtggcatataaggacaggcctgaacagcccagggagtgagccaggcagaactgggagaaagccttccgcgcaaaggatcagcacgtgcaggggagctcggggcaaggcactgcctttgtcaaggaacagtcagagcggtggaggccaagtgagcagggggtgagggggtggagggagcagtgagagcacctcagcccgtgaggcagggccctggaggccatggacaggacttgggatcctcctgtgcataaagtgggagctactgcagggttttgagcaaaggagtggcttatgttgatttatgtttcaataggatcactcgggccgggcgcggtggctcacgcctataatcccagcactttgggaggccaaggtgagcaaatcgcttgagctcaggagttcaagaccagtgtgggcaacatagtgaaaacctgtctttacataaagtgcaaaaaaactaattagccgggtgcggtggcccgtgcctgtagtctcagctacttgggaggctgaggcaggaggattgcttgagcctgggaggtgaaagctgctttgacacatgagcgtgccactgcactccagcatggggcgacagagtgagaccgtttttcattaaaaaaaaggaaagaatcactcattttatatttaaactgtaggaaagggactgtggaggagaaaccaaagatgccatttctctcctctttattttatttatttatttattttatttgattttattttatttatttatttttttgagacggagtctgactcttgcccaggctggagtgcaatggcgccatctcggctcactgcaacctccacctcccaggttcaagcctcccacctcagcctctcgagtagccggaaatacaggcacccaccatcatgcctggctaatttttgtgtttttgtagagacggggtttctccatgttggccaggctggtcttgaactcctgacctcaggtgatcctcctgccttggcctcccaaagtgctgggattacaggcatgagccaccatgcctggcccatttaaccttctagcctacttttgctatggtcagagaacatggtccctgttatacctggtctttgaaatttgtcaatacttgcttaatggcctgatacatgattcacttttgtaaatgtctccaatgtggttaagaagaatgtgtagtctctgatttatggatgcaaaattctgtatacttccactgatcaaacttgtgaagtgtgcattcagatctgatttcttttgtctgcttaaattctcagtagctgatagagatttgtcaagctcttccaaaagatgatggtggatttatctcattctccctatttctcctatatatgttgaggctattgatactagatgtttaaaattctgatatcttcttgatgagttaaaccttttatcactttgtagtgacccttttggtccctgctgctgttgaccttgtcgggtattcacgtggccgcatcagctttcttttggttagtgtttgtccacttctgatttttgcatcccttggcttccagtcttccgtgtgttgttatgcgttagatgatctccttcagatgcacatagctaggtggcggtggctcttagttgaatctggaatctgtggatcttaatagagcccttagtccattgttattggtatatttggactcgttttcaccatctgactgtggataaccatttgttctgtcttttgtgtgtcatttttctcttgccaaatttaaattttatattcaatttctattcttttcagtgatcacacatggggtatttttatttaacttaaaaaaaaattaaagttgaacactatctttactcccctcctataaaatagaaggacttttgagcactttagcttcaccctcctgcctggcatgcacaccctcacacatatgtgtatatgtgtatatgtatatgtacacatgtacatccacacataaatacttttgagcttcataaatcccacttatcagataatactattgttgtgttgttgttgctgttgttttatattgcccatgtttgtttgacataactacatattggccattttatatgtctgtcctgctagtgtctcagactgtactagaatcattttcctcctcactgaagtacatactgtagaaattcttttagagcagacttcttggtggtgaattccctgtttttgtttgtacatgttttcgtttcatccttgttcttggacagtagtattcagggacatgcaattctgtgtggtggtcattttcctcaatgattatagcgattatgccaccatctgctggcttccattgagctgttgagaaagttgttgttttaacggtcggtcctttgtagggacctttttttttcttctctagtttctttcaggttctgtttgtctttgattttctacagttttactgttagatgtagtttattggaatctttctgcttgagatatatagtgtttcttggatctgtgaagtctttttaaaaattgattttggaaaatattcaaccattaactccttaaataattcctcttttttagtctctccactttcccctctggaactctaatcagaggatgttagagattctcattgtctccacattttttaaccatctctctttcatgttttctatctccttacctctctctattggataatgcctaaagtttttgcaaagattttccagttcaccattttttttaaaaagtgtcttcattgttgatagtttcttgctgcatgttcatgtatgtcctctttttaaattgtattcttattctttaaatatttcatacacagctgtttggttttctgtatctgacaactgaaacatgctcagtctttgggggtctaattctgtcatttattgcttctgttgactctcactcaaatggtttgtcaccttagtgttttgtgagcttatgcttgattttaatttgtaggaataactccaggcttaacttgtggaaacttcctgcaaaaagggcttgcttctgcctctgctagtgaggtggggtcgggacttctgtcccaggacccaaacaagcttccttgagtgttttgggtcgaaagcagagccatagaccctgttcttgtcacccctccaaaaccacgttctcccagcttagggcaccccactctgccctgctgcctgtgggtccagatgatgccctgctaatgtggcttctgcagctcgtcttctgcctgactctcaggctccatggccctggctcccaggtgtggccgtcttggcctcaggcattcctgccttggactctggctgccagggctgtggggaccaccttcgccatgcagtccaggctcagctcttgttgtttgtgtttgtttacctcatgcctcacttaccttttgtgaaaccatcaggatccccactgggcgtgtggctcacgcctgtaatcccagcactttgggaggccgaggtgggtagatcacctgaggtcaggagttcaagaccagcctgaccaacatggtgaaaccccatctctaataaaatacaaaaaattagccaggtgtggtggtgtgcacctgtagtctcagctactcaggaggctgagacaagagaattgtttgaacccagaaggcggaggttgcagtgagccaagatcacaccgttatactctggcctgggtgacagagcgagactttgtctcaaaaaaaaaaaacaaacaaaaaaagaggccgagcgtggtggctcatgcctgtaatcccagcactttgggaggccaaggcggacagatcacgaggtcaggagatcgagaccatcctggccaacatggcaaaaccccgtctctactaaaatacaaaaaattaactgagggtggtggcgcacacctgtagtcccgggaggctgaggcaggggaatcgcttgaacccgtgaggcggagcttgcagtgagccgagatcacgccactgcactccagcctgggcgactgagcgagattccatctcaagaaaaaaaaaagaaaaccatcaggatccccaagggtgttccctctctggagtccagttgtttcagaggaggaagggcatcatgagggaccaggggccaagttatcattttatttttcagtaggattggaatttcggtaacacagaaccctgttatgtttggaggaaacaagttccttaaagctcactgcctttcctccgttcccagctccgctctgcattggataaaacagaagagctcgaggtgagcaacggccacttagtgaagcgtctggaaaaaatgaaagcaaatcggagtgcactcttgtcccagcagtaaattccagctctgatcaggcaactggttggtgactggagagcattgtttcataggcttttctctgtcctgtctgggagcgctgcttcttcccctgccttccgagagacgaagaccgtggcgagcttggcgcttaggggctcccgtgccatggctcaccccagggagccccagcagccaccaggtgcctctgtctgcagacccctggcccgggctggcgccgacgctcagaacctgcaggtacttcataagcacacaggggcctcgagggagctctgtgtctgaccgcacagcagcctctgaatgccgctggaagtgatgatcaaagtaaagattcagttgggacttgagttttttttttttttcatgtgtcttgctgaagattaaggggaaatgttacagtgttgggacttcctttcatggcagaatctacaatttgagcgacttcagtagtatctcttagtctacgcttttcatacacaaaacactgtggaaccacaagccattaccaagcaaaactctttcactggaaacaagggggcagtctagaagtaaaagtgaccttaagaagactctttacaggcaacaaatgaagcttttctaagggatttttgcatcagttcagtcataagaatacttttttccagggtaattaggcaatagcttcactgaaaatgacagcttttcattgcattatttaatccttatatttggaattgaagtcgttaacttcttttaaagaatgtactattagaaaaattaaaaatgaaatgttgagagacttcagcaatgtggttctaatttttttccactgagaaagaagatctttaatttcatattaatggttctgtatattttgggtcatctttttattttttaagaatatcaagtcaattcatttttctttccctatttaaaaaaaaaggtgttttcacagaatgagtgcacttaaaaagtgaagtgaaggaggaggtaacagtagagacgatggcaatatcatcaaggacaaaagtaaaaacgtttagctacctgctgatttttagtgactgttcatatatgttgtatttcaagtatggctggtgaagccagtcagcttttcgggacgttagcaagtggaaactgagtcagtatcatccaaaaccatatctagtcttaacacatggagaatgctggagtgagggttgtgagttcagggtatataatcaagaaaacactcccagcataatgctaggggtcaccagtgtccatcccccagaactgtatggatctaggatatacacagctgcgttgcattaagaaagagatgaaatctctattaaaatacacaagatttttgtatctccttgtgcagaggatatttgccactgcccattgggaagcagacaagttatagggggctgggggccaacactggcaagtaggaaaccacgggtcggacaggtgagcaaaatgtgctggcaggtgggcaccactgggagacccacactgcacacccgggcaccgtatgaacaggaaagaggaaggaagctggacgaagcccctcagggaccctgtgctgaccatgctgggcccaccggcaaaagggagatattcagttccttgtctcatccttaaggtttcttccacaacatctgaatacaagcatgtttaactgggaaaatgtctatgtcatgcgtgaataacaccagcagcaaacactcacacatcacgcagacacggccggcagcatgctgacgcttttaggtatttttcactcatgcaattttcacatattttcactcatttcatttgcacggaaattctatgaggtagatgctgttatcaaatccacattacagatgagggacccagggtccaggaaggtgaactggcagaagtctcccagctggtagaacagggctgcaaggcatcgattcccaggtgtctcacagccctgagaagatggcgttttccctatcagtggctctgaggaagtcaagccttcagtctctacctctcccaccaattcttttggaaacagcaaaccaatgttacacacacttcctaatccagaggaagctagaacacgatttttaaatttatttagtaaaataaaactttttttgcagatgtaacgaatggaaattggttgctggcttctttcatccctgcaacctagcgtttctcagcctcagcacgacggtcgtctggagctgggtcgttcttggtggctggggtggctgtcccctgcaccgtgggatgttgagcagcaacactgaactctaccaactcattgccagtagaccccactcccggtcatgacacacaaaaacatcaccagacattgccaaatgtccactgcgggggtgaggggcgtgtaaaagcgcctcccattgagaaccactgctgtaacctgaattagaagatttggaaaagaaatggttgaaaacccagaccaggatccctgttgtatgtttcctatgaatgattttcatttttagaaatgaaataacatctaggacatagagcaaaacactcaaaacacatcataaatggataacataaatagataaaaatccaatgcagttcagaattacaatcaaatgttattttctcttgtgttttagaattcctcattttcatagtcaaaatatcaactaaagcatcaaaagttcctgttgatatttttgaaaatgtgttactacttagcaaatttggatttctggtttgtacagtgctgagcccttgaggaataccagaagaatgcacaccttaaggaggctgtggttttcagggagagaacagccatgcatgaggatggccatagcagaaggcggaggggtggggaagtgccagctgttagctatgtggagccagccagttgcaaattttcaaaccggcagaagcatctgttgtgtttcactaaatgacccgagccagatgtggcccacgtgttcccgagcctgcctgagtatctgaaggggatagagctgatgtccactgacctgcctggctccctgcaccttcagccacatttcggaagcacttgctacccagtgttaaggatgtgcggaggcttagaggattccagctctgtggtcagggccttttgcccttgtgtccaggagcctccagggctagctcccatcactcaaggactggacagttgtccctgaaccccagccctgtacttgctgccatgcccctcgatgctgctgcctaaccacttgctagtgtgtatctccatgtatggccagccccccacccctgccagttcccccttgcttgcttctttcccctctctgccagaatagctctgatcaccacttgtggatggctcctacctggtccccaggtgcactaaatgctaagcaggtcctgagctccactggccctgagtgaagttgcactgtctgtggctggatttgtctcttccaattgtccatcctcttgggtggcatagaaacaagaacatcagagacttgggaagagaactctgagctagaaatatctgttggctgggtgcagtggctcatccctgtaatcccagcacttcgggaggccaaggcggctggatcacgaggtcaggagattgagaccatcctggctaacacggtgaaaccccgtctctactaaaaatagaaaaacaaacttagccgggagtggtggcaggcgcctgtagtcccagctactcgggaggctgaggcagagaatggcatgaacctgggaggcagagcttgcagtgaaccgagatcacaccactgcactccagcctgggcaacagagcgatactccatctcaaaaaaaagaaagaaaatatttgaagtttatgttaatacttcctaaatcccagggggctgctgtattagtctgttttcacactgctgataaagacatacctgagactgggcaatttacaaaagaaagaggtttattggaaggtgaaaggcatgtttcacatggtggcagacaagagagcttgtgcagggaaactcccttttttttcttttatactttaagttttagggtacatgtgcacaatgtgctggttagttacatatgtatacatgtgccatgttggtgtgctgcacccattaactcatcatttaacattaggtatatctcctaatgctatccctcccccctcccccgaccccacaacaggccccagtgtgtgatgttccccttcctgtgtccatgtgttctcattgctcaattcccacttatcagtgagaacatgcggtgtttggttttttgtccttatgatagtttgctgagaatcatggtttccagcttcatccatgtccctacaaagggcatgaactctcattttttatggttgcatagtattccatggtgtatacgtgccacattttcttaatccagtctatcattgttggacatttggcttggttccaagtctttgctattgtgaatagtgccgcaataaatatacgtgtgcatgtgtctttatagcagcatgatttataatcctttgggtatatacccagtaatgggatggctgggtcaaatggtatttctagttctagatccctgaggaatcgccacactgacttccacaatggttgaactagtttacagtcccaccaacagtgtaaaagtgttcctatttctccacatcctctccagcacctgttgtttcctgactttttaatgatcgccattctaactggtgtgagatggtacctcattgtggttttgatttgcatttctctgatggccagtgatgatgagcattttttcatgtgccttttggctgcataaatgtcttcttttgagaagtgtctgttcatatcctttgcccactttttgatggggttgtttgatttttttcctgtaaatttgtttgagttcattgtagattctggatattagccctttgtcagatgagtagattgcaaaaattttctcccattctgtaggttgcctgttcactctgatggtagtttcttttgctgtgcagaagctctttagtttaattagatcccatttgtcaatttttgcttttgttgccattgcttttggtgttttagacatgaagtccttgcccatgcctatgtcctgaatggtattgcctaggttttcttctagggtttttatggttttaggtctaacatttaagtctttaatccatcttgaattaatttttgtataagaaactcccgtttttaaaaccatcagatctcgtgagactcattcactatcatgagaacagcgcaggaaagaccagcccctataattcaatcacctcccactgggttcctctcacaacatgtgggaactgtgggagttacagttcaagatgagattttggtggggacatagccaaaccatatcagctgctatactggatttagttgtaggaggcaagaataatggtggaggaggcttctttctgtttgtgtttagccttctggacccaccaccaccaccaccaccaccaccacaggcactcaggggtcccaccgagtctgccttctgaagacagctgatactgtgatcttgaacaagttgtaccccacagctaattgagatgtgctgagtttttcccctgcttgagttgctttcatttaaatttccccaaccaccagcctgctgccccagggaaaagccactcagcttcaccactctggcctgcttggactttcttccttggattttcctaggctgccttagccacactggaattttgtagcaactaagagctgtagtttttcacccaccatggttttgttaaatgtggttttaaggtaatgtggcttaatatttccatatcaaaaaatttaaatccactctcttttaaaaatctaggtctaactcctaaatctgggtctagatgccataaaagaacaaaacaatgatggtttcctctctcgtggactatatgggcagcctgtggggtaaagagagaagctgtctgttgccctaagtaccacaatttagcacaggcaagatttcacatgggagaatgcaaaggtaaatacattcatattacagcaggaagggcaagtttgaaaacaaaatttgtgagaaaccctgacttaaatctgctaaatcttatctcagaaaaggcagttgcctcactcaacatgaacacctgaagcagctgagtcaggggaagatacaacttcagaacaggttcctaatacccaggaatctcgttgtgttagaagcagatgtcttgtctttactgtgatttttaaaatatattatttttgttcttatcctaaatacctctgcgtgtgtctgtttccatgattttatcaagagtgacttttcagatttcctgcaagttggcctctctagagtttattagaataactctctaaatattgatcaagtacttactcaagcactaggggttcaacagttctattccagtggggaatgcagacaataaacctgaacgtgagtgagtaagattttggataatgaaaggtactatgaaaaaagttgaaagcaggtagtgggatagagagcgagctaaggcacatgtggtcaggagtgtgtacgtttggggaagttgctgctttagctgtctggttaggaaaggcttcacagagtaacatttaagctaaaacctgaggatgaaaaagtcctggctatttgaatgtctagagcagcactgtccaatagaaacataatatgagccatatatgtaattttaaattttctaatacttatatttaaaaaaaataaacagatgaaattcattttaacaatacactgtatttaacccaatatatctaaattatcattttgccatgtaatacacattttaaaattgttaatattttatgttttttaatagcaaattttcaaatcagtatatattttgtatttacagcatatttcaattcaggcaaagttttcatgataaatacttgatctgtgttactatttcataaaattaaatagaacaccaaaaaaatcatttttcttttttttcttttctttcttttttttttttttttttttttttgagacagagtcttgctctgttgccaggctggagtgcaatggcatgatcttggctcactgcaacctctgcctcctgggtggtgggaaaagttgaggcagggcttgcatgtctgacataatgtaaaagagtcttggaacacgtcctgggtccaaggtctaaaacccctcatggcctttggaacaccaagctctgtgctaaagagtggaaggctgccctgccgtaccataatctaagcccagggcataaaacccctcgtggcttggatggaatccaggactcagggcagaaaacccctcgtggcttggatggaatccagggctcagggcataaaacccctcgtggcctctggaatgtgtctagacttgctggcttcttgcttctagcactcccaggctcatggattgattgtatcttagactagaagaacatgttccccatgatctcaagtagcagaacatgttctatatgcttcaaagggaatgctaaactgtcacagctatagatcatatgcttgatgcaccgctacctttcaacccccacatcctcaccacctgtttctttgtttgatcaccaataagtagtgtgggcttccagagctcggggtcttcacagcctccatactagcgttggccccctggacccactttatgcactcctaacttgtctcattcctttgacactgccagactttgtagcccccacagcctggtgttgggtctggccaccccaacacctgggttcaagcaattctcctgccacagctttccaagtagctgggactacaggcatgtgccaccacgcccagctaatttttgtatgtttagtagagacagggtttccccatgttggccagatggtctcgatctcttgacctcatgatccgcctgccttggtctcccaaagtgctgggattacaggcatgagccaacgtgcccagcccatttttctttgataattacacccatgttgataaaactggtttatgtttttcagaagaattgtttgactttaaagcaaaagcaaatgtttcaaaactacatccaaattaagtaaatccatcgactcttgtgttgattcaggattattaacatcaagttcaaagagatatcgcataaattgaaaagcaactctaaatttatcaatgtcaacaaagtattcttcaaatttttctcgtagtttttggaactaattatatacctctgttgattatacttaaaatgatacacatattgatgcatgtgttaaaatcattattattgatgtgtaatttgaaaatttccatttcaacataaatccttatacctgcttagatcgattacatataagtgtcttcttggcgcttcatatttagctcatttatacgtaatataatattagtgaaaaaacactaatcacattgccaatttctttaattgttgaatatttcacaagtttcttttcatttcaagaaaattttgaattgaagttaacagaaagcaaatctttgtaaaactcatgacttaaccaatgagcactggcaaagagtgcaagttcattaaattcattgtcttctatttccacaatatattttttttaagagacagatcctctctctattgcccaggatgaagcgcagtggcaaaatcacggctcactgcagcctcgacctctggggctcaggtgatcctcccccctcagcctccagagtagctgggactacaggcatgtgccaccatacctggctaatttttttgttttactttttgtagagatggggtctcgctatgttgcctaggctggtcttgaactcctggactcaagcaatcctcccacctcagcctcccaaagtgctgggattacagatgtgagccaccacacccaactatttgaacaatttcataaactggtgattcatagcatttgtctgtgtatagtgaatgattttaacaaccatctccatgactctttatagagactgctttagaaaactaagcacaaatattttcaataggtaccatacagtgaaatggagcaataaaggaaacatcagtctctcgttttaaaatgccagaaaatttgtatttttgacctaacatatctggagcatcatgatagaaactaatgttttcatatctcatttcatatctagctgaagttcttctctgacagatgtaaagatttttaaatatgcatatcacaagttcaattttttaggttgaaaaatttacatttctttgtaagtttggaaatccctttaaacagaatgtacccaaagtattaattggattatctttcttacattaaatgactcatctgaaactaaagaaataattttgagtcaattgatctttggtatcgttaaaaagttcttgtattatacaggcaattgtatggtggcttaactagagattctttacatgaaatgtcttttagttttcccctcataactttctaacaaaatgtccctaactgaaataatttttattatatctctatctaaaacgattttgtcttttgtgcaaggatccaagccatttcattgttggccaaaattacagactccgatcctataaaacatcacttaaaaatttgtggggagggggtgccaggtgcagtggctcatgcctgtaatcccagcagttaggaaggctgaggtgggaagatgacttgagcccaggatttgagaccagcctgagcagcataatgatacctcatctctacaaaaaataaacaaaaagtagccacgtgtggtggcacatgcgtgtagttccagtaccagggaggctgaggtgagaggttcacctgagtccagaggtcgagggtgcagtgagccaaaatgatgccactacactccagtctgggcaacagagtgagtccctgtctcaaaaaaaaaaattgttttaagtttttggacatttaattataaattcaggttactaattgtgtcaattcgatttgaactattgagaagaaactttttaccaaattcattgtgtaacatgtattgttgtgtgacaaattaacccaaaacttagcctcttaaacaacaaatatttattatctcacacagattctgtggatcaggagtctggaagtggtttagctgggtatttctggctcagggtctctaatcaataaagctgtcagccagggaaatagtcatgggacggttcactgggagtggagaatctggtccaggctcttttgtatcgttattgccaagcctcctcattggctggagatctgagttccacaccacagggaccatggacctctccataggctgctcatgacctggcagcagagagagagagagagagagagaggagagaggagagagaaagagagagaaagaataggaaaaagagagacagcatgcgtgagagagggagaacccaaggtggaaaccagtctttttaaacttaaccttggaagtaacagctcattacttcggatattcaaggggagagaaattagctccatttcttaaggagaagagtatgaaacaaatttcggacatgctttttaagccaccacactatttgctgaaaatgtctcgtctcttaatattgtatcttaatattatccttgaacattttttatatcacaaaccaactacgttttcattttgttcttcccagaaaactacaattgctattcattgtggaatttgtaacgtaccttctcccaggctcttttttctttattgttccagtcagtgtttgcttctatatctctacttgattctacatcagtagcatgtctttgttttaaagctataagattatccagagttatttttgaactagt

SEQ ID NO: 1013 - DNA, 2786 bp, Homo sapiens
cggagggaggggccggggccggggccgggccggggcggcgcgagcggctggagcaacgggccccgcggcagctgcgggcgacgcggtcgatggacatgggcacccagggatcggggcgcaagcggctccccaaccgggagcggctcacggcggaggacgacgcgctcaaccagatcgcgcgggaggcggaagcccggctcgctgcaaaacgggcggcccgcgcggaggctcgcgagatccgcatgaaggagctggagcggcagcagaaggagatctatcaggtccaaaagaaatattatgggctggatacaaaatggggtgacatcgagcagtggatggaagacagtgagcgctactctcgtagatccagaagaaacacatcggcttctgatgaagacgagcgcatgtcagtgggtagtcgtggaagcctgaggtcgcagcctgacttggagtatgggggtccttacgcctggacaaatggttatgatggagaattgtatggatcacagtccctgaatagaagatctggcaggccctcctgtctgtacagcgctgcccggccttcggggagttaccgggcgtctgtgttggatgaaggcagcttcggtgggacccgacggggcagcacctccggctcccgtgctccctcggagtacagcggccacctcaactccagctcccgcgcctcctccagggccagctcggcccgggccagccctgtggtagaagagagaccagaaaaagattttactgagaaggggtctcgtaacatgccgggcctgtctgcagccacgctggcctctctgggtgggacttcctctcggagaggcagcggagacacctccatctccatcgacaccgaggcatccatcagggaaatcaaggaactcaatgagttaaaggaccagattcaggatgtagaaggcaaatacatgcagggattgaaagagatgaaggactctctagcagaagttgaagagaaatataagaaggctatggtttccaatgctcagctagacaatgaaaagacaaacttcatgtaccaggttgataccctaaaagatatgttgctggagcttgaagaacagctggctgaatctaggcggcagtacgaagagaaaaacaaagaatttgaaagggaaaaacacgcccacagtatactgcaatttcagtttgctgaagtcaaggaggccctgaagcaaagagaggaaatgctcgaggaaatccgacagctacagcagaaacaggcgagttctatcagggagatttctgatcttcaggaaacaatagagtggaaagacaaaaagataggggcattagagaggcagaaagagttctttgattccgtaaggagtgaacgggatgatcttagagaagaagtagtcatgctgaaagaggaattaaagaaacatggaataatcctaaattcagaaatagctaccaatggagagacttccgacaccctcaataatgttggataccaaggtcctaccaagatgacaaaagaagagttaaatgccctcaagtcgacaggggatgggaccctagatattaggttgaaaaagctggttgatgaacgggaatgcttattggaacagattaagaaactcaaagggcagctggaggagagacagaagattggcaaactagacaatcttcgatctgaagatgatgtcttggaaaacgggacagacatgcatgtaatggacctacaaagggatgccaacagacagatcagcgacctcaaatttaaacttgcaaaatctgagcaagagataactgcattagaacaaaatgtacgtgtaataaggttagagagtcaagtatcacgttacaaatcagcggctgaaaatgcagaaaaaatagaagatgaacttaaggcagaaaaacggaaactccaaagagagctccgctctgcattggataaaacagaagagctcgaggtgagcaacggccacttagtgaagcgtctggaaaaaatgaaagcaaatcggagtgcactcttgtcccagcagtaaattccagctctgatcaggcaactggttggtgactggagagcattgtttcataggcttttctctgtcctgtctgggagcgctgcttcttcccctgccttccgagagacgaagaccgtggcgagcttggcgcttaggggctcccgtgccatggctcaccccagggagccccagcagccaccaggtgcctctgtctgcagacccctggcccgggctggcgccgacgctcagaacctgcaggtacttcataagcacacaggggcctcgagggagctctgtgtctgaccgcacagcagcctctgaatgccgctggaagtgatgatcaaagtaaagattcagttgggacttgagttttttttttttttcatgtgtcttgctgaagattaaggggaaatgttacagtgttgggacttcctttcatggcagaatctacaatttgagcgacttcagtagtatctcttagtctacgcttttcatacacaaaacactgtggaaccacaagccattaccaagcaaaactctttcactggaaacaagggggcagtctagaagtaaaagtgaccttaagaagactctttacaggcaacaaatgaagcttttctaagggatttttgcatcagttcagtcataagaatacttttttccagggtaattaggcaatagcttcactgaaaatgacagcttttcattgcattatttaatccttatatttggaattgaagtcgttaacttcttttaaagaatgtactattagaaaaattaaaaatgaaa

SEQ ID NO: 1014 - protein, 634 aa, Homo sapiens
MDMGTQGSGRKRLPNRERLTAEDDALNQIAREAEARLAAKRAARAEAREIRMKELERQQKEIYQVQKKYYGLDTKWGDIEQWMEDSYSRRSRRNTSASDEDERMSVGSRGSLRSQPDLEYGGPYAWTNGYDGELYGSQSLNRRSGRPSCKAARPSGSYRASVLDEGSFGGTRRGSTSGSRAPSEYSGHLNSSSRASSRASSARDVVEERPEKDFTEKGSRNMPGLSAATLASLGGTSSRRGSGDTSISIDTEASIREIKELNELKDQIQDVEGKYMQGLKEMKDSLAEVEEKYKKAMVSNAQLDNEKTNFMYQVDTLKDMLLELEEQLAESRRQYEEKNKEFEREKHAHSILQFQFAEVKEALKQREEMLEEIRQLQQKQASSIREISDLQETIEWKDKKIGALERQKEFFDSVRSDDLREEVVMLKEELKKHGIILNSEIATNGETSDTLNNVGYQGPTKMTKEELNALKSTGDGTLDIRLKKLVDERECLLEQIKKLKGQLEERQKIGKLDNLRSEDDVLENGTDMHVMDLQRDANRQISDLKFKLAKSEQEITALEQNVRVIRLESQVSRYKSAAENAEKIEDELKAEKRKLQRELRSALDKTEELEVSNGHLVKRLEKMKANRSALLSQQ

SEQ ID NO: 1015 - DNA, 3890 bp, Homo sapiens
cggagggaggggccggggccggggccgggccggggcggcgcgagcggctggagcaacgggccccgcggcagctgcgggcgacgcggtcgatggacatgggcacccagggatcggggcgcaagcggctccccaaccgggagcggctcacggcggaggacgacgcgctcaaccagatcgcgcgggaggcggaagcccggctcgctgcaaaacgggcggcccgcgcggaggctcgcgagatccgcatgaaggagctggagcggcagcagaaggagccctcggagtacagcggccacctcaactccagctcccgcgcctcctccagggccagctcggcccgggccagccctgtggtagaagagagaccagaaaaagattttactgagaaggggtctcgtaacatgccgggcctgtctgcagccacgctggcctctctgggtgggacttcctctcggagaggcagcggagacacctccatctccatcgacaccgaggcatccatcagggaaatcaaggactctctagcagaagttgaagagaaatataagaaggctatggtttccaatgctcagctagacaatgaaaagacaaacttcatgtaccaggttgataccctaaaagatatgttgctggagcttgaagaacagctggctgaatctaggcggcagtacgaagagaaaaacaaagaatttgaaagggaaaaacacgcccacagtatactgcaatttcagtttgctgaagtcaaggaggccctgaagcaaagagaggaaatgctcgagaaacatggaataatcctaaattcagaaatagctaccaatggagagacttccgacaccctcaataatgttggataccaaggtcctaccaagatgacaaaagaagagttaaatgccctcaagtcgacaggggatgggaccctaggtaaagccagtgaagtggaggtgaaaaatgaaatcgtggcgaatgtggggaaaagagaaatcttgcacaatactgagaaagaacaacacacagaggacacagtgaaggactgtgtggacatagaggtattccctgctggtgagaataccgaggaccagaaatcctctgaagacactgccccattcctaggaaccttagcaggtgctacctatgaggaacaggttcaaagccaaattcttgagagcagttctctccctgaaaacacagtacaggttgagtcaaatgaggtcatgggtgcaccagatgacaggaccagaactccccttgagccatccaactgttggagtgacttagatggtgggaaccacacagagaatgtgggagaggcagcagtgactcaggttgaagagcaggcaggcacagtggcctcgtgtcctttagggcatagtgatgacacagtttatcatgatgacaaatgtatggtagaggtcccccaagagttagagacaagcacagggcatagtttagagaaagaattcaccaaccaggaagcagctgagcccaaggaggttccagcgcacagtacagaagtaggtagggatcacaacgaagaagagggtgaagaaacaggattaagggacgagaaaccaatcaagacagaagttcctggttctccagcaggaactgagggcaactgtcaggaagcgacaggtccaagtacagtagacactcaaaatgaacccttagatatgaaagagcccgatgaagaaaagagtgaccaacagggagaggcattggactcatcgcagaagaagacaaagaacaagaaaaagaaaaacaagaagaaaaaatccccagtacccgtagaaacccttaaagatgttaaaaaagagttaacgtatcagaacacagatttaagtgaaattaaggaagaagagcaggtaaagtctactgacagaaagtcagcagtggaagcccaaaacgaggtgactgaaaatccaaaacagaaaattgcagcagaaagcagtgaaaatgttgattgtccggagaatcctaaaattaagttggatggaaaacttgaccaagaaggtgatgatgtacaaacagcagctgaggaggtactagctgatggagacacattagattttgaggatgacaccgttcaatcatcaggcccgagggctggtggtgaagaattagatgaaggtgttgcaaaagataatgctaaaatagatggtgccactcaaagcagtcctgcagaaccaaagagcgaagacgcagatcgctgcaccctgcccgaacatgaaagtccctcacaggacattagtgatgcctgtgaagcagaaagtacagagaggtgtgagatgtcagaacatccaagtcagaccgtcaggaaagctttagacagcaatagcctagagaacgatgacttgtcggcaccaggaagagagccagggcacttcaatccagaaagcagagaagataccagaggagggaatgagaagggcaaaagcaaagaagactgtaccatgtcctaagctgaggcaggcggcaggcgcggtgcacaggaagtctcagtgtgaaggggtcttttctctccactgccaatgtaagtagaatgttctaaattcatagagaggcactgtatgacaattaccaggtgctctactgctttaagttatagactgttacttgtagatttccatgtaatcattgaggttatcacccagattagaaagacatatttgttatcagtgtacgttctaattgagagcattccagtagtatcaaacaataatgtctactgtttatagtccacttaataaaaatagaggcatttactatttgccttaggctgataggaatgtgggttttcttgaccaaatatatcagcatctaattgaaatgaccaaatagcattcttagacttctgtattatgaatataattgatatttaaattaatgtcttgttcacatatgtgtactttcatatttgattttaaaatgtacattataacctgtatggtattttatttaaaggagataaacagccaaatagcaaataggtcactgaatgataagatttgcaccttagaacaataatcattttaaggataacaagtaaatgtctgaaagcatgaggggctttatttgcctttacctcatatgagtctttgatcttgaaccgatacttttggatctcattgttgatatacctgaatttactttgtaagagattttaacttcacttcatgctgatgatgtatcaaattcattttatagaaagatttaaagtttttttctggaagtgatatatgtcaaattacatttcctactgcagtatttgagcagggacagtcattttttaaatgtttttggccgggcgtggtggctcatgcctgtaatctcagtacattgggaggccaaggcaggtggatcacctgaggtcaagagttcgaggccagcctggccaacatggtgaaaccctgtctctactaaaaatacaaaaaattggccgggcgtgatggtgggcgcctgtaatcccagccactccagaggctgaggcaggagaatcgcttgaacctgcgaggcagagattgcagtgagccaagatcaagccattgtactccagcctggacaacaagagcgaaactctgtctaaaaaaaaaaaaaaaaacacacacacacacaacacaatgttttcacgcctgtaaacctagcacattgggaagccaaggtgggaggattgcttgaggccaggagttcaaggctgcagtgagctatgattgcacactgtactctagcctgggagacagagtgagacactgtctctaaaaaaaaaaaaaaaaaaaaaaaaagtttttgaaccttaaaatactttgtttgaatttctaatcatcattcaaaagagcagtaaaaaatggttacttgttcttgtacaagctactaattagactatagtaggatatttt

SEQ ID NO: 1016 - protein, 784 aa, Homo sapiens
MDMGTQGSGRKRLPNRERLTAEDDALNQIAREAEARLAAKRAARAEAREIRMKELERQQKEPSEYSGHLNSSSRASSRASSARDVVEERPEKDFTEKGSRNMPGLSAATLASLGGTSSRRGSGDTSISIDTEASIREIKDSLAEVEEKYKKAMVSNAQLDNEKTNFMYQVDTLKDMLLELEEQLAESRRQYEEKNKEFEREKHAHSILQFQFAEVKEALKQREEMLEKHGIILNSEIATNGETSDTLNNVGYQGPTKMTKEELNALKSTGDGTLGKASEVEVKNEIVANVGKREILHNTEKEQHTEDTVKDCVDIEVFPAGENTEDQKSSEDTAPFLGTLAGATYEEQVQSQISSSLPENTVQVESNEVMGAPDDRTRTPLEPSNCWSDLDGGNHTENVGEAAVTQVEEQAGTVASCPLGHSDDTVYHDDKCMVEVPQELETSTGHSLEKEFTNQEAAEPKEVPAHSTEVGRDHNEEEGEETGLRDEKPIKTEVPGSPAGTEGNCQEATGPSTVDTQNEPLDMKEPDEEKSDQQGEALDSSQKKTKNKKKKNKKKKSPVPVETLKDVKKELTYQNTDLSEIKEEEQVKSTDRKSAVEAQNEVTENPKQKIAAESSENVDCPENPKIKLDGKLDQEGDDVQTAAEEVLADGDTLDFEDDTVQSSGPRAGGEELDEGVAKDNAKIDGATQSSPAEPKSEDADRCTLPEHESPSQDISDACEAESTERCEMSEHPSQTVRKALDSNSLENDDLSAPGREPGHFNPESREDTRGGNEKGKSKEDCTMS

SEQ ID NO: 1017 - DNA, 4081 bp, Homo sapiens
ccgtgggacgggcggaggcgcccgagtcccgcttccccggcgcccttccaccccgagcccgactcagcccgcggccacctgcgccccgcccctgtcggccgcgcccgagcccagcgccgcgagccgctccccggcgggctggctcctggccccggaagcgcgagcgttcacttagcggcgagtggctccgtctccgcggacagagcgcgcgccccctggcccggcccgcgaggggctcccggcgcggtccccgagcatttcccgccgggtggagcgggccgagcccggcaggatgaccagccccgcggccgctcaaagccgggagatcgactgtttgagcccggaagcgcagaagctggcggaagcccggctcgctgcaaaacgggcggcccgcgcggaggctcgcgagatccgcatgaaggagctggagcggcagcagaaggaggaagacagtgagcgctactctcgtagatccagaagaaacacatcggcttctgatgaagacgagcgcatgtcagtgggtagtcgtggaagcctgagggtagaagagagaccagaaaaagattttactgagaaggggtctcgtaacatgccgggcctgtctgcagccacgctggcctctctgggtgggacttcctctcggagaggcagcggagacacctccatctccatcgacaccgaggcatccatcagggaaatcaaggactctctagcagaagttgaagagaaatataagaaggctatggtttccaatgctcagctagacaatgaaaagacaaacttcatgtaccaggttgataccctaaaagatatgttgctggagcttgaagaacagctggctgaatctaggcggcagtacgaagagaaaaacaaagaatttgaaagggaaaaacacgcccacagtatactgcaatttcagtttgctgaagtcaaggaggccctgaagcaaagagaggaaatgctcgagaaacatggaataatcctaaattcagaaatagctaccaatggagagacttccgacaccctcaataatgttggataccaaggtcctaccaagatgacaaaagaagagttaaatgccctcaagtcgacaggggatgggaccctaggaagagccagtgaagtggaggtgaaaaatgaaatcgtggcgaatgtggggaaaagagaaatcttgcacaatactgagaaagaacaacacacagaggacacagtgaaggactgtgtggacatagaggtattccctgctggtgagaataccgaggaccagaaatcctctgaagacactgccccattcctaggaaccttagcaggtgctacctatgaggaacaggttcaaagccaaattcttgagagcagttctctccctgaaaacacagtacaggttgagtcaaatgaggtcatgggtgcaccagatgacaggaccagaactccccttgagccatccaactgttggagtgacttagatggtgggaaccacacagagaatgtgggagaggcagcagtgactcaggttgaagagcaggcaggcacagtggcctcgtgtcctttagggcatagtgatgacacagtttatcatgatgacaaatgtatggtagaggtcccccaagagttagagacaagcacagggcatagtttagagaaagaattcaccaaccaggaagcagctgagcccaaggaggttccagcgcacagtacagaagtaggtagggatcacaacgaagaagagggtgaagaaacaggattaagggacgagaaaccaatcaagacagaagttcctggttctccagcaggaactgagggcaactgtcaggaagcgacaggtccaagtacagtagacactcaaaatgaacccttagatatgaaagagcccgatgaagaaaagagtgaccaacagggagaggcattggactcatcgcagaagaagacaaagaacaagaaaaagaaaaacaagaagaaaaaatccccagtacccgtagaaacccttaaagatgttaaaaaagagttaacgtatcagaacacagatttaagtgaaattaaggaagaagagcaggtaaagtctactgacagaaagtcagcagtggaagcccaaaacgaggtgactgaaaatccaaaacagaaaattgcagcagaaagcagtgaaaatgttgattgtccggagaatcctaaaattaagttggatggaaaacttgaccaagaaggtgatgatgtacaaacagcagctgaggaggtactagctgatggagacacattagattttgaggatgacaccgttcaatcatcaggcccgagggctggtggtgaagaattagatgaaggtgttgcaaaagataatgctaaaatagatggtgccactcaaagcagtcctgcagaaccaaagagcgaagacgcagatcgctgcaccctgcccgaacatgaaagtccctcacaggacattagtgatgcctgtgaagcagaaagtacagagaggtgtgagatgtcagaacatccaagtcagaccgtcaggaaagctttagacagcaatagcctagagaacgatgacttgtcggcaccaggaagagagccagggcacttcaatccagaaagcagagaagataccagaggagggaatgagaagggcaaaagcaaagaagactgtaccatgtcctaagctgaggcaggcggcaggcgcggtgcacaggaagtctcagtgtgaaggggtcttttctctccactgccaatgtaagtagaatgttctaaattcatagagaggcactgtatgacaattaccaggtgctctactgctttaagttatagactgttacttgtagatttccatgtaatcattgaggttatcacccagattagaaagacatatttgttatcagtgtacgttctaattgagagcattccagtagtatcaaacaataatgtctactgtttatagtccacttaataaaaatagaggcatttactatttgccttaggctgataggaatgtgggttttcttgaccaaatatatcagcatctaattgaaatgaccaaatagcattcttagacttctgtattatgaatataattgatatttaaattaatgtcttgttcacatatgtgtactttcatatttgattttaaaatgtacattataacctgtatggtattttatttaaaggagataaacagccaaatagcaaataggtcactgaatgataagatttgcaccttagaacaataatcattttaaggataacaagtaaatgtctgaaagcatgaggggctttatttgcctttacctcatatgagtctttgatcttgaaccgatacttttggatctcattgttgatatacctgaatttactttgtaagagattttaacttcacttcatgctgatgatgtatcaaattcattttatagaaagatttaaagtttttttctggaagtgatatatgtcaaattacatttcctactgcagtatttgagcagggacagtcattttttaaatgtttttggccgggcgtggtggctcatgcctgtaatctcagtacattgggaggccaaggcaggtggatcacctgaggtcaagagttcgaggccagcctggccaacatggtgaaaccctgtctctactaaaaatacaaaaaattggccgggcgtgatggtgggcgcctgtaatcccagccactccagaggctgaggcaggagaatcgcttgaacctgcgaggcagagattgcagtgagccaagatcaagccattgtactccagcctggacaacaagagcgaaactctgtctaaaaaaaaaaaaaaaaacacacacacacacaacacaatgttttcacgcctgtaaacctagcacattgggaagccaaggtgggaggattgcttgaggccaggagttcaaggctgcagtgagctatgattgcacactgtactctagcctgggagacagagtgagacactgtctctaaaaaaaaaaaaaaaaaaaaaaaaagtttttgaaccttaaaatactttgtttgaatttctaatcatcattcaaaagagcagtaaaaaatggttacttgttcttgtacaagctactaattagactatagtaggatatttt

SEQ ID NO: 1018 - protein, 780 aa, Homo sapiens
MTSPAAAQSREIDCLSPEAQKLAEARLAAKRAARAEAREIRMKELERQQKEEDSYSRRSRRNTSASDEDERMSVGSRGSLRVEERPEKDFTEKGSRNMPGLSAATLASLGGTSSRRGSGDTSISIDTEASIREIKDSLAEVEEKYKKAMVSNAQLDNEKTNFMYQVDTLKDMLLELEEQLAESRRQYEEKNKEFEREKHAHSILQFQFAEVKEALKQREEMLEKHGIILNSEIATNGETSDTLNNVGYQGPTKMTKEELNALKSTGDGTLGRASEVEVKNEIVANVGKREILHNTEKEQHTEDTVKDCVDIEVFPAGENTEDQKSSEDTAPFLGTLAGATYEEQVQSQISSSLPENTVQVESNEVMGAPDDRTRTPLEPSNCWSDLDGGNHTENVGEAAVTQVEEQAGTVASCPLGHSDDTVYHDDKCMVEVPQELETSTGHSLEKEFTNQEAAEPKEVPAHSTEVGRDHNEEEGEETGLRDEKPIKTEVPGSPAGTEGNCQEATGPSTVDTQNEPLDMKEPDEEKSDQQGEALDSSQKKTKNKKKKNKKKKSPVPVETLKDVKKELTYQNTDLSEIKEEEQVKSTDRKSAVEAQNEVTENPKQKIAAESSENVDCPENPKIKLDGKLDQEGDDVQTAAEEVLADGDTLDFEDDTVQSSGPRAGGEELDEGVAKDNAKIDGATQSSPAEPKSEDADRCTLPEHESPSQDISDACEAESTERCEMSEHPSQTVRKALDSNSLENDDLSAPGREPGHFNPESREDTRGGNEKGKSKEDCTMS

SEQ ID NO: 1019 - DNA, 4368 bp, Homo sapiens
ccgtgggacgggcggaggcgcccgagtcccgcttccccggcgcccttccaccccgagcccgactcagcccgcggccacctgcgccccgcccctgtcggccgcgcccgagcccagcgccgcgagccgctccccggcgggctggctcctggccccggaagcgcgagcgttcacttagcggcgagtggctccgtctccgcggacagagcgcgcgccccctggcccggcccgcgaggggctcccggcgcggtccccgagcatttcccgccgggtggagcgggccgagcccggcaggatgaccagccccgcggccgctcaaagccgggagatcgactgtttgagcccggaagcgcagaagctggcggaagcccggctcgctgcaaaacgggcggcccgcgcggaggctcgcgagatccgcatgaaggagctggagcggcagcagaaggaggaagacagtgagcgctactctcgtagatccagaagaaacacatcggcttctgatgaagacgagcgcatgtcagtgggtagtcgtggaagcctgagggtagaagagagaccagaaaaagattttactgagaaggggtctcgtaacatgccgggcctgtctgcagccacgctggcctctctgggtgggacttcctctcggagaggcagcggagacacctccatctccatcgacaccgaggcatccatcagggaaatcaaggactctctagcagaagttgaagagaaatataagaaggctatggtttccaatgctcagctagacaatgaaaagacaaacttcatgtaccaggttgataccctaaaagatatgttgctggagcttgaagaacagctggctgaatctaggcggcagtacgaagagaaaaacaaagaatttgaaagggaaaaacacgcccacagtatactgcaatttcagtttgctgaagtcaaggaggccctgaagcaaagagaggaaatgctcgagaaacatggaataatcctaaattcagaaatagctaccaatggagagacttccgacaccctcaataatgttggataccaaggtcctaccaagatgacaaaagaagagttaaatgccctcaagtcgacaggggatgggaccctaggaagagccagtgaagtggaggtgaaaaatgaaatcgtggcgaatgtggggaaaagagaaatcttgcacaatactgagaaagaacaacacacagaggacacagtgaaggactgtgtggacatagaggtattccctgctggtgagaataccgaggaccagaaatcctctgaagacactgccccattcctaggaaccttagcaggtgctacctatgaggaacaggttcaaagccaaattcttgagagcagttctctccctgaaaacacagtacaggttgagtcaaatgaggtcatgggtgcaccagatgacaggaccagaactccccttgagccatccaactgttggagtgacttagatggtgggaaccacacagagaatgtgggagaggcagcagtgactcaggttgaagagcaggcaggcacagtggcctcgtgtcctttagggcatagtgatgacacagtttatcatgatgacaaatgtatggtagaggtcccccaagagttagagacaagcacagggcatagtttagagaaagaattcaccaaccaggaagcagctgagcccaaggaggttccagcgcacagtacagaagtaggtagggatcacaacgaagaagagggtgaagaaacaggattaagggacgagaaaccaatcaagacagaagttcctggttctccagcaggaactgagggcaactgtcaggaagcgacaggtccaagtacagtagacactcaaaatgaacccttagatatgaaagagcccgatgaagaaaagagtgaccaacagggagaggcattggactcatcgcagaagaagacaaagaacaagaaaaagaaaaacaagaagaaaaaatccccagtacccgtagaaacccttaaagatgttaaaaaagagttaacgtatcagaacacagatttaagtgaaattaaggaagaagagcaggtaaagtctactgacagaaagtcagcagtggaagcccaaaacgaggtgactgaaaatccaaaacagaaaattgcagcagaaagcagtgaaaatgttgattgtccggagaatcctaaaattaagttggatggaaaacttgaccaagaaggtgatgatgtacaaacagcagctgaggaggtactagctgatggagacacattagattttgaggatgacaccgttcaatcatcaggcccgagggctggtggtgaagaattagatgaaggtgttgcaaaagataatgctaaaatagatggtgccactcaaagcagtcctgcagaaccaaagagcgaagacgcagatcgctgcaccctgcccgaacatgaaagtccctcacaggacattagtgatgcctgtgaagcagaaagtacagagaggtgtgagatgtcagaacatccaagtcagaccgtcaggaaagctttagacagcaatagcctagagaacgatgacttgtcggcaccaggaagagagccagggcacttcaatccagaaagcagagaagataccagaggagggaatgagaagggcaaaagcaaagaagactgtaccatgtcctaagctgaggcaggcggcaggcgcggtgcacaggaagtctcagtgtgaaggggtcttttctctccactgccaatgtaagtagaatgttctaaattcatagagaggcactgtatgacaattaccaggtgctctactgctttaagttatagactgttacttgtagatttccatgtaatcattgaggttatcacccagattagaaagacatatttgttatcagtgtacgttctaattgagagcattccagtagtatcaaacaataatgtctactgtttatagtccacttaataaaaatagaggcatttactatttgccttaggctgataggaatgtgggttttcttgaccaaatatatcagcatctaattgaaatgaccaaatagcattcttagacttctgtattatgaatataattgatatttaaattaatgtcttgttcacatatgtgtactttcatatttgattttaaaatcaaataggtcactgaatgataagatttgcaccttagaacaataatcattttaaggataacaagtaaatgtctgaaagcatgaggggctttatttgcctttacctcatatgagtctttgatcttgaaccgatacttttggatctcattgttgatatacctgaatttactttgtaagagattttaacttcacttcatgctgatgatgtatcaaattcattttatagaaagatttaaagtttttttctggaagtgatatatgtcaaattacatttcctactgcagtatttgagcagggacagtcattttttaaatgtttttggccgggcgtggtggctcatgcctgtaatctcagtacattgggaggccaaggcaggtggatcacctgaggtcaagagttcgaggccagcctggccaacatggtgaaaccctgtctctactaaaaatacaaaaaattggccgggcgtgatggtgggcgcctgtaatcccagccactccagaggctgaggcaggagaatcgcttgaacctgcgaggcagagattgcagtgagccaagatcaagccattgtactccagcctggacaacaagagcgaaactctgtctaaaaaaaaaaaaaaaaacacacacacacacaacacaatgttttcacgcctgtaaacctagcacattgggaagccaaggtgggaggattgcttgaggccaggagttcaaggctgcagtgagctatgattgcacactgtactctagcctgggagacagagtgagacactgtctctaaaaaaaaaaaaaaaaaaaaaaaaagtttttgaaccttaaaatactttgtttgaatttctaatcatcattcaaaagagcagtaaaaaatggttacttgttcttgtacaagctactaattagactatagtaggatattttaaagagctgaatcacttttggtattttggtataaatattttcatttgttatgtcccagtatattcttactggaaaattcttgttttgatctgcctgaagaaaatatctgttttctatataaaaaaattttttaaaataattgtaaagttagatttaaaattgtaaaatataaaatcacaaaggaatgtaccttatgaatgttgttgacattttatgaaattatgtggattcatattactgttacaagatagaattgaatgcaaaaagaccaaaacctcaataaaatttgaggaaaacgtgttattatgtaattgaaataaaaacattttataattgtgca

SEQ ID NO: 1020 - protein, 780 aa, Homo sapiens; identical to SEQ ID NO: 1018

SEQ ID NO: 1021 - DNA, 4272 bp, Homo sapiens
ccgtgggacgggcggaggcgcccgagtcccgcttccccggcgcccttccaccccgagcccgactcagcccgcggccacctgcgccccgcccctgtcggccgcgcccgagcccagcgccgcgagccgctccccggcgggctggctcctggccccggaagcgcgagcgttcacttagcggcgagtggctccgtctccgcggacagagcgcgcgccccctggcccggcccgcgaggggctcccggcgcggtccccgagcatttcccgccgggtggagcgggccgagcccggcaggatgaccagccccgcggccgctcaaagccgggagatcgactgtttgagcccggaagcgcagaagctggcggaagcccggctcgctgcaaaacgggcggcccgcgcggaggctcgcgagatccgcatgaaggagctggagcggcagcagaaggaggtagaagagagaccagaaaaagattttactgagaaggggtctcgtaacatgccgggcctgtctgcagccacgctggcctctctgggtgggacttcctctcggagaggcagcggagacacctccatctccatcgacaccgaggcatccatcagggaaatcaaggactctctagcagaagttgaagagaaatataagaaggctatggtttccaatgctcagctagacaatgaaaagacaaacttcatgtaccaggttgataccctaaaagatatgttgctggagcttgaagaacagctggctgaatctaggcggcagtacgaagagaaaaacaaagaatttgaaagggaaaaacacgcccacagtatactgcaatttcagtttgctgaagtcaaggaggccctgaagcaaagagaggaaatgctcgagaaacatggaataatcctaaattcagaaatagctaccaatggagagacttccgacaccctcaataatgttggataccaaggtcctaccaagatgacaaaagaagagttaaatgccctcaagtcgacaggggatgggaccctaggaagagccagtgaagtggaggtgaaaaatgaaatcgtggcgaatgtggggaaaagagaaatcttgcacaatactgagaaagaacaacacacagaggacacagtgaaggactgtgtggacatagaggtattccctgctggtgagaataccgaggaccagaaatcctctgaagacactgccccattcctaggaaccttagcaggtgctacctatgaggaacaggttcaaagccaaattcttgagagcagttctctccctgaaaacacagtacaggttgagtcaaatgaggtcatgggtgcaccagatgacaggaccagaactccccttgagccatccaactgttggagtgacttagatggtgggaaccacacagagaatgtgggagaggcagcagtgactcaggttgaagagcaggcaggcacagtggcctcgtgtcctttagggcatagtgatgacacagtttatcatgatgacaaatgtatggtagaggtcccccaagagttagagacaagcacagggcatagtttagagaaagaattcaccaaccaggaagcagctgagcccaaggaggttccagcgcacagtacagaagtaggtagggatcacaacgaagaagagggtgaagaaacaggattaagggacgagaaaccaatcaagacagaagttcctggttctccagcaggaactgagggcaactgtcaggaagcgacaggtccaagtacagtagacactcaaaatgaacccttagatatgaaagagcccgatgaagaaaagagtgaccaacagggagaggcattggactcatcgcagaagaagacaaagaacaagaaaaagaaaaacaagaagaaaaaatccccagtacccgtagaaacccttaaagatgttaaaaaagagttaacgtatcagaacacagatttaagtgaaattaaggaagaagagcaggtaaagtctactgacagaaagtcagcagtggaagcccaaaacgaggtgactgaaaatccaaaacagaaaattgcagcagaaagcagtgaaaatgttgattgtccggagaatcctaaaattaagttggatggaaaacttgaccaagaaggtgatgatgtacaaacagcagctgaggaggtactagctgatggagacacattagattttgaggatgacaccgttcaatcatcaggcccgagggctggtggtgaagaattagatgaaggtgttgcaaaagataatgctaaaatagatggtgccactcaaagcagtcctgcagaaccaaagagcgaagacgcagatcgctgcaccctgcccgaacatgaaagtccctcacaggacattagtgatgcctgtgaagcagaaagtacagagaggtgtgagatgtcagaacatccaagtcagaccgtcaggaaagctttagacagcaatagcctagagaacgatgacttgtcggcaccaggaagagagccagggcacttcaatccagaaagcagagaagataccagaggagggaatgagaagggcaaaagcaaagaagactgtaccatgtcctaagctgaggcaggcggcaggcgcggtgcacaggaagtctcagtgtgaaggggtcttttctctccactgccaatgtaagtagaatgttctaaattcatagagaggcactgtatgacaattaccaggtgctctactgctttaagttatagactgttacttgtagatttccatgtaatcattgaggttatcacccagattagaaagacatatttgttatcagtgtacgttctaattgagagcattccagtagtatcaaacaataatgtctactgtttatagtccacttaataaaaatagaggcatttactatttgccttaggctgataggaatgtgggttttcttgaccaaatatatcagcatctaattgaaatgaccaaatagcattcttagacttctgtattatgaatataattgatatttaaattaatgtcttgttcacatatgtgtactttcatatttgattttaaaatcaaataggtcactgaatgataagatttgcaccttagaacaataatcattttaaggataacaagtaaatgtctgaaagcatgaggggctttatttgcctttacctcatatgagtctttgatcttgaaccgatacttttggatctcattgttgatatacctgaatttactttgtaagagattttaacttcacttcatgctgatgatgtatcaaattcattttatagaaagatttaaagtttttttctggaagtgatatatgtcaaattacatttcctactgcagtatttgagcagggacagtcattttttaaatgtttttggccgggcgtggtggctcatgcctgtaatctcagtacattgggaggccaaggcaggtggatcacctgaggtcaagagttcgaggccagcctggccaacatggtgaaaccctgtctctactaaaaatacaaaaaattggccgggcgtgatggtgggcgcctgtaatcccagccactccagaggctgaggcaggagaatcgcttgaacctgcgaggcagagattgcagtgagccaagatcaagccattgtactccagcctggacaacaagagcgaaactctgtctaaaaaaaaaaaaaaaaacacacacacacacaacacaatgttttcacgcctgtaaacctagcacattgggaagccaaggtgggaggattgcttgaggccaggagttcaaggctgcagtgagctatgattgcacactgtactctagcctgggagacagagtgagacactgtctctaaaaaaaaaaaaaaaaaaaaaaaaagtttttgaaccttaaaatactttgtttgaatttctaatcatcattcaaaagagcagtaaaaaatggttacttgttcttgtacaagctactaattagactatagtaggatattttaaagagctgaatcacttttggtattttggtataaatattttcatttgttatgtcccagtatattcttactggaaaattcttgttttgatctgcctgaagaaaatatctgttttctatataaaaaaattttttaaaataattgtaaagttagatttaaaattgtaaaatataaaatcacaaaggaatgtaccttatgaatgttgttgacattttatgaaattatgtggattcatattactgttacaagatagaattgaatgcaaaaagaccaaaacctcaataaaatttgaggaaaacgtgttattatgtaattgaaataaaaacattttataattgtgca

SEQ ID NO: 1022 - protein, 750 aa, Homo sapiens
MTSPAAAQSREIDCLSPEAQKLAEARLAAKRAARAEAREIRMKELERQQKEVEERPEKDFTEKGSRNMPGLSAATLASLGGTSSRRGSGDTSISIDTEASIREIKDSLAEVEEKYKKAMVSNAQLDNEKTNFMYQVDTLKDMLLELEEQLAESRRQYEEKNKEFEREKHAHSILQFQFAEVKEALKQREEMLEKHGIILNSEIATNGETSDTLNNVGYQGPTKMTKEELNALKSTGDGTLGRASEVEVKNEIVANVGKREILHNTEKEQHTEDTVKDCVDIEVFPAGENTEDQKSSEDTAPFLGTLAGATYEEQVQSQISSSLPENTVQVESNEVMGAPDDRTRTPLEPSNCWSDLDGGNHTENVGEAAVTQVEEQAGTVASCPLGHSDDTVYHDDKCMVEVPQELETSTGHSLEKEFTNQEAAEPKEVPAHSTEVGRDHNEEEGEETGLRDEKPIKTEVPGSPAGTEGNCQEATGPSTVDTQNEPLDMKEPDEEKSDQQGEALDSSQKKTKNKKKKNKKKKSPVPVETLKDVKKELTYQNTDLSEIKEEEQVKSTDRKSAVEAQNEVTENPKQKIAAESSENVDCPENPKIKLDGKLDQEGDDVQTAAEEVLADGDTLDFEDDTVQSSGPRAGGEELDEGVAKDNAKIDGATQSSPAEPKSEDADRCTLPEHESPSQDISDACEAESTERCEMSEHPSQTVRKALDSNSLENDDLSAPGREPGHFNPESREDTRGGNEKGKSKEDCTMS

SEQ ID NO: 1023 - DNA, 33705 bp, Mus musculus
  misc_feature (1)...(33705): n = A, C, G or T/U
agaggctaaggcgctgctttttacattgtacattgtgttctagcagtttccattcctaggagcagtcagggatctaagtcaggaaactaaatcagagcttcaggatagctcttttcttactggatcttgatttttttttgcccctgtgattaaagaagtattctgtgtcagagaaagcaaattttgtatagataaatgaagtattgaactcatgacaagggctggagagacagtccagtggttagtgacaagggcctgggtgcagttcccagaaccacatggtgactcacaagcatctgttccaggggacacgtgctcttcttctgaactccttgggcacacacatatacacatgcatataggaaaacactcatatacataagtctaagaaattttaaacatagagtaaaaaggaagacaaggagtgtatctatctaccaaggccacagttttataatagttttctatgcttgcaaggacatgaacaaagtagtttacttatgtgtggtatatgtacgtatgtggtatatacatacatgtgtgtgcatgtgcccctgcctgtgtgtagagaacagagaaggatgttgggtgttccataccctgccttacctgttaagacagagtctcacagaacctggaactcatcgtttttccagctagactggctggccagaaagagcctgtctgtgatcctcctgtctttgccccttcccatccctcagcactgaggtcggagttctgggtggctgtgcctggagacccaaactcagctcttcatgcctgttcaacaggcactctacccaccgagccatctcctcagccctcgaaagtaggtgtgtaatgtgactgaggaacctggaggcaacttcattttgttttaaggatcccctctgtgtgctcaggctcagcatctgtcattctggattgagtgctttggatagtaggcccatcccgaaacctggagaaccaaagatacaagaggttagaaagaatggttcatagccattgcggtgttggtgttggttatataaaagaagaaaagtggtttgcaaagaaggcatgttaatataacaatactaatgttaatatgatataatgttaatgtaacattgacttgtgatgctttgattccacgtaaaactaagaaagtgggactccatctcaaacccgtcctctgtcgcctactaacaggagaggtctcggttgggaagaggacagtgcccagcatgcagcagtaaaagcattgccccttcactcccctaagaacaaatcagaattactgggtgcagaaccaagtcaagatctcagagggcaaagggcggaacagccccagaccaccacaccacccgctctggactgtcagcaggctgctctgggctttgtgccctcaagctgggatttaaactaaacagatttcctataggaaacacacacacacaatcacactctgctaaagctgcttttatggacatttcccctcagaaatatttctctctggaaaaataaattcacaggatgtaattaaagccattatgtgtgtatgttggctgagcctgttcctaagtgcttcaccaaacgggccaccgaatcaaggagtgaaggcaggctttgttcctgtctatcaacaatgatatttattaattgcagcacagggtgttctgagtctttatggtttcagaaatagccttctgctggttccctacccaaggaacccattgcctctgaccccagtgtggcctctgcaggagccttggatgccatagcagcccacagcccaccgttgggcttgtgtcctttggcttggggcctatgaagaaataaattctaagcatgagaataattaacttctgaaagaaaaagtccccccaaacagtgcttttgagtatcacagctaagagcagtgtcgtgctgcgacttctttgtcttctcctgtcttccaagtcctttaggagagctgttcttgtacctctttgtccagtaggggatccaactggatttggcccagaagaggaatcagagtgttgctttctgggacaatgtgggtgtggctgaagcgtgaggagctgggcctgccagtgaggccacagagcagactgtcacagcttttgagcttcatgggagcttgtgacagagcaaaagcactcactgcatgaccagaaagtaaaagaaggagaagggctgggtcccacagtcgcacggtctgatggcacactcacagtcaccctattttctgccattaggctccacctcctgagggtcccaccaacttgcaatagcaccacagactggaatccaggtctttaatatctatgtctttggggaatatactagggatctaccctgcttcaggtgactccggtctgaggatcaacagtgacattcgcaaagacccttcgcatagttggcttgcactcatgggggccagttctcctcgaggcccctctccaacattctactctgatccgcagttccactttgatggtccctgcttttctggatcttgttggctctggctgtttagtggcattgacccacttgttcccataagcccaggcaggttctcatgagaaacacacactcatcccagcagggggagaatgggtgtctgcaggagatagcttctggggcatctgtgagaaggggtgaggtgaggagataaatgcctcaggccacgtgggtggagcagggctgggagcccactgtcctgctggtcagataggacagctggggaactggagaaacagttcctgggagagagtgaggaggcaatgaagtcatgtctgtgtgtgtgtataaggaggggcagcagggataggggtagctaggcttccctaatgaagggcctctgatgtctggctaaggggcagagtctggctttaaggggtcattaccatcaatactaggtttgtgagcccaactgacagaaaccaaatcttgtgggagagaaatgtcacctggcagtgaggaagcaccgtggggggaagagtccaggcttccgaggagctaagtcccagcttacccttgtgaaactgcagttctgtgttctggagccccttggtcgcggtcgccgttaagcttcctgagctggcattggctccacctcggatcctctgctgcctgagagttccggtgccagccctcttccactccaggctgagactgcttcagctctaagtctctctcagtaccagcgcacagaaagcaccatgcctaggcgggttccatctctgcccaaggagcgccctcagactccactcaggtgaggccaggattcttcaccacagaaaagaatttcagtgatgctcagtacaaagcgaccttcatgtttatttagaaaaagttttcccaagaacagaaacatgggcattggggagacgcggactgggacagagagagggttcggtggaggagagtgtttgctgctttcaggggacctgagtttggttcccaagcaacacaaccacctgctactctagctccgacggaactgacgccctctcctggcgtccttggagactgcatgcatatggcatctacaaacacacatacatccactttttttaaaaagaagggacagtagtaccccctctggcgtgggcacaggcttctcaagagagagccacatttcagtgtcttcagctgtgcatagattttggcttttgaagttaaatcatttaaagggtttaaatattaagtaaaaaatgtttatggtaggtggtgtggttcatacctgtaatctcagcacttgggagactgagaccatcagaaacaagggaggacagaggagggagggagggaaataaggagggagaggttttggactgactgacccaaagccctgtcaccagaaggggcaaccactggacgtctccctgggaaaggtgattttcacagttcggataattttttgcaagctatatacacacacgtacacattcctggcatttggtcatcttttcttcagattgaaacagtactataggcaagggtagagagacacagactatttctctttccaatagttaccagtccctggctcttcaggaaagccgtgagcagcaagccttcggttcaggtagcagaagaccagctttggagctgtgacattggctacagggctgccacctttgaaggcacagggttgctgtgatctgagtacccagagctttgggtttctagctttgaaaggctggcatcacatggtctagttaccagggcttgaactcttaagctctgagggttggaagcctggcttgctcgtttcaggtgtgcagggttgtcagcactgagggagttacctctgtttgtgatttttatttgaatggagtaaaatgacccttagccaagtgttatggcaggaatatccacaggggctgcccatatagttagttctaagattcttttgtatccattggtacaaggcactcctaggattttgggtcattaccacctcactgaagtgccacttaccaccagctacagtcacagggaaggaactgatatgtggaggggttgctccatttgggcttcaccggcaggatgtggactctgcctcccagtgcttcacaatttggctctgggatttgggtaccaatatctgtggaacaagctggggctggcaaagatgattctgggcagagtgaaaactaaagaatctttctgctcccaccaaggatggagaagaggggataaggtttgccttggaacaggtacccccaacaatgcccagggctcaggaccaggagagatgtccattttgggccctcattgacttagtgtgctacccagttctcaaaggtagctgcatgtggagggtcagcacacctgatgtgttgggggtggggggcacagcatcatcgtaccctatatgcagctggggactcagccttgtaacgccatatccctgctgtgttttgggacaggcctctagctgcttacagtgggataagaggtgtcttggccttccagggtagggtctnnnnnnnnnnnnnnnnnnnnnnnnnnnnnnnnnnnnnnnnnnnnnnnnnnnnnnnnnnnnnnnnnnnnnnnnnnnnnnnnnnnnnnnnnnnnnnnnnnnnnnnnnnnnnnnnnnnnnnnnnnnnnnnnnnnnnnnnnnnnnnnnnnnnnnnnnnnnnnnnnnnnnnnnnnnnnnnnnnnnnnnnnnnnnnnnnnnnnnnnnnnnnnnnnnnnnnnnnnnnnnnnnnnnnnnnnnnnnnnnnnnnnnnnnnnnnnnnnnnnnnnnnnnnnnnnnnnnnnnnnnnnnnnnnnnnnnnnnnnnnnnnnnnnnnnnnnnnnnnnnnnnnnnnnnnnnnnnnnnnnnnnnnnnnnnnnnnnnnnnnnnnnnnnnnnnnnnnnnnnnnnnnnnnnnnnnnnnnnnnnnnnnnnnnnnnnnnnnnnnnnnnnnnnnnnnnnnnnnnnnnnnnnnnnnnnnnnnnnnnnnnnnnnnnnnnnnnnnnnnnnnnnnnnnnnnnnnnnnnnnnnnnnnnnnnnnnnnnnnnnnnnnnnnnnnnnnnnnnnnnnnnnnnnnnnnnnnnnnnnnnnnnnnnnnnnnnnnnnnnnnnnnnnnnnnnnnnnnnnnnnnnnnnnnnnnnnnnnnnnnnnnnnnnnnnnnnnnnnnnnnnnnnnnnnnnnnnnnnnnnnnnnnnnnnnnnnnnnnnnnnnnnnnnnnnnnnnnnnnnnnnnnnnnnnnnnnnnnnnnnnnnnnnnnnnnnnnnnnnnnnnnnnnnnnnnnnnnnnnnnnnnnnnnnnnnnnnnnnnnnnnnnnnnnnnnnnnnnnnnnnnnnnnnnnnnnnnnnnnnnnnnnnnnnnnnnnnnnnnnnnnnnnnnnnnnnnnnnnnnnnnnnnnnnnnnnnnnnnnnnnnnnnnnnnnnnnnnnnnnnnnnnnnnnnnnnnnnnnnnnnnnnnnnnnnnnnnnnnnnnnnnnnnnnnnnnnnnnnnnnnnnnnnnnnnnnnnnnnnnnnnnnnnnnnnnnnnnnnnnnnnnnnnnnnnnnnnnnnnnnnnnnnnnnnnnnnnnnnnnnnnnnnnnnnnnnnnnnnnnnnnnnnnnnnnnnnnnnnnnnnnnnnnnnnnnnnnnnnnnnnnnnnnnnnnnnnnnnnnnnnnnnnnnnnnnnnnnnnnnnnnnnnnnnnnnnnnnnnnnnnnnnnnnnnnnnnnnnnnnnnnnnnnnnnnnnnnnnnnnnnnnnnnnnnnnnnnnnnnnnnnnnnnnnnnnnnnnnnnnnnnnnnnnnnnnnnnnnnnnnnnnnnnnnnnnnnnnnnnnnnnnnnnnnnnnnnnnnnnnnnnnnnnnnnnnnnnnnnnnnnnnnnnnnnnnnnnnnnnnnnnnnnnnnnnnnnnnnnnnnnnnnnnnnnnnnnnnnnnnnnnnnnnnnnnnnnnnnnnnnnnnnnnnnnnnnnnnnnnnnnnnnnnnnnnnnnnnnnnnnnnnnnnnnnnnnnnnnnnnnnnnnnnnnnnnnnnnnnnnnnnnnnnnnnnnnnnnnnnnnnnnnnnnnnnnnnnnnnnnnnnnnnnnnnnnnnnnnnnnnnnnnnnnnnnnnnnnnnnnnnnnnnnnnnnnnnnnnnnnnnnnnnnnnnnnnnnnnnnnnnnnnnnnnnnnnnnnnnnnnnnnnnnnnnnnnnnnnnnnnnnnnnnnnnnnnnnnnnnnnnnnnnnnnnnnnnnnnnnnnnnnnnnnnnnnnnnnnnnnnnnnnnnnnnnnnnnnnnnnnnnnnnnnnnnnnnnnnnnnnnnnnnnnnnnnnnnnnnnnnnnnnnnnnnnnnnnnnnnnnnnnnnnnnnnnnnnnnnnnnnnnnnnnnnnnnnnnnnnnnnnnnnnnnnnnnnnnnnnnnnnnnnnnnnnnnnnnnnnnnnnnnnnnnnnnnnnnnnnnnnnnnnnnnnnnnnnnnnnnnnnnnnnnnnnnnnnnnnnnnnnnnnnnnnnnnnnnnnnnnnnnnnnnnnnnnnnnnnnnnnnnnnnnnnnnnnnnnnnnnnnnnnnnnnnnnnnnnnnnnnnnnnnnnnnnnnnnnnnnnnnnnnnnnnnnnnnnnnnnnnnnnnnnnnnnnnnnnnnnnnnnnnnnnnnnnnnnnnnnnnnnnnnnnnnnnnnnnnnnnnnnnnnnnnnnnnnnnnnnnnnnnnnnnnnnnnnnnnnnnnntcttggcttcgttattcctttcttgcagtctaagtctctttcagccccagcctgccttccagaaaatacccggttcatgtaggctgagggccggcttactccacccagcaccagctcaccactgcgtgtcagtccaactccaggctatctaatccctcttctgtcctctgaagacaccagcacacacatggtgctcccagcacgcacgcacgcacgcgcgcgcacacacacacacacacacacacacacacacacacacacacacacacacacacactttaaataaatataaaaataattctgccagctgtggttgtatactttcccagcacctgggaagctactgcaggtggatctcaatgagttaaggcaagactcatttacatatcagctctgggccagccaagggctagtaagatcttgtctccatttgccctaccccacccccaaaccccttttaaaaagtattcacttcctattcctcctgagatagaatagaaaggcaaatcatggaggtatgaggaggaagaggagccctttacctttactgaggaatttggttgaagcctcttgccaacagagaagcaggaattccagcacaattaactgcttaaagctttcctccctccgcacttatgcacctgcaattttccaggactctcactagaaacttttacaggaaatggacatgcacaaaactcatgcaatcagtggctcctggctttatcagattataattccatccaaggtatgtctgaagccaccccataatctcatagacacacacacaaacacgagagagagagagagagagagagagagagagagagagagagagagagagtgttagtttctgagtactcttgagatctaagttgagagccatcaaaatggtgtatatagtagctagtgctaaggattgtgactcccttgaggagctatacttgggtgtgtcttccatagtacctctcttctaagtctttaggttaaagtctaatgttaaagtattttaaataaaacctcaacattgcttccattagtcttaacaaattttttttttcccgagccaaagcagtaagtccagttttgcttgagttttggtctcaacgaagttctcaggctagggtgacagcctggagttttatctctgtcccctcacccgtgacactcccttttctggaagcaaactgacacctactattccactctgtttccgaagctgattcctttagtgacctatgtgtggaagagtgcattatttgttcgttattgctggcttatttcactgagcagagatcctccagggttggccatgttgtaacctggggcagaggctttttaaaggatatatggatggccacgacaccacattttgatgcgcatttgggtggttttacccttgaggtatcccagccagggatgtgcagccgtggagcagagccataaggctgagccacctctggctctttgccttgcagcgtcattggtgtcacctgtccctcgtgccaacggtgttatcaagaccaaacaccactgcaggaatctccccgctcccctcaaaaccctcagagcccgtggctctgttccaggatgcctcacacagctccacagacctgtgcaactgagccagtctgggcacgaggatttgttgggcacctatagtcgctagctcccagctggtgtgccatgaccacacaaagatgcagacaagtcacagccgcggtgttggagactgtggccttgcctccatctcacaggacagcggggcgcttctgtctccttaaggcgcggtctccccccggtccactggggtcctccccctgcaaggtaccttccctaagttgtgtagaggagaatgaaaggacccgacagcgtccatgcttaagaactgttcgtaacgcaacgcacacagtgtgaccgatgtaaaatcgggagtgcttgagggaaagccactctgtcaacacgccttgaccaagttacagacactattggctccatggagacattctgggctgccttcgtctaacacaactttgcaagtcaccgactcggaaggcaccgtttggagtctcgtagaaaggacagcagcgcagccccacgtcactcaacacccttcagccgctgcgatagcggaccacagtccactgggccgtaacggtcccgcccacgtcccgccctccagtgggcgggaacagaatcgaccaaccaggagttcctgaggcatgcaaataagcctccgcccccagaggaaaggcgtttccccagaagctgctgctgttgcctcgggagacgcagtttggtcaaccccgctaatcagcaatcaagtccgttagccaggccggaagtggagaccccagcaccctccgtccggagcaggaagtacgaaaaggaggctcatactccccggaagccgagccctggacacgcccacctgccggaaacgccggcggtgcttctctgacagcgttgctctctgacaggattgctgcggaggtggacaggcggcggggtcagggcggaggctgaggaccaagtaggcatggcggagggcgggaccggccccgatggacgggccggcccgggacccgcaggtaacgtgcgcggctaggggtagtagggagcggggttgcgtcttggggtcagagtgtcccttgggcgtccgggactcgggtcctcggtcctcgcaggccagatccgaggaatcgcgcccggggtcagtaagtgtggacgttaggctccgcgcggccctaggcgcgcgcccccgctcctgcctggcctctcgtggacatccctcccacggaggtttctttctggtggagctagccttgtaactgccaccctgttagcccatccccgtcagcgatgaccctggctggaccatggggttcggatcttcttccaggtatgagctcactggtcagtaagggccctcagaggtcagccttcgtgcggacaggttccctttccccatcccgccagccagtcagcgcagtagctactggacaaacgtcctccgccccacctccacccaccttaacgacagtgctgtccccagagagcttgctagtgccacaactcttacaggggcgcttgacccacctgcagaaaaagggtgacacttgccacctgccttaaagctgctccactttgcagtgctgctacaatggaactaacaattcccaggagagtttcctggtacggcgtccaccttggggtctttctgaacctgctggtaggtgtttggtaggtgtgcttctgcacccatctctgattttagagttcactgagctctcttctgtatgcagaaaatctgagaaagccacaatgttggtacagtctcttgtcattcctccctccatcaattcaacaaactttgtggatgatgtcctattggcctgactcacctggggctatcggggtgacatgaaaaagcaaggcaaggcctctaccaccaagagctttggttgtcattgaatttgatctcagggacagacaagatctttgagtggattgacctgtcatgcaggaatgagaaatgggagagaggtggttggtcaaagggtagctatttcttaaggtacagaatagtcctgtggaagaaaaagtggttttgcaccccaccccgaccccagtgttgttttagtgtctgttctgtttgtgtgtttccagcttgggtagaggcacaggtcttcagtgggtagttggattagatgatcagagaagtccgaaattgaaatggctttcggctctagaactggaggagattctgaaggtctgttggcctgggctgggagtgtagaggagaggtgagctaagggggtccagagactttccgaagtcctctggtgccagccattttcctaacagttacccggtacatctgaatcctccccaactctggctttaaatttttatactgtgctgtagttacagtgatgaaaggaggacctggaagcgccttacagatccatttccaggctagatagatgcctgcctgttggtctgctgtgcaccagagtgaaccgaataggtttttgtgaaccttgtgctgccttggtctcagcccagtcaatggactttcaggccgcagagggcaaggatacttagtcgtcaccaccgtgtacctataggagaatctgtaggggctcaacggatattgtattcaaatatggaaacacatcagcgactagaaaaagcctgcctgtgaagggatatgtttggtaacatgctaggacatccccacagggtgggagacttgaatccaagcagttagaatttgtgctgtctttattcacctgttggtgcaatgcttttaataaagcttttcagtctcctggagttagtttgggctgtgatgtgagcaaagatgtatttccaagtaggtgattaattgttcaactactttccactggctgtatgtctcactctgattttatgcctgcttattacagttgagctgtttatattaagattaaagtcttcctggagaattgattctgctttttgtttttgttttctttctagtctggtgagagttttgttatctagtatggtagggttccttccacctgttattcttactaaaacagcaacaaaagctattttcccttatgtatatctacaaatacaagtttgaaatcattttggtatatctgatatcaaatttctgaagaaactggatacattatatttatagggaaccctgagaatttctctaatattgaatctcatcctagtacatgatacagtctttctattcacttctattttttttgttgtataggttggacttgtatttatgcacatatattttagttttctattttattgaggtatgattctctctctctctctctctctctctctctctctcgtgtgtgtgtgtgtgtgtgtgtgtgtgtgtgtgtatgtatgtatggagctcagaggtcaacatttagtgtttttcttactccaccttatttttgaatcaaggcttatgtatttggctaatctagctgccagcctgcccagggatccatgaccctaagcatcctccagtctctgcctctcctacccacgttggaatggtagggatgtgtaactggtcttggctttttatcttttatatggttgttggggatctgagcttcagggcttatatttgtgtggcacacactaccaaatgagccatctctccagactcttgaactgtaatttctatacaaacaaataaaggtatacctttgaggcttattccttgttatttcattttcactgatacagtaaactccctgagatagtctaactataaagaaaagagatgtgtttagttcacagtcatgaacactgtggggacagttgtactctgctgaattgtctcttatcaagacacattgtgacgattttacagagcagtgtggtatggaactcattcaccttccaggaaaacaacccttgcttggcccttggcttttggctaaccagctatttttacagtaaaggagatgactaccattctcctttcaaatgccccaatttaaacatcttcttacatacatgatataaattagagtaatttcatgctgggttttttttttttggcataatatttcaaacttcagtttgtactactgttatatttttccttgttcaacagaccatcacatttttttcttttattttttttagaaaaaaaaaatcttattgggtttggtgtcaggaatgtgctagtttaaaaagggaaactttccagctttctcttttaaattattttctgggaatttgaatgttctctgtgtggctagcaggagggagccactggagaaaggcaaagcatcctgtttggtcagccttgccagtgtttccgcaccctgataagagcccctctcttcagtgcaggtcctaatctgaaggagtggctgagggagcagttctgtgaccatccactggagcactgtgacgatacaagactccatgatgcagcctatgtaggggacctccagaccctcaggaacctactgcaagaggagagctaccggaggtgagcattgggccggtaatgggtgttggcctgtgggcctgcaggaggctgaggcttgtgctttggattgcagaacaagactctgatgctgcaggactgcaatttgcttttagaggagggacaaaaggaggaattataggtggccagatgcagtgggcaggggttcctggagccaagtctgcctggaattgttctggtaacttgtcctatgtgagcatcggtttcctcaatgttttttattttattttattttattttatttgaaacaggatcccactctgcagccttggctgtaccagaactcattatgtataccaggctgacctcaaagtcatagagatcttcctgcctctgtctcctgaatgctaggattaaagatgtgctctaccatgcctggctattttatttattttaattgtgtgtatatgaggtgtggggtgggtatcagcatgtgaatataggcaacagaggccagaagagctcttccatttgaactggggttacaggtgtggttgtgagccatctgatgtgtgtgtttggaattgaactcaggtcctctaggagggtagaacatgctcttaaccactgagctatctcttgagctagtcactatgactctttatcctgggtagttctttgtctacagccactttattgacattcattttatgttctcttcttcacatctcaggtctgtagtgatcaaccatgacttcccactgtagggatgtggtagcttccatctcctttgttttcctgtccatagcttcttgcttcttgcttgccaagtccttctggtcactgggtcccaactcttcctggatagcagagtcttgcctgtgactccctgtgcagggtgctgggagagcacccattattctcactaggtattgactgcaactgaagctggcacttctctgtacttgtgtgtttctcctttgccctgaggagtaggacacagtgaactgatggaagtgcctgtgggtctctgcaggaaagagctcccctagcctagtgtgacagttcccaagcaggagtgcagcaggagatgctcctttcttagctttctagtgacatagtagtgttccatcagagcacatgtcagtatttgataaacaaagcagagggctggagagatgactcagcccttaaagagtgcttgttgctcttgcagagaaaccagattcaactcacagcactcacatgagacactctctctgcagagtttccatgcatgcaaacaaacatgcaggcaaaacgttcatacatgaaacaaaatgaatacatctaataaagccaaatgaacatttaaatttatttaatgtgactcaagcccctaaaagccttaagcatacagatgcagcagtagatgagttcagtgtagcatatggatatagcagtagatgagttcagtgttgctcctattgtgccccgtccttctcccagccccctcctctctctctcttctctgcttgtttcctcctctcttttcccctcctctctccattttcttacttctttctctcgatttgggtttcatgtatatttgaagcccaggctgcctcccatctcctgagttctagattattacccatgctaccacactggcttctttttcctttgttctttcctttctttctattttttctttcttcctttcttttgtttgttctttgttttggtttgtattttggtttttgagacagggtttctttgtgtagccttggctattctgggactagctctgaagaccaggctgacctcaaacagagatccacctacctctgcctctttagtgctaggattaaaggcgtgtaccaccactgcctggctgctccttttttcttaaacttgaggtttatgaacccgcctttatattttctactgctgatcatttctctggtggttctggactttattggctcctatcagcccatgtgtggctggaggagggacatcaggtgcatgttcttaggtctgcctcagtgcagaagctgaggtaagaactccttggttgctgacagatagttatgtagtggtcatactgcctgagagctgaatctggacagtttcaccacttctggctaagaatgcagcctctgtaaccttactgatctcctaggctctcaggtgttctgtaggaggacatagattactattactagtcatctttaccaggagaggatgccagccttggacgtttataggtagtcactagtaaaagagcatgcgtgacgctgcctgtcctggcacgtgtccccgatggacctgtatgtggtttgtagagtctggaatctcagagctagaaatctcagtgttagtgctgattattctgtcaaagcctctgaatgcctgtcctctctgttcagcagggacatttgtgaacatttcaggacacagaacataaatggctggaactgtagctcaggggtagagtatttagcatgtacaagatcctgggtttgaccctcagcaccaggagatggaacacagaacccagtgagggtgttctaaacctcagggttagtctttctcgggagcccctgctggagagaggagggagaagagcagtgtgcctggggtgactctcacaagctccccgtgttcccatgcagccgcatcaatgagaagtctgtctggtgctgcggctggcttccctgcacaccactgaggatcgcagccactgcaggccatgggaactgtgtggacttcctcatacgcaaaggggccgaggtggacctggtggatgtcaaggggcagactgccctgtatgtggctgtagtgaacgggcacttggagagcactgagatccttttggaagctggtgctgatcccaacggcagccggcaccaccgcagcactcctgtgtaccatgcctctcgtgtgggtagggacgacatcctgaaggctcttatcaggtcagtactgtacctgcatttcctggtatttaggcttcttagaggccttggaaggctgccttatgagtgctcttcgtgcttttagacccagtgatgccttaggctgactgttagttttctttttcttcttttctttttttaaagatttgtttattatatgtaagtacactgtagctgtttcagaagagggtatcagatctcattacagatggttgtgagccaccatgtggttgctgggaattgaactcaggacctctggaagagcagtcagtgctcttaaccgctgagccatctctccagcccaactgttagttttctttttgacttgggtgcttgcttatttgtttcttaacagtgcaaactttccatgtcatctgccttcatgtagagcttaggccatatcctctaaagttccttattctttaaatattttaaaaaattgtgtgtgcgtgcatgctcatatacgcatgcatattccggagcatgcctgtggaggtcaggacctgtgggagttggctttctctttccactctgtgggttccagggcttagcagcaggatcctttgtctctatggaaatgttcttagtaggatcagttaatgaaattcagtttggttcagaaatcctgagggcattcagttaatgcatcgagccttctctggagcgcagggcactatgacaggaaagcacatgagcatgtattattttatttaaaaattctctgtgttctaaactctatgatgattgacctttagaaaatggcagcttgctgggtgtggtgatgaacacctttaccagctctatggaggtagggggaggtgcagctcagctctatgggtttgaagccagactggtctgctagcaagttctaggccagtcagggtacgtagtgagactggctaaaaagaagaaaaaagcccaaaacaaaagaaggaaaacgggaatgataactgttaaatttcttcaggggtaatatctaaatatgacccaaacctgcccgccaacccacccgtttgcctgcctgcctgcctgcctggctcatagttcttgtaggtttgcctttcatctttcattatagcaatttcctggcccctaatagggaacctccccttgttgtttgtaaggtcccctgctctatattgctgatgttttaggatggaaagtaagaggtgatgtttctgtgcatcagtgtcatatcgatttgttgagctatttaggttccttgtagagataataaaagcaacagagaaatttagaaaatattcatgattaaaatgaactagatcccatctaggatagctttgtgagtttcaagggctatcttccctacagctcagttggtatcagattgtcatactgtttaagattataaacaatttggaagacatgtctccaatgaggatggaatgaataatgtatgtgaaatggacttttcctgttgttagttaaaagtgtagcaagtaaagtggaactctggttttctgcttgtagaactgagtctcggagggaggggagatgccaatgaaggacattggctgtcttatttagggttttactgctatgaacagacaccatgaccaaggcaactcttataaggacaacattaattgaggctgacttacaggtttagaggttcagtccattgtcatcaaggtgggaacatggcagcatccaggcaggcatggtgcaggaggatctgagagttctacatctttatctgaaggctgctagcagaatactggcttctaggtagctaggatgagggtcttaaagcccacacccccagtgacacacctactccaacaaggccaagcctacttcaacagggccacactttctaatagtgccactccctaggttaagaataaacaaactatcacagtggctttgtgtgtcctcaggcctatgctgccccaaagaaacactttagattacaagttcctctggacacctgaagtgctagagatgggctatgaaacaggactgatggctgagactgttgctatctgttgtctaggcagggaaatggcatttgtccatcctctctggtccctgaagattaggtccccacatgttgaatgccctcatcattgcttcctgtgtgctgtcacttcgtgtttcaggttaaatactcaggtaatgacacagtttgtgagccttcagaactacctggagccagagaaggcttaagtacacaggtggcagatgactgagcgggagaggacatgggtgtggatgtcagaggacagctcacagtagttggttctctccttccagtgtgtggctaccagggattgaacttagactgccagtctcaatgacaaagaccttaacccactgaatcatttcaccagccccagacggcagatttgacctaaataattgcatctagtttccatatggttttatatttatttgtaaattccgatctatttgggatttatcttggtgtgcactgtgttgaatggactttatttttccccatatggatttccagttatcccgaggggaaaaaagtatcagaaagttcaagaccacccccctcccttgcttaagatagtccctttctgtatatactgactttctgcttggagttgggtctgttgaaagatgttttgtgagtttacatgggtctgctggtctattcacatgctggtgttgttttatagatctttataacaagcccttgctgtggtggggctgtctcctctgtgttgttgcttggctttttgatctggtttgatcttccaaatgaactttagaacctacatatatagttccaggggtattacctaattgtagttagcttcagtagttcaggaacagaattttcattcataaaatcatcttagggaaggaaaatcaatgacatgctgagccttttctagtacttaatgtgtctgtctgctttctcagttcttttgaacttagttgttatgtttatgctgatatacaactgttgctttcctgcttcatctctcacctgggcttttgaatatatccatatgtatatatgaaggctatcgtttcagtctgctattttagtaattatcctattgcttgctgtttattcattcctcgcaggcttttttaggttttgtaagcctttcctctgagtatagaaagtggtttattcttacttcccagtcctgcttatctgactgctgtccttgtcctttgccagctacactcctcgtgtactacagaagccagcatgtggaggggtctgtgtcttctccccttgcagcagggacatccctagttcttccttgtgaaatatgatggttctacctggagaagtgtgctttaccattttaaggaaatagctgtcactttctgtttcatagaaaattttaaagcaggcataattgtttatagtggactttatgggacccaccagtggtataaatcatggttattagagtttaaagcttaggcctctagcttggacactctcccggctgttttgcccccgacccaccatgtggtgagttctctacctttctctgctcctttctggtccatctgttttcctctgtgtccctctctgaatcccctcctctccacattttctctgtctagaacttctgccctctacttcctgcccagctattgtctgtcagatttttattataaccaatcagcagtgatacaatctctgatactattctagattgcctctaggcatagagagctttctgatcttgaagtatctgagcaggttgccagtgatgggccataaaaatgacaatatcagtatcctgctagcattttgctctctgggagggtgcagaattaacaattgaaaatacaaagatacctttatacagtgtaaacaacaactgttggctcttgtccttttttcataattagtggtaatcagaattttcccattagatacattaatacaatatgttaatagaatttctaatattggaattagttttaaattcttagagtaatactcagtttttttctatactgcttttcaaatatatgttcaatttttctttgtaataatttttttgcttattgaagatttttgttttgtttttgtttttgtttttttgagacaggatttctctgtgtagcactggctgtcctggaattcactctgtagaccgggttgggctcgaactcagggattcatctgtctttacctcttaagtgctgcaattaaaggcatgtgccaccacgcctagcacttactgaacaatttgaagttgaattgagttattgtattagtttcatagtgaatgtgaaagtgttttttcacttaactctgaagcagtatagtctaagagttattttattgccaaagttctgaaagatttccctttggaatttgtgtatatgaatggattccatgtttttacttgttaccttcttttactggaagtactgatactttagtatcatcctgggtatctctgggagatttgttccctattctacctgataccaaactctgagatctttaagtctcttacatgcaaaagtatagcttctgtgtgtagtcttggcacaaggacaacttaaaatacaagtctactctaagtgctgtgtaactgctgtaatctttatctaggtaggaaggataagaaagggactggaggtgttcattataggctgtttttaacctgtattccccaaatgctgagtctttggatacagtaactgcagatagagagggctggttgtgtttgtgacctgtggagtctccagagactcctgcgtgactctgtagtgcgtctttcatggtagctggatagtctttgatatctgtgtttgccttattataacttattcttctcttcttgtaggtatggggcagatgttgatgtcaaccatcatctgactcctgacacccggccccctttttcacggcggctaacctccttggtggtctgtcctctatacatcagtgctgcctaccataaccttcagtgcttcaggctgctcttgcaggctggggcaaatcctgacttcaattgcaatggccctgtcaacacccaggagttctacaggggatcccctgggtgtgtcatggatgctgtcctgcgccatggctgtgaagcagccttcgtgagtctgttggtagagtttggagccaacctgaacctggtgaagtgggaatccctgggcccagaggcaagaggcagaagaaagatggatcctgaggccttgcaggtctttaaagaggccagaagtaagtggcctgagctcagctctgtgttgtggtctggggtggactgagccagtgagatgtagtacaaattaaaacaagggcaaaacaggcccctcgagacggctcagctattagagctgctctttcagaggccttgttcccagaggctcacagctgtctgcaactccaactctaggaggtcctcctctggcttctgcaggcactacatacagacatgcatgtgtgtaaaacacctgaacatattgaaaaaaaaaaaagtgaatcttaaataacaaaacaacacaccccaccccaaaatcatttccagctaagcacttaattaaagccctcaggaccagcagttctccagagtggtcattgagtgagagtgtatgtgtttctctgtgtgggtgtgtgtgggtgtgagtgggtgtgagtacactgttcaccttaattttgagacagggtttctcactaacctgggagttgccaagtagacttagctggctggcaggaccctgggatctgctacgcctctttcctcagtgcagggattgtagtgtgtgctacactctggctttcttcgggagggtgaggccttttgcttgcatggcacacactttactgactaaattccttccctatccccagatggttatttagcaattcctaaataccaaaagctgataccaaaaatctatacaagtagacatatgctttcaaagttcttagagttatattctccacctttttgctcttcttagaatggtttctttgtaatgttttaccttttttttggagacagcatttcttgtgtacccctgactatcatggacgtcactctgtagaccaggctggcactgaactcagaaatccacctgcctctgcctcccaagaactgggattaaaggtgtgcaccaccatcacctagattcttttatttttcattttttcttaatttgatttttaggtcattgtatcaagtgatgggattcatcatggcatttaaaaatattttaatatgttttatttaaacgtatatgagggaagcatgcacatgccatagcatgactgtagaagtcagaggatagcgtgcagcagtcagttctttctgccacatggttccatgggttggctcaggtgatgaagcatggcagcagcacacttaccctctgagctgtcacgttggcccatcacgggatcttcattcatgggtcctatgttctgccttcctcatctctgtcttctctgcccagcttagcccctgccttcctctcatgtgcattttaacaaacagagctacaagctcattttctagagttcttttcttcattttaaaaaattccattcgggctggtgagatggctcagtgggtaagagcacccgactgttcttccgaaggtccggagttcaaatcccagcaaccacatggtggctcacaaccatccgtaatgagatctgactccctcttctggagtgtctgaagacagctacaatgtacttccatataataaataaataaatctttaaaaaaaaattccattcaaatatcaaagggtagagttatgtgataaatctagtttttgtcaaaatgaaatatggagcttgtttgcatgggaggattttgttaaggaattaataagtcagtggcgacagagtttggagtttacctgtgcttggatttgctgtcagccatgtctcacaggcagagattaacctgtgtgtctgtctgattgcctgcctgatgcctacccctcacttctcccatcttgtcagaggacatatgagttgatagtttgtcgttggtcctctatttctcaaagaacattagtagcagtgtgtttttgttagctatactcaagccaggtctcagaaacatgttcctgtttagcttttctccaaggtgctggctgatggcctccgggtgggaaccaggaacagaaggaagcttcttctggtcaccttcccttcctgaagcaggggtttagctgtgtagtttccatcgaggcaggaagaccggcagcctaatctctgagttcaagtactgtgcacttggtgtccccaggcctctgtgacctgctgggacagagcaagagcgaaggtcatttgttctcatctgtgggtcctccatgggtggcctttttccagggcactaagcattgcagagggaggagtggctgacagatgagcagatgccctggctaagatgcagatagcaagccttctagtagctcccagagcctcctcgactcagatgaggaaggttggctttgggccttccgagttacgagagaagtaacctttccctcctctttctcctcacactccccaggtattcccaggaccttgctgagtttgtgccgggtggctgtgagaagagctcttggcaaataccgactgcatctggttccctcgctgccgctgccagaccccataaagaagtttttgctttatgagtagcattcacatgcagtgctgactgcaatgtggaagccgatcacctgcagtgaaaactgacacagactctggcatcctgggaaccatggcctgtgctgccagcttgatccttggctgtcagtgaagaagaaacggctgtgttctcttggactgtgattctatctcaggtgcttgggccatcgaacgctccttgagtcattgtcaactgagaggcacatacaaacttaattttgttcctcttcagtctctctgttttggattcttcctggcaatgtgtgcagcatgggctgagcctggtgattgccctagtggggaaggcttttttctccaggctatgcatctatttatgttcctactttgcaatttattgttcttttaaggcttgatatcaaaacagaaagaggtttgttaagaaaagatatagggagaaggaattcggttcgtgcacttgctagcctgctttcttgcctgggtttgtctgtctatgctgcctggtgcacatcccttctctttgctgccactgttctattttgggagttgtcttccgtctaagatggcttctggggttctatcttattgcacagaggtcccagaacagtgttcatagggcaccatctgctctgccaagggttttctgatgtcttaccctggggatcttcagacagtggttacctttaggagacccacctggaactaaccattaagtgactgcccacattcagatcagggaccatcttaatagtactcactgccagtcctcacaagagaagatgacacgggtgctctcttcagacactcccatacaggaagtggaaaatgtcttggtcacctgggtggttccaggctacaacttcttggtgtccactagacaggatatctaggtgttgggtgactgttcctcccactttctgacccaatgcctttgtgggtgcttctagaggtctttccctgtcctgcccagggctgttggtgggtgagagagatgagcttattgcaggattgcaggtttgtttaactcttgagtggtgagtgtcacagcaggtgggcccataaccacggccttgagcatccttaggttgctcctgtttcagtgaagtcaccttttgtcattctgaagcctgttaggattactgtgtggaccttgctgattatagacttgagaatatttgggacaagcaggtaataaatctgtttagacttttggccataaaggggatttaacttgttaatactttcctagtgtaccattttgtgttttagctgaccagtcaggcagttggtagccttgggattctgtggatggagttccaaaccccaccccagtgcctcaggaaggcccaaggcagcaacaccaagctggtccaaatgtactacatgagttttgatgagccttgcccagtcctggacagtgagtcctgtgtctggggcaggaatgagctggccagagcctgtccctgtctccccacagctgttctgtgtggccccagcacagctcttcacttggacttgagtagctttccctgtctcaaaccagttttcagaacctttcaatcacttcaaggttctgcatgttcagaatttccagccggtaactctgaatgtgacacagcatcggcatggactgagggcacttccccttgtcgccagtatgctatgaaggcactgcatgtcattgctgtcaaggatgaggtacggggtaagaagcaccccaggttcatgagaggtaccataggaagttgatgtgacttcggtgaggactgaccctctactcagcagacttctgagctctggttacctgtgtccttcctagcatggggatgtgggtgtctgatgaacctactgccttctggctgaactggccctagcagaagagcttagtggtccagaggaaggagcctgagggttgtcccagctcatcaaaggggtatttgtggggttgttgctgttactggggcagccacttgatttaagtgaagacttgtgtagtggaatcttggctaggcaggttggaaccagtgatgatccctcagaatttatcttttcagtattgggcttttagacatatgtccagaaacctgccaaggcaatgccatacattttgtagctattttacttgtgatgtctatctgtctgtctgtctgtctgtctatctatctatctattaatctattatctacttatcatctatgtatttatgtatttatttgtttatatatttttgtatttatttatttattcatattctttttccataagaggacttaagctggagagtcttattttgttttgacagtagattggtaaagtagataattggcatttttcaaatattgaccagtactgatgtcaggcttaaggaccattatttcagagtttccccttttcactttcatgaatgaatttttagataaaaatttcctgaaagataaagtcctgactgtgggccagagcggagggaagttcttcatgcctgagagctgctctggcctgtgctcagccagttcctggagcagtgtctgctctgcagcagacaggaagagctcttcctgtgcctttccagggaccctgctgaggtcctgtgaagtgccgaggctgcagacactttgtttgggaggggtctctgtcctgagaaaactgcttcctagtggaagtgcacttacggtggtcacagtgctgagagcccacagtctggatttgggattgaccttgtggggcggttggatcatcttgacccacagtgcagcaccaacagagagccattcgagcaaaagggtaagggtggcttgtagtacttgaggaaatcaaatttcctcagctgactggactgccttttattcttcagtcatgtcattcctgacaacagaaggcttgctggaaagggatggtatggggctatggctttgcatgtaaaacacttttgattgggatccacagcagtgttcttttcacctctgcctgctgctgtcctggcacagtctgattgtagtggatgctacatattaatgaggaagttttagatcctaagtagcattcctggtggtgaaaggcattgtggctttcccatggcctggggtctaagtgtaagctggaggaccactgtgcgcgacctgaggagtctagacatgcttttgaagcgcctctaccaccccagatccatgaggtcaccacagaaagtgtggcctttttggtaagacttgcttgtccttcactcaggccttgggaaccagtggcacctaggatgctggtgatgatgtcaccagtggtggtctgctggtacctgtgtctccttggtgcctgcacaccgggcacttggagactaatcctgccctgcagggatcagatgactttccatccgcacagagattcctggaagtgcctcttgacttgggagcttctttctttcccttgctcattttcacctcgttgctctccttcccagagttccttggtgtgcaataaagtagtaggtataactggttagggactcttagtcatctcaggaaagtcccacagatgggtacatgcaagctttgaagtgggcagtgatctgtggaatttactatacactccagcctgacataggacaatggagtgaggagaatgcggggaactgccgtagccttaacagacacccaatacccagtgtcaatgatgcatggggatccaaccagatcctgtgcatgtaagacaagcactcgaccactgagctgtatcttctgcctctttatgtcttaggtaaatgaagcaatggaagggtttttgtaaatctcacttgagattgccatttatgaacctaattgtcttggacatgcaatgtcagtgccctgttctctcctgcagtgtctgcatggcgtccactacttctgttggtgttgggcgtgtgtagtgtcccgtgcactggggcctgtgtgcttgtgctgaagtcgtgctcactgcagccctctagttcctgtttgaggatgaatgagtgcttgtttgcagtgccctggactgacttgcttttgcccttgtgcctagttaagagatttcaaaaggtcaatgactttttttatacattgttataataaatgctttattgccctctgatttccttcccacatgccttaattttgtggcccgtgtctcactgaatagaagcttcctctgtgtacagtctcttatttacattagttcatcattcattcattcattcattcattcattcattcatgtgtgatgtgtgtgtcatcttgtatctgcgctcacatataagctatggtgtggatgtggagatcaaaggacagtgtttgggagttggttctcccaagagccgagcctcttatagcctccccgtgcagctgtgtgcacagttcaagtgggaggggctggctcctggatagcttcctatggctggagagaaggttctaaagcaggagtctgtagctgttcagtggatcttggggttgcagggagaaatctagtcttttgcccaggattaaactatttagtgttgcttggttcactttgtggctctggttccagaactgaagagagttccttctcacagccttccttcagtaacattgcacagcattctgtggtgtggggacatgagggacactgccatttgtgccccatgtgatatgtgacttattttgccagttgaaggtaaaatctggcaatttgggataagcgtggagtgactgaactgaataaaagttatttcttcatcttgagtgtctggctctctagctctgtgctctgtctcgtctgcttccgaggttgcttccattccttacccagggtgtattacgaaaggaaaataggtgttctcagccccttccatcacttgtgtggcagaggctgcctgtccatcactctccatccgtctccatctgccatgcagaactctcatgcatccatgaagaccttggtctccacaggtgtgcaccattgtgtctggtctcataatggtactctgtgagtttggaggctggacactttggtttcaccaaggaaagttgcagaattcagtcacttgtgtgactcagtgtgactgtttaccattgttcctccctcatccttttgacacgacagagcctcccagagaacagatgagtgataactcagaacaacctgagaagacaatactgtcagccaacaagggaacagagaagctgagctcctggtctgggatggaaggttctggtgcctctgagaccagcaggactggctaccacactctaggcagtcgaactccctttggccccatgggagacaacattgagcctttagtctgcacaactttctgcagaaagtgcagccaccagaaacttttctgaaaatccacatcagctccaaagggaagactggtagatagcaacacagtgtgtggatccacttccgctccaaaggaaagactggtagttagcaatgcagtgtgtggccaaagagacgatcaaacatgtcctccagaggattctgaagaggctcctgagaacttgagcttcagtgtccagatcaccagggaaagcttgtactaatgtcagaggtcactgggatttcggaactgccgggagggggggcggcggggggcgggggagggggggggaagcannnnnnnnnnnnnnnnnnnnggggggggaagcagtgtcctgataaaacactggtgaaggttcccaatggcactctaggatggggacctaatttctgaagggaattatttccagatcaattaaaagtcactctgaaagacttatgaactctaaaggtttaggaaattacttgaggatatacttcaaaatgagggaagaagccaagaggggagggggcttatggtggaaattgaggttccaacataaagaggtaagggactaggcgtgggatgtttgtcaagtcttcagatcaaacactgaacaccaccagttactgatggacacctggcaaaagatttgtagacaagctgggctcaaagtactgataaatataatgaatgaaaactagttgagcaaggaaaagttagcacaataaaaaccatcatatgtcaggtgtgacgagtgtgtgacgagtgttcctgataagaggatgcttgtaaatagagtggcactaccaagtctagccatgtcagaatggaggcagtactctctggatattactgagccctccatggggaagccagctgagtccccccctcccccccactccctaggaggtgagcccccactgggttgcaggatggtagtagagccactgggatggcctgaggaagccaggcaagtcagagccaggaaaggaaggcactacctcatccagtgttactctggtgacccatgcctgtgggcagagcctaaccttgctgtagcaggcaagggaagcatccagaactgcagcaggacaaggcaaggtgaagttaacgctgtgtgctggcagttggtgcaagaaagctcgtgttaagccaatgcatccccaatgcttaacatacagcaaagacaggagaaaagaacctcacactggcccacctcacagagaagcacagtggttagtagtatgcgaaacataatacatttggctcacggtccacatataggtgccagttggctctccaccaagaaagcttgttcttccttcatggcacactctctgagctatgtccctgatcaccaggaatgttgcttggagactggtgctgagccagggtttccaagttagtccagggcttcaaacgccacatttggaggctatggccgcatcctctgcccctttcctgcctttagttgcagatgatgaacaccccatgaggtgatggagttggagatgaaagcatatggttcaggagagctcctgtacagctaggggtcttgtcttggccagttacatgaaccatatccacactccccagtgttgagctagcatttatgttcttgtggaccttacactgagatctacttcttgttccattcaccactgtgtccttcccttttccatggactgggtcccagggttggggaacactcttaaagatgcatttacctccagagaccatctcagagtccatccctctgggaagtcacctgcattgggtttgaagcctgtactttcgaggctcccagtgggagcgtgtctttgattcacaatgttatttccattcttctagcagctgctgagattctcccagcttgctttccccagcgttttctctctcagaccccaataaaatagccctcgagttaaaacaaaagttcataacctctagatacttctgctagggccttggacctgcaggctagctgctaagaagcaccggtgactgacctcaactctatctctgagccccgagctccactgtggcatggtttggagtctgttctgaggctgcactgctaggctccagttctgacttggccactcacaaggaggatctgtgggatgctcaactgcaaagtggagtgcaaacctgcctatcccaaggggctagttaagaaaattgggtggggttggggagggcagatgtggcagctgatgccagtaatccacttgtgggatggaagcaggaggatacctctaggctagcctgggctatattggaagaccctgcagaaaaagaaagtggggggagggagcggcatctatatggaaggaaagtaggtgagcagcgtgtgcctgatgtcaccttccaccatatgcctggttatctgagactggtgctgagccagggcttccaagctagctttgggaccagggcttcaaacaccatggtgggaacttggaagagcaatggtatacctgagcttgtctctgtatctacaagctaggccttaagggtgatgtctggccatccctctggatccatgggggattgagttcaagagccccaaactgggaaacgaacccccagggtgttcaagtgttgatataaaaagggtgttttttatttttgtttatttttaaactctaaagacagggtcttactctataatcctggtagaccaggctggcctcaaacttacggcatttttactgcctcagcctccttcatgctgagatcacaggcatgcactatcttgcctagctaagaaggtggtaatatttgcatgtaacttacatacctccatgatctttaaaatcacagattagttacaatacctaaatacctaatgtgatacaaacggtcccactgttgtcagactctgttgtctagggagaaatgacaagaaaaacgcttcttacctgtttaacacagataacgttttattttctgagtacttttgatccatggttggttgaatctctgaatacagcacacatggacatgagctgccaactgctgccccttgtggtgtgtgtgggcagaatgacaacaacgcaggtccagtgttcagcagaatgtgtggcccatgattaaagtatccaggatgcttgtgtaacaccaatggtggatgtgcccttcactgagtggtgttccttggcacaacaaagtggcataatgaacacagtggtgctgtgtatctgttggcaagtcccctgttctgtgtggtgatggcatgaaggactcactgtcatgtgacatgatcagggtggatgcccaagggacttgggagcacttggtacttcctgatgagattggcagggatccaggcctgacagaatgaagctctcagtgactaaactgtcccttcccattctgctcttggtttcccatagaaagctgcagtgcacatatgagccctgaacagttagacagacctccagtcttccacaggcctgtgtttgctctctgaattccagactgttgaaagggttatctgatccccatattctgatgtcaggccagcagttcctcttcacctcttcttttggaactacaaaccaaacatccctgatgtgaaaatccaacatccaaatgctcccacgcctggaactctttgcatatcgacacaatgctacaaatccagatttcccatgtcataaaagtctgtatatcgcctaacattactgttagattatgtacatatataacgtatttgtgggatataaaggaattttacatttagactttgattccatttccaagataccttattgtttctatgtaagtatttccaaaacagaaagaaaacttcaaagtctgcagcatttctggctccaagcactttggataagagatcctgaatcccatcgctctgccttgagaataaggaccatctcctcctgttggcagtttctgccttatctgactcctcgcagcgcagccggcaggcacaagcttcagaggcagaggctgaaccctgccttccctttagactgagcactggagtagcacattggtggtggtggtgatggttgagacagtgaccagccctagtttgaggttttgtttggccctaggtggccaggatataccctgccctctggtgtctggactcagtaatggtcttgagcagaagaggaagccattctttgggacttttgtaggctaaagtagcctagcagctggtgtcccctatagaagccagcacctgtaataaggaagaggtaactcattcacttcctgagcttccttgcccacccctacagagccagtttactgcagatgcttcataaatgctggctggctggtcaaatgaatgaatgaacgaacgaatgaatgagtgaataatatgctttgacaatagtgaattcattttgaaggttgaatttgatttttggaggaccacctgctgaggccctggggtgcgggtatcttaccctgggccttggaggctccctgaggtgcccttctctctcccagaccctggatcttaggtctggcttcacacccagcagcctgagaggggcctcttggaaaatgtgcattcgtgcttttgaaatcccaagcgggctgtgcatgctgcttcggaaggagtgactgtggttccgagccaagttgtggtgagcagtgcactctgagctcccttcaagggaccctggggtcagctgggaggggtcttactccacccaagagctcgaatttcagggcttgtg

SEQ ID NO: 1024 - DNA, 983 bp, Mus musculus
atggggttcggatcttcttccagtgcaggtcctaatctgaaggagtggctgagggagcagttctgtgaccatccactggagcactgtgacgatacaagactccatgatgcagcctatgtaggggacctccagaccctcaggaacctactgcaagaggagagctaccggagccgcatcaatgagaagtctgtctggtgctgcggctggcttccctgcacaccactgaggatcgcagccactgcaggccatgggaactgtgtggacttcctcatacgcaaaggggccgaggtggacctggtggatgtcaaggggcagactgccctgtatgtggctgtagtgaacgggcacttggagagcactgagatccttttggaagctggtgctgatcccaacggcagccggcaccaccgcagcactcctgtgtaccatgcctctcgtgtgggtagggacgacatcctgaaggctcttatcaggtatggggcagatgttgatgtcaaccatcatctgactcctgacacccggccccctttttcacggcggctaacctccttggtggtctgtcctctatacatcagtgctgcctaccataaccttcagtgcttcaggctgctcttgcaggctggggcaaatcctgacttcaattgcaatggccctgtcaacacccaggagttctacaggggatcccctgggtgtgtcatggatgctgtcctgcgccatggctgtgaagcagccttcgtgagtctgttggtagagtttggagccaacctgaacctggtgaagtgggaatccctgggcccagaggcaagaggcagaagaaagatggatcctgaggccttgcaggtctttaaagaggccagaagtattcccaggaccttgctgagtttgtgccgggtggctgtgagaagagctcttggcaaataccgactgcatctggttccctcgctgccgctgccagaccccataaagaagtttttgctttatga

SEQ ID NO: 1025 - protein, 324 aa, Mus musculus
  VARIANT (1)...(324): Xaa = Any Amino Acid
MGFGSSSSAGPNLKEWLREQFCDHPLEHCDDTRLHDAAYVGDLQTLRNLLQEESYRSRINEKSVWCCGWLPCTPLRIAATAGHGNCVDFLIRKGAEVDLVDVKGQTALYVAVVNGHLESTEILLEAGADPNGSRHHRSTPVYHASRVGRDDILKALIRYGADVDVNHHLTPDWPFSRRLTSLVVCPLYISAAYHNLQCFRLLLQAGANPDFNCNGPVNTQEFYRGSPGCVMDAVLRHGCEAAFVSLLVEFGANLNLVKWESLGPERRRKMDPEALQVFKEARSIPRTLLSLCRVAVRRALGKYRLHLVPSLPLPDPIKKFLLYX

SEQ ID NO: 1026 - DNA, 51077 bp, Homo sapiens
ccgtggacttatccaagactggtagcttggcttttgggctttaaactgtctttggtttgaaggtggggtttcactagggacctgcccccagtctgcctaagaatttgtctacctccttctgctatcacttccctgataaagcttattccttaatctatcctgtgttttgttgggaaatcatctaagatctgcttcctggcaggtggtgaccaccaagagacccatcttttagacagtgccttttagtgataaactttgtctattttgtcatcatacctgaaaggtagtttccctgggtgtagaattctaggatgacaattgatctcttaaagcacattgaagatgtcattctagtgcattctggcatccactgatgctgttgagaagtcggctttcagttacatttgtttcctatgtggtctctctttctctggctgctttttaaatctttttccttggtgtcctgcagcctcaggacttcaacatgcattgaagtgtgcttctatttaaatcttgctagggatttactgagatacctggatttctaactctggaaaaatttcattcctatctcctttaatattgcttcctctcttctctgttgattcccttcttgaactccagagtagatgctccttagaccctcctaccccagccaccatgtccttcacttcttgtctatatttttctatctctgtctcttggtcctatagttgggatgattttttaaaattttttagatttcatttattttttagagatggggtctcactctgtcacccaggccagacagagtacaatagtgggaccatagctcactgcagcctcaacctcctgggctcaagtgatcctccctcctcaatctcctgagtagctaggactacaggcacatgccaccatgcctggctagttttttttttttctttttgtagagatggggtctcattctgcttcccaggctggtcttgaactcttggcctcaagcgatcctcccacctcagcctcttgagtctctgggattacaggtatgagccaccttgcctggctaggatgatttcttgagcaccgtctttaagtccacaaccaattgcctctttagacatatctaatatacttttcactgcaaccgtttagtatgtttttttcgaccactgtgtttttaatttcattttagaagttctgtttaatttttttttcaaatatactggttctttctgtgaagtctcttggcccttgttcacattttctttttttttttttatgatcttgttgcatgccaacttcgttcacattttcaggcttctctttactacttaaacattaaagttgaaattgacaccttccccaactgggcactccctgcgcccttctcctgcgtgtgtctccccagcctggcactccctacacccttctcctgtgtgtgtctccccagcctggcactccccgcgcccttctcctgtgtgtgtctccccagcctggcactccccgcgcccttctcctgtgtgtgtctccccagcctggcactccccgcgcccgtctcctgtgtgtgtctccccagcctggcactccccgcgcccttctcctgtgtgtgtctccccagcctggcactccccgtgcccttctcctgtgtgtgtctccccagcctggcactccccgcgcccttctcctgtgtgtgtctccccagcctggcactccccgcgcccttctcctgtgtgtgtctccccagcctggcactccccgcgcccttctcctgtgtgtgtctccccagcctggcactccctgcgcccttctcctgtgtgtgtctccccagcctggcactccctgcgcccttctcctgtgtgtgtctccccagcctggcactccctgcgcccttctcctgtgtgtgtctccccagcctggcactccctgcgcccttctcctgtgttgtctccccagcctggcactccctgtgcctttctcctgtgtgtgtctccagggcacaggtgtgtcaactccatggcagccgggacttttgtctgtttatctcacttttgtgtccacttccttgaacagggctcagtaagccagcactggttggatagacagtagcttcatattcggtgtctcatcagtgtttgaagcctgtggaggacccttttgctgactctccttctgtgtgcactttgctatttctgccccaatgagaggttatttttcttggaacttgatctgtgggaattctttgaggcccaggctgaagtagtctctagaaaggaactatatttgcttctgccagttgcttggggcactatcaacctagaactgctgtcacttagcttctttgcttgagagttttcagaacactaaagtgtgaatttcggtgggatttttgatctaaacttcatgtgaggcccaggcctgggctaaggttgagatgagcaggcttttctgctgagccagtattttagttcttgttacttctatctccacctcctcctcaatgttatctttaaaattttttttaattgtgataaaatacatgcaatatataatttaccatcttaaccacattgaagtgtatatttcagtagtgtcaagtgtgttcacattgttgggcaactgatctctagaatgttttcattgtaaaaatggaaactatacccattaaacactagctccccatttcccctcccccaacccctggctgaattgccattctttctgtttatgaatttgactactctagatacctcatgagtgaaataatatagcatctgcccttttgtgtctggattattttgcatagcatagatgtcttcaggattcacccacattgtagcatgtaacaggatttccttcctttggaagcctgaagaatattctgttttatggacataccacattttgttgatccattcatccactcatggatgcttgggttgcttccaccttttggctgttgtgaataatgctgctataaatagatatgggtgtacaaatgtctacgtccctgctttcagttcttttggatatactcagaagtggaattgctggatcacgtggtaattctgtttaattttttgaggaaccaccataccattttccatagtgcctataccattttaagttcccaccaatagtgcacaagggttccaatttctccatatctttgccaacacttgttattttctatttttttcttaaatagtagccatcctaatggatgcaaaatgctattgcattatggttttgatttatatgtccataaagattaaagatgttgagtatctttccaaatgcttattggtattggtgtatcttctttggacaaatgtctgttcaagtcttctgcctatttttttctcttttggtagggtcagggtcttgctgggatgcccaggctggttgcaaactcctgagctcaagcaattctctccccttggcctcccaaaacactgggattaccggcatgagccattgtgtccagccattttgcctgtgttttaaatgaggttatttgtggattttttgttgttgttcttattctcgttactttttacactgagggtgggactctatgggtgccagttctatgcaagcatttcgtatgagactcctgctctaaattggtttctgcaccctatgcagtcatccaggtagaagttcaagctctcagcacacagtttgagatgagtgctggctcagacccactaagctgtcagggtttctgccttctctttgcttctggccgctatggcagcctgaggatgcctctaacaagatgcgttttacattttctccagcattttagctgtttgtatcaggagggccgtcaggcatctaatcgcccacacgatagaaaccgtagctcccggacactgattttcttaccacgtcttgacttttctctctgccatcagaagtatttgcttgtgtctgagagagcccgaggattccgtataggtaaatgcatcattagggtcatgacagaaaggagagcggggagtaaatgtgtgtctacaccatgattttgtaattttatatgcctgtgaataaggacatgaagtttacgtagagaaaggaaaagaggtcatttcttagactggtgtattggggacagcttactctccttttaaaaatgcactcctcccttcatcagccacgcagtcagtcagtcagttgagagtgagtccttggctccagccctgtcctggaagcaggagacccagagactgaagagattagaaagcgcccggtcctgagtccctgtgcttgtgatgctggttatgtacacagtgagcagtggcctgcaaacgaagttaggtgatgcagtaatggtatgcgggttaaacactttaacattggaagggcaacctaagaaaacaatcccagcagtttgggagagaacgcctagttctcaaacagatgttttcgagggacaacaggaaccactggaaaagagtttgaagttgtgactttccttagagtggtgaaaacaggattccattttcaaaaatgtccttttcacaccactaagaaatgccagccacagaggggatctcagctgggggagggggcagaagtgtgtagggtttagagaaaagcccagccccctttgggcttccaagagcaattcagaattcctatgtggaaaaggggagaggggcaagttcccagagagacgaagggcagagcagcctggagacttcctctctgctgggacaccgcctgctccggctgtcggcagccttcttcaggtcccctgtctttgtaaaaagtgctgctcaaagctgggacttaaactaaacagatttcctagaggaaacacacacacaccatcacactctgctaacgttgcttttatggacatttccctgagaaatatttctctctggaaaaataaattcacaggatgtaattaaaaccatgatgtgtgtatgttggccaggactcttcttaattgcttcaccaaatgggccaccaaataaagcaatgaaggccggctttgttcacgtcgattaacaatgctatttattaattgtaacacagggcattctcttggtactttatggtttcagaaacagccttgcggttggcccttgcccaaggcagcctcagttgtgaccccagtgtgacctctgcagggagacaccgcgagggctcctccgtggcactggatgaggcgacaggctcagctccaccgacacgcccattcaggcgtgtgttttctgctgataacctaggggaaaatacattccaaacatgaaaaagttcctgaaaaagaaactgttagcaaagcagtgcttttgagtaacagggctaaggggagtgaagtcttcttaccctcggtgtggctcctggagaggccttcccgctctcagcccgggctctcctgctgggtcctcgccgcagggagcgactgtaattccagtttccttactggatgtatgagccctgaagcttcggaaacagttcaccacagacccgtgtgaagcccaggtgcaggcagggctgcgctcccccgacccccacgttctaggggagggtccttgttgcctctgccagcttctgggggccccaggtgttcctcggcttgtggccacgtcgctgcactctccacccccgtcttcacgctgtcttctctctctccaatccgcctttgcctttctcttgtaaaggcagctgccattggattagggcctgccctaaatccaggacgatctcatcttgagatccttaatcgcatctgcaaagaccctttttccaaataaggtcccattcacggttccggagctgagaccgtggacatctctgttttggaggctgccattcaatgcccccatgctgctctataggttccttgggatggtgtccagctttgctcgcccctgaaccctagaaccccgctgccctggtgtggcagtttgtcaatttcagagcatgaatgcctttatccattggttcaggaacaaggcctgggccagctcctgtgacagaatcaaaatacccgtcccaccagaagccactttcgtggaacctaactgtctgccaggagagataggccagctcctccggcagctgcagtcaggtgaggagataaatgctgctgggaggacctggagccaaggccccagctgcggggcggaaagcgggggtgcggtgggggaggcatctggtgagggggagaggtccccaggacaggggtatgggagggagggagcctcgtgcgcagaccccagggagagagtgctggccctggagggtcaggttctaggcagggcgcttgggagctggaggaggggagggaggttggggctcttctcgggaagggcctcagatgcccaggctcctccaagagcctatagatgggcattcgggaccgtgaaggagtctgtgagcccgagtgacagagaccaactggtatggcaggaaaagttcacctggcggtaaggagggcatggtgaggccagcccaaagactccagcactgccgcaggacaggcggggagcggagctgagggctgggatagggtctccactcaccctgctttgaaaactggcagctctgtgttctgaggcccactcagtgctgggcaagctgggctgttggtcccgctgtggccgaagagtctctaaaaacctcctgtctctgctgccagtccctgctctgggactgagatttcctcacctctgactcctcccgctgtggcagtgaccagcacatggtagttgccttccacaggtgctgcctggagagacgcaggccctggtagaggatgcaggggctcactgagcgctgtggcctcctgacactagtggagttctcggtcacaccaagggaggcagcacagcacctgtgaggggggctgaaagagggcacccccttggcaggactcccagggcccacactgtcctctgcagtccccacagctgggcttcccggtcctccctgggacctccactgccaggctaaaccacatccaggcagaggccgacctggctggaagagggaggcttcgagggctgcaaggaacatcacggcctgggccctgcccagccccaccagccccaagctgagggcctgctgggacactgcgtctacccctgagccctgctctgttccaagctgggcagagaaggtgggctcagtttaggacagggtggggtggggtgggaggctggaggtgggcgtggctccactcagcaaagccatgccatagcgttagcagccatggcaccgatgcccactgtgtcctgaggctctctctgccccaggaagcctgtggcacattctatgggattttgtgtctttacaaagcctgcaaagtgggtattatcagcccgatttgacagggaggcagctggtgctcagaggagtcaccctgtcctggtgactcagctggaaggatgtggatctgcctccctagcttggggcagacaccctgactctctgcaggtgggctccaaggcctgagacagggtctgcggggcaggggctggtaaagatgtttccagggcaaagcctggagggtcagcgagctgccctcatctcgtggcctcacctggtaaaccttcagatcccctgcttccttcaaagcaggagatccttcaaaggggaagagagggctgggcctcctgggaggagacaccccaaacacaggcccacagggcctaggatcaggagagattcccatttctggtccctgcctgggtgacatctgctgcccaattcccggagacagctgtgggggttaagcgacagcagcaccagcacacccaggcccagcaggatcctcaccagcctgcagctgtggagctcatgtttccagccccccatatacctgccatgcttccagaggggcccccagttccctgcaacaggaaggatgagggatgggggccccttctcagacctcctgaaccagaaagtccattgttggacatttttgttataaaatgatggtaatgagcactactgtagctgaatctcccccacatctgattatttccctagaatgaatgcctggaagaggcatttctgatcaaggattattcattcttatgctttagctagactgccaaattttccaccacaaagactgggctaggctccacagaggggtcactggggacactttgggggaggcctgagcctccaggaggcaacaggaagcgacgggtgattttaggggtgggaaaacgggagggagccactgggacctggaggggcaagacagcccactgcactggtcctgttgctgctgtgctgggctgggatggcactggtaggcactggtaaatccctgttgcttgtaggtgatgggacccaagttgcttcatctctagcggtcactgagtgtccctgtgttggtgggtcttttgggctcagaggacctggaagaagagggactctggagaggtgaggtcagagggggagacaggctgtagggctggacagtctggatgtgatcccaactcagccacctgtgggctatgtggttttgggcatagcaccaggcccccagatctcagggtcctgagaaatgggggtgatggtattggcagagtggccagcaattgagtgtccttccccctccagcactgctggctctgtggacactgccctgcaccatgtgggcatttaggaggcacggaggtgggcatgtgaggccacctccccgctacagaccacgtgcggcctcaggttcttctaagaggcaggatcccaagggcaacacgtggcagggaaggtggaggtgcaggtgcaggagggccactctgctcagggactcaataccttgatgcaaaggctaccgacacgcagaacgctcactgtgagcccaccgggaccaggcaggcagagcagcggaggcccccggagacgtggctctcaccaggctgcactttagaatcacctgggtgctctgaaccacccaacacccaacccgcacccctgactgactgcaccggaacctcttttaaaaaattctttaaaacaattgtggtaaaatatatagaacataaaacttaacctgctttaaatgcgcagttcagtactgttaatgcacaattcacattgctgtgtgacccgtctccaaaactttttcatcttcctcaactgaagctctgtccccatgaaaaactaactcctcattccccactcccccagcccttggcaacccccattccgctccaccatttcactgctccagggacctcaaataattggaatcacacagtactgtatttgtctttttgtggctggcttatctcactcagcataacgtcttcaaggtcatccgtgttgtgacgtgtgtcaggattcccttcctttctaaggctgagtacgaatccattgtatggacggacagcatttcctttctaaggctgagtacgattccattgtatggatggacggcatttcgtttatccattcatccatccaacaacacgtgaggcggcttcaggcttcggagttgctgaagctccgagttcgggatgtgcagctgtggtggagccaggggctgggcacacccctggctcctggcctggcagcgtcatcatcggagtcacctgtccctcatgccagtggtgctctctgctgtcatcaagaccaaacaccactgtaggaagtacccccactcccgcctccaacccccacagggcctgccaggtctgcccccagtgggccccctggtgcatctgggccacccagggccagcctcagcaggggcactcgcggggctgcgcctgcggcttcccttactccagtctggaatgttgtacacacggatgagccagcagctcacgcccacgactgctggggtctccggactccctcatcagcctcctgctgtgctgtgtacaaatcctcctcctgcatgaggccccgctgtctaactcagcaggggagaatgggaggagccaagggaatccgtgctttaggaccaacaccaatactcatggtgggacgacgctgcgatatttgaagttgggagtgtgcaagaaatgttactcggttgttcacgaatgcattcatttattcaatgaacttcgcgtcagccactggctgtcatcagttaccgacctgattgagggcttcatggaagggatttggaggagcattcatctaaaaccacagcacgctgcgacgctcagccctgcagtgggccctcaccagtccccgcgcctccgaatccaccctcccggggctgctcgtggctagcggggggcacctgcggggaccaagccagcccggccgaggcccgggtcccgcccgccacggccctcggggccccgcccgcatctggcagaagccacgccccgtccgtgtgggtggggacggcccgccggaccgaaattcccagactgctgcctcaggcaacgggctttccgactccttggcttcttatgtgaggaaaccacagcgcggccggcatccagagagtcggttagccgcgaagttcccgccggacgaagggaccagccagcgccctgctagacagcgaggccggaagcggaggcgtggcccctgcgcggccccggaaaccagtgaggccggcgcgcgcccgccggaagccgcgaccccgacgcgccccccattgccctcggcgccggaagtggtcgcgggtcgttctgcttcctgcccgaggggcgtgcgcgggtcaggggcggccgcggaggcggaagcatccatggcggagggcggcagcccagacgggcgggcagggccgggctccgcaggtaacgtgcgcgcggccactgggccgcggggcgtgtggggatggcgaagggctggctccggcgtccctgccgaggtcctgcgtcctcgtcccgggctggccgggtccacggggcagccagggagccgcaccctgcaggccgggggtggggttcagcgcggctcgcagtgctgggcgaccccaccacggacgcgctgccctctcctcggcctcgagtgcagtccccgcgctagattttctttccggtggaacttgctcgtaacttccttcccgttagccgatacagatttgatatgacccaaccgcaaaagtaggacgtgggccaccttccagctctgagcgcacggatcaggaaagccagccagagggtagccctagggagggcaggcactttttcaccattctgccgcccacggcgtgtccggtggtacagcggggggcagccttcccacccaccacaggcacagaccagggacaacggggacgccgtctccagcgagctcgtcagtgacacaacatgtccaggggcctttggcccaccagcaagggaggcagatagaaaggctcacacccaccttccaaaataactgtcctacttagggtctccaccttgcagtgtccctaccatgcagatgtgaaggaagcggtcaggacaggttcccgtttcccggtggtgtggtgggagttccttcttgctggatttctgagcttgccattcgcgccaatagtttcgtgtgttctgggctttctttacatgcctatatttgtctttggaggggttcctctcctacttagtaataaaccaatacatttcttaaacatcttaaaagattgacttggagactggtgcagataggcttttccatccatccctccctctgcacctccttccaatcatttaacagacttgtattgaagacctgctgttggctagacccagcagaggatactgcagtgaccagaaaaagccagacaaagcatctaccatcctgggctttggttggcgttgactttgacttcagagacagccaggaccttagggtctaggatgtcatctcatgtgagagtgagagacggaatgatgcgtgttccgtgggaaaaagaggaccaacagctacttcccagtataaagagagttcctggggaataaacactggctttgtcggctgcacaggtctcctttttttttgagacggagtttcgctcttgttgcccagggtggagtgcagtggcgtgatctcggcccactgcagcctccgcctcgggggttcaagcgatgctctggcctcagcctccctagtagctgggattacaggtgctggcatcatgcccggctaatttttgtattttagtagagacggggcttcaccatattggcatattggccaggctgatagcgaactctagacctcaggtgatctgcccgcctctgcctcccaaagtgctgggattacaggcggcagccaccacactcagctgagggctcctttttatatcctcatgcactgctgttttgttattcagtgtgtttcggcctcgggtagaggggcaacagattttcagttgaagcttaagtgctatcctggggcagttgtgttgtcattggagtagttgatcagcgaaacacaaacttgaagttgcttttgaatctggagctggggaaagattctgagtctactttgagcagggccaggaatggatagcacagaggccagcagagggggcccagaagagggctcagcaaaagtcctgtggccgccatttacctgttggttattgccctacacctgaatctttcccactccgactttgaactttttcactctgtagtaaccgcaactgtggagtaattacaggggaggatagttactgaaggaagactggggtggtggcttaaagagctgttcatgccggcttgttgatctgcggcgagtctggttgtgggatcagcatgagcaactcagtggactgtcaaaccctgcagagccgggacacttactcatcacccccgtttcacctgtggttgagtctcatgtacagtagtactgaaaagagattaattttaatataaaaaacaatgtcagcatctggaaagagcccccttatggagggggtgctttatacctgcctgtctggtctcacactaggacagcatggcagagcagggacttgaatccaagtggtctgagtttttgctctttacttacacacgaatctgtgtaactatttttacaaaactcttaaatcttcaggagtttattttgggttatgatgtgaggtgaataactcaattatttcctaataagtatctgattgtacaaatgctgtttgttgaatactcttttccattctcgctgattgtgatgccggtttatcacattcaggcataccttggggatagtgtgtgttcagttccagaacactgtaataaagtgaatactgcagtaaaccaagtcacatgaaatttttggtttcccagtgcatatataagttatgtttacatgatactatgatctattaagagtgtaataggccaggcgccagtggttcatggctgtaatcccagcactttgggaggccgaggcaggcagatcacgaggtcaggagatcaagatcatcctggctaacatggtgaaaccccttctctactaaaaatacacacacaaaaaattagccaggtgtggtggcgggtacctgtagtcccagctacttgggaggctgaggcaggagaatggcgtgaacccgggaggcggatcttgcagtgagccgagatcacgccactgcactccagcctgggccacagagtgagactccgtctcaaaaaaaaaaaaaaaccaagtacaataataccattatgtctaaaaatgtacacgttttaatttaaaaatactttattgctgaaaaatgctaaccatcatctgagctctcagtgagtcacaatctttttgctggtggagggtcttgctccagtattgatggctcctgacttatcgggggctatggtaattcttagatgacagtgaagtttgccatatcgtctggctcttcctttgatgagatttctctgtagcatgagacgttgtttgatggcattttacccacagtagcgcttctttaaaaattggaatcagtcctctctaaccctgctgctgcttaatcaactaagtgtatgtggccttctaaatcctttgttgtcattatgacagtgtccacagcatcttcaccaggagtggatttcatctcaagaaactgctttctttgctcatccattcaagtttgatcatgcgattgcagcagttcagtcacatcttcaggctgtaattctagttctcttgtgatttccactgcatctgcagttacttcctccatttaagtcttgagcccctcaaagtcatccatgtgggttggaattaacttctttcaaactccttttgatattttgacctcccatgaatcacaaatgttctaaatgacatctagattggtgaatcctttccagaaggctttcagttcatttttgcccagatccatcagaggaaccactacctatggcagcgatagcctgacaaaatgtattaaatgatgataacacgtgaaagtcagaatgactccttgatccattggctgcggaatggctgtgttcgcaggcatgaaaacagcatgaatcttgtacatctccatgagagctcttcggtgactaggcatattgtcagcgagcagtagtattttgaaaggaatcttctgagcagtaggtctcaacattgggctgaaaatattcactaaccatgctgtgaacagatgtgctgccacctgggctttgttgatccatttatagtgcgcaggcaggagttttggaatggtgaatgaacactgacttccacttaaagtcaccagctgcgttagcccctaacgagagtcagcttgtcctttaaagctttgacgctaggcattgccttctcctctctagctatgaaagtcctagatggcatctttttttccaatagaaggctgtttcttctacattgaaaatctgttgtttagtatagccaccttcatcaattatcttagccgtgtcttctggataacttgctgcagcatccacagcagcacttgctgcttcactttgtacttttgtgtgatggagatggcttctttaaacctcgtgaaccaacctctgctaccttcactctttgcttctgcaccttcctcagctctctcaggcttcatagaattggagagagttagggccttgctctggattaggctttggcctaagggaatgttgtggctggtttgatcgtatctccagactactcagatttcctctatatcagcaataaggctgttttgctttcttatcaattgtgtgtttacaggggtagcacttttaatttccctcaagctctttttcctttgcattcacaacttggctgtttggcacaagaggcctatctttgaaccttcccagctttccacatgcctttctcattaaaattaatcatttccagcttttaatttaaagtgagagatgtgtgactgtttctttaacttgaacactcagaagctgttgtagggttattaattagcctaatttcaatattgtgtctggggaacagggaggcctgaggagagagtgggagcagctggttggtggagcagtcagaacacagaccacgttgatggattaagttcattgtctcatatggcacagtttgtggcaccccaaaacaattacaatagtaacatcacaaatcattcatcaccataacagataaaataataatgaaaaagtttgaaatattgcaagaattaccagattgtgacccagaagacacaaaatggacacatcctgttggacaaatagctccaaaagacttgctcagcacagggttgccacaaaccttcagtttgtaaaaaaacacaattacgtgtgaagcttgataaagtgaaatgcagtgaaatgaaggctgccggtattaggttgtttatactgagatctttctgggcagctgatggtttgattttcttttttattctgatgagtgttctgttacctagtagggtaggtcttttctctgtacacttactaaaaaccaaaaaagttcttctcccttatattttaaaataaactttagaatattttttgtgacatctgataacaaaatcccaaagaaatgggtcacgctttatttaaaattccttgattattgaatcttttaatccaagtacttggtgttttttctgcttattctgttcttttgtgttgtttttgagttttatagtcttcattaaatgggctggatttatatttatgtacatgtgtttttaaccttcgtttttattgaggtgggacttctctatggtcaagtgcacctgtctgaggagtttcttaggcaggcctccctgtggccgttgcccagggcagcgtggtagggagtcacccgtgtagcagatagcagcatttgctcagccgttggattttgccgtatgtcttttttgtagtgaaggagatgactatgttctccttcatagttgcccagtattaagatattcccaaataccagtactaagatatttgctagattctttgatacaatattgattcaatctgctgatattttcttttttctttttctttttttttttgagaccgagtctcactcagtcgccaggctctggagtgcagtggcgcgatcttggcttactgcaacatctgcctctgggtccaagcaattctcctgcctcagcctcctgagtagctgggactacaggtgcgcggcaccacgcccagctaattttttgtattttcagtagagatggggtttcaccatgttggccaggatggttttgatctcttgacctcgtgatctgcccgcctcggcctctcaaagttctgggattacaggcgtgagccacctcacctggctcaatctgctaattttttctttaggatcttgcatccgtattcttcaggtttgccttatcagtggattctttgacacaatattgattcaatctgctgatattttctttaggatcttgtttctttattcttcagtaggtttggcttatagttcctgggccccatcaacttttaaaaaattattcttgtcagcgttggtgtcaggagtgtgctaatttaataagggaaggtttctactattttctgtgatttatttcttttgtttttacagacagggtattgctgtgttgcccaggctgatcttgaactcctggcctcaagtgatcctgcctcagcctcctgagtagctgggattacaggcgtgccaccatgcccagcttgtgatttatttcttgagcatttgaaggtgccccgtagctgggagagggaaggctcgctgcagatggcacccccttttggttagtcttggcagggcctccatgagctaacaggagcccctctcttcagtgcaggtcgtaatctgaaggagtggctgagggagcaattttgtgatcatccgctggagcactgtgaggacacgaggctccatgatgcagcttacgtcggggacctccagaccctcaggagcctattgcaagaggagagctaccggaggtgagcggcgctgcccagggctggtccgggtactagggccctgaaggtctgtgtgaagctgagccccacagtcgctgtgcagatgaagaccttgatgttgggaggaatgtgttccagttttagaggacggggataaaggagactgaggcagcatggtcagagttgtaggagacagccagacagtgtgggcagggagacctgagttcaggtcctgctctgccattaaccttagtgttttctggcaacttctggccttctgtgggcctcagcctcctgatgtcactcctgaaggtaccactgtttccctcttcagtggcggccctgccccatcttgggtttctcgtggctcttaattgcaggcgcttctgtacattcaccctgcttcaccaccttccctagtgccctttcctctagcttctcaggccctcagtcatctgcccccgggacctgggcctcagccttaggcccttttacctcatcagccttctcctttctgttcccctcatcagtggtcccctgtcctggccttgccaaactctgcctgtccccacaaaatggctccagcccttccttcgcagcaagtgatgcttgcccttccctctccctgctcaggacacctgggggagcagagtctgcttgctctctggactgttctctgattgttctgcgggtctaaggttgcagtcccagctagagcttaaactcagcagcagccaggaactatccatgctgctgttgtgtttccgcgttcccttcaggacccaaatgccagtgcggtggtagaagcaatgcctacatgttggcgccgaaactaatgccacaacttttctttgcatagttcccaagaaaaggatttctaacagtacaggaatgtatttcttcatttccttctagtgtcttagcagtatttcatcaaaacagatatcagtatttaaaagaaaaataccagaaaggactgtcataggaagacagatggattacgcacagatatttaaagtgggtgactcaagcccaaagaaaaccttaattcaacttgcagatgtaacagaatgaaatagagttcggtgaggtctcagcccaagtctttctatattgcatttcccagcactgtttctcctccttcttttactcaggctcagggcatctctggttctttacattttcccattgctatttgcttctttggtgatgagttcctggagtgttcctcgactttcctgggcagtcagagcctaggcgcagctggcggaggagccccgagggctggcttgggagctgcttcccctgcatgttcctgggccctggtttggtgctctgggcctctgagctttgttctcagtgacactgggagctcgctgtgaacccgttgcggtcgctgccttgctgggtcggtgggtggggcaggcagttgcagtctgattgtgacatctgccgagagctgagtctggacaggttcctctgccgctcttggccaggggtgtagcccccgtgccaccttagtgattccttcaggccatcatttgtgcagtgttagaggttgggggcctacatagtcacctagtcctggtgaggatgctgaggcctagagaggcccagcctcaagccttcacagatggtaactggggaagagcagcctaggggctcttacccagactcccgggcgagtgcgctgttcatttggcactgcctcccaggcagacccttcccacctttgtagaggaaggcacttcagatggcagtcaggaaatctaagaactagagatcttagttttggtgctgatcattctgcaggtgccttgagtttcctgtctctggaatggggctcgtaatgcctgccctgccatgccccggtcccgcaggggaaaggtgtgagagcatttcagaaggcagagcccaggtggaggcgttattaaccagagggggaccgtgtccatgctgccagggtgaggggggcagtgcagcccgtccctgtcctgcggctgcctctcatgagcccccttgtgttcctcctgcagccgcatcaacgagaagtctgtctggtgctgtggctggctcccctgcacaccgttgcgaatcgcggccactgcaggccatgggagctgtgtggacttcctcatccggaagggggccgaggtggatctggtggacgtaaaaggacagacggccctgtatgtggctgtggtgaacgggcacctagagagtacccagatccttctcgaagctggcgcggaccccaacggaagccggcaccatcgcagcacccctgtctaccacgcctctcgcgtgggccgggcagacatcctgaaggccctcatcaggccagtactgtggagctcgcctggctcctgcagccactttatttttcttctctgtattttgcagtttttctgtctttagaattcggctctttagatgactcgcctgttttgctggcctttgtaaagagctgcctcttggctttatcaggtctctttgttttttggcttacctgttcctttatatttacttttatctttttctaatttttagttttttttcccttttgagttgactgcttattcattttttcttaagaatgcaaacttgcaacgttaatttaccttttactatagttttgaccatcctctctaggctttttccttattatttaaatagctctaattgaagttgatttcctctttgttcttagagttatggaagataaggttttaataatgctttttgttgtattatgctcagataatatggaccagatagttttcattttggggattctttgacgtaaaaaaattattattattattatttttgtttagtttttgaggtggggtcttactttgttgcccaggcttgagtgctgtggcgtgatcatagctcactgcagcctcaaactcctgggctcaagtgaccctcctgccttagcctccttagtagctgacactacaggtgtgcaccacaatgctggcttcttcttattttttaatgtcagactacattgttgtgaatgcttgaaacaagtacatgaccatgggtgttttgtttacatattatactttgttaggttagcactctctctctctcttttttttttttacatttttgtcattggatctgccagaaatttaaagaattctgttagtctctgatcacatttttgattttgccattttttccccttgtactttgaataggttttgctttgaaaattttgatgctaattgagctcataaaagttcctgcttacatattatgctctatcaaaacaagagtactattagttttatttaaggcccatttacatggcattatgtaatatttagttttaaccctagggagtttcagtagttctgtttgtgcttgtgtagaaccatttgtctaggagtttttgctttttaatacagtgaacattattgctatagctgatgttggggtctgtttctgttatctttctgttttgtaactgtttccatttgatatcttttcttcttatatgttgtttttttctttcctcttccattatactaggtttacagtcttattttattttattttttttgagacagagtcttgcagtgttgcccaggctggagtgcagtggcgcgatcttggctcactgcaacctccgcctcctgggttcaagcagttctccttccttagcctcctgagtagctgggactacaggtgcccgccaccatggccagctaatttttgtatttttggtagagatggggtttcaccatgtcagccaggatggtctcgatcttctgacctcgtgatccgcccgcctcggcctcccaaagtgctggtattacaggcgtgagccacagtgcctggcctacagtcttattttaatcatactaatggttgcctttttttttttctttttcaaccagattgtttttatttttcatgtttctagtgacttctttccagcaaagatgcttttttccctcttttactctggagaccaaattgctctgcatttggacagggtgcagtttaggtagctggttctcagggaaatttttctgtattgaaaaggattaggtaagggttctgttgttataggctgcagccagggtggctctgatgagcagggacctgggattccctttacccagcacagaatatggtctttaaattaggtactgagaatatgtttttcctgttgaagggttttataaattaaatagctacacaattggcttttgggaggctaaagaaatgagagtggtaaggttgttatgttagagggtgataaagctgcaaggctttttccctctttttaaggatttctaacctgattatctaagctacttcagtcccttgtctttgcaccttggagaatgtaagctattaatttggaaatgcttttgagtaggatcaatcagtgaaattccatgttggttccagaaagccctttgggtatttcagtcaattcatgatgcacaactgctttgagttacctgcaggctgcccgagaagtacatatacagatgcccttcattttttttttttttttttgagacggagtctcaccctgtcgtccaggctggagtgcagtggcgctatctcggttcactgcaatctccgcctccagggttcacaccattctcctgcctcagcctcccaagtagctgggactacaggcacccaccaccatgcccggctattttttttgtatttttagttgagacagggtttcaccatgttagccaggatggtcttgatctcctgaccttgtgatccgcccgcctcggcctcccaaagtgctgggattacgggcgtgagccaccgcgcccggccacagatgcccttcttgcgaaaacgttactaagacatcttactccctcactggagcacgggacattactttcacaaggtggtaccaagaacatatattattctattaaaaagttttctatattctaaattctaagataattgacacttggatagtagagtgatacggttaagttactgaacagtgatgttttctggaaataacttagcttctgccttccctgtgccagttcccccttagggctctcatctttcactgttgcaattttctgtccctctgtaagtcacctccattttgttatttgtaaattcacttgatatgtattgcccatattttagaaaaaaggtacagagtggtatttctgtatgtgcaaaagttatattgatttattgagttctcccagtggttccttgccagtgatattaaaagcaatagaggaatttggaaaatattcaggattaaaattaactggatctcatccagtatatttttatgagtggatgaagggctatctttcccacagctcagctaataccagattgtcatattgcccaaaattacaaacgttttggaagattttccctaagaataagcagaaaaaaaccatcactgcttgagatctagttttcctttgcttaattggttgggtgtatgaaatgaaatatcaatttcttgttggctctgtgtgttttagaatacttcccctgtcactcctagaatgtctttgagagtgggtggtgtttgtgtttgtagtggaagcttcattgtcatgtgagtgtgttggttggagagtgggtggtgtttgtgtttgtagtggaagcctcgttgtcatgtgagcgtgttggtccgtgtgctggtcctcaggcctgtgcttcctgaaagcagcagttttggttccaggggagcgtttctctggacactcaggatggtgctgaggagacggttagaaagcgtggctgctggccttacctgttggcgagcgctgtgattgcggcatggaaggtgacgcagttctgtcctccctgcaccctgcgtgttctggtcccgtcatcgctgctccccacatattgtcctttcctattacaaatgaaatactttggtggtgacgaatcttgtgagacattgtgggactgtgtgggctgatgaaagctcaagaaaacaggtgccaactctaatgttgactcagattagagtcatgtcatgcgttttgggcaggaatcgcaaagggaggttgtgttcgcattcccctcttatcaggctgcgtgtgatcgcagtgtgtccattactgccgatactcacttccgttatttgattaaggtggtgcctgccatgtttcgctcccgtaaagctattccttttctctctgtaagtagtattttgaggagaggtgctttacaaccatgtatatgtcctgttcatctcagatttttaatttgttcatttattaatttgttagtatagactcatggtttctgatattatccaatgagttataattcattattattgttacttattttgatattcgtattgtctcagtttgtctactgagagctgcttcaagccatctctgtccttttaacatgaccttagtcattctgtgagcagctcctcactttctcctgtaacaagatattctcggctcatcttgcactttgactgcctcagtcctggaataagtcatttctcctaggagtcctggtttcttttagtgaagaatggtgtgcagaaccctatatttggacactaggagtgcctattgcttttggggtatcactgttttcatgccctcctattggaccaagctaaggttgtatgtacattccacatttctgtttatatttctttatatacattgacaggagttcacctggctacctttaatccaggctcatgccacaaggttcatcctagttttctgcctttcgcgtttactattctcctttcaccagtgagaaacccagttcccctgccctccacatactgcctgtgttgtcctgttgtcccctgtgtggcaccagccagccccccttttgctgcctcttcccatacatggctcctgacctgtttgggctctcacctctcatgccaggtggccttctcaccttgtcaggactctgactctgagccagggccccctcattgactgatccctgttcagagtgaaaatgattggtagtttgcacttgccctggaagaaccctaaacgtctgatagagagccgtatatttggtcatctctgagtacagtgacaaggacaagtaaagtaaatggagtcatttagagattggctttggtggagaatgaggcttctaagtcaggtggctcctacacctgccctatgtgagatttgtttcctcccatcgggctgtcactggggattaggaggggcggcctaggggttacctcactcatggctgtgtacatgcccacgtggagagctgtgtgacgctgccctgccgacaagctgtgcgtcctggcctggggccttccaggtgaacgtgacgctgggagtggtctgtgctaatcatgggagtctggatgtttagtgtgcctgaaaagaaagatgtcctagtgggcagcgcatcatggcgccagctggatacctgattgagttcatgcgtttctttttgctttcaatttttttttttttttttgagatggagtctcgctctgttgcccaggctagagaagtggcatgatctcagcttactgcaacctctgccccctgggttcaagcaattctcctgcttcagtctcctgagtagctgagattacaggtgcccgccaccacacttagttaatttttgtatttttagtagagacggggttttgccacgttggtcaggctggtctcgaactcctggcctcaagtgatctgcctgccttggcctcctgaagcgctgggattacaggcatgagccaccgcgcttggccaaggtataaatttttggaaatctagcttgtatccttgtctccttgatcctgttctctccctccccagtagataaccatttaaaaagttccatggtttaccataagcacactgcaacctcctcccccacagaaacagtagtggactgtacactttcactgtgctgctttccctccctcttcctgtgctcggaggctgctccggagcagtgtacagcgaccccctcactccttttcagagctgcacagcgtggcgttgtgcagatgagctgcagttcattcagccagtcccgttagtggacacgtgggtggtttactgtctccagctgttagggatggtgctttaatgaattgccttgtgcatacatctttccatagttttgcagatgtattttggaaatagatcccgagcagtgtgattgatgggtcaaagggtaaatgcatatgtaattttgctagcgattgacagattgcccactccacagggggaaagttcacttttcattgctcaaacaatgaatgagatttcctgtttcctaaaagcctggtcaataaatttttggatttttcccaatctgataggtgagaagtgatatctcagaatagttttaatttgcatttctgttccgagtgaggctgagtgtgttttcatgtggctaagagccatttgtagctgtccatctctctaaattttttttttttttttttgagatgaagtctcgctctgttgcccaggctggagtgcagtaccatctcagctcactgcaacctccgcctcccgggttgaagcaattctgcctcagcctcccgagtagctgggatgacaggcacacccacacccggctaatttttgtgtttttagtagagatggggtttcgtcatgttggccaggctggtcttgaactcctgacctcagatgatccacctgccttggcctcctaaagtgctgggattacaggcatgagccaccacgccccgccccatctctctaatttttctgtagggctattgatctttttcttctagaagctctttatacgttaagggtattaaccctttgtaaccttttcccccaatttttcattgcttgttttacttttacttacgttgttttgtcatgcttatgctatgcaagagtttttcttttaaaaattttcatgttaaaaacattttatttgtggattttgtgtcagaattaggcaaattttacttagaggtttttttctagtttttgcatggtttcatattttacgttttaagttatggtcagtttggaatttattccagtatatgctatggtgaatggatatacttttacctttttccatatggatgtccagttaccccaaaaaacacttagtaaaacatctacaccctcccttgtttgagatactgcctttatcatatatgaaatttctatgtgcaatttggcccatttcaagattttctgtaaagttccatcattctgtcaattttgttcacataccagtgccacagttttatttttagcctttataataaacttcacttatggtgtggctacctcccaccacccccttcttgcttgtctttttcatattctttcatcttacagatgaactttatatatcaactaatgtagctccggggatgctatttttatttatttatgtttgtaatcaacttatttagttctagtaatgacattttcatttataaaataaatttagggagaattatcttcttgatgttgagtcttaatcagtactgtgctatgtctttccattctcttaggtctacttttgttgactttaagtagtagtttatcatttttgttatgcaaattttggacatttattattaagtttatgcttagatatgtcatagtaaaatttattttgctatcataaatggaattttcccttctactttttatatgaagcctattggtttgacaacctgctacttcaataagttctctcattgcttgttagttgttttcccatattatttagggcttttcagacacattgtatcctctgaaaataggaaatttttacctcttattttccaactttatgcatttaatttcttcctcttgcctgattgcacagggtacctttaacaccagtgttcaacaggaggctggaaagcaggagtctgtcttgctccagctttggccggagtgcttctagcctttccctgttaaatgagatgctgacttctggcctgagggagtatgttttatcatgttaaagaaaagccatcactttctgttttcttgagcatttttaaacatgcatagctcttgagttttgtcatatgcccacctttttttttttttctgcatctgcagagataatcagaggatttccccctcagcctcattttacaatggattatattaatagagtttctaatattggagttacctgtgcattcttgggataactcccatgaggtcatggtatattgctttcttaatatacttaaggattctctttggctaaaattttattgaagatttaaaagttggtattcctaaatgaaattagctggtagtttttcttatgctttggcccttgttgggctttggggttattgtgccagtttcatcagatgaatttgtaagtttctcttctttttctttgctctgaaatagtttaaatagccttgggattattggacctttaatggtttgaaggacttcccttaggaatttttctgtgtgcggggattccaagttctttcctgctaccttatcttgctgaacgtagtgaagctatctgatctgtggagtctcctacagcgcctggtgtcactgaatcaaggccttctgctcagggtggctgtgggatttgttggatctgtgggatctgtgggctgtggtcagtcccctgcacagtctgactttccctttcttccctgcaggtacggggctgatgttgacgtcaaccaccacctgactcctgatgtccagcctcgattctcccggcggctcacctccttggtggtctgccccttgtacatcagcgcagcctaccacaacctccagtgcttccggctgctcctcctggctggcgcgaaccctgacttcaactgcaatggtcctgtcaacacacagggattctacaggggctcccctgggtgcgtcatggatgctgttctgcgccacggctgtgaggcagccttcgtgagcctgctggtagaatttggagccaacctgaatctagtgaagtgggaatcgctgggcccagagtcgagaggaagaagaaaagtggaccctgaggccttgcaggtctttaaagaggccagaagtaagtggcttgagttcagctctgacttgtgggctgggttgattgaatgaatcaagatgtagcaataaacaaaaaacaaaaacctccacctgagcacttggccaaaatcttcagttagaactcgcagttttccagatggttgttcagattgatcttctctttttaaattcctgaataccaagaactgatatcagggaatctctaaaagtacatgtgtgttgtcagaactcctagaattatgctcgcgctctctttttttttttttttttttttgaggcagggtctggttctgtcacccagactggagtacagtggtgcagtcatggctccctgtagccatgacctcctgggctcatgcaatcctcccacctcagcctcccaagtagctgggactgtaggtgcacaccatgcccagctaatttttgggttttttgtagagatgaggttttgctgtgttgcccaggcttgtgttgaactcctgggctcaagtgatctgcccgcctcagcctcccaaagtgctgggattacaggcacgagccactgctttggcctagagttatattctctttatccttttgctctgacctgtggccccagattcttatagacagtgacttcttttatgcctggtttttaaatgagcccttaaaacaaattgcaagcggggctttctagggttccttactctcctttcttcaattccactcaagtatcgctactttggattgtgtgataagcctaaattttgtaacaataaagttcctggtctgcttatttatgaagaaagattttgttaacgattaatgcatcaatagcaccagagattggaattgatccatagcttggtcttgttatccgaggctctctgggattcagacattgacctcatgtgttgtctttaacctcctgcccacatgtcaccccctcccaccgctcccagtctgggtcttgagacatccaagttgataacctcttccttctccctgcctctcaaaggactttaaattcattgtgtttttgttactggatttccctaaaccagttcattaaagcatgctcctgtgtagccttcccacaaatagttaatgaatggtcagctgggagctgtactgatagaagcagcagcttgcgttcaggactgttccactcctcagcttcctcgctaatcgagacagaacttggctgcgctcttttcattgggggcaaagtcgtcagcctgtgcccctcaagcagtgctcagcctgtgttccccaggcactggtggagcttcagggattgactaagggaaggggctgacagaggctgggcgtccgcggcccgcacctgctggggccttcagtggtccactctgatttctttctctagtgcattaaacatggtcgagttgtgatccagggagcagatgccctgggttaacgaggctggaaaggtttcgctctttcctgcgacagaaggagcagataagaagaccttcctccctggggcctgctctcctcatccatcaggaaaagccatcactttgtgtttcactgagcgttttgaagttggtagtgagcattggtgcacttctggctggcagtcccagctgccttttctctctataactggaatagaatgaaccttcctctatccctctctttcttcccacggccttcaggtgttcccagaaccttgctgtgtctgtgccgtgtggctgtgagaagagctcttggcaaacaccggcttcatctgattccttcgctgcctctgccagaccccataaagaagtttctactccatgagtagactccaagtgctgcggttgattccagtgagggagaaagtgatctgcagggaggtggacaccgagccctgagtgctgtgctgctgctggtctcctgatggctgttgctgcagaagatgtcctcgtagactgtcattgctcctcaggtgcctgggccgctgaacagtccttgggtcattgtcagctgagaggcttatactaaagttattattgtttttcccaagttctctgttctggattttcagttgcatattaatgtaacgggccatggggtatgtacatgtaggggctgaggttggaggcctactaatttccctgtagggaagactcccagcacttctggaactgtgcttctctttatttttctacttctcaatttgatggttcgattaaagccttctagtatctcaatgaaaagggagtttcgtaagcaaaatagaggacagaaatgcagttcatgaacttgctggttggtttttcctgctcctggggtaacacatgcgcttgtcatacacgccccttccttgccccttcagtattctctctttgcgatggaggtctcatagtgagtgtcttcactcaagggtggtttcctggctgcacggcacctgttccaacacctactgtgcctctcatcaggtgtcacgatttttctgccacttcaccttagggagcttccagtgattgattttaggaggcccacaccaaactccccaggaaatgactgccttccttgggaccaaggaccgttccaacagcattcactgccagttctaataggcgaggaaaatgcccgaggcgctgtcttctgtcccccacacgtaccagaaagtgaaaaatgcagcgagtcctctgggtggttatgagcctccaggcgcatgctgtccagtggacagaacatctggcggttggttgattgctctcttttgtcttggtcgctgcttctagaatctatgcaggggatagcagtgaggtcagaagtctttcccgggagagagatggcctgggttatcattgctgatagctttggctgcatgagttgggcttccccttacccagggctgcacagccaggtgtgagggtcaccggcaggtgggctggtggctgcagcctcagagccctcccaggttgctgctgtttccagtgaatcacatttcgtcatttgaagcccatgaggaccattgtgtggatccatggtgattctagacttcagatatatttaggaaggcgcagatttcaaatctgtgtttgattttctgtaataagagaaatccaatttgtaaaacttgaacaatgataccgttttatttacttagtagcatcactgtgtgtcttagcaggcaggcagtgtctggccattattgcgttctacagccagaggatagaattctatacccccaaccccttgtgtcacaaatgggctctgtgtgggtcaccccagctgacccgtgtatgtgcagatgcagttccgaagggaagaacagtcctcgggtgattcagaggggaaaatgcaatccgggaggtgtttcctcagctgaggtgacactgttagaagctgtgatggttgtgtaaatgtgggctgtgtgctgttcccgaggggagcttgggattgggtcctgctgaagccaggagggtcttcccaagataggagaggaaccgcaggtggtgagcggctggggagggccaggacagccggggctgggtgctgcaggggcttcagcccgggagagggggtgggcgtgttctttgtggtaccaaagtgggactaggacaaaaattgggctgtggctggggcaggagctatagggagttaaggaatgatgatacggaagttggagccaccaccgtggactgggccttgtcactggaggtcgtaggcagtggctcatcaccctggtagggctgataggggctttcagggaggctggttagctccctgcactctggctctttactggcttactgtttagctcctcccacctcgaggctcttcttcctgccaccctttgggctcagaggagggtggcttttttcgaggtgagccatgttgtagacacatgatacgctctgcgtctgctctactgagtactttctgcaggggcctgttaaggacgaggcctccccagccctgcccggtgcaggaggtggctcagttattgaaccttttgggaagcagcacctgggaatgctgcctcgtgggagtcccatgcgtgagtgtggtggtgtgaccttcaggctgcacagaggcaaggacccagatgtggcagcatgggcgtcatgctcctttgcacagcccagggcctgttttggagggaccaggtcactgcccctggtctctctaggaggagtggactgaatggatcgttgcagagaagactcacccagacctggccagggaatgatgtatctggggagagaatgagctggaggagggggcctctcatggcccttccctggcctgtggcccagcctggctggcctgcaggtgtctagggtctcagcttttcatttgcagaggacatgttcaacttcctctctgttcaagccagcctttgccaattttttcagaatccaaacaatttggaggtttggtatcttgtttcatagctgccaaatatgaatctgaaaacagggtgggtagctaaggtcattcctcctgggttttagtggcattgccttccttcactaaagctcccttttttttctgttggcaaggacaggttacagaataggaagagtagcactttccgcctaagcactttaggaaatcacctttctaagccctggggcgcccaagtcccatgggacagggaaacgtggtcctcagtgaggctgctgcctggctggcccggagtcctccctaggagaggggctcgatgggctgggggaaggagcctgaaggttgcccctggttgcatcccagaagcatctgactgtcaccactgccagtggctgtggaacagtcctgggccctgggccttggctgctgtcaacagatgggctgggctgggctgtggtggggtgggggacaacgttggtaactctgagaattcagctttggagtcccgggtgaggggttttagataaacccatcaatatcacccacattctgtgactctttgcatcactcgtgttatttatttatttatttatattctgccttgttccagaaaagtgtttaaggcaacaacgcttgttttttggtgttttcttttgacatttgaaaatttagtacattgttaaaatgtacttgttaaacaggtaattttaaagagaaggaacaattgtttttagtaagttttctttttcctttttcaatgaattgattcttcaaattaaaagttcttgagagaaggagaggaagatacagcagacataggactgagccaaggaagagtctgcctgagagagacgcttggcctgtgctttgctgccatccgtgcggccttggccacatccctattaacagaggcagctccacttcagacagggacaaggcttcctgctgtgcctttctggcagggttttgtggggtcacatgggaagcaatgtgttacgcaagcagtctccatgtgtgtgtaaactgctgtcctggtgacttgtccctcttcttagtggaaatgcatttgagatggtgacagggctggatgaacgtgtgaccctgggagatccgggctggactgtggaccccgatgggccagagtccttgtggcccacagcatagcactggggacagagcgctctatgcaggtgaggcgtatgagaacagcatggtaaataattgatgaagtcacatttgttcaacttaaaggattgttctttattctgaagttattttcttccttatttggatgataaaatttccttttatgtaatgaaggtaaaagtagagggcaatatttttgctttttgaaatgctcttggttgcaaaacaaaatgttggttgctgtttgtcagccccagaatttcttcttaagttcgcctgtctctgaaatcccaaagtcacggaaccgcagtctagctgtggtgcatgtttacgtattggtgagaaattcctcttgggttcttgaacagcctgtacgctggcaggcagcactgcagcatttctgctgctcatggccaagaacgagtctggagatcgctgcgtgcggttttaggaagtgccaacacccgtggtgatgggcctctggccacccctggatccatgggacacactcacaggaagctgatgtggccttctcggtgaggactgcaccttaacctgggcactgggagcctgtggcccccctgtatgttggtgatgacactagtgtgggtcttctggctctggggctacagcttctgcctcctcacctggccgtcggtactcggcaagcaggcctggcctcccggggcctggatccctaccggctgggattggcctcctggaagtacctgtttgggccatgtgacctcctttctcacttatgcctcactcccctcctcccgctccaaacccgaacctctcagtgtggaatgaacgctccaaacccgaacctctcagtgtggaatgaacgctccaaacccgaacctctcagtgtggaatgaaacagtttagatgtgtacatgatgcacgtgggtgggattcacatcccaggagaattccacggagaggaatgtgcagattttgaagtgtacagtgatgtgtggaataaatactagaaattctcagcagacagtgggatggagaagtgagtgggggcaggagggggatttctgttgccttgacatgtcgttgctcagtgcctggattgcaggcgagtctctcttttttatgttgctttgatttcaagatctcttagatatactaggtagtgtatgaatgtgcataaatccagtttgagaatggtgtttatgaagaagctgtttcgtgtgtacagttgctgctgtaatttagccagcagtgccctgccctgccctgcagtgtctgctcagctcccactgcttctctttgctgttgggcatgtgaggcatgacttggaggggggcctggtgcctggggacctgctgaagagaatgctcaccaccagctctctgtttccctttctgctttggtaatcaacacgtgtttgcctgcagtggccgggaccgtgactgtttctgcccttgtgcctagttaagagccttcaaaagcataatgaacacttttgatatgatattgtaactttagtaaatgctttacttccctctaattgcccccaaatgccttaattttgtggactgtttatttcaacaggtggaagtgttggtcgtgcgaaatcttggtattcgcatttcaagaagggagttcttttttctttcttctttctatggaacgtttcaagtgattggatagaaagaagggctctgaagcaggagttttcacctgctctgagggaacttggggctccagggacgtaccccaaatgttgcccaggttgaaactccctgacagcctgttctacgtagtggctcgtggtttccagtttgaagagagttgtgcccctaaaagtgtttgaaacctgtggctttcaagcaaggtaccgttgtccccacagtgttccgtggggtagggggtgatggagactgtgggcaagcctgttgtttttggccccctgttgttacatgggacctgttttgacggtgggagggtgagatgtgaagatgtgggatgaacctggaatgaacgaattaaataaagacatgcatccatctgtcagcgactccttgtgtgttctgcctcttcattccttgtcccggaacctctgccacctctcctactctcctgcaaaggcggctttttatcacgagcggtctcagtctctctttgccttgaaactaactggatttatgtggcagagattgctagtttccattcatcatccactctctccatctgtgataatacaactcaaagtttttagctggacacttggattcccagaataaaggcttcatttcccagcctcctgtacagctagatgtagctgtttaccattgcttcctcctgaaatcccattgatatgacagggaatttttttaaaacataaatccaccaggatgattaaaaatagcaacaaaattgggaacctctccagaaaataggtgaatggtagttgacttagaaacacctgagaaatctacattgtaagaaagaaatgggaacatccgagcgtccgagttgtctcgcagagctcccagaggatttggaattggcacttctaggtacccctggaagtagttgtgagataaggtgaaactagtagtcgaggcctgtttaagaagccgttagactccccattccacacagttgggcaaccgtgcctacttcaaactcgtgaaagaccagaggaggtgtgccgctttcagctttcagtatctaaaatccatagctcagtagtatcctctagcaagaaataaagcagaacgagacttctttgaggaatctcaccagcctaaaaggaaagacctaaagttagccatccataacatggcccaggacataccctcacacataacgtggcccaggacatgccctcacacgtaacgtggcccaggacatgccctcacacgtaacgtggcccaggacatgccctcacacgtaacgtggcccaggacatgccctcacacgtaacgtggcccaggacatgccctcacacgtaacgtggcccaggacatgccctcacacgtaacgtggcccaggacatgccctcacacgtaacgtggcccaggacatgccctcacacgtaacgtggcccaggacatgccctcacacgtaacgtggccccggacatgccctcacacatctttcaatgcatcccagcaaataaaataattctgagaatgaaggctgtcagtttccggattacaagggctcagcgcacctagtttcaacgcaatggaaggagaaagcaccctgccttcttccattccttatcagtgtgcacatccaggcacatgagtgtgagatttcagaacaccggggaacggctggagggaatgaacagtacacatgcagagtattaggaatcaataactttgcagtcctcagatgccacataggaaacacggaatgtgggccttctccaattctgaaggaagattatttccagatagattaaaaggcatgccaaaagacttgtaggctccttaaaaatgtatattccacacactgttttatttatttttattatttttttgagacagggtctctcacctaggctggagtgcagtggcacgaacactgctcactgcagccttgacctcccaggctcaagtgattttcctgcttgagcctcccaagtagctgggaccacaggcatgtgccaccgtgcctggctgatttttttgtcaagacagggttttgccatcttggccaggctggtgttgaattcctggactcaagctatctgcctgccttggcctccaaaagtgctgggattgcaggtgggagccaccgtgcctggcctttacacgcccttttaaataaaaggactagagaatgtactccaaaaggagaaagcatggcataaaggcaatgggagatccaatgcaaagagcaaggtgactccccaggagcacagcaaaaggaggttccaggatggcagccgtgcactcagcatagaaggcagccaggttgggtttagtgctggctccagagaagatagcttaactattaggacacctgttgcctctgaacatattgagggtttacataggagctgagattgaattattgacaagtacctaggaaaccaagggacgtaactccaaggaaaatgggtaggaaagaagaagttaccgcagtaatactatcatataatttagttatgaatagtatttatatagtcctaaaatataagcactgaacagtaaccatattatgatagaagcctattaggagaatggagggcgggaggaggactgatgggaagtgtgtgtgagcaaaagctgaataatcgtcatttccatggggagaggtgaagagaaaatgcccagtcttgaaaagcattttgcccctgactgagtgccagagagcacaccctgggcagaaagcatacccatgagaggcatgtgggagaggctttggcttctgtttaaaccagcccagaagcagcacagcagagagaaatgctgcaggagggccgagggcagggccttgtggaaagctgtggagtccacacatcgtggaagcccttagggtgaggcaaggatgggacccagcactggcctcttcagcagcaggccgtcacggtgaggggagccacacaggagcaccgaagttgggggaacctttcacctggaaagtatggcatgttgagggggccatgagctgcaaatgcacagttcagcaccagagaacccgaggacagggaacccagtgctggagaaaggtctcatgagtgccgtgagtgtgggaagtttcttagccacaactccagctgcaagctgcattgaacactggagagtccactgtggtgctgagccttgtgagtgcagctgatgtgggaaagcattcagcaaaggactctcctttctttggtgccggaaggttcacaacagaaaggccttgttcatgcagtaaaggttggaaaacctgtagccatatcgctaagttcattcagcatcggggagttcacactatagaaagtccttacaaatgcacagaaagtgttccgccaaaggtctgctctgatttagccctggaggattttcagctttaaaatggcggtatagaatcaagctggcttcacatccccaacagaaaaccaaaataaatatacagtgtgagattttcaccagcaacaacccaggactcaaaaagagtatgagacagattctggggccacaaagaagtgaaaaaactccaggcagatggtaggagagccagacttgcgcacccatgatgccccttccccggattctgcctagcaacaattgagtggagaatctttccctgacagtattagtacactgctatgaagaactgcttgagacggggtaatttgtaaagaaaagagctttaattgactcacagttctgcatggttggggaggcctcgggaaacttacaatcatggtggaaggggaagcaggtgccttcttcacaaggtggcaggagagagtgtgtgtgtgaaggaggaagtgtcaaacacttataaaaccatcagatctcataagaactcactctcacgaggacagcatggggaaaccaccccatgatccaatcatctcccacctggtccctccttcgacacctggggactataattcaagatgagatttggctggggacacagagccaaaccatatcaccgactcaccggtttttacactgggaagggtgagactgaggtggtcaaccagctttcccaccatgctagaatccctggcaggagacctgtccttgcattaaccgacaggcagcagcatgactgcctgaagagggaaatctgtggggacaggcagtgacaaatgggggagggggaactaccatccccagccctggagagactgctctgtaacagccacaggagatgccaaatcagagtggctgttcagcagcagccactggaggaggtatgtttcccagctcccttgggcacaaacccctcaccagccttgtcacactgctgggataattcctttgggaccttcccagttcaggacaggcaaagctcccatcatgttctggagttgaggtgagcctgggcttaacgtgccatgtggagctgaaaaggaggcagtgacctagtggtaaagacttgctaagcaaaaatatccaataaaacccaaaacaagccagacagagaaaactggaataaataatccttcaatgcaaggacagatgtatactcacaagaaacaacagcaaacagggaactgtgacctcttcaaaaaggacaaagcaaaaatctagtgaccctaacgagaagacagtttgtgagctctctgaccaagaattcaaaatagcagttttacagagactcagggatcaccaagaacacagaaaatcacttctgaaatttatcagagaaatttaacaaagatggaaataatcaaacagaaatcttggaactgagaaatacatttgctgaactgaagaactcattagaggctcttaacagcagaatggaccaagcagaggaaagaatcagtgagcttgaagactgtctctttgaaaatacacagaggagaaaaaagaatgagaaggaatgaagatcacctacaagagagaaaattacctcaaaagaccaaatctgagaatcatgggtgttcaggaggatgctgagcaagggcaaggggtagaaagcagattcaaagaaataataacagagaacttcccaaagcttgagaaggagttaaacatccaggcacaggaaggtctagaacaccaaacagattccacccaaataagactaccctaaggcatacactactcaaactctcaaggtcaaggacaaagagaggatcctaaaagcagcaaataacataaatgaatggagctctgattcatctcacagcagaattctcaacggagaaccataccctaaccctaaccacctttaacttggggggttttggcaggagggaatggaatggaattttcaaaatgcttgatgatttagtcctggaatgtgcatcacccagagcgttgctcggagtgcaatgaatggaaggaacctcctgccaaatcctaggcttgcgctgcataaaagccattcagtacagcctgtttggaagagctttaagttgcaggtccagcctctcaccctcggcaaaatcccatccaaggaagacctcatgaatgcagatataggggaaggccttctaccacagagacctcctcattcagcactggaataaatgttcaccagagacccagtccttatgagtgcagccagtgtgaggaaaccttcagccaagggccccacctcactctgcactagaaagttctggctggaggaggaccttaggtgtgcagggaatgtgcactgtccttgtttgacttaacagcgcatgccagagaggagatctgagagcagagcctttgtggggatggccttgagagcagcctttgtggggatagccttagccagaagttgaacttctgttcacatgtccacattgggtgctgctcatgcatggtgctgggtctgtgggaagcttgcaggagctacatggcatattccagcctgcccagagcccttgccagagtcatatcactgtcctcctctaccagctgccggggactcctgagccaccccactatgctctttccagtcccttgagggaaacccacgtagcctgagcccccattcccttctccctgattggatggatggggcgtggacatgacctagcttcggctaaggggaccttagccagggtctttttgtggctcacagggacggtttacattttttcatggatgttgctggcctcatatgactctgggtggatttgtctggcttccacctcaaacttctaagggaactgcctgcctcattaggctacctttaacttgggggtttttgtttattatgtggagtggctgagaacagaactgggatctgccatcattggaggtagggatggggtgtggaggcaataggatacagggaagagctctcagtccatttggctgaagtttgttgcgtaagacctgggaatgactgaagggctctgtgtgcagctcagtgctgtggcctggatggatgtcaggattgtttctgggcccaggccaccctgaggagagagtggttggtaggacagtcccagcacgtcttggggcatcctgagcttggtcccttgtatccagggatgtgtctcacacattccagttccgtgtggggaagcttttccctgggactgccaggagccaggtgccctgaagtgcagaagctggtgggcggtgtcattgatggtaagacttgctggggccacgtaggagtcatagtgcaggaatactaggtctgaatagttgggagtgggggagactgcagcaaacctaggggaggtgccccttctaaccgggcattcacacatgttcagtagctgctctgtgagatgacagtgcacagaaatgctgaggacctccagacctgtgtcccacagccactctcatgggcagagcgaataatcgaaagcagcctagtccagggtggagaagttcactgggttgccctgggccagggcttcatgtttggtagggtgaagctgtgggcaggaaattacttgctgggatgccaaagaaatttgcgggacagctgcttgcagggcatgcttttggacttgctgggaagctggagcaggctgggctcccggggaatgctgggcggctgcctgtggggcagctgaactttttgggaggcctgggacagccgcagaactcagccaggatgctccgtgttgggtgctgctgaaacctgctggaggtaaactccactggcgtcccacatacccgcgagtgccaagggagtcggaaggaaggaaagcacagtggaactaggaagagaaaccccttcctcttaccagtgtccctccagagccgcccactgacaggctcatcagccctgtgccagctggcaaggaaggtgtgctcctggatcccggcagagcactggggaatgatctgcaggctggaggaggaggcgtgtcatgtgcttgaagcagtgttgcaggcttcttcctcaggggacccagccttactttcaagaatcttggcctgtgaattgagctaggtctgggaactgggagagaggctgttgctatccacagctgtgactcaagtcagatttttggctcccagacctaaggttttctgctttattccgtcagtcagtcctcttgtattcctagggataccatgttcaattagccactggcaaagagccctgcggaccagggtgttttgatccccagcgtgtgtctgctccctcccttggcagacgcagccgcctggtctttgctggtcaagtcctggcatttggcctctgctcctttggaaccctatcatccccattgaaatcagagagcccagctcagtggcagtgtccctgccatcgcacctgcctgccaaagagagcagttgcaaagcttctcagggatgcaggtgctcccaggcatttctcagtgcccaagtgaaagtgagagtgctttggagccttcttgcagtgtgtagttgagagagaggtgtgcgggtcacacatgttaaacccagtccaatggtcccatctccctacgcctctggaatccctcctccatgctgggaaagctctagcatctcaaccttgttaagtgtaggtcatttctgagttcaagtttcagtcaaacaatcaaataagcagttagagccatgtggcttgttcctggggcgtgcctcattgatggatccagtacgtggagtggtgtgaaccttctgcttcaaggcgagagaccacaattggtggtgatgtcaggtaatgggattttttttttttttttgagacagggtctgtctctgtcacccaggttggagtgcagtggcgcaatctcagctcactgcagcctctgcctcccggattcaagtgatactcagtctcctgagtagctgggattacagacgtgagccaccatgcctggccaatttttgtatttttagtagagatgaggttttatcatgttggccaggctggtctcaaactcctggcctcaagtgatccacctgccttagcctcccaaagtgctgggattacaggtgtgagccaccatgcctggctagtaccaggatttcttacaagggctctttctaacccactgccttttgttggagaaattgatgttattggcatattttaaaaatcatgtccaaatgcagctacagaacatgaagaaaatattttctagagtgaaatgcttcaaagagtgaacaaggaatccatctgctgccattcccccaatccgctctgtcccagtctccaggctgcgaggggggccagtgtggtgtctgatgacgctgtaagtcatcctcagggacagctccaaaggtttagcatcacgtttgatccaaatgttcagaacgtctcacagatgggtgtcatttctgaaaacctgtaactgtaggctaaaattttctgatttagtttaaaaaaggaataaaaaagaataagcaaagaaactgcctggaagtgagacctgtgctttagctggacttagccatcactgaaccagacacagatgctttggtgaagggtgcaaaaaggtcatcccttcatccctctcagaaatgaaagtgaggtagttgacaataatgaaaaaacgttttatttattaaaatgggtgatcattaaaaatgtctatttaaaatgagaagtctgtgtttgtgaatgctgaaagctgaggaatattaccattggtcagtggttcttaattctggctgcacagtgcctgaggtgtgttaaaaagctcccgatgcctgggcattgtctggatcaactgtgtgttagtttcctattgttactaacagatgacacaagctttgtggcttaaaacaagacagatttgttatcttacagttctataggtcagaagccccacatgagcctcactgggccaaaatcaagatgtgggcagagctgtgtgttttctggaaatgccagggagactccatttctttgccttctccagcttctagagtctgcccacatttttgccttgtagccccctcctccatcttcacagccagcaacaaagtcctggctgggggtcctccccacaccacatcactctgagctccactctgctgccctcctacactttttaggaccctgtgatgacactgggccaaccagatcatccaggatgatctccctctcttaagggcaactgaatagccacactaattccatcggcaaccccagttagagcagcatattcacagcttctgtgaactaggatgtggccatccccgggagcctcttacctgctgaccacagccgtaaaatcggaatttctgggagttgagcttgagcctcaatagttttagaaaccctcccagtggattctaatatgaggccatttaactaggactggttatggggaacagctggagggtttcaagaaaggaagtaatgcagcccaatctgtattttagaaatactgctccagttacactgtcaggggtgggctggtgggggagggaggactgtgatgggacttgagtcagtggacaagcgacagctgtggggatcaaggcagtcttggttttgctagccattcctcaaaaggatcaatgtccactacgtgagtactgccctggggtatgggagatacacaaatattttgaggagtcttggacaagaccgagccacagtacgagacacccagtacagcacctcccacccgcagaggtgttttgttttttttttttttttttgagtcagggtgttactctgccacccaggctggaatgcagtggcacgatcatagctcactgcagccttgaacttctgggctcaaacgatcctcctgcttcagcttcccggaaagctaggactgtagttgctcaccaccacatctggctaatttttaatttttttgtttttggtggagacagggtcttactatgttgttcaggctcgtctcaaactcctggccttaagtgatcttcctgccttggcctcccaaagcgctgggattacaggtgtcagccaccatgcctggacctcctccagagttcttgagcaaggccatgccattggtggcagcgaattacatgcctttgtggagatacaatcacacaccataaagttcaccattttaaagtatgctactttaaagtgtaacagtttttagcgtatccacaaagttgtgcgctgatcaccactgtctaattccagaacatttccatcacccccaacaaaaaacttcatatctattcgcactcacaccccagttctgtccctgccaggccccggctacaattaatttgctttcagtgtttatggatttatctatcccatttatacttatgtaaatggaaccatataatatgtggccttttgtgagtggcttctttcacttagcatgatgtttttaaggtttgcctatgttgtagcatgtgtcagaatttccttccttttcatggccaaatagtattctactctgtggatgcaccacattttgtttatccatttatcagtccatggacatttgggttgtttctattttttggctattgcaaataaggctgctatgaacatttgggtacaaagttttatatagatacatgttttcagttttcttcagtatatacctgggaatggaattgctgggtcatatattaactcaatatttaatttttgaggaactgctgaactggttttctcagtggctgaactattttacattcccactgtcaatgcacaagggttttgattgccctacattcttgctaacacttgttattgtctgtctttttgattttactccccctagtggggatgaattggtatctcactgtggttttgatttgcatttccctagtgagtgatactaccacacatcttttcatgtgctctttggctgtttacatatgtcctttgagaaatgtatgtttagatcctttgcacgttttaaaattgagttgtctttttattgttacttagaagaggtctttatatattttggatatgattctcttatcagatatttgatttgcaaatattttctcccattctgtaggttttcttttaactttcttcatgatgttctttgaagcacaaaggcatttaattttgaagaagtccaacttatctatttttcatttttacttgtgcttttgatgtcagatctaagaatccattgctcgatccaagatcatgaaggtttactcccatgctttcttccaagtcttatagtctcttagttgttacattttatgtctttgatccactctgaattaatgtgtacatatggtgtaaggtagggggcctaacttcattcttttgtatgtagatatccagttttcccagcaattatttttgttgaatagtctattctttcctctattgagttgtcttggtgcccttgtcaaaaatcagttgaccatggctgggtgtggtggctcacacctgtaattccagcactttgggaggccaagccaggtggatcacctgaggtcaggagtttgagatcagcctggctaacatggtgaaaccccatctctactaaaaatacaaattagctgggggtggtgatgggtgcctataatcccagctactcgggaggctgaggcaggagaattgcttgaacccaggaggtggaggttgtagtgagccaagagtgcactactgcactccagcctgggggacagagggacactccatttcaaaaaaaaaaaaaaaaaaaaaggaaaatcaattgaccattaatataaggttttattttggactctcaattctattgatgtatttctaaccttatggcaatacaatactgtcttgattactgttgttttgtaataagttttgaaatcatgaagtatgagtactgcaagtttgttgtttttcaagatcattttggctattctgggtttcttacatttccatatgaattttaggatcagcttgtcaatttcttcaaaaaaaggcagctggggtttttatagtaattgtgttgaatccattgagtattagggggaatatttccatcttaacaatattaagtctaataattcattatcccaagatatcttccaatttatttaggtcttctttgatttctttcagtaatgttttatagttttgggggtgcatgtcttgctcttttttgttaaatttatttctaagtattttattccttttagtgctattgtaaatgggattgttttcttaatttcatttcaatatgggaagcataacacagtgcttgcctggtagggttgttaggacagctggatgggccagcaggcaggcaccttacgatgcctgtcttttgagagatgctcagtgagcactggctgtcatggctcctccacctctcttcccgctccccgccacacccaggaccctgaatgagggtggtgctgtggcatcctagttagagcttgaggcttcagagccagcggggctaagattatggtgctaatatgccctagctggggggccttgggagcgttttatagctgactgagcttctgtttcctcatttgcaaagtggggctgccaatgcgatgtcgtttgtgggatgttgtgagggataaacgacgcaatgcagctcagacacggagcatcatgtctggcccacgcttcactgcatccgggataccagtgttgataaatgacatcactgactatgccaatcacagttgacaccgccatcgctggtgtgacgcaccctggcatcagaggtggtaaaatgtggaccccatgtctcttggcattgcagaaatgcaggatttctatcatgcagttgcctcttccacacagtgcatggcctggacaatcccagcaggcttttcctatgtgactcactttcatgtacatttaaaaaaattaggaaagaagctttctgtgacccccaggtactccagcttctgttggtggaagtcaggagatgttacaggcctaacggaatcaaggcctcaggtatttaagctattctttgtttcctacaggaaagagaactttatacacaaggtgggtcccctgaagattagattatcagttggaaacctgagttccaatgtattcccactgttggatctctgaatgctgtgcttttgaccggggtctcctgggccccatattctaatggtcagtttcaggttcctcttctttcacctctgcctgtggaggcaggaggcatgcagtgatcatcaccctccttcttccagtgttttcagtctctgctctccagggaccagtcttctgcatatcatgtctcctggttccatcacagccatgtgaaagcacagtcaccctggagaggaacagaaggcagagtcagcccctacctgtcttacgtgcgccagggaagaacggactcatggcccttctgagacttcaacctgagggtcggtgaatgtcagaacagcagcaacagcgagggctgactccggctttgaccttcagaccctgagcagccagtggagtctagctcagtctcggctttcactgtggacactgaggcttagggaggtgaggagacacagctggctgtggtgggcccccgccctggcggtgccaggaccaagcccagggcctgtctcatgccgtgccctatgccttctgagctgaagaggagcctgttcgttgaggaactaagagtggattagaagagtaacggatgctttctacagaagcaagcggcctgggtttggaatgaggcagcctgttcgtttgctgtgcgtccttgtccctctcagaaccttcctatagtaggcgctttatcaatgctggtcagtgaaggaatgagtgaatgatgtttttcaacaaaaatgaattcattttgtggactaaaatagcctctggggagcccattgcagagaccctgccatccgcgcgccccgggctgcctgtggctctcccaggctgctttccctgcaggtcttgtacgtgggagtctggccatccagcatccctgggaaggggtttttgggaaatgtgcatttatggatttgaaatcccaaacgggatatccacactgcgttagaaggcacagttgggctctgagccaagctgtggtgagccctgggctccagggcggctctagaggaccgaggggccccgggcgggagaggtcgtgctgcgctgagagctcacatttcacggcttgtaaaacccaatcggaattccaggtgtgcaaaccacatttgatgtcccagtaaccaggtaacagcaggatggaggacttggggagagacttgagaagcttcctgaggagggttgccaatccactggccctcgccttcccaacccattgctgtggccagccagccctgtgccctgtctcctggccccagcatggagagctgtgcacttcccctgaccacacggcctgctcattgcacagctgtgcagggcccttcctctctcttggatgccccacttcagatgctgcttctgccaggaaacctttccctcccctcccagctgagtggtgaccccaccccaatctctcaccagaggcctgtaatcttagacatgcctagcaacaaacatttgggggaagggtctgtgtacaggtttgtcatcttcatgcctggaggaggcggcagaggtgatcagtgaacaagtacaggtcaacagccagggtagggaggtgtgctggagggggggtggtgggtccttcttgtgtagagacccgtagctgatctctgcccgagtagctctaaagccttctacttcttaagaccactagaaggagataagttttacccttctgagttaaaactttaaaaaagcccccacaatatcctaatctatgtgtcaaaagcccccacaatatcctaatctatgtgtcttagtccattcctgctgctgtaacacagtccctgagactggataattaaaaatcatagctatttttcatagtcctggaggctggggagttcaagatcaaggcactggcaggttcagtgtctggtgagggccaggtacttctacgatggtacctcgtttctgtgtcctcacatggcagagggggaggaagggcacttaactagctcgctggagctgcccccccattttgttttctggagacagagtctcacgctgtcacccaggctggagtgcagtggtgcagtcacagctcactgcagccttgacttcccaggctgaagtgatccccaccacctctacccccctgaggagctggtactacagccatgtacctccacaccaggataattaaaaataaatttttttgtgtggatatggggtctcactatgttgccaaggctggtct

SEQ ID NO: 1027 - DNA, 387 bp, Homo sapiens
atggagactgtgggcaagcctgttgtttttggccccctgttgttacatgggacctgttttgacggtgggaggcccagaagcagcacagcagagagaaatgctgcaggagggccgagggcagggccttgtggaaagctgtggagtccacacatcgtggaagcccttagggtgaggcaaggatgggacccagcactggcctcttcagcagcaggccgtcacggttggaaaacctgtagccatatcgctaagttcattcagcatcggggagttcacactatagaaagtccttacaaatgcacagaaagtgttccgccaaagagacccagtccttatgagtgcagccagtgtgaggaaaccttcagccaagggccccacctcactctgcac

SEQ ID NO: 1028 - protein, 125 aa, Homo sapiens
MVGKPVVFGPLLLHGTCFDGGRPRSSTAERNAAGGPRAGPCGKLWSPHIVEALRVRQGWDPASSAAGRHGWKTCSHIAKFIQHRGVHTIESPYKCTESVPPKRPSPYECSQCEETFSQGPHLTLH

SEQ ID NO: 1029 - DNA, 7424 bp, Homo sapiens
ttcacgaatgcattcatttattcaatgaacttcgcgtcagccactggctgtcatcagttaccgacctgattgagggcttcatggaagggatttggaggagcattcatctaaaaccacagcacgctgcgacgctcagccctgcagtgggccctcaccagtccccgcgcctccgaatccaccctcccggggctgctcgtggctagcggggggcacctgcggggaccaagccagcccggccgaggcccgggtcccgcccgccacggccctcggggccccgcccgcatctggcagaagccacgccccgtccgtgtgggtggggacggcccgccggaccgaaattcccagactgctgcctcaggcaacgggctttccgactccttggcttcttatgtgaggaaaccacagcgcggccggcatccagagagtcggttagccgcgaagttcccgccggacgaagggaccagccagcgccctgctagacagcgaggccggaagcggaggcgtggcccctgcgcggccccggaaaccagtgaggccggcgcgcgcccgccggaagccgcgaccccgacgcgccccccattgccctcggcgccggaagtggtcgcgggtcgttctgcttcctgcccgaggggcgtgcgcgggtcaggggcggccgcggaggcggaagcatccatggcggagggcggcagcccagacgggcgggcagggccgggctccgcaggtcgtaatctgaaggagtggctgagggagcaattttgtgatcatccgctggagcactgtgaggacacgaggctccatgatgcagcttacgtcggggacctccagaccctcaggagcctattgcaagaggagagctaccggagccgcatcaacgagaagtctgtctggtgctgtggctggctcccctgcacaccgttgcgaatcgcggccactgcaggccatgggagctgtgtggacttcctcatccggaagggggccgaggtggatctggtggacgtaaaaggacagacggccctgtatgtggctgtggtgaacgggcacctagagagtacccagatccttctcgaagctggcgcggaccccaacggaagccggcaccatcgcagcacccctgtctaccacgcctctcgcgtgggccgggcagacatcctgaaggccctcatcaggccagtacggggctgatgttgacgtcaaccaccacctgactcctgatgtccagcctcgattctcccggcggctcacctccttggtggtctgccccttgtacatcagcgcagcctaccacaacctccagtgcttccggctgctcctcctggctggcgcgaaccctgacttcaactgcaatggtcctgtcaacacacagggattctacaggggctcccctgggtgcgtcatggatgctgttctgcgccacggctgtgaggcagccttcgtgagcctgctggtagaatttggagccaacctgaatctagtgaagtgggaatcgctgggcccagagtcgagaggaagaagaaaagtggaccctgaggccttgcaggtctttaaagaggccagaagtgttcccagaaccttgctgtgtctgtgccgtgtggctgtgagaagagctcttggcaaacaccggcttcatctgattccttcgctgcctctgccagaccccataaagaagtttctactccatgagtagactccaagtgctgcggttgattccagtgagggagaaagtgatctgcagggaggtggacaccgagccctgagtgctgtgctgctgctggtctcctgatggctgttgctgcagaagatgtcctcgtagactgtcattgctcctcaggtgcctgggccgctgaacagtccttgggtcattgtcagctgagaggcttatactaaagttattattgtttttcccaagttctctgttctggattttcagttgcatattaatgtaacgggccatggggtatgtacatgtaggggctgaggttggaggcctactaatttccctgtagggaagactcccagcacttctggaactgtgcttctctttatttttctacttctcaatttgatggttcgattaaagccttctagtatctcaatgaaaagggagtttcgtaagcaaaatagaggacagaaatgcagttcatgaacttgctggttggtttttcctgctcctggggtaacacatgcgcttgtcatacacgccccttccttgccccttcagtattctctctttgcgatggaggtctcatagtgagtgtcttcactcaagggtggtttcctggctgcacggcacctgttccaacacctactgtgcctctcatcaggtgtcacgatttttctgccacttcaccttagggagcttccagtgattgattttaggaggcccacaccaaactccccaggaaatgactgccttccttgggaccaaggaccgttccaacagcattcactgccagttctaataggcgaggaaaatgcccgaggcgctgtcttctgtcccccacacgtaccagaaagtgaaaaatgcagcgagtcctctgggtggttatgagcctccaggcgcatgctgtccagtggacagaacatctggcggttggttgattgctctcttttgtcttggtcgctgcttctagaatctatgcaggggatagcagtgaggtcagaagtctttcccgggagagagatggcctgggttatcattgctgatagctttggctgcatgagttgggcttccccttacccagggctgcacagccaggtgtgagggtcaccggcaggtgggctggtggctgcagcctcagagccctcccaggttgctgctgtttccagtgaatcacatttcgtcatttgaagcccatgaggaccattgtgtggatccatggtgattctagacttcagatatatttaggaaggcgcagatttcaaatctgtgtttgattttctgtaataagagaaatccaatttgtaaaacttgaacaatgataccgttttatttacttagtagcatcactgtgtgtcttagcaggcaggcagtgtctggccattattgcgttctacagccagaggatagaattctatacccccaaccccttgtgtcacaaatgggctctgtgtgggtcaccccagctgacccgtgtatgtgcagatgcagttccgaagggaagaacagtcctcgggtgattcagaggggaaaatgcaatccgggaggtgtttcctcagctgaggtgacactgttagaagctgtgatggttgtgtaaatgtgggctgtgtgctgttcccgaggggagcttgggattgggtcctgctgaagccaggagggtcttcccaagataggagaggaaccgcaggtggtgagcggctggggagggccaggacagccggggctgggtgctgcaggggcttcagcccgggagagggggtgggcgtgttctttgtggtaccaaagtgggactaggacaaaaattgggctgtggctggggcaggagctatagggagttaaggaatgatgatacggaagttggagccaccaccgtggactgggccttgtcactggaggtcgtaggcagtggctcatcaccctggtagggctgataggggctttcagggaggctggttagctccctgcactctggctctttactggcttactgtttagctcctcccacctcgaggctcttcttcctgccaccctttgggctcagaggagggtggcttttttcgaggtgagccatgttgtagacacatgatacgctctgcgtctgctctactgagtactttctgcaggggcctgttaaggacgaggcctccccagccctgcccggtgcaggaggtggctcagttattgaaccttttgggaagcagcacctgggaatgctgcctcgtgggagtcccatgcgtgagtgtggtggtgtgaccttcaggctgcacagaggcaaggacccagatgtggcagcatgggcgtcatgctcctttgcacagcccagggcctgttttggagggaccaggtcactgcccctggtctctctaggaggagtggactgaatggatcgttgcagagaagactcacccagacctggccagggaatgatgtatctggggagagaatgagctggaggagggggcctctcatggcccttccctggcctgtggcccagcctggctggcctgcaggtgtctagggtctcagcttttcatttgcagaggacatgttcaacttcctctctgttcaagccagcctttgccaattttttcagaatccaaacaatttggaggtttggtatcttgtttcatagctgccaaatatgaatctgaaaacagggtgggtagctaaggtcattcctcctgggttttagtggcattgccttccttcactaaagctcccttttttttctgttggcaaggacaggttacagaataggaagagtagcactttccgcctaagcactttaggaaatcacctttctaagccctggggcgcccaagtcccatgggacagggaaacgtggtcctcagtgaggctgctgcctggctggcccggagtcctccctaggagaggggctcgatgggctgggggaaggagcctgaaggttgcccctggttgcatcccagaagcatctgactgtcaccactgccagtggctgtggaacagtcctgggccctgggccttggctgctgtcaacagatgggctgggctgggctgtggtggggtgggggacaacgttggtaactctgagaattcagctttggagtcccgggtgaggggttttagataaacccatcaatatcacccacattctgtgactctttgcatcactcgtgttatttatttatttatttatattctgccttgttccagaaaagtgtttaaggcaacaacgcttgttttttggtgttttcttttgacatttgaaaatttagtacattgttaaaatgtacttgttaaacaggtaattttaaagagaaggaacaattgtttttagtaagttttctttttcctttttcaatgaattgattcttcaaattaaaagttcttgagagaaggagaggaagatacagcagacataggactgagccaaggaagagtctgcctgagagagacgcttggcctgtgctttgctgccatccgtgcggccttggccacatccctattaacagaggcagctccacttcagacagggacaaggcttcctgctgtgcctttctggcagggttttgtggggtcacatgggaagcaatgtgttacgcaagcagtctccatgtgtgtgtaaactgctgtcctggtgacttgtccctcttcttagtggaaatgcatttgagatggtgacagggctggatgaacgtgtgaccctgggagatccgggctggactgtggaccccgatgggccagagtccttgtggcccacagcatagcactggggacagagcgctctatgcaggtgaggcgtatgagaacagcatggtaaataattgatgaagtcacatttgttcaacttaaaggattgttctttattctgaagttattttcttccttatttggatgataaaatttccttttatgtaatgaaggtaaaagtagagggcaatatttttgctttttgaaatgctcttggttgcaaaacaaaatgttggttgctgtttgtcagccccagaatttcttcttaagttcgcctgtctctgaaatcccaaagtcacggaaccgcagtctagctgtggtgcatgtttacgtattggtgagaaattcctcttgggttcttgaacagcctgtacgctggcaggcagcactgcagcatttctgctgctcatggccaagaacgagtctggagatcgctgcgtgcggttttaggaagtgccaacacccgtggtgatgggcctctggccacccctggatccatgggacacactcacaggaagctgatgtggccttctcggtgaggactgcaccttaacctgggcactgggagcctgtggcccccctgtatgttggtgatgacactagtgtgggtcttctggctctggggctacagcttctgcctcctcacctggccgtcggtactcggcaagcaggcctggcctcccggggcctggatccctaccggctgggattggcctcctggaagtacctgtttgggccatgtgacctcctttctcacttatgcctcactcccctcctcccgctccaaacccgaacctctcagtgtggaatgaacgctccaaacccgaacctctcagtgtggaatgaacgctccaaacccgaacctctcagtgtggaatgaaacagtttagatgtgtacatgatgcacgtgggtgggattcacatcccaggagaattccacggagaggaatgtgcagattttgaagtgtacagtgatgtgtggaataaatactagaaattctcagcagacagtgggatggagaagtgagtgggggcaggagggggatttctgttgccttgacatgtcgttgctcagtgcctggattgcaggcgagtctctcttttttatgttgctttgatttcaagatctcttagatatactaggtagtgtatgaatgtgcataaatccagtttgagaatggtgtttatgaagaagctgtttcgtgtgtacagttgctgctgtaatttagccagcagtgccctgccctgccctgcagtgtctgctcagctcccactgcttctctttgctgttgggcatgtgaggcatgacttggaggggggcctggtgcctggggacctgctgaagagaatgctcaccaccagctctctgtttccctttctgctttggtaatcaacacgtgtttgcctgcagtggccgggaccgtgactgtttctgcccttgtgcctagttaagagccttcaaaagcataatgaacacttttgatatgatattgtaactttagtaaatgctttacttccctctaattgcccccaaatgccttaattttgtggactgtttatttcaacaggtggaagtgttggtcgtgcgaaatcttggtattcgcatttcaagaagggagttcttttttctttcttctttctatggaacgtttcaagtgattggatagaaagaagggctctgaagcaggagttttcacctgctctgagggaacttggggctccagggacgtaccccaaatgttgcccaggttgaaactccctgacagcctgttctacgtagtggctcgtggtttccagtttgaagagagttgtgcccctaaaagtgtttgaaacctgtggctttcaagcaaggtaccgttgtccccacagtgttccgtggggtagggggtgatggagactgtgggcaagcctgttgtttttggccccctgttgttacatgggacctgttttgacggtgggagggtgagatgtgaagatgtgggatgaacctggaatgaacgaattaaataaagacatgcatccatctgtcagcgac

SEQ ID NO: 1030 - protein, 169 aa, Homo sapiens [sequence omitted]

SEQ ID NO: 1031 - DNA, 279995 bp, Mus musculus
  misc_feature (1)...(279995): n = A, C, G or T/U
cacagtcccaggggtcctcgaggccctctctgaggactggtgtctgacccgagactggaattcctgggtaagaagttgaggccaggctggtctgtttggtcggggtgcggaactcagctgatggctgagccctattccccagcccttaggtgaagtaagggcaaagaagagttgaacctcaaccaccagccccaggtaaccccaaaccatttaacctgacacttggtatctctcctcccctgagtagggttactgtggttataaggtaaccagccgcctggttgctgcacttggggactgcgtggccatggagggagcattcgattaggtcagagaagacctacctagttcgtgagactctgtcatggtcacaaatggatggtgacctaggtgaagatgctcggtgatgttagaggaatggggacagccctgcatggaggtcagaggacagacagttctcaggagttcacttgaaacttctacctcgtttcaagacaggatctctcttgttgtttctgtcatttccccatgtcctccagaccatctgggttgtgagcttctgggtgattgtcctgtctcccatctcactgtaagagtgccaggcttacagatatgcacctggctttctctgtgacttttggggatcaagctcgggttgccaggtgtgtgcagggaagtgtttttacccacggagccatctccccagacccttcctcctaacatcatcttgagaaggctttgtgaaagtgacatatattcccttaactggtaaggtgtatgtatctattttctgttttgcttttatcttagggatgagatgatcattattatcatagtaaagagccaagaatgattcaatttaggaaagtaatgggaaaatttgctcatcttttatgggatcattttaccataatccctgccgataaagtagtggtttctttcaaatgtgccagttcagggtcacggagctgcgctcttaaagcctccaattgattgtttagtggggaaatggtattcaagtgaggcacatcagcatgcaaatctaaaatgtggccattttcatctagattgaatattattaactagcccaagggataggatgtaattaagattttcagcagcttatttttgtctaccgtgatgagaataaccccaatatttaaagcaactggcccatttgaataataggaaggtggttcaatgcccattttgacttctaggtataatgaaagtgtttggctttttctccatgtgtctgagcatcgataagggcagggggtctgaacctgaagcacagaagggaacacgccgattgcagggccatcccagtctgttgttttgggtgaccaggttccagctcctcactctgtcacgaatttttatatcttctgatacgggtttaagagcagagacccactggaatgagtcaagtcatcgctgagaggttcggcttttgcctaattagaatgatggggcttagagcctgtgagcacagatcaggtcaagcaggagtataactcttagtttggatctattgcagaaaagtttgcaaggtctcaggtctggggatgtagcggtgagaaagtgcttgcttggtgtgcacaaggccctgtggtcactccctggtgctggtggggaacgatgaacagaaagttttcaaggtctgcctccacccgtcacagagctgatcaggagggcagatctgatgatatcttttttccagtgtacttcctcggtcaccattcttaggtagaacaagaggctcgtcccatatcattgtaaaaggaagagaaagttctcctttcctcccaggaaagatctgttgcagagcagtaccaccttcagcagacacccaacaggctgggttggtaccaaggctcatttcagccatccgaatttccaggtgtgccgtatgtgtttagtacatcatttgataatattaaaaaaaatatatattaaagcagtgtgagacgacaggagaaagaagatgaatgttagcattcccctggggttcatgggtgaaggaattaacacagcgtggcactctaccctagctgtgtttgtttccatggcaacagctacgtacatgtttcagactatctacagtgacacagttgcagaaatagtagcttgcaggtttctgatatcgcatcagcggacaggcggcacgcactatattaagtaagtgtaaaagaatttaaaatctaggggtggattcggacatgtagagctgagccgagcagtgtgtcaggggttgttatggcttttcccttttgcatgacagcaaagttgaaagttgcaagctgccagtcaaacaattgcccttgcttgggtaaatatcatcagaggaaacaaatgtgagtgacagaggtaagaaaatggcttgggcagctggcatagggggatgcagacagtgaggctaacattttggaggggtgataatggtaggataagaatggaaggcttgtttgaaaatagccgagcctttaagcagatctgatgtacaacagaatttttagcagctgctgagtttacagcaactgaggtcttttgaatgtgtggctgtggaaattgcttttatataaaaatgatcaggtggggagcatgaaggctaattaggggtgcagttaaaagagggtcggggctccattgtctttttcagagtgcttatataaaatatccctgttcttccctggatgaccctggtttatttttgacattgcctgttacttttgagtcttccttgctggtctctgtttatattatgccgccacattgtagcctgagatgacttcagtggtggctagagagcagccaagcacagaggatagactgtgtgagcttgtgactctgcgaccaaattgtacagtaatttaggaggactgttggaatggccgtttatttacattgccggaaacctacttttgaatagcagcccaggtgttaggttaatggatttcaatgtgcacgttatggttacaggagctttcaagtatgttatagctaatttatactgagttcttgatgtcaaaatattttcctctgtgctcgttattctgcttaaacttacatttaccttatactctagttttattaatcttgcaccagtggagagaaagcaaaacagaacagtcatgtgagataatctagtcgtttgaaggttagttttctgaccttaggagagcttttacagaatgtgatgtattgatgctttgagtctgtatgagactttttttttttttatgtgcacaggagatgatctacagcccctactgcatattatccctcatagtaattatttgaatagatgttaagagaccacctctgggggactccgagctgctgaacacctgggcatgtggagaactgggacaggttttgaattataaactagggatgtgaaggctggcatgagcaaccccccagcgggtagataggtcctaccttcttatggtcctgaatggaatgagttctgaagctatgcaagcacatgcacggtcggtctcagcagccccaggtgggaagggaaacttacccgtggtggctcacaccaaaggcagggtggttcttgtaggagccttctgcccactcccgttctcaccacagttgaggcattagatgccagcctggctttgcagcccatagagggtgacttccttggcaggggttcttgtgatcggtgcagggaactgccactagaggggctgaatgccattggtctgatagttcacatgaggttcggcctcatgtaggtaggaagggtcctagaaaccttcggctcattcgccaggactcagttgcaaataaacaaagtcttagagaatgactcaggataaacaaggatggccagttccacttttgtttttgaggtgattgtgtgtgtgtgtgtgtgtgtgtgtgtgtgtatacatatgtgtgtgtgtgtgtatccatgtgtgttgctttgttctaactctttcataagaataaagagacacaaagcaggcacagtggtacttgcctgccatcctggcttcagctcactagttctcaggggcagcatcatcagaagggccaggtcatcctgagttacacagtgagcttttgggatacattacttttctcctcgtgggtaccagttatccaacaaggagagactaaagggaagagagatttattttggctcacggtgggaggaggttcgttgtgatggggaggacttggaggcggcggctccgcagaggcagggaatctgcagctggagctactcaggtgctcacatctgtgcggaagaggaagcagaaaccaggctagaagcccaagcgggctactgacctcaagcttcctcttcacttcccagtgccccacttcttccagctatgccccacctcctaaggattccgtaacctctccaaggagtgccaccagctggtgaccaaatgttcaaacaccatggggacattgtacattcagtccccaaaagcattagaccttcagttgtagccttttggtgttggtggtggggagtgggatttgagaaagggtttctctgtgtggcctggctggcctggaactcactttgtagaccaggctggcctcgaactcagagatctccctgcctctgcctcctgagtgctaggactaaaggcgtgtgtaccaccaccgcccagcaagttatagcctattaaaggctgtgacttccttactttggcagattttatagcacctagatcagcttccaacttttgtatttgaccaagttcttaaaacttaaagttatacttcgtgtgaccgtctccagatcagagagagcactgaggccatgtctgtcacagcatcaagcatctgcactcatttgttcgagttcagataattacaaattccctactgcttggcaccagctaaacatagtaacaagtggctggttgtttttcttcttttttgtaaagtcctaaaactgtagagataaaaggccttcccagggcaacattgctcaaatgagagcagagaacagggtttgtttgttggtcggtttggtttagtttggtttttgctacagtacggagtcactgtattgcccagattgaccttgaactcatgatcttcctgcctctacttctggggttcaaagcaggtatgtctctgcgaaactcagttacggtacttttttccagtggcagggttcatcggagcccagctgagagggtgtctgtggtcctgtctgtagagccttgaaaggtgtggctttgggtttcatcatggactaccagtcagttcctgcatctggattggctccctctacaaacaccgtcatccagcaatgacattagtcagcccttcactgaaggctagtattattgggttaaattaaaaacaaaagtgcactgagaagtgagccaaggggagctagatgtcccctccacggggacacagcaggacacagcagctgccgagtttagtcaagttcagacccttaaaaagagtggaaaaaaagaaagctcagactttccagtgcccgagcaccgctgtcctggccagatgggcacagtgccggggcaaaaagaggtcttcggtttcagaaatctgagaccccgaccttgcaaacagggagggacacaaggctgccactgggtccaatggtggcatttgggttgtttctgggctcctgtctgcccattgttacatcagacattactgctatgtgaagcccacgacactcaaaagagtcagacctccgggtgaacaggagtgtgcgacttcagaaagggtgtgtgtgtgtgtgtgtgtgtgtgtgtgtgtgtgtgtgtgtgtgtatgggcatgtatcagcagcttttttttttttcttttttttttttttttgtctttcagctttttttttatttttttttctttccattatttattaggtatttagctcatttacatttccaatgctataccaaaagtcccccatacccacccacccccaatatcagcagcttttaaggaaagctttctatgtaaatagaaataactctttcccagagttagcctgtttagggaatagcacacaattcaggtttctgagttggaagcctgattaatctctctgtcagttacatatggaaataaattagtaaatggtccatctgggactaaactactgcagaggcgataaattatcaccgtcgtatatgtcggtgttgctgaaggctgagctgtgctctcaggagctgctgaaagataactggatacttggctgtggtcagaggcagaacatttgatgggaaaaaaaaaattctgaggaaggaatttaccttgaaatgtttctagggagaatggcttggttgataccaagtttgttcctcaaaactgctatatctgcaaacatttgaaagggaaagtcttgagggcatacggaaggtttgcgtcctgtattttcaaaggctgatataataccacatcggtgattaatacccaaggtctcaataaagagtggagtctgcgagattgcgagctacgatctgcacagcagcttcttctgtttccttatctcagtttgaacaaaggtgagacaggtcaatgtctctcttttcctcctttttaaaaaaaggtctgtttggtgtgtgagtgtcacagggtgtgcctaggagccagaggacaacctctttgggagtcatctctctccttgcgctgtgtttagaggcaagatctcttgtttctgctgctaattgctgactgctggttcactgtagacttcacttctccctgcaggagtgctgggattacagatgtgtgccaccacatctggctcttttttttttaaatgtgggttcttaagattgaactaggggtgtcagacttggggggcaagtgctttatcctagccctaaccctcctggctcagcctcctattattataagaataagctaccaacatctttcctaatacctcttttgtataaaattaaaaagtgggatgtaggggatccagaccttgctcatagttaggtatttgcatggttagaacgaagagtcataatgaacaaggagatattcagagttctttctgatttctaaaattttcaattgaagccttggtatggcgtcaagtcccgtcattgatagctgatgtcaagaaatgaagccatgtcaccttctacttatgttttatgttctagaagtgagaacaacaactgaacacaaatgttccatttctccaactggatggagatgttgactgtgagtttagcttgggtgggccagatgcaaaccacagtcaacctgagatgcttataatggttataatgtcaaaaccaagaaggtgtcaggacgtctccccttggcagaaatgtcccctggctgcaatgacgtccagattcttgtgcctgtcttaacacttccttttgtgttccttctgggtggaccatgaactgtgaatccttgaagcagttgagtctcccttgtggaaaaatgcagagtagtgaatataaaacataaaatctaaaaaccaaactgggcatagacaagggtttctaagcataagccacgtgtgcaggctgagtggcctttacttagggattggaagccatggctcccttgctctcacctctctggatttggaattgaccttggttcactcagatcttcaagttcctcgtttatctgccagatgtggtgactgagtatctcaaagaagagtcaaattagggcattgcctgtattctcctgccccatctagtgtttgtttgtttgtttgtttgagacagtctcatatatttcagggtagcctccaacttgatacgtagctaaaaatgaccttaaaattctgattttcttgtgtctacctcataagtgctgggagtacaggcatgggccactgtgtcagtttttacacatgatgctggcaatcaaaccagaacttcccagagctgggcacacattctgtcaactgagctgccaacccagcagtcagattctgatatttcaagaaatgtttatttggtgtgtgaatgtacatgcaagtgtgtgtgtgtgtgtgtgtgtgtgtgtgtgtgtgtgtgtgtacgtgctcacacattggaagtaagagaacagcgttctagagtttcacctcttggagacagggtctctcctttctgctgctgtgaagcacactctgggcttgacagcctgagagcttttttgaaagtctgctgtctctgcctcccatctctcagtaggtgggctggaagcccagatacccacaactgcgtccagttttttgcatagattctagtttctcacatgagcttgaactcagagcttcagacttgaatagcatcatgttactccacttcctgccacccaccctgttctaatctaaaggttcataattattgccattgtcttaagacaaatctgtcacttcatcctaaccccaactagagagagacaagtgccttccctggagtcctctaaccaaggtgaaaaacaaacaaacaaaaaaacaccaaaaaccaaaaagccaaaccaaacactctctggtgtttgatgcttgtgtcttcctgagagggtaacacatttagaaggaactcctccatatcttcttcctccctgtccaatccttcctcagtattctgtctttaattatgttttagacatgaaatagagtagggtaagattttattgtataccgggatcaatgcctttgtatgaatggatgaatggatgatctaagatcagaggcacgtacagggcgcatgagaacactggtctccgccctctcctcccaacattctaagtcagtagaaccgggatcagggctaagattttcatctttctaggaaaggccttagatgctgctgctgttccagggtcctgtttgagagccactggtgtaatgacaatttcctatcatgctcataccaaccatcacaggataataccatgcctagagaagccactgatttgccattcttttttttttttaagatttatttattatttattatatcttaagtacactgtagctgacttcagacacaccagaagagggcatcagatctcattacaggtggttgtgagccaccatgtggttgctgggatttgaactcaggaccttcggaagagcagtcagtgctcttaaccactgagccatctctccagccccctgatttgccattcttaaggcattagatgccaaaaattatcttccagcagaaatcatcatctcatgtgcccacttttctattgtccagggttattaactgtgacccactaacttgtgggttaatcaggctagtctctaccaggactagagagaatgcattttccagcaaaagaatcattaatgttacagcctgaacactacggctgcccagtggatcgaggttggccttgaacacatggcctctggcagctctcctttagacagacaagtatttcagaagtcgctatgagagctggggggatctgcaaccctataggtggaacacaatatgaactaaccagtacccccccagagctcttgtctctagctgcatatgtatcagaagatggcctggtcagccatcagtggaaagagaggcccattggtcgtgcagactttatatgcctcagtacaggggaatgccagggccaagaggtaggggtgggtgggtgggggagtgggnnnnnnnnnnnnnnnnnnnnggataacattggaaatgtagatgaaataaatcccaatttaaaaaaaaaaaaaagaagtcgctgtgataaagaaaagtggtctcaggaatgtctagatggcttttgtagcaaatcaaataatgtcacaatgtctatggcatgtattttcaaatttctgggccctcttgtgccccagaagcagtttcaaaaccactccatcctgaaggcttctcactccttcgccaactatccaagaactgagaggcactctggcaacctgcttttcactgaagagtgtcatttgtctggggtcaggccagagaggacgcgcgttgtggctgtgaggactctctgcttctttagtctaatcctgtctcccttctgctccactccagcagcctctggaagtgtcgcctagtgattatgaagacacctttgtcctttctggagcgatgctgacctggacccattctgactcaggtaatcactctctctcctggtccttccccagccaccaaacctcagtagatcgaggaaatcaatgaaataccacagctatatttatatgcaaataccaagttgattgtctcccccctcccccattgctgttcttcctccaatcttcttttttttttttttttaagattttattatttcatgtatgtgggtacactgtcgatgtcttcagagacaccagaagagggcattggatatggttgctgggatttgaactcaggacctctggaagagcagtcagtgctctttaaccactgagccatctctccagccgtcctccaatcttcttaatgatccgtttacgctgctgatagactgacaaggtggtcaatccagcttaggcattaagataattggaagaccttgagtcacatctttatttaaaattctgtgtgtcttggacccatgagaccacacgaacattgctgggaattttcatgtggagacagactagaacctaagtagtgcctccactatgttcatcaccacctttcccagaatgccatgtgcaactgtcttcctccttccgatgttgtcccagttgtgtccagaggagagttctgagtgtccgttttctgtgcttggggcagattgggtgaggaagcacaaggcagttttccaatcttcagggattgctcaggaatgccaggttcacagttcatggcaggcggaagggctccgtgtggagcaggggctggtcactcagtacaggactctgcttcagagaacccacagacttccagatcggaggatgaagtgactgtcaaagggatttgtgagggtagaagcatctcagatgacttagtctctgaggatcactcagccaggcagagagaggtaggaaggaggacatgacacttaggcaggaaggcagggctgagccctcagtgtgcccagaggatgcacagctgtctaatccctcgtctctgtcccagccaaagtcagagttcccctcaaggcctgggctgcctaagatcctggagtagagctacttgggagaaacgccatcctgtgaccaagggggtttgcctggggacagcaccactgttgtatagctttggcatggtgctttttcctgcactcctctctccaaagctcacccctccatcctcgacgtgctttggattacctacagcctgatgagaggccctggatgaaacagacactgtgcagggccagtacctggccttcaaaggtgacattttcaagctaaggttaaaaaacaaaaaacaaaaaaaaacaaaacaaaacaaaaaaagctgggcgtggtggcgcacgcctttaatcccagcacttgggaggcagaggcaggtgaatttctgagttcgaggccagcctggtctacagagtaagttccaggacagccagggctacacagagaaaccctgtctccccaaaaaaaaaaaaaaaaaaaaaaaaaaaaggtgggtaactaaaatggctagattatatagggaggagcctctggaggggagggcagcccagcccctgggctgaagagttggttcaggtaggtgggggcgggcggaggtagaggatagggggtgccagccatatcctatagcaggtagggcctgagggatgctgggataactcagtggtcaggtctgatatattattgatatattaaataggcagctaagctgtttatcccaggatttgaggcttagcagtcttactccctaaccctgaatatcaaacccaagtgtggtgcacctgcctgggagcccagcacctggtgtgcaggcaggaagttggaaatgtaatgtcatcctccacaacacagttagttcgagcttgtgttgcctgggaccctgtatggaatcgacacttaagtagggttagtagggctttattcggggcatagtcctgtattcattcatcctgcatgatgaaggcagcttttgcactccaatgaggaggctgcctaggcagagcacacaccatagaatatttaccatctgaccttttgcagaagtttgctgcctcctggcctaaacagtggtgtgacacccgctcttgcaaaatttgagatgtgggacttgttccccattaagaaaatctggtcagacaatgagcagactaacgtaggaaggggagggtggagggatttcctagagacaccggatcagccacacactagctggactttccaggtatctgtaagtttcaattaaatctaaatacatcatcggagcgatttcatttcaggaaccagagtgtactatttattaatctggttttcacataaagtaccaggcttcctggaatgaccttgatgttggaatagatgggtatcaaattaatgctattcttgcatctcagaacttttttctttttctttggcactagatatgagcgcttttatttgaaagcaaataaatattttgggtttaaatcaagtgagtgttgcacggctaccgtgaataagctcttttcattttgccaatgttttttcccaagctggtaggattgtacgacactggagggaaatctgtagttaaaactggagatacgagtgcctgactggctgagccaaggaaagctgtagcctagtaagattaaaacgggcatccagggggctggagagatggctcggtggttaagagcactggccgctcctccagaggtcaaaggttcaattcccatcacccacatgactgctcacaactgtctatcactggacagaatccaattccctcttctggtatgcagacagacaatcagacaaaacacccatatacataatataaataaatctttttttttaaaagtacatcctgtggggctggcaggatggcttagtgggtaaaggcacttgctgccaaacgatgcaggccagatgaccagagtccaaattcagtcccctaacccaagtaaagatggaagaaaataactgactctgtaaggttgttctctgacctccgtatgcacatggtaggcatgccctctcttacacacacacacacacacacacacacacacacgcgcacatgcactcatacgtatacttacaatgataataaataaacagtaactgtttgactatatcagtgctggagaatacatggttaagagcacttactgtctgccagacacacctttaatctcagcacttgggagacagagtaaggtgaatatgagttggaggccagcctattctacatagtgagtcccaggacagccaaggctacatagtgagaccctgttttgaaacaaacaaacaaacaatcaacaaaaagagcactgactgctcttgaagaggactgggattcagctcccagctccttcatgggggctcttatcactgcccacaactccagttccactgcctgcacatcctattctggtttcctggcttctgcacacacatgcacagacattggtgcaggttcacacacatacataaatttaaaaaaaaaaaaactttaaaaacgatgaaataaataaaatagaaaagcgtgttgggggactggaggtagaccttggttggtggagtgcctgcctagcatatgaaagtcttaggcttagtctgaaacactgtatacactgggaatactccagtgagtattcaaacgctcccagggaacgcctggagtccttatggaaggtgtgaacagggcaggcagcaggcacgcagcctggaggtctctgagtcagagcttgggagacttctgtagctaagttccaaaccagctcgggctccatgggaccatatccgaatgaaaggcctaaccacagtcaacacagaccagaaagcctgcaggacaaaagcgtattaagcaaaaaactgttcaacaaaatgcaagaccatgtggtcatttccctaaatgcttcctcgttagtgttccgaaccaagcacacgagctcagaaggaccagtggctcaccacggagccacatgtgacagtcagcttgcattgcttgcttcaagacacacacacaccccccccccaccgatccccctcgggatctcacacacgtgcttcggagatgtacaaacaaaaagaaaatgcgcccgttctgaaagaaaaactaggtagaaacttctaatcttgtctcataaacaatatagaaataactttaaaatattccactttaagcatgcatttaatttgtgctctgggaaccaaatagtgttgccaagatagagcattctaataatgatttatgtaaatttatttgtacaaagtaatggtgtagttgcctatagcaaattgcttagaatatgaaatgacatttatggctccgtcctccccctcccctgaatgaatacattggagaaaatgagagagtccagaaagcagaaaagaaactcaggttcaaaatggaggctgctgcgtgaggaagcagagatggctggttaggttgtaaaagtcctatctgtgtgattctctgtgatttcgagtctttttttttttttttttttttttttttggacaagagaggccagagtcctgtgttttggggatggtgaaatactcagacactaaaactcttagaacagccacagctccttgccctagttggtgccctggtggcttgcttacaacatgtggtacgcaaggcaaatgtaattacagttaggcaattaatcttagccacgagttactcattaccagagaaagtcatgcttcagtcataaatgaaacccaaatattataaaacaaaagccaagctacagaagtctcccaagatctgactctgagacctccaggccatgtgcctgctgcctgccctgtttgcaccttccataaggactccaggtgttccctgggaacatttgattcataaaagccatgcacacaccagagcggctggatgcttaggcctggtgaagactggctgcagttaccacaccctgccctgtttcaaaggatgactctaacatctttactctagaagcgatttgatttgttcagaaagtacttttactctctcgtttgcttgctggtccccatcatttggagggggtgggaatttataagatacatatcaagaaatttgaaggccatgggagtcacaaaacaagagagcagcagagtgagccatgggcagattccacttgtcgtgtcatcagctccagctcgggcttcagctaaggggccgggttggacattctggacagcttattttgttccagtcaaagatctgctcatgctggggagagggcaggtagaattgagtgatagtgtttctgggctgttctagagctgcggactgattgatggctgacgagattgagaggccaaatgcaattgtcagaccgaatgaaaacaaccctggcttccaggacagtgggggaggacgggaggagggctggttttaatcaacaaatataagtctgaaaatgtatgctaaggctgtttttagggagtggtcctaccaacccagtctaaagcagcggatccatgttgttactccctgtgatgactaatctagattgtcaactttgggggtgggaggtgggatttagaatcaccatagaaacaaacctctgggcatgtcttcctggaaggttctacattaggttaattggtgtgggaagacccactctaaatatagaggatgccttttttacgagccgaggacccagactgattaaatagggggaaggaagctgagcagaagcatcctttggttcctaatcttggatacaatgtagccaccagcctcaccagcctctgcccctacctccatggcttcccttcctccgcaggctgtacgctcacagtgtgagcagagaaccccttcccccagttgcctttgttaaagattttatcacagcagcaggcaagtaactaatacatcctgggacttatcctttctgcttcctggccaaatgaccttggacataatttctgaaacttgtttactttatggagatgataggaaaattaaataactcattaagtacttagcatgctgctcaggaggtactacttagtttatggtaactcttaaaattcttctagttgatgtaacctggatgggccagactgaaaattgtgagattaaatatatatttaatttaaatgtggcttgatctaaaagatgttaaagtcaactgacttttctatgtatcaaagatagcaaatcaaatatgagcattctttcacttattcatttaacaaacaactcttagtcgttaatgccctttgtaagctgttcataaagatggagaaaccagctagcctgttctcaagcaataagggagtttgatgttttttatgtctgtctcgggatttctttttctttccattgttttatttaaaattgcctttaaatatttgaccataaatatttaaatatttaacagatggctgtttacacataagtgtgggcccggtgcaggccacattaatatacatggtcattgtcttctgcgagtgcctgtgagttgcttccctttggtggtcctggctagctagggggtgaattaagacccatggaagggaactctggctcttgtttcggctactcctgcctgcaaagaaggccattctctctgctgataggttctcagccagtatagtcagacattgtttagttagaagtaatttccagtagaagtttatacactatgctcttatcaagggttggaatgaaaatgagtcctttataaaatgtgtggatttctggtttgttgtttgttttgttttgtttgttttttgatacaggctttctctgtataagaacagctgtggctgtcctggaacttgctttgtacaccaggttggcctcgaactcacagagatcagcccttctctacctccctagtgctggtttttaaaggcatatgctaccatgcccagcccttttttgtttctaatggctttatgacatccgagaaagggcatttcacaaaaggttctctgaagaagatgaggaaatgtgaagtgtgagattcctttttactgttttaagatagggtgtcgcttagcactggaacttgatttatgaacctggctggctttaaactatgagatctacctgcctctgcctccaggggactgggattaatggcacatgccaccttagccagcaaggatttgtaagtggaaggagaaataagaaataactagtaataaatctatgagtctggggtgtatgtagctgagcggtagcacagtggaagagcatacagaagaactcagggttgacccaagggcctctcctcccattgatgcccgactaggccatcctctgctacatatgcagctggagccatgagtcccaccatgtgtactctttggttggtgatttagtcccagggagctttgggggtactggttggttcatattgttcttcctcctatggggctgcaaaccccttcaactccttgggtcctttctctagctcttccattggggaccctgtgctctgtccaatggatggctgtgagcatccacttctgtatttgtcaggcactggcagagcttctcaggagacagctctatcaggttcccgtcagcaagctcttattactgcccgattttcattgcactctttctatgctcgcctacctcacgtgcagaaggcttgttgtacctgtctttcgcaggacaagctaaagtttttccacttgtgtctccttttagcctgagagatattataggacactgggtatgtaagtaaattaaattggtacacaaaaaaattaaatagttgctgttcataaatcataaaatttatttaaaaataactccctggctataatgggattttatcatctatcgagggcaaaagcagtttgcatactaattagatggatgtacttatttattttatataacaaagcaaatcttagaattattaaaaacttttatataatgaattaagtcttagaattattgaaaattctcccctaatcccaaggtgaaactcaatatttttccttgaaactcaagtcagacattcaagtatcaatttagaaagacaaacattccaacaccttcctcatccaggggtgtactgatttgatgcttaacatgtaaggcagtggtggtagggaaataagaaaggcctttgattcctagctaagccattatgtttatgcagttatagcatctagcagtctcaaatgagctgagaccatgtttattgttgctgtgttctgtgacagcatgtatgtatgatatgacagtgtgtgagatacaaaccccctgtgttgtgtgttcagaaccaaggctacagtgaagtcccaagatgccatggggtcaggcagtgccaggcataccttaaattcaccttttacagtgaccacatttttatcccatccccagtcacttatacaaaaaaaaacctgtggctcacagtgttcaatctggcaatgtcctgtttaagcctgtagtgtaagaatgacgaacaatgcagttacccaggctaggtgtgcagcaggctgtaccatgcaggttagtgttgtagcgttgtacgtgtgtgcagaaatgccccctaatgacttcattactgaggttaaaaaatgagcccccgagtttgcagtctcgctgctgtgtgaaatctgtatctgcggacccttggctctcctcttgctcctatttcttgatgctgctttgtctcctcctcgtctagcctcctttcggtctcagattgccgtttactggaggcccaaagcccagggcttatctttattaaaaggaagattagcaggtattagaggcataccagcaattaagactttcttcctggcttcaggagagtggaaaagacgagtgggcatctgttcatagcactctgggttaagactatgcattcacatatttatctcgagggtgacatctggctatcccaccccatgcagtgacagagagaggctatccccctgattgccatgagcagtgtgatgatgcctgctggcctgcactgtacctgtcaccctcgtgtgtcctcatgtgtcaccgtgattaatacactccatctcctgtaaatgcatttgaaggccctccatggataatggaatgttaatctggggttgagtctgttgggcccagtctcaggactatattcaatgcttggagttccaccaatgatagcatcagcatagtaagaggatctggagccagggctagtgcgcctctggtagagtgcttgcctagtatgcagggtaccctgtgttcggtcactagcaccacataaactaagtgtggtgatgctcacctgtaatcccagcacttgggaggtagaaacaggaaggtcgggagttcaaggccctccatgacttcataggaagacatatactggcctgggctacatgagatccaatctcatatataaatgagatccaatctcatgcatacatgagatcaatctcatatatatataaattaatgggatagaactggaaatcagaagtcagagcagggatgtcttcctaggactctgaagagctattttaaggtagaatccttgggtctcttctggaaagattgctcagtggttaagagcactggctgctcttccagagggcctggttgagttttcagcacccacatggcaccctcacacagacatccatccatgcaaaacaccaattcataaaatataaataaatcatattatatataaaaaagtagactgctgttataagagagtgaccttcaacaggcctgcttaatatgacacatagaccataatgaggagggaggccttggtgaagggctgcctccccagatcctgagtccaatggcctctcaacagttggactttcaacagtcagaccctagtacaaaatgtgtttgcttgggagatcagcactctgatagcaacaagggtaaacccgtttatcagctcggctctatttgtgctagaaaagcttagggaatttaaagcttttgactgtaaacctcacacacacacacacacacacacacacacacacacacacacttcccgtctcccagtgtcactatcttctggtgacacataattttccaggtgaacagagaagcagggaactggtccaaatagccactgaaggtctgaattactccccagtggttcgttgaatctgatgaatgggacatgctgtctccttcccagtctctgataaactggggtggaactgagcaggactcagttcagttggaggaccaggtggtcctggagggccctgtcgaagcccattttgggtaaataggaaacaccctgcagcccccttatttagaatggggagtggccatgtcatggggaatgcagtgcttcatagtgacttccaagacctgaagaattttttttctttttgaagcttgctctcttatagcccatgctggccctgtactccctgtggaatgagggtgactctctgattctctggactcctggcatcaccacatacattttatgtgctgggggtcgaacctgggtcttcaggcatgatagggaagcattctgtcctcagtcccaggcttagcattatcacattatataacattattcccaatacgaattaatagaagtactactactctttatattaataactgactgatatgtatgaaaattcatataatgtatacacatgtggaactgtatatgcctatgtaaacatgcatgcatctataaataaatgttatttttttaattctgaggttatgttatttattaatccatgtccagcttgctcaggatttggatatagctaaattatcaccatcataattacgtttttttttttttctgtatcatctctgtgtctttcttagttctacctgggatgtagactatgtgcttaactgagcaaaaatgccaacaagctgctatttattttattaaacagcttgagcagagatatttgatctgattgctgaaaattgttagcttatcactgaacttccctgatggttcttattattcaatttgtgttgtctacaataataattattactatataaaagaacatgatgcttttatttgtacagttcttgcattaataatttaactggctattatacccagtgtaatcttgacatatgtccagatgtgtaggggtcggcctggagcatcttcagaaggtggaatgcaggtgtgaattgtaaggttagagtcaggatgtgggtaaaaaggttactggcctccacatccaattgccttcatgctcctccctcccgtgtcgttgtttctgagtggttcagcaatgatgactctcacctggtcattttaaccccctcagggaaccgatcacagtataggtagttggctgactaaaatggctgccttgtactgactggtttacaagtggaaatggctaaaacaacacacctgacccaggctgaaggaaccagtgggtcagtcagtagcctgtgcatccatgaggcctgttctggagacacggtgaagattttatcattcattccttagctgctccttccaggtgcatcagaactgtataaggcacagatatttttttattaccatgctataggaaaccatagtttattgtcctttttagtctaggtgagtcctacatgctgtgtcttaaacttaggtttatacgctaagtaacttgaaatacaccttttgaggaatgagatcacaggacaggttttggagggtggtgcagcctgacattgggggtgtcagcccactgtgggggggtcaaagactgcattttctttttcttttctttttttttttttttttttggtttttcgagacagggtttctctgtatagtcctggctgtcctggaactcactttgtagaccaggttggcctcgaactcagaaatccgcctgcctctgcctcccaagtgctgggattaaaggcgcgtgccaccacgcccggcaagactgcattttcaaactgtgggttgaatggggaaaaccaagcaaatgggagaatgctatttggtcagcacagtctgacgtctgggagaatgagtggatgatctgttggtcaagagtgtcatggaggatcagaggtgatggtctacactgtacccaagttctcgggagcggggaggcaggaggagcctgaattaaaggccaacctgggcaagggggaacaggagagtaagggagtgagaggagggagagatggaaagagggacggaaggagagagagggagggagggaaggaaagcccccatggagacaactttcagcctcagaattggggtttgtgagacttatgcccttcactctcacgagtggacttcacaccctgagcaggttgtgatggctggactctcatctggattgatgtcctcgctcagctcggtagtataagcctcatagggcaggtattaggagtttcatgatctgccttttgaaatggatttaactattcctaattaaaattatactcacacctttaatgaacagctaaattcttggcactggaaccctagggctacatagtctctatccatgctgttgagcatgtcacagagaatttctcatttgaaagacagtcacttcctgacggtcacatggtgcacatggcaatgccccaaattcagtagtataaaataagaaagttttctgtcttgcacactctatttatttgctgtgaatggtccatcaaggaccatattccatgttattcttggtctcatttctagatcaagacaccctggttatttttcattgtcaacttgataacaaccaagagtcatgtaggaagagggagtcttcagaatttgaccatatgagtggcctgtggcaagttgtgtgtgtgtgtcgggggggaggtattgtcctaactgttgattgatataagaggtcccagcccactgtgggcgatgccaacactggggaggctgtcctaggttgtataagaaagctcgatgaacgtgaactgaggaaacaagtcagcaagcagggttcttccatgcttcttgcctccaagttattaccctgagttcctgcttgactattctataagatgtactgtaacctgtgacctggaagtatatgatataataaaccctctactcctcaaattacttttggtcatgtatgatcatagccacagaaagccaaagcatgtgggatgttcctatcacctgtgattcttaaagttggtcatctggggatggagagatggttcagtggttaggagcactggctgcccttccagaggtgctgagttcatttcccagcaaccacatgggggctcacaaccacacctataaagagatctgatgtcttcccagcatgtaggtgtacatacagacagagaattcctacattaaaaaaaaaaaaaacacataaatacttttttaagaaagctagctgggcgtggtggtacacacctttaatcccagcacttgggaggcagaggcagaggcaggcaaatttctgagttcgaggccagcctggtctacagagtgagttccaggacagccaggactacacagagaaaccctgtcttgaaaaaacaaaaagaaagaaagaaagaaaggaagaaagaaagaaagaaagaaagaaagttagtcatccagtgacaggtcacttcttcgcccgttttatttttttaattttttattataggtcaagccctatacccctgaggtataccccttagcaagccttaccccatttccttttggagtaccaaaggtagacactactgcctttgttcactgggcaatactctcacccggagcctcactctcagccagcttctgccacagatctgagttcatgttcatccaaggcccttgttaggttggcctgattaggaccaggtgtttgagtctagtttcatgttgttggcataatgagttctatctggcctttagttatatctttcaagtccccaaaggaattttgtcaacataaaatggtctccctttgctaattgagccagtcgtctggaatgaggcctggggctggattagaaacatggaaagccaagcatgatggtgcacgcctttaatcccagacttgggaggcagaggcaggtggatctctgggttcgaggccagcctggtctacagagtgagttccagaacagccagggctctacaaagcaaccctgtcttgtttgttgcacagagcaacaaacaaacaaaaacacatagcaacagaagaagagggagggagggagggacgaaggagggagagaggggaggagggaggaagagaaggaagggaagaaaaagacagaaaagaaacaagaaacagaagaccaccagacaataagatgttgcctttgaatttttgcaccaagctctctgccttggctttgctagggcagccatactgttaagtgttttccggtccttttttgtaggtgagaacattaaacccagagagctaaactcgtatgcctatagactcaaagtacaggttagagaataggaacctgctacaggtgttgggaaacccagcacagtggtttccatgacaaaggcctagcagaatttaaagtgttcttttcacaacatggtggagaatgggttagaattttattatggtgccattctcaagtcctgactttgtgtggcattctagtgtgtgccctgtttgtttttgaaacctgctaagtaggacaatgcctcctgctcctgccaagtggatgcggccttgcagaacacctggtggaattggtgtgtaaacagatgcttgtgaaatgccttttgcgcaattgacaatacgactgtgtcatgatgatcaatttggttctgatatgctcctgtaggaggtatgtgacctcagaagtacctcaaagcaatggtaggccttgcctatgctttgagaaggctccatcctgtgtgaaagccagtggccaccagctctatggcattcaccatacgatccatttggcttgtacttcacagtctacgcaggacatcatcatgtgcacacctgccttgcgcagaacaacactactggggttgaaattgagttgtgccaatcagagtgttgggcccacaggaggcagagaggttgagaggaatgaatgtcttgctctaaagatgctcactgtcaggagactaggttagttatcaagggagcctcagtgtgtgtgtatgtgtgtgtgtgtgtgtgtgtgtgtgtgcatgtgcacacacatgtattcagatgcatatacagcattcatgtgggggttggagatccactttaggtgttggtccttgcttttttttttttttttttttttttttttaaatgtagtctgtttttttttttaaagatttatttatttattatatgtaagtacactgtagctgtccttagatactccataagagggcatcagattttgttatggatggttgtgagccaccatgtggttgctgggatttgaactcgggacctttggaagagcagtcggcgctcttaaccactgagccatctcgccagccccggtccttgctctttaactagtttgatgcagggtctctttattgtttgcttttgtgtacaccaggctagctggcctgaaactgccaaggattctttttttttaattgtagtatcagtaccttcagtttcttttttttttttttaatttttattagataatttcttcatttacatttcaaatgctatccaaaaagtcccctataccccccccacttcttttttttttttttttttttttttttggtctctgcctcccatcttgccatggaggcagggctatgaatgcgctctaccatgccccgcttttccgtgggttctgaggatgcaaactcagaggcttatgtttctggatccagtgttctgccccatcgagcctgctctacagcttatgcagtgtgcgctttcctcctttgtgcatgtgtgcagttcatctctaccgtcatcataaacaccccaccaaggtgcttttagatttctcagccttcacaaccacgaactagaataaaactcttgccgggcgtggtggcgcatgcctttaatcccagcacttgggaggcagaggcaggcggatctgagttcgaggccagcctggtctacaaagtgaggtccaggacagccagggctacacagagaaaccctgtctcggaaaaccaaaaaccaaaccaaaccaaaccaaaacactccattgcttataaagcacacagccttactcagttactctgtgccagtacaggatcaggccagggcaaatgacatttccgccctgtgagtgagtgagatggtaagtggatttatccgaggcccacagtgcccgagtagctgaccttgaccttgtagtccttgagatggaccctgctccctctccccttcccagtacttctctgtgaactgcagcattcatgcacagggagtggttagggatcaccccgcaggtaccttacttgaagcagacggatcttttctgaaaggagccttcgttttcactttaaaaaaatctagattcccccagaggggtcagaagaggaatggaagcccttgcccttgtcctcattcccaagagccacttggcagggagtccaaatggagaccagataacagaaaccaatggaaaataaccttgaacctcaggcaatttggaggcaaggctttctttatctgctagctacaggcagcaacttttcagtctcaatgtctgggccaagaacttcttgtttcttgggatctctggagaccttgcctgaacccaggcagagaagcgctccaggcttacctagcagggatgcactgaggctggaagacggtaggctagccagggagtctttgctctttcctggtacctagagtgtgaatgtcttaaggtattctaagaccagtgatctggctttggcctaatctgtactgctggtacagtttagtgggttccagacctcaatttttcttacctaaaaattaaaacataaaaaaaattttaaagtatacttttttacttgtttgactggtttgaggtttttgagactaactagttctgaggattagctgtggaatgggcacccctactcagtattcgccttggagtacactagcagagtgtcttgggtgtgcacatctactaaaatttatgttgcacagacccagcaagctcattcacccttagaaatatatcctgtggatgcttttcttcctgtggtttgttatggtgacggtaaatggctgtgccctcagtctctatctgcagggacagctcagagcacagggctttgtcctggtccactgggtagcatctaataggacaagatggaaaggatccacagatgtaacagcgagaaatgagcagaatacgatgtgctgagtgctgtctgccttctataaatcgtacatgttctgctggtcagtattctattactaaaagaaatgtcacgccaggcggtggtggtgcacgcctttaatcccagcacttgggaggcagaggcaggcggatttctgagttcgaggccagcctggtctacaaagtgtgttccaggacagccagggctatacagagaaaccctgtttcgaaaaaccaaaaataaataaataattaattaattaaatgtctaagaggggctgcctgcgattcaactcctcagagaagcatttgcctggcctgtgtgagccttaggtactgtaacccccagtttacataaccatgtcaacaggtgccaaagagaatccatttagaaagcagacaggattttttttttttttttaaattttggctcatggttttggagcctttaatccatggttgattcaccttgttgcttctggtctgtggcaagatagcatatcaccaggaatgcctggagagaaaattttaaaaaatgagaggaaggtagattcccaaaatcctccttcaagggcccttccccagatgacctcatttccttctacatggtcaagctcttaaaggttctgtcaaccaccactggtaccacagtctggggactgactatgccattagaacacagtctttggggcatttcatatgtctgccatcgtcgtatgtgtcaagtcatctgtccctgttttacagatgaagaggttaaagcatagtgaatttgtgcaacccactgagtcttagcaggatgtgggtatcaaagatattccttagtaggtaaaaaagcagatttgcaaaaggggtatgagggctcatgttaattgtcactccggcagaatctggaatgacctgggagaagagtcactgtgcatactgtgggaggttgttgagattacgttaattgatgtgttaagagccgtcttaattgtgtgtgtgtgttggggggggagggggattggcgcgtgtcctgggctgaaggcaaagagctgagcagcagcggtcactgctctctgcctcttgactgtgatgcacccagctctttcaggctcatgcctctgcgactctttggcagtggttgactgtgacactaaatgaactgtgacctaaatgaaccctttctccctgaagtagcctttgttatagtattttatcccaacagctgagaatgaaggtgaaacagggggatccatagctatactttaaaaaataggatatccactaatacatatccacacatatctatgatttggatttaaagatttattgttattattattatcattattattgtatgtgtctgggtctgagtgtgtgcatgtacctgtgtatactgtgctgaaagatcctatcttttctttttatttaaagatttatttatttatttcatgtatacgagtacactgtagctgtcttcagacacaccagaagagggcatcagatcccattacagatggttgcgagccacaatgtggttgctggaaattgaactcaggacctctggaagagcagtcagtgctcttaagccatctctccagcccaagatcatatcttcaaatgcaaatcccaaagcaggaagagtgaacaggaagtgggaggggctacaaagtctcaaagctcacacactgagtttgtatctgtgtgcaggtatgtgtgtgtgtgtctgtgtttgtgtgtgtgtttatgtgcatgcactcaagtatgtgttttgtatatgtgtatgtttgtgtgtgtgtctgtgtatgtctgtatagacacatacgtgtctatgtgtcggtgtgtgtatgtctctctctgtctgtgtgtatgtgactatatgtgtgtgtttgtctatatgtgtttctgtgtgtctgtttgtctttctgtgtgtgcccaagaaaaccagaacagggcatccatttcctagagctgaagttacaggagaccgtgccatgctcactgtgggtgctggttactaagctcaggttctcagaagagcagcaaatcttattaactgctgagcaatgtcttcagccttctcatattttttaatgactattattattggcaaggtccacaatagaaaatgtggggctgagaatatggcttagtcagtagaatgcttgcctggcacacacagtgtcctggatttaatccctagtgccacataaaaccaggcatggtagtataaccctgttatctcagctcttgagagatagagtcaagaggattggcgtacaaggtcatctctggctactgtggtggtttgaatgagagtttgtagcccgcccacttccggttcacccttctgctttgctcttgacattgaagatgtgatcgctcagcctcttgctctggatatctgttgtcaagcctctcccatcattatggattctcccccctggaaccctaagccaaaataaactcttgcttctgcaagttgcagcagcaacagaactaactaatagggagttcaaagccagtctaaggtataacagaccctgtctttaaaaagggagctcttagagggaccaaggattcaaggcaggagggaaggaaaattgtctttttcatgccttcctgtctctgctccttattctaaggatgtgtgtgtgtcacttctttttctcagacgtcggtatgagcccagtgttcctagtcagtggagtcaaggtctactaaaattcacttttaatttttttgtatttaaaatttgtaagtaaataatagttttaaaagagagaacattaagcgtaaccttctaaacacacccttacatgttagacgctcctggttgtatctgtggagcatgtactcagccctctttctaatatgatgcagaacaaagccatgtcccctggccagttgacccttgtctttagacccggtgtgatccctggcccaagcatagtactgtgctcacaccctcctcctctgttggaacatctgattcattcagcagatttaactgagcactaactattgagctgttctgccttgtgtcctgcagtacgaagaagatcaaagatgatgatgtaggcccgtggttctctatcctcccaatcgaccctttaactcagtttttcatgttgtggtgaccccccaaccataaaattatttttattgctacttcatagctgcaattttgctactctaataaacggtaatgtaaaaatccgatactccaatgtctgatctgtgactcagaaagagttgtgacccatcgattgagaactgctgctctaaagagcaccccatacttaccttttcttatctaacaaatgccaataatatataagcacagataactttgcagccaaaccctgttttgtccaagcttccctcttcttgctattgaacatcctcctacctgggaggagagaagtcgtcagctaccaactcagagtcagtcccaggacagatctgcacacagaaggtaccgcctttcctgcttagaaggctagaacatggagcaaatagactattgaactggccgttctgcaagctcctaccctgccagacactaaggcatcaagccaaagtacccagctggtacccatgtaggtctcctttcccatctggatgactttggtatttcctgaatgggtcactctttctcattctgaaacttctctctaggatgacccccccccccccacctgtactgcctagttttgtgtcaacttgacacaagctggagttatcacagaaaaaggagcttcagttgaggaaatgccttcaagagatccagctgcaaggcattttctcaattagtgatcaaggtgggaggtccccttgtgggtggtgccatctctgggctagtagtcttgggttctataagagagcaggctgagcaagccaggggaagcaagccagtaaggaacatccctccatggcttctgcatcagctcctgcttcctgacctgcttgagttccagtcctgacttcctttggtgatgaacagcagtatggaagtgtaagccgaataaaccctttcctctccaacttgcttcttggtcatgatgtttgtccaggaatagaaaccctgactgagacaacacccatcttttatagaaagcttcctatatgttaggggttaccacagcatgaggaagtaactatattaaagggttacagcagtaggatggttgagatccactgatgtagagtttcctttcaagtgactgaggatggagtgggatccctttgggtaaccagatcccagaaagatttgaccactcttattcaccagaaagaaacgaatgttcacttttaatcagaggccttggtattctgcgctgacctttacagtctgctatttgggggctacagcctattagacctgcctgtgagtctttactgaacgctcggggaaaggtgtactgtagatgtccttgtcatttagaacaagatacaagaaaaggaaacctttaactctttcccctacagggaagtagtctgttattttataggcaggggttcactgtgttgccttgggtggccttgaattcatagagatctaacctcctcccaaacctgacccctgggattcaaaatgtttgctaccacacccggctagcctggctttcttttgttttatttctttgtttctttgggctctctctctctctttctctccctctccctctccctctccttctccctctcctctccctctttcctctctctctccctttctctccctctctccctctctctccctnnnnnnnnnnnnnnnnnnnnnnnnnnnnnnnnnnnnnnnnnnnnnnnnnnnnnnnnnnnnnnnnnnnnnnnnnnnnnnnnnnnnnnnnnnnnnnnnnnnnnnnnnnnnnnntccctccctccctccctccctccctctctctctctctctctctttctttctttctttctttctttctttctttctttctttctttttttgagacaggttttctctgggtatccctgctcactcagtagactggcctggcctcagactcagaaatccgcctgcctctgcttcttgagtgctgggattaaatagcctggctttcctttaagaaaagaaaagaaaaagtttgtaatcttagcagttgggagacagaggcaggtggatctccaagtacatgaggccagtctgatctatgtagagagttccagggcagacagagctacatagagagaccacataaaagaacagtagcctgctttggtcatgtacacttaacaatcccagtacttgggacacagaggcaggcgaattaggagttcaaggttatccgcagctgcctagtaaatctgagtaggttatgtgaggctctgtttaacatacacacacgcgagtgtgcacacacacacacacacacacacacagagcgagagagagggggagagagagagagagggagagagagagagagagagagagagagagagagagagagagagagcaaagacaaggaaaaagaaacaaagacacactaggcgttcctagcagcagtcagacacagtgtgcatagttttcccctcctgatacagagccagcgggcatgagtccctgtcatcccatgctcatgtgtgccctgcagctcccttgagctgaaagcatcccagttgagtgccatgttttcctagcatactgttcctgatgtatgccaccgtcccgtctagtttctaggtaaccaagattccctctgaccctcatgtgccattgtacaacatgacaaattacttttggagtttcagatttgtttatttttaatttatttttattttatgtgtatgagtgttttgcctacatgtacatatatgttcactatgtgtgtatgtgtgtgtgtgtatatctgtctgtatatatgtcaaaagaggacatccaattctccccaactggaggctatgagctgccatgtgggtgctgggaactgagcccaggtcctctgcaggagtagcaaatgttctgttgactcactcactgggcagtctcttgggttgaagatttaaattcacactgactctaaggtctcttatcatgagtgtgcttgttcagggggctgccaggtgtgtggccttaaagtctgaggcatgctgagtcttcactgctctgtagtgtcagtgatgtcatacatagtgctgcaatcatcgttcattccaaagtcattcacaccctatttggagccttctgagcatttgagatttggaggcgagcgtgctgagattccgtcaaagctaggatgggctagctccgtacccttctggggcagctggttattttgctaggctctttggagagctaacgagtgaatttgtttccctttgttcttttccacttggcaaatatcgactttgacttttgcctgtgaatggagccggccggccggagcgtggctaatctttacttaagggctttatcttctcaggagccaggtcagccaaaacctgttgccatcgtccttgctggaacctgcagcagttttgattgctccatccgcttccgtggagttagccaagcaggcaccacacctggggctaagcagctagcagagtctggacttggtgggctgattacaaccaggctgtatttgaaacctagatttttttttttttccccaagcatgacagtcaattcctggctaactgggcctctctttccacacagtaggaaggagcgggacattttctggggacatgaattataaagaaggcattgaggtggtatggtaggaacccctggcttactcctaagctattttgggggaaggaaaatgttatactggaaagagaggtcccgctctgtggccatctccaaaagcatagcctttgttcctgtcataaggataaggcaagtgaagatgggccaataaggtccagagatccttaggtaaggtagagggaatgattcagatgacaggcgacatggacagtgatgggtctttcctgaagggaaaaggctctgacgcttgggtgggaagaggccaggagcacgcctttgccctctcttatctgacatctggccagggcaccttccctcaaacctcttcatcactccgacatcaagagcgatgttcatacaagacggatatccccagggagccccgtccacttgttatttctcccacgttcccccaggaaggaataagatgggaagatagctcctgagagaggattcttggcaccgttccggcctacaagctgatctgtttccgtatctgcccacaaaacagaaggaatcagtttcctctgcctttcccccagtctcaaagcgacacattgctcttcactttttatccagacaaacacattgaggttggaagtgttccattgattggccaaagtcatacggtaagggtaggggagagatgatggctcagctgttgagagcattgactgcttttccggaggatccaggctcagttcccagtgcccacgtggcaacccagttccagagtattcatcaccttcttctggcctctgggaacattgtattgtatatgcgtgaggcacttccatacatatggcaaacactcacatacttaaaacaaaacaaaagcggaaacggtaggggagccagaacttgaagctgagagcattgagctccagattctgtgcttagaggccctgcgccatgttggatttacttgagtacgcaggcctaagggtcaagcggccaagtctgcacaaccctcaagagctgggttcaggcctgaactagaaccatttcaaatccactggtttgccttggcggtctgcataccctacctaccacacacacacctcaacaagtaaagtgtgaagttctggaagtgctggccctattggcatgttctgagtgacactgctttagagagagagagatgagcactgtgttcagtgaggggacctttgccatcatgatgctgcctggtgagggtgacttgtaaccctgagctgcgcagctgtagctgactcttggctttggttttgtcattttttttcttagatagaatcttgctatgtagccctggctgcactagaacacactacctagaccaggttggcccctaccttgcagtgattctcctgcctcccaaatattaatatgctaggtataagctaccacacctggctgaattcatgggattgtaaggcatgcatggaccacagtgtgtatttgtgtttgaagatacacgaaatacatagatacatgctggcaagatgcttgtatgcataaataataaaatactcctaaatttttgttaatgttcacaaaaagccagtttacatgcataatacaaaattttatgtaatgccagaatagtgcagaccaaacatttggaagcttcatagttcaagaccaaggttctgatctgttggcattttaaatgaggattctctttctgttttgctggggttacatatgttctcatgtagtggacagaaggagaaggacactaatgccatcacagggtccccactgaatcacccatgccatctaaatacagttccctcccaaaggctgagtctgcagacaccatcacactggaagtagggctcagcacaagaatttggggtgtggggtgggggtgggggacaggactatagtcaggctgtagtagtatgcttctaaacaagggatttctacaatagtcagagccagtgggaatgatatattctagtagatgctgccaactataacatatgcaagctactaaataatctcatgaatactgaagaagagagactctatcttttttcttcttgtcatttctgagtttgtttggtttgtgcttgagaaaggctcttgccgtataaggctgtcctgacagtcctcctgtcttccctgtgagtctcaggacacaggtgcacacatgctctccaagtgcatcttaattgctcgcttgcttatttttttaagacagggtctcactgtgtcgccctgatttgcctggaacctgctgtggagaccagactggccttgaactcacagaggtttgcctagttctgtcttccccactgatgggtaggatcaaaagtttgcaccaccaagcctggctaaacatgtctttccttacctttgttctcacactggattttgcgttataaagtgtatgtgtgtgtgtgtacacaagcatgttcttctgcatatactgcacatgtgtgcacttactggcagacgctagaggtcagtttgttattcctcctctggaatggtattcaccttcgttgagacagagtctttcacttgcctggagcttattgagtgagccagtgtctggccagcggtccccaaggatcctcctggcaacatctgccaatgctgtgagcacagtcaacatacacctgacattttacatgggagccaagggtcagactcagggcctcaggcttgcaatgcaagcatgttaccaaccgagccatctccctagctctgctttccgtccttctttcttccttttctttctttgagatgagactctcccatagcccaggctagcctaaaactctttattagctaaaactggcctcaagctgcttctaaatgctaggattggggtgtataccgatcttcgttgttgttcagaggcagaggctgacacagctaagcactttccaagagacgaaattgccatttgatacgattcaaattcatttcaaactcttgctgtctcttacaagtgggtgcaaagtgtttggaggtctggtgcttatgttttgaataggactttcttggagatttttacttctggtttctatttccaggtttttggagtcctgagtgtgcaggctagcccattcccgaggctttcccagtgtcttcctgaagcctctttgctttctggccctttggcctcaggcttttggatgagggcgtgtcattagtttccaagccttactgtctcaggggtggggagaagatagctggctgcttatagcagagctcctgttagaacaggcatccccagaaggcctcagactctagttcctagcctggatggtctctggcctggatacctaggctacagcatgagacacccagactgaggcttcattcttatttatccctgagggcagactcttgactcaggttgctgactctggcttttctccacccgcagcatgctcaggaatgaggcgaggaagcctttctgctacagcgccactcagggaaggtagataccttagctctccttggaaggcccagctagagatagaccttgcttcaggactaaaataggggccagcaacttggttcaactggtggggccacttgccaccaactcagacaacccgagttcaacacatgatggaaagacagaagagactccagctagcaagttatactctgactctctatgcaagcacatacacggatgaatgaatgaatgaatgaatgatttctttaaaggaccagattaggaagtagcaagatgggctcttgagaggacagtagcagtgggcttcttgttctctttcccttcctgttgtatgtcacacatcataggatatcttgaaatccctggggtacagagctcccagtttcttcccagcctggtctggggaatgaacccactatctgtcatctgcacagtattgtaaatgcagaatgctggatgttagactagaaagtaggagatcggggttgagcctccggctgggggcctttcgccttacagtgtgctgggcatagaacccacggctgcgtacactgggttcctctccagtctgaggttgaagcttttaagctgtggttcttctctttccaaactcactgtttggtgctcctgagcatgtggtggactcgaacctgagacatgtggacaggatgggtgagagggtggctgtatgtggctctggagttagaatccttccagaactctacagtgcacagagcaagcaatgaccacacatttaagtctagaatttgcatagtttttttagattaaatcttgaataatgtgtgtgtgtgtatgtgtatttatgtgtgtgtatgtgtgtatatgtatttatgtgtatgtatgtgtatttatgtgtgcatgtatgtgttcatatgcacgtgtgtatgtatatatatgtgtgtgaggtatgtgtacatgcatgtatgcatgtgtgtgaggtgtgtgtgtatgtatgtgtatgtgtgtatgtatatgttcatatgtatgtgtatatatgtgtgtatgtgtattcatgcgtgtatatgtatgtgaggatgcacacatacacacataaaacacatgtgccacagtgcacatggagaagtcagaggataactgtaaggagttgcccttgcctttccagtagcttccagttgtcaaactcgggttgtcaggtatgaacagcaagctccttcaccccacgaactatctttgggggccccctccagcccccaccagggtttctctgtgtaacagccttgcctgtctggaactctctttgtagaccagggtgacaccaaagtctcagagctcttcctgcttctgcttcctgagtgctgggactaaaggcatgcaccaccacgcccagccaggcctgtgcctttaaaaagccctttccactcaaaccatgaacgcacacacagatagatgccttttgaatttttcaaattggtaatgaatgaatatagtcaaattaaacaagtaagcctaaggtattatgccaggcaggtaggatgaggacagtcaagggactgtcacccctgagccacactaagtctgcagaatgagcaaagacttggcagtatcccatttatcctgaccagttctcaggctgacatctcaaggtgacagtttgtgacaggtaacacgaagaactgaaaacatgtcaatccagggccagcctagggaaagccctgtccaattttatcatggtctgtgaactccatctcaaggatttttgactgaggaatgctgtacccctggccagtcatcctatttaggcgtaggatccaccaaagaaaattacttttcctgccagtgaggcggatattccaagcatcaggtcgtaacactaggttagccttaccaggggtgactagttaatgtcagagaccacccagggtaggactcagcagatagaactgagtgacctgccccccatgtctatagacttccccttcatcctcgcctcagtttttaagaagcggctggaaatggactaggtatttggatttctatgaaaacttgcatttcttccttgtgctagcccttctgggtccgtttgatgtctctgattgcagagtcccacagtcttcacccagtgtggctcactgattgcgggcagagaacctgagcctgcctttttttttttttttttttttttttttttttttttaaaattaatgttgggagaatgctgcttgctggccatgttccatggatacctaggaagcaaaggccagcccttgggaacgtccctggcttgacccacatcccatatgagtgtaaccagtgagccttgaacgttatcccaaagtctcaatgaacatagatttaaggagctgaagcgaagactgtaattttctgatctggaagagactgtagagaaaagctctctctccttgtccatgttaaatatacagaggtccagcgtgtatctctggggatcacacaggactccagtggtttaaggcagacttagtataggtgacattaagtttgtcctggaacttctgtagttgggaacagagggagagaactctactgctaccttgggtaccttgttacgagtcctgtggttcagaaatctgtaagtggggaggtcagggttgaggggcgaccctaccacctgacctgtattcagaattgtttccctgaagaagtggacacaggccattggctcagctcctagagtgaaggctaggaccaagggcctgacaacccgagttcaacacatgatggaaagacagagtagactccagctagcgagttatactctaactctatatgcaagcacacacctggatgagtgaatgatttttttttttaaggaccaaataggaagtagcaagacaggctcttgagaggacagtggcagtggctccttgttctctttcccttcctgttgtctgtctcacatcataggatatgtgtgcccgtgtgtgcttctctgacagagatgcccttgagttggttttatggtgtgttctcttgctagccacaggttcctacctctgtatgtcatgcccccccccccccacacacacacctcctccaccacctgtcaatctgacctttagatccacctgggtgaaatatttggcactccctatgagctctttgaggttgccatgaggaactcttcttacttgccctgctgggctctcaggatccccaccctgacccccctgaagtgtgtcggctaacttgaatgcatgtggactgtgtggatcttgcaagctctccagctacttctccaaaggagaatacagaatgtcctagaaattggccttctgcccccatgaatgtggtggcattttcctctcaaattgtcttgttcctatcacaagaaaaccttgaagtgtggacttaggaacttctgtgctaatcctgtgattttctggtcctcttacggatttgctggtgatgccagattttactgcagacttttatgggtgactgtgatcaaggacttcaagatttgtgttccttgagctattagagatctagagtttgttttgagtccaagaaagaattgggacctttgtgttgtgtgtatatataggaaaaggataggaagttaataattaataagggggactgcaattgggttgtaatatgaataaaaaagaataatattgattaattttaaagaggcatgtggatttttttttttttaaatgcagggttcaaaggttaggagctgttctgataacgttgccataggaaacaggtgcagagaagatctggttaggaaaacagagtctgacagggcagaagtggtgcacgtttttaatcccagtggcactcaggaggcaaaggcaggtggatctcagagttcccaggccagcctggtctacaaaatgagtttctggaagaaacaaagaaagaaacaaaatcccccaaacccaatcttacccgtgaggcaagaaagcaggggtgctgacagaggaggacattgaacgtggtctctttatgacccagctccttgtgtttctggcagagcacacagcacagggaacaccggggactgagaaatggaaacccagaggatggccttgacaaagtcatttgaggacagagacaggatttgagctcaggctttcttctgcaaaggacttgagtaattttgtatctcttgccatgtctgccaaggcttttgagacaagctagtggtttccctgggcgcccaactcagccttgtgaggagaaggaggggaggagatgcaaactcattagatcctatcaagaatgctttggggtgtggtgtggtgtggtgtacaaggtgagatggatgtgcctcagttgcttcccagtgatttcctgacctacagggaaaatccaacgtatgtgctcatttagaatttagctttctggtagagtgttaggaagaacaattcctttcaaaggagcaaacgtaagacatgtggggtttgatgctaacaatgtatacttaatgtatgcatgtttaaaaaaaaggcatgaagaatttactatggacattgactttgaagtacagatatttatagacaagtcaaacaaaacagactcaatgccagagaggcacagatttggcgtgggctgctgtttgtagagaaaaatgtaactgctgaacctagcaggctcatggggcgtggggggtgcgtttcctagtgcgtcgcatttggaaggtgggcgttggtaattctcctcgtggctatattaggtgtcacccagtattgtgcaacaaagagcaaagggaggaaggcaggtgaaggcacttcgtagacctgggattgttccatatcagagtgagcttcaagtccgggtcttggttcatcactacaatgcccacgggaagatgttactatcttcccataactcacaaactcccagagaactctaggctttctgccatggtatatcacttgtgcagggatatggatgagggtaacatttcaaagaatccccagaaagtcaggtttccaaggccttacttatttttttgagttttgtttctgccgctgtgatgaattactctgacacaaagtaacttagggaagaaagggttcctttcagctccaaagccaggttgtatccatcactctgaggatgcgactgccctccacatcacacccacaaacaagggcagagaaataaaaacgagcgcatgcttatgctcactttagtttctctgttctgatacagtgccccaaaccgaggactagtgctgtctgcttcccatatcctttaatgatcaagacaacccctcagccctatactcacaatccaggcagttccacattgagacgcttcagattttagattctgtcaagtcgacagctaagactaaccattacacctgtgaatactcatcagcctagcaattcctctttaggattcattacaaggaaatgatggtctctctatgtgggaatatggttattcatctgagtgtgttgacagcagagaaaactggagctaacttaagtacccacttgagggagagaccaaatcatcagttatagcttatgacaccgtacaatggatactcactgtggaactgttccttgaagtcctactgtgtgggtaggtagagagtaggcaggaagtgtatggtaccattaagaccgatgcagtctgaggcctctcagagctcagagttttgtcatagaagcagattctgtacagtgggaagcagagcgaagcaggcacgtcaggactgtgctctgatatcaggtcaagtgcagaaaaaaatctaggaaatttgaatccctaccagggaggcagagactctgagtgatagaacacgactatcccttttcgtccccatcactgctgctgctaccaccactgccacagccgccttctcctccccctcctcctcctcctcctcctcctcctcctcctcctcctcctcctcctcctccttcatttgtggttttcaagtatcccaggatgaccattgtgatgttgtaatagaagagtgaattactgggtcagtgagatggttcaagggataaaggtgcttgctgccaagccatctgacctgagcttgatcccatgatagaaggacagacccgactttagcaagttgttctctaacctgcatgtgtagggatacacacacacctacatccatacactaaatacagaatgtgagacaatattaagagagtaacattcttggaagcaaaggacagctatgaaaccctagttcttgacccaatgcttcattaaacctgggaggttttgaatgggtgtcagggagagagggcagagggatgcccaaatctcctccaggaatgaacagcggcctgggtctgccagctcaccgttccaaggtctcaaacgcttgtccctcttgtgttttctgaggaaatctcccacagggcctatgagatggaactttaaccaggctgtgatgctgatgtcacggtccccaaacatttgtagtctttagagtttggtcctctgggaatatgctgatgtactcttatggggttaaaaaaaaaagtttctgttttgggcatatgataattaaattagggaagtgccttttgcccagcaaataaaacccagtgagactggtttcccttgagcaacgcaaccagatctcattgcaacccaataaaccaaaatgacagtcgctctatccgtggaggtctgctcaggtgccaagttctacactaaagtgccttgctgacatgttgcaggtgaaggaaggctcatggaataggtgctggctatctccggggaccacttctgatcctgatctcagaagttggaaaaccagagttggtgatttgtggtggttgacactgggatgcagagtctaggctgttctctctgaggcaggtttctaacctctgctctctggctgctttccgctctgagagtcaagcctgcctgtgcctgcaaagcccgagttctgaagccaggagtctgaggcactgaggaggcctgggagtgggaggatgtgggaacatgggagcatgcagccgtagtaggagagcggtttctggaagctccatgcagagaaagctagtctagctgccctgctgggattgtggtggagttttacaggggaggcaaggaacacacactttgatgccattgcagccgggtttcctctgctgacagtcaaagaaagggcagccactccagtgtgcctacctgcatctccccagaagagtggtacttgcaagaaaacctggcttttacttccctttttgttttgtgtttcgtttgtttgtttgtttttgttttcgagacaggggttctctgtgtagccctggctgtcctggaactcactctgtagaccaggctggcctcaaattcagaaatccacctgcctctgcctcccaagtgctgcgattaaaggcgtgcgccaccactgcctggctttacttcccttttaatctgaaaattttctttgctggacttcagttttacttattggtcaggtatcaacctataaggtatataggaagcatcaaggatatacaggaaaacttaagatgtcccaatgtttgtcagagcaaagtgccaaggagggaccctccccccattctgcagtggcatctctagcagggctggaatttgggacagtggtcatccaaatcgaaccttcagtgagaatcagagctgtttgtgtgcagggagagtccaggaaagcgcttcagttgtcttctagggagctgctgaaaatgtcaggaaattctaatgaattcaggggcaaattttcatggattttttagtgcctcaaagttgaaagaaaggaaggcttggccttgtggctttctgcagttactatctggggacaggaactaaagaaggaaaaggaaaataataataatgttagcttttgttttatttttaaccatctgtttatttgtatgattgttgggagtgggcaggtactccggcaccacacttagtatgtgtttttaaatctgaggacagctcagggcagtgggctccgccctttcactttgtgagccccagggatcaaattcaggttgtcaggcctgctagcaaatacctttatccacttagccatcttgcctgggcctttgttttgtttttgaggtatatgtgtgtgtggggggggggggggagggggaatgatgagctcagggtctggcgtttgccagtcaggcactccagagctgaactgcttccccctctcagctcctgtcttagaattatttatttatttatttggttttaaaacgtttattgtagaaaggcagagagggggagaagaataaagtagagatggccatggccacgttgaagagatggggaaaggaaaggcagagaaagggggagcaagagggcgagagagtaagagagaattcttttttgtttttaaagtgtattaatttattatttttagtggtgtgtgtgcgtgtgtgcatgtgggtccttttactttggggttctgaggactgaactcaggtcaccagaatggcaggagccctctcatctgagggcttctaaatctttttagttttgacctgatcctaaagagcacttggatagcgtttaccttgtggaatgcgctctttcgggtgcttgagtgtttaatcctcctgtggtttcaccggatagatcatattatattctcactttacaggtaaggacactacacacagagaaatcacctgactttcccaagccctgaaagtcctacaagggtttcacagctactgggactactacacatcttgccagtagtgtgtgtctttgtttttgctttgggtgagagaggcagtatctcatgtaatctcaactggtttgcctcaaacatcctgtgtagccatggccttggtcttctgaccttcctgcctccacctcctgaatactaggattataggtgtgtgcctcttggattataggattttggggaacaagcccagggtttcacgcatgctatccaagtgtgctgttaactgagccatgctcatgcaggcagccttgttcttttaaatagataaggtgtcaggaaaaacattataaaagtcagagttgttgggtttggtcgggaggctgaggcagaagattcaagagtttgaggtcactataaggatatagtgatatgctgtgcctaaacactagggcctgatgacataacccaggggtagatcagttacttaagagtgttcaagtttgggctgctgagatagctcagtgctaattgttcttctgaaggtcctgagttcaaatcccagcaaccacatggtggctcacaaccactcataatgagatctgacgccctcttctggtgtgtctaaaggcagcaacagtgtacttatttataataataaataaatccttaaaaaaataaaagagtgttcaagttcctgggttggaccctcaccactgagaattaaaaaacaaaacaaacaaccctctcccaaccagaaatgtagcctttttgtggcttgattactgctcaaacagactaaccaatacagtcagtaattgtaaagatttgtggtgcttggcagggccttctgtgcctctccacctgtctcagaagacaggcaggtttccccgtggtcactgtggctggtggggcgcggggaggggactctaattgtagtcttcacctccagatcctgacttctatccagagagcacacccattgtttctcagacattggctgagtggaggggctgactgcagcagatgcaaaagcttgcttatcagtctatagtgagagacccatctacttgggaatggcaatacaaagaacggagaagggagtctgagagcgactggaaaagcctggcagcctaagcccccaggtccctacaggttattgttcaaagtcaagagcaggtttaatcctcagtgtacagggcttggaaaagtagttagtcttgaggaattccccacccccatctcccaagacccaaacccctctcttcactgcttccagacctcaggtttccaggggaccctttatttccttagagatgttaactcggatgtaactccccaaagcctgcagagtcccccacctccacactttgcatatctatacaccatcctgtacctggctgtttaagtctgcctaacccggagaatggcccattgttagtaggtggcatggtgtctagaaaggctagcctcggaatgtgatttccagaacttgtagttgtcagaaaggtaaactccaagaccaggtggccactgggctctcggttttactacctaccattctaagaaggtaagtcacaaaccaccttccagtgttatcatctgagccaaaatgagtatggagaaggtggggggcaggctctgcagggagggcagatcacaccgagtagtggggctgtgcacggagtcagtcggtctcggtcggagggggggcttggtgcaggtttggttacttattcagagtggaggtgcgaggggccaaaaagcccagcaagccaaggaagtgcaaaggtccctgaagaagtttggaatgtgcacgtgtactgggtcaagggacaagcccagccagagcaggctgccttaaagctttccctttctgcaagcattctgtattggtcctctcacctaagtcttcctggagagggtagagttcagccccccaccccacccccaccccagcctgaccctgcatgcatactgtccctatagagtctgtctcctggagagactgaaccttctgatcaaagcgaaactgaaatagtgtctctatgaggtgggtttgagagttcctcttattccccaagacaacagccctccatcagagagggaccggtagtccttctcttgattcagggatggcagggtaagctgatcacacctgagaggctgctgctgggttcagtattagctctaagtctctccttacttcagaatgctcttgatagagctccggaggaacagcccaggatcctccataggtatggacacctttaaggaaagagtgcaaactgggtgatggtgcacgtcattgatcctagcattcaggaggcagaggtagctagatctttgagttccaggccacacaaatacaaaactaaacctaagagttgaggagaggtagcccaatggttagggcagtggtctagggcttgcctacaagccctttggctcaaaccgaagcaaaaaaaaaaaccaaacaaatgaaaaccaagataaagtagaagagtgagcatgtcagacgatcaaagggagcacagcagagagtgtattcaaattgaaatatttaaaaatccagaaaaccaacttgctgctcccacctaatcgctagcctctgcgagattctgcacgcctatcttcctgcacgccctggactgtgacgtctttaaccatttcctcataaggttttggaatactgttttctgtgtggaaaaccagcaagatcatttgttgattacactggcacggctggttgggatattttgttgtttttgataagcttagaaaagcattaagtttcacaactgattattgttaatgccatgcaagatttttagaaaatattgtcagttttgacaaaatttctttttttttcccagattcctaaggtatattctccctctcatctcctctctcctctctcctctctcctctcctctcctctcctctcctctcctctcctctccactccactccactttttgggggagtaaaatgactctcagctttctatgatataaaacagataaaatgtgcaactcagtgtctgtcatgtcgcaactactcaataaactgagccattatggctgtccttttcttttttcgatcagtagtcttacactgtatgctttgggatgacaagatgagatattttgtgtccccccccccccccgcccttccagttaaactctaagacctcagtggggggggggtgtcatgcttgtttctagttctatacacagctgtcttccagtagcgatggattcccaacagttaatttcccattcataattcccctgtctatcagcaggactcaaggaccatgaccaccctttactcattagctgaccttaaaagtacttggtaatagtttgcaaattgagccttttaaattgttttaaacttatcaagtcttgtcactaaacctgtcaaaatgtcatttttctattttattctgttaaaaagtcctaccgtgttagaaattcctcttcgtaagaaaggaaactccattgatcactaactcaatatgggtgtaaagctactttttggtcatgagcaacagaaaagccttcaaaagacttcaaaccacagggacctgttggttcctgtattgagtctgctatctggatggtccatttttagctatctcagtgcctttgttgttgatggctggactgggctcatccacccgcaaggtttgggcagttgggagaagctgttgtgggagggagaagctgttgtgggagggagaagcagttgtgggagggagaagctgttgtgggagggagaagctgttgtgggagggagaagctgttgtgggagggagaagctgttgtgggagggagaagcagttgtaggagggagaagctgttgtgggagggagaagctgttgtgggagggagaagcagttgtaggagggagaagctgttgtgggagggagaagctgttgtgggagggagaagcagttgtaggagggagaagctgttgtgggagggagaagctgttgtaggagggagaagctgttgtgggagggagaagctgttgtgggagggagaagcagttgtaggagggagaagctgttgtgggagggagaagcagttgttgctgtgcttcttaagtcatttccctcttcagggactcatttgcttcattaagttaggagtttgtgacattcctagggaattcctgcccaaggctagaatgaatcttgtagatttcagcttttcttttttttaaacattagtcaatatttttattgtgtgtgtgtgttaagacagtctcactctgtaattcctcaaacacaaggcaattctccttcctcagcctactaaacactatgatttcccaagtaatctaggggacactggatgatggccttaatcccttcccaagggcagtgccccagtgtgacctaaggaccttgcacaaagcccataggttccaacagcccataccacaccacactggggaccaggcttctaacatggatccacatttatttttattttatgtgtgtcttagttggggttttactgctgtgaacagacaccgtgaccaaggcaagtcttataaggacagcatttaattggggctggcttacaggttcagaggttcaccagtccagtatcatcaaggtacgaacatggcagcacctaggcaggcatggtacaggaggagctgagagttctacatcttcatctgaaggctgctcgtggaagactgacttctaggcagctaggatgaaggtcttaaagcctatacccacagtgactcaactactctaacaagaccacacctacccctccttctaaaagtgccactccctgggctgaccatatacaaactatcacaatgcgttttgcttgcatggatgtcttgtgcaccacctggctgcaatgccggctgaggctagaagaaaactttgaatcccctagaactgaaggtaaagatgattgtgagctgccacgcgctgggattcaaaccctggtcctctggaatagcagccagtgctcttcactctgaaccatctctccagtccaggaccttaccttttcatcttacccgtgtacattgtcacttgacttgttcagccctggtgtcctctgtccaggaggatggcagtaccttcctcgggaaagagaagtagtaaaaagagaaataaataatgcaggcataactactggcacggtgcctggccttcagggccccccagagagctgtctagtaagagatctgtgctgtgtgtgctctgtgagcctttggatggcatccttgaaggcttgctcttcattgtcttgactgctgttgttctgaagccctgaatgtcttcaggcaaaattgacatcacttgtggtccaccccagggaaagtaggagcagggtggtgtttagactgtctatggacatgccaggtttctcaccaataatgagagaggtgtactgtgcctgtcagacacgctgccaggagggacggaaagcagtgttttgtccacacccttccgcatagaactgtggagcacctgatcctacagcaggactgttccagagttttatatttatttgcttgatctggatgtttgcattgtgatgttagatttttcaaaaccttacaccgtgggccaacaagacggctcatctgccctaaagatgcttgctcccggttgctgcgagctgagtttggttcccggggcccatgtggtggaagaagagaaacaaccgacgtgtgcacgctgtcctctcacctccaccgtgtcctcatccacagccacacgcagacgcctgaattgataaatgtcatgagacaaaaccacttatctatgagaatgcaaaatgttaaagcaacagaaatcatagtttagtgcacacgtggggacaaagcttctggccagtttcagtacgaatttataagtgttccgcaagctgagcaggtcggtgcacgcattcagtcccaatgctggagaagcagaggcagctggagctctgtgagtttcaaggccagcctggtctacgtagtgagacatagtgatatcccacctcaaaaaaacctaaactaaagtaaaacaacaacaacaacaaaacttttccaagaagtaaaattgaccaaaaacaaaagaagagaaatccaaaagcaacttccaggactctggtggagaggcctttaagtttgtttgatctggagatgtgaatgtgactgaaagcctgagggacacaggaaagcccccagagggctgtgggtaggacgcagtgacctttgctatcaatattgcaggactcccccattctacattttttttttaaatgtattttttctacactaaaaaaatatgttttgtgtcttaggcaacagaagcggtggacaaagctttcatttagatcatgcaagaaactgaaaatgtggaagattttccttagaagagggggtatgggggggggcagagtaaagtggagtctcccgactgctgcttcatcccagccatccctgcagtgagccccagcatccctgcagcgagccagcactctgcagtgtctaactttccactttcacttttgattagttagggcccccatctgctgttatttggatatgagtcttttctgtgacttattttccaaggatccgaagcagtttaaaaatacataatgttcagcgatctaaccatgttgtaatgttaagtacttgtttggggacttaaaactaaatccgtcaaacagatttgaaacctttacagtgtcttaaaaaatgatagccggtgagcaaaaaagaaagaggggaccacgtaagctgtgatcgccacgcttttagcagccacactagcagcaagcagttcggtttgcaaaaacagaagagtgacaattctttatttaatgttaaacaggaaactgaaagcaatctgcagcaccagggtgcgttttcaaggaacctgctatttatcagtgctggaaaaagccggcagacatttcttctatttgcttaagatgataatgtcttcgtgaaaatcttaacccaaacgtgaccgccagaaacagggtctgttgtatccgctggttttgaggcaaccggttccccccagaaccaaaggaaatgtagaagcaaattgcagagctctcagagagttggagagttgggcaggcactcatgttttgcccgtgtgtggggctgtcacttagccagcatgtgtgggtatgaatattctttctgaagacctgggcttcatttttaaggtcagccttcaatttcgagagaatataatttgctgttatttttagggctttcatgattgctcgtaataactaatgaaaaaaaaaacagcagagaaataaatgtgtaacagctgtgtctgcttaacttgattaaaggcagttaaaaaaaaaagtaaacagaagactaatgtgacaataggcaacggggacaagtatctctgtcattgtgagaagtcttacagacataacttgcctcgagtcggaaggccggccgggtctgtgtttaaagtttactttactgtttgtctagtgtgggatcagtgttggagtgaataatttatagccagcatgaatgagctcattagtcaccttttcagactttaaatgagttttgtggttgtcattactcgggccttctgttcagccgccgagcaaaatgacagcttggcagttggctgccttgttgtgggggccgcctgttccccttcaggtctgtgctggcttttgtgtttcattgagaccttgcttttcttgccctgtggctgggccaggaacactcacttttcagtcttatatacttgaaggctcaaagagacattttggaggaagtttaaaacaaaacaaaacaaaacaaacgttttggtggtatctgccagtgaaatggatgggcgcttgctctccctctccctctccctctccctctccctctccctctccctctccctctccctctccttctctctctctctctctctctctctctctctctctctctctctgtgtgtgtgtgtgtgtgtaggccagaagtcaacatcaggtgatggccactgaaacgctgtgctcatcagagagaatagcaaaggcgcccacgaatgcctgtctactcagggtttctactgctgcagtaaaacatcatggcccaaaaacaagttgggaaggacagggtttatatggcttacacttccagttcacaatctatcattggaagaagtcagggcaggaactcgagcagggctggaacctggaggcaggagctgatgcagaggccatggaggagggctgctctctggcttgcttcccctggcttgctcagtccacctttcatagaatctaggaccaccagcccaggaatggcaccacccacaatgggctgggcctcccccattagtcactaattggtaaaatgacttgcaggtggcggatcatatggaggcattttctcaattgaggatacttcctctctgttaactttagcttgtgtcaaattggcacacaaacgtagctaatacaacacctgaagagggagggtcgacctgactgcatgtcttggtagaattgggagataggaggatggagagatggatatagtagactatactgtttgcaaatgaagtgattgaaatttctgaggccactgtgccacaaattatccatgtctgtcaaagcaattgcagtctatttgacatttggtatctggtttatttatttactttaaagattaatatatttaatgtatatgtatgggattatttcgtttgtggactttttggtttatggttttttttctgagataaggcctcagtttcttgatctctctctgtcctggaattatctctgtagaccaggccgacctcaaactcacagagatccgcctgcctctgcctcctgagtgctgggtttaaaggagtgccccagcattgccaggctgtatatgtggatatttgagcatacatatttgcacaatgggcgtataggtgtccatagaggccagaagtgggcataggattgtctggaactagagggacagacagttgtgaaccatcctgtgctggggactgaactctgatcatctgtgagaacattaagctccactgatccttctctcgtgccctggttgatnnnnnnnnnnnnnnnnnnnnnnnnnnnnnnnnnnnnnnnnnnnnnnnnnnnnnnnnnnnnnnnnnnnnnnnnnnnnnnnnnnnnnnnnnnnnnnnnnnnnnnnnnnnnnnnnnnnnnnnnnnnnnnnnnnnnacagacagacagagagacagagagacagagaaacagagagagacagagacagagagagacagacacagacacacacacagagacagacacagagagagagacagagacacacacacagagacagagagagagacagacacagagagagatagagagacagacagacagacacagacacacacagacacacacagagagacagagacacacacacagagacagacagacacagagagagagagagagagagagagagagagagagaatgaaaccatcctagcaggtgaattattgtttttgttttgtacgtactgccttcttggattaaaagtccccttattactcttcctttgtgtcctcatcctgttttctgtctgagatcctatactatccatccttcatctctctccctctaggaaggtctctaagaataatccagatgctctgggtttctccaaagcatctctgattcctctgaagtctgggatctgtatatgttcccgttcccacacatcacttgggagctgtgtgaccttgggtaggtggacaaactctctgagacttgggttctttatttagaaaatgaaatcatatagctccttatatgattgatgtgaggctaaaatgagtttttgcaaagtctttgtgctggtcagatgctttgtctctgtagttaatccctgatttacttaaaatacaatttaagggctggagagatggctcagcgggtaagagcactgactgctcttccaaaggtcatgagttcaaatcccagcaaccacatggtggctcacaaccatccttagtaagatctgacgtcctcttctggtgtgtctgaagacagctacagtgtacttagatataataataaataaatcttaaaaaaaatacgatttaaaaggaagaaactttacttggcttacagttggaaggagtcagtccatgcttgcctggctacagagcagagcttctcacatgatggtggccaggaagagacaggaaagaggaaagagacaagctacttctcaaaggcatggccccagggggtgtgttccagttcctaaggttttcaccacctaaccccaaaatagtgccatcagctgggactgaccttccacatatgagcctacaggcacatttcctgtgccaaagataccaatcttagggtactatctggcactggctaggtgcgacataaacatttgttgaagatgataatcagttttcattagttgggtctctacttgtgacttgactcactggtcaatacttgtttgtaaccctcaaatgaaaagttgggtgtgctcatggttatcctcctaacagcttgagtggtcaggtgtgcctgtccctagctgaagacgaatggggtgacaaccaaaccgtgtcctttgtgtggtctagatagggtcacagtttttgcacttttgcatttttggttggtgatttaggtatttgaaatggcgcctgaggggagctgcagtgctgtgtagagattctgagggcaagctgcccatgatgtgcctgtcatatgggggatatgctgactaagctctttttatatatgcctgatggcgtccatagcctggagcttactgctaatcaacacatacctagttaacattagggtttctttaaatgggactatagataagaccgtgagttggtgagaagactgttaccagagcttgtaggcacctaactgttgcccctaggaactatgcttaagtaactgtggtactttacacatcatcacatgcacaaagaggagaaagaacagtagataaatgtcctctgaaaactcaaggttggaagtctcctgcagcacaagttctcagctgtagtcagtgtccccaggaggtcaggagaagccactgccccattcctctggtatgctttgattcatagatgtgataacacatctcatttcttataacggcatcatcaaaattatagataaatcctgcaagtcgatgttgtcctcctgtaacttttttcaaagtctacttttaatgatggttcttagatgcattaacctcccttttaacccaccacccaccagaggtagtggaaaagagaaggctaggctggtagttcaggagactaggcctaaatcttaagtccaggcaagtccaggcctcagaagctgccctgcaacctgccctgaggcaaggtcaatgggtcagcaacagtttccagacttccccagcaacagttttcagccccccaggctccagcaatggttctggaatgtccctagatatagaaccaagaggtcacctactcctccctggaattaacctaatgtactttaaaatctggcctgccagcccactttggggtcttgaaaggaaataaaacttgagacatgtgattcatgtaatttatgtcaaatagcccaaagagttgtttgtgagctttgaaacctggggctgagaacatagcagaacaggccaggacatgcccgggcaggcccatcgttacatgtcctgactggcctagtgcctccctatctcccacccttctgacagtctgttgatgtttaaatgaaccaatcatgtgaaaccgcgccaattccaccccagccccaccccttttctataaaagtccctagcttccaagcctcagggtccaaaccactgtctcctgtgtgagatacgtttcgaactggagctccgccattatggctccaccatggggtcgacacctctgtctcctgcgggagatatgtgtcggcccggagctccgtcatttaactacctcatgcttttacatcaaggtggtcgtctgttcgtgattcttgggtgcgcgccaaatggaaattgagtgggggtttccccactaggttctttcaatctctccatctttgtagatggtagaccccagcatgttgggcttctgtagaataaaacactctttgcatttatatactatttgagactgggggtatcattcttcagcaaatcatgggccctcctagtggacttgcttagacatttctaatggttctttggagcagctcccatgtgtgtttgtctggaagtctgcagttcagttcacagtcaacaggggcagcttgatctactggaaaacccttcacagatttaccagcagtccagtttggtagagtcaggatagcaaacacagatcagcagcagtggcatgaactggcagagacagccaggctgcagcctcagcaccagtcagcaggggggaccagggaggacaccagaagttctaggctgtgcctctctcagggaagcaaggaccagtaaaaagcattgcacagccagctctataagtgagcttagcgcagcctcattcgctgtccattgagtccattttatctttcctccaaacatcacgtgtcttccatgggacttgtctcagcccatgaacctgtctcagctgacatcactctgccaatcacatcaagtctgagcagcaagaaactgcagcacattaccagaagtgtttttgtcaagtttctctctagagtcccaacaaatggagctcaactaagtgacgtaaggtggactagtatatgtgtgtcattagcgaagaccacttcgtcacgtgttctttcacgtgcttgctttcgcagaacatcctttcacccgtgtctgcttcaggaaaacactccttcacatgtttgccccagcaaaaaaccctctaacacaactggccgttcaaagaaccctcaagtttccacttcactcctccacaaatgcacaagtgtttggaattcttgtatccttgaagagaaatttggctactcaaaaggcttaccttgaatcctttcttgggcagaaaaactttatatctctgaatatagggtttataatatgtagcgattccattggctcccactgctaactttttttttttttccaagacagggtttctctgtatagccctggctgtcctggaactcactctgtagaccaggctgacctagaactcaaaaattccgcctgcctctgcctcctgagtgctgggattaaaggcgtgcgccaccctgcccggctcccctcaactcttaacattatgaattgtttgtaagttattttacatctgagattgtgaaactgaatcagaaaagggaaagctttaaaaaaaaatggttttaaaactatcagaaaactggaaggagcagggagtaaaggggccgagctagcttctggtttaataatgcgactccagccttttatttccacaagttctgtggtaccaggatcttagatattgtccctgaaaacactttcagaggcactgtggggacctttgcttcagctctggtggtgcacatgccagagaccgctcgcataaatgctgcacccacatccctgaactctgcaggcctgactcctgcttttctggaatttcccacctcagggatcaggaggtctggtggaatggaagtacctaggctaaatccctatcggttggtagtctaggatcaatggcagggctcagagaatacatttttaattaatttaaggcagaccagtcctttagttgtgtgaggataccttcccagtcaccccgacacccctgtttttacctttaagtgtgggtcgatctgacaggtggagtgagacatcagttgctatagcatgtgtttctttgacttcactgaagttgaaaatccccctttaccttcttgtgtgttgtgtgattggcccctttgattgagatgttttgttttgtttttttctttctctttaagttatgtgagagtttcaaattaaatgccttgagccagatatggtgggacatacctgtaatcccagacttcaggagaccgaggcaggaggatcataaatcttaggccagtagaggctacatgccagatctgatgttaaaaacgtatgcccacatatatttacatatgtaactattatcgcctcccttttgttagagaagctcctgtggcctcaaccttcctaagtcgtccagaatgacctttaacctctgatctttctgcctctcaacctctagagtgctaggcttatagtaggcttacaggaaccacacccagtttcctctttttatatttagcaaatatttacacctttttttttttgtcttttacaatccctgatggcatacaatttctaaattgttatgcaaatatgtcagtgtgcaaactaaatctttttgatttgtttacttaaccaaaatcttgtactatgtactctggttccactatacactccttacaaatattaattcatttaattgttaccacagctcaatgaaaggttgctacagattggatgctggacaatcccccaaaggctcataatgaatgagcttggtcgccgagggtggtcatactcctgggaggtggtggagcctctatgctgtggagcctagtggaggtctttgggccattggaggcatgtttccaaggggattgaggggcctcgtgaccttccatttctctttagcttccagtcatgacatggtaactttgtcccagcacatgttcccaccatgttgcgttacctcaccaaaggcctaaagcaagatggccaccgatggataggcgcctcccccccacaaaaaaaagcccaaataaaatgcatgttttctccttataagataattatgtaaggcatcctgaaataatgacccaaagctagctgatgtaattagttattatcccatttcttttttaagattaataataataatttataccaattatttctaacaactctttattgtttataaattgatggtatttatataatctatagtgataataattatgtgtattatgacatggactgagcgtgtgcatgtgtttgtctgtgtatgatgtgtgtggtggtcagaggacaacacctagttcttttctaccactgtttgtgctcattccatgggattgccgtgctcacttggcaagctctttcacagacagcctccacccactcccattccttcatttttaagataaggggactagatagagggaaagaagttatgttccttgcctggggttatctggctgctaagtcctagcatgtgtatgtttggctgcactattctggccttggcgttgggcttggtatgtttgtatatctatggttgtttcctctatgcttgccagtgagttggcgagatggttcagtggttaggagcactggctcttcttgaggactcaggtttggttcccagctctctctgggtgctcgtaaccacctggaacttccaggtgatccaaggtctccctctgacctcccaaggtgccatgcacacatgtggtctgcagacacacgtgcaggcatagcacccgtgcacataaaataatacagaaactttaggataatgcttaccaggcgtcctcctgtccttgatggctggtgccacgcgtatttttcccgggctgtctttcaagttcctcatcactcagcaacaggcatggagttgttaggtctttaaagcaaatccttgttgactgagtgatttgtctgaaactggattctagatcatccgtttaccgtcttgtttatggttacagaggagttgagagacattatacttctagtttgcctctagcagatgacttcataggcttaggggttggcaggggagcctgaactaatgaatctcactccacccatcacccctactttccttacccctcccccctctgaaccccaagtcagcatccttgcctactagagaagcctttcccaggctccacccttgaggattggcctggtaaacatgagggagtgcactgaggttgtcatatggtgaccgggtcttctgcctcacttaggaacttccaggtcttccagctgagggtctctttcttctctatagaagggaaaaagtgagctttgttgttgttctggcaaacaaaaatagcatccttgtgtgttatggtcaagcaatgactaagggattgtctttggctgtacctctcctcctcctcctcacaggacacaccctctttgtcttttggtgacttttataccctgctgcctagaccgattgattcttctggaatccagtggccctcaaagtatggttctcaggtctgccatgctttttagagatgtaaatatctcaggtcaagcctcggcctctggaaccagaaattatgggtgtggggaccattggtagcatttaaattagccctctaggtaattctgatgcacattcggagaactggaacatagtggtagaaagcgtaaaactctataaatgtaaacacaagtataaaagaagagcatatccaaaaaaaaaaaaaagagaaaagaaaaagaaaagaaaaaagaaacaaccaaaaaaacttgttctcagttctcagagggagtcactaacagtattatcacctcaattaaaaaaaaaaaaagatttattcaggttgtgtgtgtgtgcatgccctgtgccgtgtgtgtgtgtgtgtgtgtgtgtgtgtgtgtgtgtgtgtgtgtgtgtgctatgtgtacaggtgcccatggaggccagactaggccattgtatcccctggaactagagttgcaggcagttgtgagtgctctgatgaggtgctaggaaccgaacctgtgttcttcacaggagcacctagtgctacttaactgccgagccacctatacctgtccagccctcttcctaaatttgcaaaacccacttttacaaaattatcttttttttttttttgtttcctttgtttgttttgggtgctggggagggagcccagggctgcacatgtgtgaacacatgtgtgcgaacacaggccatcacagtgggctgccctcggctcccaccctgccttttgagtgaagggttgccatgctgtctgagctgttccaacagcttttggttctctgtttcgctcttcccactctaaaaactcatgctgtatccagatcccattcatcttttgaatcctatttctttgataacacaacttgtgggttgtaaaaatacctagccatttcccttgccttgagaatggaatgtgaaggaaccactaacactggtatcccatgagttttgttatgatgcttccatatctatttacaaatatataaaccccacaggaacaagactttgtccctcctgaacctaacccagtgcttggtaaatatttgtctaacaaacaagggcattttgaacacaatcaagttatactcagtctgtttgcactctcctacctggaggagaggttgtcagaacagctatttcaaggagagctttcttgatatacatattaggaccccatttagggatatctggacttgtatggagtggctccccgggtggcttttccagacttttctggacaaacaacccaggtttagggtgctcctccatcttgccaggcctaactccaaccatacttattacatctcttcctcacaaaattatctatgcttcgttccccaagcctgttgtgtcagatagtctaccaagggctttgcctctctcttctgggggctgggggtgtgagaggggtcagaggactcctttccctgagaatttaaactagaggacagaagacttgagacagtctgcagatggtggatgctaaaaccagaggactttaagaactatggccgggaagccatgtgtgaccataagcaagctgtcccacagggaggagagtagagtatctctactggcaagaagcaagaaataccttgaactggagggagggacaaaagcaggaatcctgtccccagttccatgccaccagctgagctgcctgctttttactggaaccagttgttgttaccttggagcagagggccgtctttccaggcctgcctcaggtctttgcacctacagcaaggtctctctggaatctacttagttgtcactgctttgagggactatcagttattccattaagaaccatgaaggaggaatggaggcctatactgccttgcgctggctgtcccagaacacaagtctgtgtccagatggggtacggagtgatcccatcaagtcggcaatcagaaaataaatgttgctgggcagtggtggcatgtgactttaatcccagtccttgggaagcagaggcaggtggatctctgaggttgaggccagcttcatctatagagtgagttccaggacagccagagctactcggagaagccctgtctggggagtggggaggcagcggcaaaacaaaacaagaaaaccaaatttccaaacagcaaccacaacaacaacaacaacagaaatgagttctgggtctgagataggattctgctgtcaaatagctatttaaaacaatagtttaaattatttggcctgcttgagatttcttggcacccaagatattagggtatatttggaaaacacagcaggaacttgagcatgaggccattcctacaggaatttggcccctggatgctaatgtcaaggctgcctgtcccagagccagggatctgttgaatcactgttggaggagggcacaccaagctcactctggcttacagcaaaggtctgctggggtccattttagatcaccaggcaggcagacctgtggaccttgcaccttccttatcagccttcctttctctctttgggacaacacctgcctgacatctcttagcatatctcgaacggaaaagggaaaaataagaaatcaagtcatactcaataaatctgtttgctgccccttttccgtctcctgcctgaggtagaggttgtcagcacaatcagcccccgggtggggggctcctttgatgtgtacagctaggacccccacctaagggtattgggacttagggttggctttccagatgtttctcataggcttctccagacaagctactcattcagcttgcgaatgccctcagagggaaaggaaagataagaccagcccattaaaggcagcttccccactcactgtgctccttcctctctcgatggcttcttagagcctaaacttgtcctgtgtgttcagtttttgtttatttggcatggccagctcacaccctaggaggcgagtttttgttgttgttgtttccgagacagggtttctctgcatagtcctggctgtcctggaactcactctgtagaccaggaagggagttttaagaatgacatacatagttcaggcctaatcaacctgctttgagaacctaggaagaaggactggggaggaaataatgtgctgggcctactttaagtagagagatgcctaggaagtgtgagaggggttgggcgggctggcagctcaaggcggagcagggagagtacattctctaaagtcagttttgacctttggtgaggattaaagattgtcaagtgacacgctgttgtaggagggggacctgccctagctgagccacaggtggctgatcttctcttgtcctggtttgggttaccagtagtgggccttagaatcactggtgtgcgactccagagatgatctaatgtgcctgccaccgggtaccttccgcgcttagtcacaagatgtgctcaataacataggtgtcgctggatgacctcaggctaccttgggcttcttcaggtcttctggctgcttggcaaggagtgaagtctctgtgagtctgaattgctgaagattgcctgccacctacctaatcttgaagttttgttaagtgggggattgagtctcagattggtttggagttttctttctttctttctttctttctttttttttttttttttttttttctttttgaaacaaacttctcagaagcacgtggtatttctctcactgttctctctctccctgtctggctatgataaaagttcctgtccagctgggtttttcagcccagttcacagatagctgtccacttttctggtgggcgtgggaggatggctttgggcttctctttgtaggacctgctcgcctagctacctgggagtggtgcacaatcctatttttatttatgtcaccagcagggtgtcctattggactctgctttcatcctcaccaaaggcagccggctggtgagccttgagcagtgggtggccattctctggaggtgtctggagactgggtgaagtggctgcgccattggggggcgcggggtgggaggctgcagattatcgttttagttgatgaagctcaaaatggtaaaggacggagatttgttttccttccagatgggggcccttagcccagcctactggggagaacccactgacgttgcgtttggggttcacctctcccttggtggttgcggccatcctcctgccctccgaagccaaggcaacctaggctggggatcagttttttcgtccccggcaagaggtacatggtggaggaggactggacccgcctcgggagtgctgcagtagtagttggagagaagtggagtcttctctcttcaccctcagaagcctcgctcgcgtcgtaattctttttatttttactttcgagccttgtaaggcaggcggccggggtaaaagcgctgcggcgacacgttgccagctgcgcagcaccgcccgtgtggcctgaagcaggggagagggccggccacgcgccacctgcccggctcccctgggtccctgggtgccgcacgggagcccgggaacccagcctggccaaagggcctccctgcggacccgcgccgcagctcggggtcgcccagcccacgttttccgtctctccggctctctccgcccctccctccccgcgcttcccctcctcctgcctggtacatgtgtcgcctttttttgtttgcagtggaaacaatnnnnnnnnnnnnnnnnnnnnnnnnnnnnnnnnnnnnnnnnnnnnnnnnnnnnnnnnnnnnnnnnnnnnnnnnnnnnnnnnnnnnnnnnnnnnnnnnnnnnnnnnnnnnnnnnnnngtgcccgcgcccgcccgcaccacccaggtggggtccgcattccagagccgtcgcagcggcacggggacggggctcgcaatgcggggcgcgggccaagctggacccggggtggggggaccccagtcctgagccgggaagttgcccgcccaggagtttcctgccccgacgtgctggctgcttctcgtgcctcggtttcccctccgactcggagagcgacagagttggtattgtctgcggaacaggcatcctcagcaattcgagtctggcagagggtgccgatcaactccagaccccaggaccgcgaacgggcgcctaacaaagatcccctccctagccgagcacgctcagcacgggccgcgagcatcccgagactctcggggcctcttccgcaccctgactctttgcaagcctttctgggcctcgcgtgagctgggagggacggtgggcgcgtattgatttgttttagtctcgccacgctgcggccaataaaaggtttatgacatctgaccagcagtgaaggtatgtgtgctcccaattgccctgtgtacggggagaagagcagttttcccgttgcctggcaacgccgccgattgacgcagggcccagccaatcgctgccctcgttggtccccttgaaatgtttttgacaagtacagtaaaagggagtggagcgcgtgcgtgcgtgcgcgcgcaaggagggggaggttcccggtcccccaaactcgcgactgcccagctttggttgagaaagatttctcaactttttaaaaagttcaccaccaacatctgttcagacctgggccgtaatggcgttgtcaggtatttggagaatttctgctattagccaaaaaagtaagcgtttttactccattttcttcgttggaagaaagaaaggaagataaaacacaggaagtcataaaaagaatgaaaacaaaaggagggtgtgtgagacgtaaccaataacttaaggcggtcactgttgggtcactgttcgaagcaacattattagcagcagattaaaaaatgtttgcttgaccacagacgcacactacccctccgcctctctaaaataagaagggaaaggcgatttggaaaattttgtagttaagatataatggaaaactcagctgtggtttctgggaattgtttgttttgtggtaatataggacaggggtagtaaggagtcgtcacatgctgttgtaaagggagggatttgtaaggaatgtagttagtggagagtttggaaacataatctaggggttaggggccctccagaccacctcttcttggcactggcatttaaatttgtttttcgtataggatcacgttgctggcagtgtttgttgaaaacaaaagaaaacatggagaatagcatgttagttcctttgggaggccactgacaaataagcaaattaaaaagaaagagagcagtatgttgtcatagcaacagtgcaattaaattactttactgtcagccatgatataattttcctgtttggaagctcaggagacataaaactttcatttggtgctaaagttgacttcaactggctgggtagttctctcgtgtgtggatgtgcgggcaattagaaccctttctaggggaatcggaggaaactctgagacaagctggccttgatttcttcctaaggaagttaaaagctgtatcaggctggattccttaactagctccaaacctgaagataggagccaccacttttctataacgtgcatgctgtatgatatagactaacttccttttttgacagaaatgtttcctcggatgaactggattcttctggattgggctgccttgttccggctgggtgccttgtggggtttttctccttttcttcttcttcttttttttttttttttttttttttttgatttttcgagagacagggtttctctgggtagccctggctgtcctggaactcactctgtagaccaggctggccttgaactcagaaatcttcctgcctctgccttccaagtgctgggattaaaggcgtgcgccaccactgccctgtgatttctctcctcttagagatggcatgtcctgtccacttgggagatgtgcctcctttatctctgtccagctggggggggaagtgcacagcacgctggcacctcgcctctttgtttgagctctgcactgtgctttctagaatccagttctagaacttcctgtgctgaatcagtggtcactttagatgccacgttaatggctatttagaggcttgtgttaaccatttgtttaccttccatgtattcattcctctctaggtactttgcttcaagtcctcactgagccaaaaaaaaaagatacttttaaactaagcatgtagctttagctctgcacacccaccgccactgaaaaactcattgtcctttttatcttgagttgtataccagagggctgtgtctgtaggggtgactctatttgtaaacttgacatctccctgtattttcttgtcacatactgctttactctctgttctaggtcattgataagagtggagatgctgcgggtgggaaggatctgttagaactttggaggaatttgccttcctgtagtgaaattttcagttgctctcctgactttattttcgtcaccgatcctagttaacgacttatccttcattcccacgtatttttagtgcctggggttgcacacttttcctctttagagatgtccttgagttgaatgtactcggtcaagttgcaggctgcagggttccttgtcctggcttacacttgtcaaatgttagtaaagttgtaatttttccttacaatttttgtgggataaaataaaactaaacagtcaaatcaatggcctttggttaccaggctggcctcaaactcagaaatccgcctacctctgcctcccaagtgctgggattaaaggcgtgtgccaccactgcccagctgtaagagtcttcttaggggattggaagcaactctccttgccttccctctcatctctgttattttacttatgaaaaaaattatacttgtgtgtgcgtgtgtgtatgtgtgtatatatgtgtgtgtgtgtgtatgtgtatacagtgtatatatgtacacatatatgtacacatacatgtgtctgtgtatatatgggagtgtatgtgcccagtgcacatgcggaggtcggaggacaaatttctggagtgatggtccctgcatcacggaggtctgggtgatcaaacacaggccatcaagcttgtcagcccccgcaccccgagttttgagattgaatctcctgtagcccggcttggccttgagctctcaatcctcctgccgaggcttgaagaatgccaaaagcacaggtgtgctgggattacagttgagtgagtactttcagacccagcctttttctctttgagaagaataaacagtggacctggtaatacaaagccacagtaggtgcccatgacacttatcttatttatttatttttttttttttggtttttcaagacagggtttctctgtgtagtcctggctgtcctggcactcactttgtagaccaggctggcctggaactcagaaatcctcctgcgtctgcctcccgagtgctgggattaaaggcgtgcgccactaccgcctgaccaaggtcaccattctgctgacactctgggctcatttttcttcattgtgtaactgtatggtgggctcgtgtggctgccatgcaggagtactgccctgccttcaccttgtagttgagagccagataggagcagagggagtcaggcggaaactgatctgattcctcttctggggttctccggctcatgacttctctgccttgtccttcctaggagccttcacgtaaatgggtccagtcatgcctgccagtaagaaggccgagagctcaggaatcagtgtgtccagtggactgagtcagcgttaccggggcagcggtttctccaaggccctccaggaagacgatgatcttgacttccctctgcccgacatccgattagaagagggggccatggaagatgaagagctgaccaacctgaactggctgcatgagagcaagaacttgctgaagagctttggggagtcggtccttaggagtgtcagtcctgtgcaggacctagacgatgacaccccaccatcccctgcccactcggacatgccctatgatgccaggcagaaccccaactgcaagcccccctactcctttagctgcctcatatttatggccatcgaggactctccgaccaagcgccttccagtgaaggacatctacaactggatcttagaacatttcccgtattttgcaaatgcacctactgggtggaagaactcagtgagacacaacttgtcattgaataagtgtttcaagaaagtggacaaagagaggagtcaggtaagtcgcccgtgtcttctagaactgagtttagttattttttgttttaaattaaaatttttttttaaccattaaaaatgaatgtatagttaaccatgctgaagtcgttatgaatggataatttaacacattggtgagttgtggaaaatcttccttgtttttggtttgtttgtttgtttgtttgtttttggtttttcgagacagggtttctctgcctagccctggctgtcctggaactcactctgtagaccaggctggcctcgaactcagaaatccgcctgcctctgcctcccaagtgctggaaatcttccttgtttttaagtgtattggttatactttctgatttaatgtaatcacacaattaagctttgccaaatccactgtcttcattcatgtctcggacatgccctatgatgccaggcagaaccccaactgcaagccccccgactcctttagctgcctcatatttatggccatcgaggactctctgaccaagcgccttccagtgaaggacatctccacatcttccacgtggttggggcagttgggttttacaattcaaagctctatgtggcaatacctagtgtatcaacggagggacctttagataaggagaattgccataaagaactggaggaaaaggatagctgctttctgaatattgggagggggtggcttctcaggcttctggaattcacgggagatactgctctgttgaaagatacttgaacatacttaattactccgagacccatcagagactccaggtgccctcagcttttatgaaatctggtgtctatgtgagtgcctggcaccgtgaaactgggaaaccgccagggtgaagtactgcgtgggttaaggttcccaccagaagggttttttgtttttttttttaaattgtttaagtgtgtgtgtgtgtgtgtgtgtgtgtgtgtgtgtatgtgtgtgtgtgtgtgagagagagagagagagagagagagagagagagagcgcgtgagagcgagcccgagcacacatgtgtgagggagggagctggatttacaggtgatcgagagctacccactgtgggtgttgggaactgaccttggttttgctggaggaaccatgagtgctcttaacctctgagccattgctcactgatgctgatgatgtcaggaggggggttcctggatatgcaggagccttcttcttttccaggtccttagttttatctgtgaggctcagggcgtgcctcttacatccctggtactcagtcttagctattttctcaggttaagcatctgagaccactctctagatttcaactctgttccctgctttgagatccttctgaaaacttagaaactgtcctctttcaaagagccaggctgtggcattaaacacctttgtataggtcacttcttggggcaagagagagagcaagtgtgaggaaggaattctaagcttagagtacagccagcagaggtcgagtcaggaccccagagctgtttgccactgaggaaagttaacagggcctttagctccagtcatcctttctgcacgttctagcgtgcccgcgtctccacgtttgacatgaaaccacagcacccacaagtaatgtagctagttcgaactctgaactgttaaacaggaccagcttcaagcctgcagggagacttagagattatctactcctcttgctgccttgctaccaagccctggatggtgcctgtcagagctcaccaggagggtccacccggctccctgccccgccccgccttacactggattcttggagtcacatccccctcccccccaggggtgttggttgtcaatctcagcaaacactgatacctgttgacagggagtgttttgaaggacttgagattgttaattttctgaattgttgagttctggcttcctagctgaggcagtgacctgtattgacgtgtttctgatcaaatgccagtcagttttgtgacttcgagtttgttcccagtgaataaagctacagttgtgcccccctccccctttctttttctttgggtgagctggaggcctctggtggctgttcaagtgtcaggcttagtgagtgctgccagggccctagccctggcctgtttactgggggttttctcctggatttgctgcgtaaaagggaaggcattctcgctgatccattgcccagtgagagtcccttgggctctgtaggtacacttgttttcttcccagggagttctgctttggcagtaggctcaacctcaacatgaatgtttgaacacacccaaacgttggtgagaactgcctcagataacagagaatggaggcctggcacattatacccaccgagttagctgcgccaccttctttgtttgttttaattcttttggtatgtttttgaaattgaaaaaagcttggcctagcagagaggatgtgggatcctgtgggatccttgtcccagacggcttggaacatgggaccctgctggattactgtttggctaggcccctggagaagggaggaacctttgagattgcatctcggtcaccccaagcaaggcatttaacactggtaccacctctcaggccccaccttggagatttggttctgaggtgggttgggaaagttggttgtctggtgtttcaaggtgcttagctggtcctggaaccagggaggggcctttcagggtttttttgttgttgttggtcagtttgttttgagagggcctcaaataggcaagccttgaacttgatattcatctttgggtgaccttgaactcctgaccctcctgcttccgcctcctttgctggtattataggcatgggttttgttctttttcctaagtgttcagatttcatcaagaatctttttctctcaattaagtctgttttatctctcaaagtgcttcaacagacaggttaaatttgtttttgtttaatcatgggcatttttagccagccaaagtagatagaataatatgaatttgggctcctgtcaccccacgatccatgtctagagctagggtttaaagggaattgtctggtttcgttcattcatttttttttccctgtcactgttgctacttggaagaaaattcagatcgtgagtcactttatttcaacatacttgagagtgtaggagaataatccataatttgccatgcagctacaatgccagtgtgtctgtttgtacctcatgcctccgactcccccccaacattagaaaggcttagatgtcatctgagccaagtattcaaatatccaagattgttagatgtttcaattaggacccccaacatggcttatgcagggttgtggggtctctcacaggctttgcttgtttgagtatattgcacttttttttttcttttgagttatggtttctctgtgtagccttggtagtactggtcctagctttgtagaccaggttggcatggtcttggggatcctcctgcctctgcctctttgagtgctggattaaaggcttgcaccactgccactacctggctctctttctcttttttaaagacacccagcacttgggtcttcagagtactttacaccctgcttgcttccttgtgatgtccctgagtttgtctccatcccccagaagggaagtgagctcaggggtcctctgctgccttccaggccccttccctgggaactgagtgtagagggaggggctgcgctcctgaatccctaagcctgctcagcttgccttggggatgctgtggtccagcctggttcacaggggtcagctgctccccgtcctgtgaacttcacaactgtctttcatgttaccaggttatcagtggctgctctttgctgagatcaatcaaggtcatttttttttttttttaaagtctaagatctttttttttttttctcctagatacaagtgtctggatttgtatttagcatgtactgacttctctggggacttgcaaatgagaagtaagacaatgcagttaatttttatagatagattaatggagcaggtatgtgtgctttgctttcccggctttttatttatttcccttcttgccactttaacaaagaaatcttattgtcagcagaaggtttagaaaggaaacagtgcacagagtgtacttaccatatacaaggctgacagctttgaatacagctttggcctgtagaggtggctccgtggtttagccagtccaggactgagtccggagcaggactccgagactggtgttagtggttagcagtaaccggccatctttttgtagaagcaggcgttggaagtggttcagtgcggttgggccttggggtcttcggtgtctgaggcactgttgacccacagcctgaattcagtggcagcatgtcacgtgctgatgaacaccatgttgctcttgagattttgtttgcttaggttttttttcccccttccttttctttttctttttttttttttttttttttttttttctcgagacagggtttctctgtatagctctggctgtcctggaactcactctatagaccaggctggcctcgaactcagaaatccacctgcctctgcctctgcctctgcctcccgagtgctgggattaaaggtgtgcgccaccatgcctggcccttttctttttttaaaagatttatttattttttatttatatgagtacactgtagctgtcttcaaacatacactagaagagggcatcaaatctcattacagatggttgtgagccaccatgtagttgctgggaattgaactcaggacctctggtggagcagtcagtgctctcaaccactgaaccatctctttagcctgtttttttttttttccttccccctctcctttctctttctttgattaggttgaacacgctaagcaaggtcatcatagacacggccatgttatgtatgcccagagggaatagtcgtgccatagcataggagagtaaagtccaggctatttctggggtgcagcataaagaactctagagagtaaacaggagtgagcgacacagtaagtgtaggggtgctctcactaagtcgcctctggtcctggccttcgcggttattctgttcgcctggtgcctcctggtagatgggattcattttgttttgttttgttttgttttgagacatggtttctctatatagtccgggctgtcctggaactcactctgtaggccagactggccttgaccttggagttctgcctgcctcttcctcctgagtgctgactaaagttgtgcaccatcatgagtaacaatctgacagtttcccccttatgcataatggcctcttattcccgctttctagaggatgctggtaactaagctctctgcaggaacagtacttgttcttgggagccatctctcctgcccgcctttggattaactcttaagggacagtagtgagtcttcattcattatctgagaagagagtatgacaactgagagaatgcacccattagcaagcctctagggcattttcttgattgccagttgatgtaaggggtccagcctgctgtggtcagtgccaccactgggcaagtgatcctgggatgtatataaagcaaactgagcagaccaggaggaacaaccagtaagcaacactcctccggtcctgcctggactttccttgatgatgaacttcaacctgtaagtccaatacaatacgctcttacctcttacaagttgctttggtcctattgtttcctcacagcaatagaaaacaaactaagtcaagagggggtgatagtgtatagtgttctagtccttggagcagatcagaatgtcatgtctcagccgggcgtggtggcgcacgcctttaatcccagcactcgggaggcagaggcaggtggatttctgagttagaggccagcctagtctacaaagtaagccagggctacacagagaaaccctgtctcggaaaaaaaaaaccaaaaaaacaaaaaagacacccccacccccactcccgaatgtcatgtctccacccagggccatagtatttcattcttttggtcaggaggcctaagacaggacagtttcagtgttttcctttctggatgttaccagggcaataggaggtgaggtccaagcagaatgtaaaggagggatctctgttcatttgcttccaaggctactaacccctttctagctatctaacgggaatcttttcattttttcccttctattaaaaagtatcattattttatatgtctagtgttttgcctgcatgcgtgtctgtgtaccacgtgcttgtctgctgctggtcggaagatggttcgggacctcttggaacttgagttacagacagtgttgcgccaccatgtgggtgctgggaatcaaacctgggtcttctggaagcacagccagtgctcttacctgctgagccatggatcctgccgtctggtggaattgtcaagttagcatcctcggtggtcctcccgaaatcactgtgctccctttagctgtgctccaggctgatcctgtccatctgttccttccagataggctctttcttggtctgcctgcatgagagagagatgtttcttgtcctcttaaataagctagttattgtttgcttacttgcccagtcactcattcattcatttattcattcagcaaacttgataaagcccccagctttccattttgaagtctacaactaaatatagaaagataaaaaagcaattgtattgttattacagcgaagctgctgtataccttttttgtacgttgttagcctcagtaaaataatttaaccactgggggttgtagttcggaggtagagcacttgacgaccatgcttaaagctctaggtttcgtctgaatcccgagctccatccactgtttggctgtgggtgtctgtatctgtctgagtcagctgctgggtggagcctctcagaggacaacatgctcctgtctgcaagcataacagggtatcgttaatgatgggtctcaagttgggctggttattggtttcccatgcctgtattacttgtcgacaggataaattttgggttgaaagttttgtgggtgggttgatgcctttattgctccacgggggttaaaggattgtgggtcccaaaggggagaggaactccacaggaagatcaacagagtcaactcacctgggcccttgggggctgtcagtgtctgaaccaccaaccagagagcctaacaggctgggcctaggcctttccgctcatgtgcagcagatgtgtgacttgttctaaatgtggattctgaactgctggagaggggctgccccaaaagccctgcacatgggttcttctagctgggctgccttgtctgacctcagtgggagaggaagtgcctaacctcacagagacttgaagtgcgagggttgggggatacccaggggaatacccaggggacccccaccctcccagaggagaagagaaggggagggggagggggagggagnnnnnnnnnnnnnnnnnnnngggagggggagggggagggaggaggattgtgggagggagctgaccaggagtttaaaaaaaaaaagccctcggttcaatccctagtgggtgggactttaaaaaccacgattcagaaggaagctctaggatggtttccttatagtttgagagaaaaagaacagggcagctgggcagtggtggcgcacgcctttaatcccagcacttgggaggcagaggcaggcggatttctgagttcaaggccagcctggtctacagagttagttccaggacagccaggactacacagagaaaccctgtcttgaaaaaccaaaaaaaaaaaaaaaaaaaaaaaaaaaaagaacagggcaggcgagtcgtgcttcctgctggctgctgtgagacggaagatggaggagagggaaagcaggagccatgcgttttgagttggggtccaagagagtaggagggtcagcagtggacgttggcaggtggcttacaagggggaagaggggcttcaacagagaaaggaggacaatatccagactgtcagggcaaggcacatttccaaagaagggacagaaagagccgctctttcaattagaactcagaagagcagtcagacttggtaatgatggtagtgctggcgactactctgggggaggggcttctggggcacaagtacattatctcattaggggagtaattattcttcccagctccatagcatgtcttccggtgaatcagctttcccgaggggtggtctcctgtacaggtgattgacaggcccagttggattacctcttaaaggagttgatagagtatgtagtggttgggacagcgtagaatgtcttgtttccatccaggcagagatgcaaagctcccattctgtcctttggacctggaggaagtgagtagctttgccttaatgagcctcagcaaaacctccgagcctctaccttttcctatagtatatagtagatcccgaaaggtcgggggcaaagttgatgcctcccgttctatgctgggtatgggaatagggaagtagatgccagagcccattttaagtgtctgtccccaaaggcctccaagcctgctaatgcctgtctagctacctaacacggtgtgagagctgcttacaggcttccctgtcctatggactctacctacagaacctcttagctagtgaaactccagaaagccctttgttgattattttaattatctgtgtcctgtctctctctcctcattgcttttctgactcttcaagggtctggcattgacttcctaggaagattctgatgttcctcgtgggggtctcacaatgcccctgggaaacgtttttcttctctccatcagcatcccccgcactcccaactgtgaagagccaagcctctctcagtgcaaaagcctcttcctcagcacactaccaacagattgctttcagaccttgtcaagctgcagagggtttctttccatttcagctgcaggctagctctcagcagtgaataatgggaggctagcacacctgaaaaggccagggtttgcttctttcggaagaagtactgatgttaatccatatccttgttaggcttcctgtggtgctggggatggagcccacgggccttgtcctgcagtactcgtcatgcccacccttatggtttgctctgccatataagtcctgcccatctaaatgcttttgatgctggcaagatggtgggaaggtgtagccttcatggaaaattccactgccttcccaatacaccgctttttatacttgaaacagaaacttttgaaatctatttaaggttggccaggcacaggtggggcaccccggaggtgcaggctggaagggggtgtagggggagaacagcctctggtacctgtgagtgagcctaggcacacagcctaggctagtgagaccctggcttgaaacaaaacaaaactaaacagagccccagaagggaaactgtggagtgtgtgctgctactgtagtgcttatctcgatggcactgtgtttgtggataggatctgacttcatcggttttaatgtatttgtgatttatctcagtgcgtaatgaatgcctggaccagtcagtcctttggattttctcccacactggcctgtttcagaccatcagaatttgttcaagttgtgccttcatcataagaggccattagtatcctgtacttagtggcttcttgaagggaattatttggtgatgttgaaggttctttctaagaacaggcgtgattcttgttgtgggagctaacagtccaaggagagaataaaactgaacaagccaccttcagtcccagaagcaggccggatcagtgtctgattggtatcatgcaaagtcagccagggaggctttcccttgaaagagcaaggccgtaggaggcgtggaagccatgatgatgggcaagttaatattccaggggaggaaacgctccagtgagttgtaaacagagcagtcttaggtgccctgtgatgggaacagataggctgaggcacggctggtgctgaaaaggcaaatgctgctgatgtaagcaagctcgacaagtattgctgtgccacggggatgagtctaatgctgttatttttagtgcattgctggtttctgttcaagtgtttcatggtccaggatagcatcagccaccgcagaaatgaagggaaagacaagtagggtcctgtggaattagcaggttgaagggacgctccctttttaaaatttgattggctatcttctactcccatgatctcttgtagctacaaggaagactgggaaatgtagttttgatgtaaaccccccccccccccccacacacacatacaattactaagtcatatgggatcttctgacacaaaggtctggatgcagagactcatgtcactggactagaggtgtgttgaacagtatcagaggaaagagaaggagagaggtggtggctggaaggttccatgaacaacagtggggacagcttaaagtcaccaatgtagtctttctttaaaatagtccagttgaagttttacttcaagatattctggttaaattgcattgactatcttcaaaagcagtagcttggtagaggtaaagatagagtgtgtgccaagatggataagagaaaagcaagaaagtatatcgttgaagatagtcgtgcctaaagttgttcttttaataataacttgatggtttgctttgtaagattcccagcagttccaggaacagagcctttgattttgagctaggtctcccgcctgggcttgtttgagtacctgtgccttgaactcagcaggaggcagtaaatactggcagagctggctgctcccacatctttccccttacagctcctagggtgttccaggtctcctctggaccctaggggctctagtccagggttcccctccacttacaggatctctttgaagtgtctcttggaaggctgtgcctgtcctctgggacaagacctataagtgattcaactaatgtcattagcttgaagacactcaggaagcagaacctttgtatatgctgtcttagaaagaaaggtcaaatcatgtgaacactgactccaagctgcctggcacagagccaggacgtaacccccccccccccacccccctggctcccccaacactgctggtgtaagtcccgggatgctggtgtaagtcccgggatgctgggtgagtcagctgtggatgatgtcatgtaaggcgatagatagtgtttgtgctgagctcggaagacctcaaggaacacggagtttgcaaagtaaaaattaactcttatttgcagaaaaaagtagcctcccttcatttaacaacgaacagttcacaaaggccgtacctgtcagacactgggtgatctagactgtcctaaggatggggggtggaagatgagctaaacagcacttcattacgtgggccgggcaggtagtgatgggtgcggtgaagaaagttagagggaggagatgcagtagaagggaacaggagggcggtgagttcaagaggctcttcagaggaactggctgggcgcgccttggacagcaagacaaagccctgcgaaggctctgaggtggtaatggttgcgaatgtccaaagagcagcaagaaggcttcaggaaatctatagaagcagaattggacatttaaagggacaggagcagagtattggcctttgagtggtgacggttactctggcgtgcttcaagatcgcagtctgtgggtgcaggtacgtgggcacatttgggtggagaggtagggtaggaatttgttagtgttcagtttgagatagggtttttttgttagaaacagggtctcactatgtaaccctagctagtctccgattcacagaaatccacctgcctcagcatcccgagtgctgagattaaaggtttgtattaccatgccgagcctcaatgtttttgtctgtctgtcttctgtctgtctgcctgtctcttttttgagctaccgttaaactatctaagtagagccttcaagttgaatgtttgctgtatgaacatgaagctcggtgaaagtcagggtccaggtgtaagttaggcaatgcagaggcaatggaataactaagaagtgcacagggaacggaaccaagagttcctggattacctctcagtcagaaagaagtccgatctctgttttagctctttgctttctgcaataaggatgcaaatcctaaatgtgtttggagtagctctgcatctcctatgtgatgagagaaagtgcactccaggacacatccgtttagcatcctatttagcaaagtcccctaccccaagacttcggtgagttctctgccatctggtccctggccagagaaggactttatttttttttttttttttttttttgggatgggcgtctccatagcaacgagtgtgcagttgatatggaaagtaagcagttgccttagcaacagagatactgatgtggtggctcccttgctttcctggtaagctgaccaaactagttcaaatgcattatgaagggctacacacacaggctggccctgctggtgtaaaactagcctagctttaagagagatcgcagcccttcccccttccagaggaagggcgctcagtggtaataaatcagacaaaaatagttgctgtcagttgaaatagattataagagggttttcctagaggagtggttttgtttggtttgacaaaatgctatagtcagagaatatttggttacaaggaaaagaaagccacctcggttggcttaagtaaaagaacatctatcttagggatgtaataagcagtccaataggccagagcccaggagcaacacagctcacctcaggtccgctgtgcctggaactggtcctgtccttctgagaccacgtggacactgagcactgctcttctctgggtatctggtctggcttcatggtttcttccacatggctctcaatgtctgccaactccccacccgtgtcttgctgtactggaatgtgtgtatctgtgtctgtgatgagagtgatctagacccagtgtccagtaagcaggcgcccaccctcatccttgtgtggcatgcttgtcatcgtcattccagatgagtcaggtgttcagccctgggcagaacagggacatggctgagaatttaggatcgctgttgggaaggctgtctctctggggctctatagagtgagccctaaccttaaaataccctcgtaatgaaatatttctgtttcccatcctcagaaaccattttattactgaaaataaaaacatcagaagccttgacatggtgacacacgtctggttgtcatccttaaattctagaggcaccagtttgggttacacagtaggacctcatttccaaagcaagcaagcaaacagtccaacactcacttttgaggagttagtgctgggctgttggaggtgatggatatcagcacactgggcaactttaggagtgtcgcaggaaccccttctgcttctttacaatgtagtgatggttagatctaacagtcagtctgacaggactgaggctcacctggaaacagagtcttagtgggagactctctggatcaggttttcccatgggcatgtgtaggaactctattgattatgcttacccactatgggtggcaccattccctaggcttagaattccttggctagataaaagggagagagctagctgagcactaagcattctctcagtgctcttgactggatgtgacaagatgcttcaagctcctgccacttgacttccctgggatggtgaactgtgacctggaattgtgaagtgacacctatcgttctcctaattgcttttgtcagtggagggtatcagagcatacggaaaggagtctgtgttgcatgcctgcgaagttttcacctttctctcactcccgtagacctgcagtggctgccccacaacaaccccagcgttctttggtgtctcctccttcctgccagctgtcctcaaatggcctatggtcacggggttgagcgaactcaaggcccctgatgtaggcaggaatgaatgccagctgtctaacacacattgtcctggttttccagatcgagggattgagcaatccaccaccgtgtaccagccatgtcaccgtactgtctttcaaaatggggagaaatgtgatagattattccatcccagggactagtgatacaaaaacttcacagaactccggtagtcaagactgggtgagaattaaaacagaccaggaaggcactgggtgattgccaaggggttggccagtggccagagttacatgggttgaagctttggcggcgcaaatggcccatcctggatagcagtgccactggaggggcctgaggagaagaaaggattgcattagcagctgtcagaaggagggcgctgcaggccaccagcgatggctgtgacgcagaggtggaaatgacactgagtgtgaaaattgggatcagaactttccacaggggtctgctggggctctgtggaatggtgagaaccatttgtattcagggtcttacggcttcacaacaactgtaaattagatagcacaggctttttacacggtggaattagaggctcagagagcatcggagacttgctgagagtctgggctaccttctgagactttcttcagtatggaggcagatggttcctgtggctgggagagacaagggggtttgggaaaggggccaaggtataccgcaccttcttgcatgctgtgctgaggggctaggactctgtcctgaaagcagttgggctggggacctggctcaaagcttgtagtgtcctgaaggcggtagggagccagtagttgttctcctgagtgcagtctccatgtgccttagctttcctgtgtctactataggaagaatttttgttgcctagaaatnnnnnnnnnnnnnnnnnnnnaccacagcaggctggaccccttacatcaactggcaatcaagaaaatgccctagaggcttgctaatgggtgcattctctcagttgtcatactctcttctcagataatgaatgaagactcactactgtcccttaagagttaatccaaaggcgggcaggagagatggctcccaagaacaagtactgttcctgcagagagtgtagttagatgtatcctcccccacctcccttcctatctggacccgcccccttttatctctcagtagaaaacacatagacctccaagggataataataaaatataatgtaataagataaaacaagaacaaacacattggaattggacaaagcaagtgaacagaaggaagagggcccaagagaaggcacaagaaacacagacccactcattcacacattgaggagtctcacaagaacaccaatctggaaaccataatatatagagcaggcttttcacacagaggaattagagcctcacctcctcttctacagggttccctgagcttgggaggggatttgatggagatatcatgttttgggctgagcgtatggaccagatttctatttaaacaaggaaaggtcttcagatgctgggttcttattttaaatgctttcttcttatatttacttaatggttcttgttttgattgatggtggatttgtcctgttggtttgaatcctgctgaccattctgttatttcatgacttatggagcaatggaatgaaccccctctcagctccatcctcagggtttggtggttggaggttcaggggtataggactacaggggtagtgaccctcttgttctttgggattcaaccacagatactgaggtcttaattgatgcagggtttgtgctgagggcattggaggacacaaagtatgtaagctgggttctggtgggatgctttgggtggctctggacactcctgtcttcagccccacacctggtgactcagtgagctcctttgcttctgcccctgagtgactctccatctcctccttcctagcacactatccttcatctcttgcttttgagttacctacctactctttcctgtctcccctggtactcatcacagagccaccaggccaggtcagcacacagccctttttgctctctattgcctggagtgatgtgtcctgcagtatgtctcagatcgccggctcttagaataacagatttcatgaacttaataagaacctctgagctgttgtatgggagttgggcatattctctctctctctctctccctctccctctctctctctctctctctgtgtgtgtgtgtctctctctctctctctctctgtgtgtgtgtgtgtgtgtgtgtgtgtgtagaagccagaggttgtcatcactgtcctttttaatcgctgtccttgtgttttgagacaaggcctttgactgaacctagagcttgctgattcgtcctgacccgagagcaccagggatccccttgactctgcctccccagtgaaggagagtcaccacatcttgttttaacacttgggtcctcatgcttgtgtatgaagcagctgcccagcccaggatatctgcttttaaagcttctcacatggttatgcagaactgtgtagagcaaggggaacttcagggttctgagtcctgtctttctattttaattaggtaagattttaacgatgcccagtgagctgtactgtacagtgtaactcaagtaatggattactgtaacctatagcgtttcattctcaattatgtgagataacttttatcaaatctgatacatccctttctattgcaagaggactaaaaggcacacgtagccacaaaaccacgtagttataacgccagactcccattcctgtctatcatacacgactttagtgttataatacacctggctgtccagcaggtcacccactcagggcttagtcacgtgatctcactgttgcttcttccagggcccctcccttctttaaggactctgtttaactaggaagggcatggccttgtgcttgttttcctttgtatgtcttttcacggaattgtttttataagtgatttatcacttctgctctgacctctgagacactcaggcctgggtgcttctttgtttcattaattacacagaatgtcctgaaacattagtctttgcctgtgagttggcacttaactactggtgagatgcacacaggtccttcctgtgacatgggacctgtttgttccttctggtattaggtagaaagttctaaccttccttagaaggaatggcaactgtgacccatggaggtgtggggtgttgttgttgttgtttgtttgtttttaaattttacctaagtatctgttttgaagtctacgttcattagttttggtttctggcttatttttgaggatttccttcatccgtagagataaatttgataaggttcctacccagaaacaggatttataagtaagaaagtactggcctcattcctgagtggtgccctaaacttcttagaactcattcatttagccagtgtggacttaaggcattagcataggctgtgtcaggcatggggaaggaagatgaagagcatagaccctgtcttggggaaagtccagcctagtaggagcagtgaactcccaatgtagtggttgtgtaagattgcatatacttttctccttgggtccttctgtgagagggtgcaggagtgactgtggcttcttggtttttatgcagactgatgatggtaagagagtaggtgactcacagtgcactggcccaggtgtcaggagagctgggttctagagctgtgttcttgggcaagttctgtacctctgcccccacagacagctccatgcttctcacgcttccttagtgttaacttagtaacagtgaggagagtgggtccatacccaggcttccagactacctgccacggagacctctcatcctccctgtgtgcgcctagacagacacagggggtgagtcctggacttctgtcaatgtcagaccgttgtcacacagactcttgggaatcagcgtttggagccaagtcctttctttgcagtgttaactctgctgaagaccccctccctacagcagcaaagtggcagggctgcgtgtgtccttctaaggcctttcccgcaaacgcatcctggaggctacacaactgaggagtcgatagctttgattcgtcaagatcctgtgtgtcctgggggcctctcccattgcctgtgtaattcagtcagcaagtgggagccaggttttctgaacatgaagtcttaggggacccctggcttagataaggacagtgacatcaagtgtcttcctcttaacctaccggagttctaagtccagctgtcaccatgcaggcccatagaacacacacatctggccagatgtagtctggtacatggaccaagggttttggtttttgtcctttctgccccctctgctttctctctctctctccatttcctaatgatgtctcctttatcacaggtctaagaaaacactaggtgaagctgggcctctgtatgttcctggtctgcataggtctgacccctgaactgtcttttttccttgtggttgttggtagctgtcactctgtcctctctggctctggggacaaacttgtggcctctgcagctgtgattgcttgccaaaaggctctttattgtgttagctgccctggattgtgaaggaatcctgctcaatcttctccttgctgtgagaagtgtttggctgatgtgccttgtgctagttcttagccctgtatgaggggtagaggtttgttgggacagctccacaaattccccagccccagcagatcatgggcatgcttgccttcagccctggacggccaagctggattgcaaatcacccattcagacaggagcttagtcacatgatctcactgttggatctcccagggtgccttggatttattttcccgagtgggacttaaaggctgagttgagtccttcagcaagatgtatatattgccttccactctctggttggtttctgtgagtatggccttctttgggaataggtctttgaagatataatcaagcttagagtggattgggatggtccctatctactgtaggggagagacccccagacacacagggagaatgccaggtaaggttagcggcaagctcctagagctatcagaaaatacacttctccatggccttaatacccagccttggctgtattttgtgactgtggccctaggaagcagatgcagtggtaaaagaaggagcaagaagagtagggtgcctgcctgtgccaagactggcagcacaacccctccccccctttgcaggaaaggtccttgaacttgaggcaggtgaggctaactgtgtgctccatagtatcgatgaggctgaggctaagagaggtgtttgtagccacacagtggggctgttggtaggtaggtttgggtccgaaccctggtgtgtctcctgagcttagaaccttacctggcttctgctgagtctatccaagggagttcattaggaacctggatgtgtttgcactgaggcggaagaaaccagagaacgaggggcagaggcttcccggtgtttccctcgcgggtccacaggcactgacgctgagtggggaggtgcagggtgcatggagtctggctgggacccttgcttacttgccaggcaccccaaactgctctgcccttccttcatcactcctccttccccttcctcctcctcttctttcttccccccaaatgaaatcatttttagaaaactgcctccccccccccccccgcccccccatgggggatgatagtagggggtgtggcttggctttttggtttgcagattttaaaaggagttatcctatttaaaaaaaaaaaacagaaattatcctgcaaagtacactgaatacttgggaaaggagcacggactcagtcctccctggctttgacctctgtagacctctagtgctgagcgcccatcttgcagggtcacctgtcccctgacctgcctctgctgtcctgtccagggtcagagcactggacctggagggtaggccttgcctcctggatactggaggtgttagcactcccgggcacactttaaagaggtaaattccgtacaggtgccttatgtggagtcagggtagccctggtttgggaagcatctttttccacactggtcctttgggtggggacataaagtcacgtgccccagcttgcacagccgtgaaagccggagtcagtcggactcctggtacggaatggagggcctggctggagtcctctggagtttcgaatgtattgactactttgttcttgatgatacaatatctgcatgacctcagttttctgagcttctgaaggcacttttgttgagtttagtaagagcttgttatttctgagaaacgcttgtggtctggaccccaggctgcctttggagcatggcgctgactcctgtcttcagacagaaggtccgggcagggctggcactgggaagctaggtagtttcctaggttcagggtgacctgttaggtctcaaaccagggacaaagagctaactgaggtgcctgccagctacttactcccaacatccctcagtccctgcctgctccccggtcctctgggcccatagataactcagccattttggttacaccagtctcatcccgggcctctcctcgatcggaggctcctctcttgctctcctccccgtctctgctcacatggccctgcacttggactcttccagatgcctctggctgttttctccctcagtctataataataacaccacacctggaagcaggcaggttccccttctccacgcatgacccctttctcttaagttttttactcagtggtggagatgaccaaagagactgaacttaatacagttccctaccaccctccctggaatgtggcaggctgtacccattccaggcacccattatgtgtaccttaggggcgggagagaactttgaggaagctgtggctccttcagctcacctattccgaggctttctgaagttgtaagtacagggactgttgagcagagctgggctcccaacgtctggactagcctgtgtgagggcctccttccccatcgggctggctcccgcccttgtcctcggggacttcagaagtgctgggagcacaggtggtttctggggattcggtggtaggaactgattcaattactgaggcacttctttggaccatttttattttctttaatacctggtattttactttgctaggcttccccccactccccgaataaaggcacattcaataataagaattctttaccatctaatacaaaatgatactgcttgtcagcttgaagaaaaagcaaattgtctgcttagtgttttgggatttcctcttctttttttccccccctcccttataaagggggaaaaaaagcagattagagaaaatccttgaacatagtctcctgattgaaaaatatatcgctgggtttccttgaacatagtctcctgaatgaaaactgtatcgctgggtttcgccgctccatcattttcttaaagcagcagttgtcctcatttagaacacatttctgtcttctatcccagctttgagaaagctttacagacgctttaccagtgtgtgtttgtgtgattgtttgtttgtttcaaaattggggaaaaaaaacaagcaaaaatctcacaaatgatcttgagacaggcagacattggagatagagacacaagtccttggtgactgagtgtccttaagcaagatccttgttttgagtttggatctgtggtatgggattaatgaggcctctcacgtggttgtttaaagaatgacgcggtggcacagcccttcactacagtgggcacggtgagcaccatgctggtggctgtgttctttgtgttggtgctgtggaccaaattatgttcttccaaaaaagtttacggagagacctgacctctaccgtgtgtttgaggtggggcttttagaggtgaggtcagatgaggcgacaagaatggccgtgatcacggggctggagagatggctcagaggttaagagcactgactgctctttcagaggtcctgagttcaattcccagcaaccacacggtggcttacaaccatctgtaatgggttctgataccctctccccgtgtgactgaagacagctacagtgtactcacataaataaaataaatctcaaataaaaaaaaaaaaagaatggttgtgatcagactggatgggtggctttgtgagcggcgagagagataagattggttttcttataaaacagagggagagagagacttcttctcacctgtgtggtcctgtgcacgacacccgataaaggtcgagtggagactgaaggatggcagtcttggcgccagggagagaggtcttatccacaggtggacctgctagttggacttgagcttccagagctgggaggaatgtctgctgtgtgatccgcctactcagtctgtggcattgtgtacggcagcctgagcgagcaggaagatggagcccgctcacctttgccctaattagaggctgcttccttcagcaggtctgctgcattccaccagggagcaggtgactctccatgcctcagggatgccgtagggataccttctctttctctccggtggcctcagtgagcgtgactttgacaggaaataactaagacataattctggggttggctataccccactctccttaccccccaactccaccccaaacactctgcattggagatctgaatgtttgggtcccttacttagtagttcctgatgctttggggtgcccagggcatctgcgtgtgacctatacccaatgggcttgctgagtctggaaggatccagggttcagggttcgatgttcagacctttgtgtgtgtacaccctggtctttctccatggtgagctgcttagtctaagttatttttgaggtgtgtttctttttttctctcaggtacaagctgcgtttcagaaccaaagagagtattggtttctttttggcctcagtctttgttagtcagagagaaatttcacacacatacaccattaatacattgggcctttaaaaaagatcagccatgaggtgtctaacttaagttccaggtgataagattatagcttttgaccaataatcctgcatatacacattggcaatatccctagtagcatgcttatagcacacatacgtgcatgaacgcctgagtgtgtgtatgcggtgtgggtgtctctgtgtgtatgcggtgtgggtgtctctgtgtgtatgagtgtgtctgtgtgtgtgtgtgtgtgtctgtgcgttttctaccttcctccttgtttgtgaaggtccctgttgtctgtctgttgggctgtgtcagcgagtgtagctgcctctctggtgttcatgggttctcctgcccctgcctcccttggcccttcactgtgattacagatggtcatactacactacacagctgacttttacatgaggtttttggttttgttttttttgtttttgttttttcgagacagggtttttctgtatagccctgactgtcctggaactcattctgtagaccaagctggcctcaaactcagaaatccacctgcctctgcctcccgagtgctgggattaaaggcatgtgccaccacgcctggcgggagtttttgaacttgggtcctcatacatgcacagtaagtgctctaaccccttgggccatctccccagccatctacttccttttaataaggaatcccataagtcataaggtctattgcaagtaggacattgaaaatagacagaccccgtagagacgaggaaaggtcatcttgcagagggccaccaggaactagggattacacagaaagacggtccctagagccttcaggagcatgcctctgacagcctcctgattgcaggtttttagcctatgagaaagcagatgtctgcttttaggcccctgagttaacactcatctgttagcaaagtctgcagaatccagacaccgacactcatgtttttacttaaaacgcagccttccctttactcgctgaggctcactgcaccccaccttatcaagagaagcccagcgtgtctgatgatgaagccactgtgccgctcatcgtggaaggaacacggcatttccctgttagtcaaaatttagacattgataaaaaaaaaaaaaccctgcttttccaattaataggtgaaagcatatgaatcacttggtgtgtttgtgagacgttgtgagacatatgtttagccctgaccccctgagctctcactgaaatcatcaggacgctggcctctgcagtgtcatccacagatggtagggactccagccaaaacaccgaggacggaaggagagaggctcagcccgataccctgaactactccagtgctctcagcagtaggctgtcgaggggacattggatggtcactgtcaggccacccacccccacttctcctgtgctagacccagcaggccccttcctttcccatggcagactctctttagagaccataccttagatgatcttgttcaaggtgacctctaagattttgctcatctcttctcggcagccaatcctaccatctttgtcaggcatttttcacgttatttagtggcctcagctttccacaaagtgagtgcttattgtcccactttatccacaaagagactgacaggtaatctgtcacgtggcaaccaaacccaactccttcgaaagctcagtatgccaccagtccaactctgggggagcagttgtgtcagggcaggggctggatctgagaacgcagatggacgtacaatgcctcttagagaaataacccgtgggagaggacagggatactcttgcaacagaatggggaaggcggagggcaccttactgggaatggcttgattgacatccaggcctaccaagttagagtattttctgaaagagctttggagagtctagatgatgaccaggaggggaaggaggcagggtgacggttagaccatccagaagcctatgacggcttagagtccagctatggccagagatcccaggaggagcaacgtggattgattgtattagcagcagagggaggggcaggtggtttccagctgccattatagaggttggtgtcccaggtgctgttggtggggcaggcagacagggaagaggaacaatgtgggaccaaaccctctggtgagggtgtgagcacaccatgggggcgggcagagcaggaggagagtgagtttgtttgtgtggctggttccagggaaaggtgtgtgtgtgtgtgtgtgacctggtggtggcagatcagagcacaaaggggtcatctgaagaggatgctggagagtgggaggtgtgtgaggctgagacacacaaggttgggaataaccgaggatcatgtgaaagactgggtagggctggtttgactttcatttaagcacacattttccagaccgaagatgccaggatgcctggacttagctgcacgtgtcacatggttggggtgtggtgcagtggtagagtgtgttggggagatctatctggtcacgtgctagatgttggaagggcttcaggaaactaagagcaaatgtgttctccacatggctgtaggccttcagcatcagataaaaagagtggtgactatggtaggcagcaggggttccgatacctctgtggggggtctcgcaggaagggaactttctcctgtggccactagtttgactccagtctgagcatctggaggaaattgggtgacactgaaaggtccacggtcctggagctgatgctactgtaggctccctgtggaagggtggatgttcaacatgcagcctcggagagcaggtgaccaccctgcctttcacaggagaggacaagtgaggtgtgtagattgagtcaccttagcattgggcacaacactggacagttctgtcaccacatagctgtctgaggttcctcaggaaagttgacagcctcccagctccaaagtgtgtaaggatttgaggctgttaatcagttttccagttttccaccattatatcaaatctctaaggaaagctgcacttggattcgcagttttgggagtgttagtccatgattgactgcacccattgctcagggtctgccctgacatagcacaccacacacagcagaaatgttgttctgagcaaggcttcacttgcctgtgaagtgatgttgagagaaaaaaggagtgtcagtgccccacttaagggcatgaccccggtcacctgacctcttcccaggcaacacctgttaaggctgttcccatttcccagtgacactgtccttcagtactcaggtcttcgagggacatttaagacacaagaacaagcctttggtattcttggaaaaataggactcaccaagaggtattggctacaagcaaaaagccttgggatatgaggggcgtggggaaagtaccagtctgcagcagaagtcagcttgtcatctctgcagagctgagtgagtgtgtggtgggttatgccctcgcccatgccctggagcagccattcctggtggggtgggggtgggggtnnnnnnnnnnnnnnnnnnnnnnnnnnnnnnnnnnnnnnnnnnnnnnnnnnnnnnnnnnnnnnnnnnnnnnnnnnnnnnnnnnnnnnnnnnnnnnnnnnnnnnnnnnnncctccagcacttgccttctaagaggctagaactgacctttcatctcagaatataggcctggttccagtggtgggagaagagccaagacctcgctcctgcgcccttctcaccagtttattttcattttctctccctccaaaaaggtagagacctcatggtatgaaaaagatatgggctccctctcacagcgataagcacaagaatgcttcttttatttcaaggagaaacaacttgagtctgagatgtcccggtgcagtggggggaatccgatgatgtctgatcactcagcagcagacagattggtgtgttttaagtgtcagtcccaggattcctcccaggctgctagggatgtccccagacatgtctggctctcagaagagccctgtgggtacacaagagggagtctgtaattgcagaatttggggtactcctcagctaaagtagcagacgtctggcatcctccagactgctggagtagctgtctgcagctcccacccacaacgcccagcatacttgtagcatcctgagactcaggcttctcctcagtggatggataatgtcacgagagagctgagactgtccctccatttgtgtgaggggccagttttctgctttgacctggaactcttccctattgttggggaatgaataatcttggtgctaaacaaaggaacacagaaacaaagagaaagtaattcagcagagtgatttctttttgcaaaagggtgtggctagaacccaaactggtttagcagacacactccctaaaatgacctatgttccttctaccccaatggtgactgcatcttatctccttggtgagagctcgacttcatggtccagtgcgattggctaatttgcacaaaaggaagtgaggtggtttcaggaaatccagggcgctaggaaaacagtgtcttgcactattgtgccagtgggttagggtgaccatgggaaagcaccacagtgtatgtgactttttgtgtgtacacatctgtttctgtgtgtgtacaaacacgtaaaggccagaggtcaacctctggtctcttttccttgggagccatccaccttgttctttttgaaacaaggtgtctcatggcctggggttttccaagcaggctggtctggataggcagaaggcccagtgcagggattgtatgagtgtgttcatgtctctccaccactgggtcccgggaatggaacttaggtctctttcttgtatggtgagtactttgtcatctgagctgtctccatctccaccacccccttttattatgacaaaccttcagataacctagaagttgggagagcagctcttcatccttaagagttcagcgtggctctcaggaacgcgttgctctctgtaaccacagcactttatcctctcaaggaaacttaaagtaactcctcacagcctctcatccacaccacattcaggtttctgtacgcatctaacaaagtcttcagggactttctgctgttttgtggctgtcatgttcccctctcccacccccaaggccaaatgcaagtatttcttatgtttcaagtgttttcttatgacactgttgaacttgcccctctgtcctctggaagtcaagtctaaatgaccccaggtcccatccgtttcattaagcaattggcagttaatgccaagtgatacctaacccatcagatctctctgggctgttcccagttagagaagctgagcttgctctaggcagcttcccactggatggggacctgatttggaacctcataggcacccattgacagcttctgccggattcatttccatgggagttacaagacatgactgataatcctaccactagctgatagttcttaatggggaactgtaaggaccaatttttacagaaaaagtttagtacaataattgctcctgatggtgggaaataaatccctctatgtgattttcactatggactcatggagttttctccaggcagtgttttataatcaattgcaaccattattttgatgctcaaattattgcagattcagcccatgagaccctttcaggctgcattttatgccctttgaacatgtcccttctagtcggtaactacctcctcgtggcttaagcttctctttcgttttctatttctaagccttgatttaaaggaaaaacaaaaaacaaaaaacaacaaattaaaccccccaaaacccatttcatgcagctaaagctagccttaacttctgattctgggattataggtgtgtaccactatgccaggcttcatgactttacatacgtgctcttatccaccaagccaactctagcccctaaaatttaataataataataataataataataataataataataaatttgctcttttattttttaataaatcaactttgttggggcataatttacatacacataattaaattatactcaggggagatgttttgacttgggctggagagatggcttagtaggtataggggctgccaccaaagcctgataaagactttaacacccctcctccccaaaatgtatttaaacataaaagaacagcaaggctgatatgtgcacccacataccttccccactgagccctctcctccgcccagcatattgtttctgggaatggtgagcgggctgtggggacttagactttagtactgtgattcttgaggactggtttcctgacatactgtgatatgcttacctggtcacctcctggcaggttctgggagtttttaaggaattatgaataatgcttcttggaacattcttgagcatgtctctttgaagacctatggctttattcactggaggaaagccttaggttagcaatctgttaggtggcccatgtactaagcagagtgtaactgtctgtgaaattgccagactggttttcaagcagtgtatagtactccttcattgcttcctgttctggccagtgcttacattgtcggaaagtactcatagtgtcttattctaattcgggttgtatatctttgattgttgtctgtagtttgaatggtcaagcatttgtgtgttgaagtcaaaacattcatgtggtgaaataccaaagtttgatttccctcagttctgctccgatgtaagtcatttaaatgatcaaaggctcctttacacacctgctgtgtgctagacacgggcacacctgttctgagtaaaagagaaatgggggttgctagggagatggttcggtggataagagatgcagtcacaaagtcctatattcaagttcccagtacccatcttaagaactggtgaatcctggagccctgtccctcatcaactgcagcacttgggagagcgggccctacaccctgcctggacagtagaggttgcaggtacactgcccctgagggcgggagagctggtggactgaccagcttagataccattcaggcccagatccagggctttgaattggccctcctcaacatctaccccattgatgaactgctgtagaggccagtcctatagatctgaagctacaggatctgcataatacaaggcaacaacaggaggagtcccagtgaggtcccagtattgatagagtagcagaagccagaggcctcataccagatcaatgaatcattacaaagaaggcaaaagagtagacggtgggacactccagttgctacgaggagattctttgctttgttggaggggaggatgcaagggtggagggtgggaatgaggggtggggagatgagtgggattggggggcatgatgtgaagttcacaacaaactaataaaaagttaaacaacagttggtgggcgcaggtggccataccagttgcagtggttcccatatgccttgagtacacttggctcagtcacagtgctaggggatcagtgaggctcccagtggtcaaatgggtcacggaggaggcttgttaatatctatctaaagatcttctttcattcctggtgatgtagctcagttggtagagtgcttgcccagtatatgtgaagcccagagttcatgtatttttcttggtcaagtaagcctgtaacctcagggctgcaaggggaggggaccgaagaatggcttggccaccagcatagctccagtttccggaataacatcagcaagtgatagaatgggacacccggcatccttctctgacccccatgaaagcatgggctctcaaacctacacacacacacacacacacacacacacacacacacacacagacaactggggaaaatgaaaacagttgtcatgaggcttatagatgagctaagaacagtagttaatcagccacacatgctgtgtgtgcccacagggaggccttaagaggctgaggctgccctgtatagatttcatcctgctttcccaggaaagacattctacctacatgctccttcactccatactggttgcaaaatacttaagtgtgaaaggctgtaacttgagggcttgtaccgacaggcttcacccctgggaagttaacaccacccactgtgggaacccagggttcccaggaagccagatgagcctgcacttgatcgtttggctttaggtaaaattccagagcctcgctcttcccaagccctgaccctcagagtctaaaaagtaagctaggggtgaaacattgcctctataatcccagcactggggacgctgaggcaggaggattgttgagagtgatgaaagaatatctggcagggctagagtgagtactcagtagtagagtgctagcttggtatgcgtgaggtcataggcaccatcttttctaccgcaaaagagaccataaacatatgctaagtctgttggtcctgtgtccattcccctcctgtcctccttttatgccccttagggggatcgtgctcctccggccccattaggcagctcatggtacttgtcctgagctccgtaccctgctccacaaccgaacacctgtggtcttcaggtttaggtggctgggtgttctaatgagagtaggtgaactcagacccggtgactacaattagctctgttatgtcttgggtaagatgtcctgtcagtggttgccgtaggatcacaggctctgagctgttgttcactctgcagttggctccaaatgcaatttttacatgcattctgagcacctcagagccatagtagcgatggatgacacccttagaaaggaatcctgccgagtatttttagcaacaacatacttctctaattctgtaatcgagttccatgctccacagcttacttcaccgatggctctgcacttccaaggtacgccatggagtgaataattacagaggtatggatgacctatttttccccctgtctgtgacttacatcgcataggaattactatgcacctattgtggtgtgtagattctaagggtaaaattctagggtaatcaattctggttttagcttgtcagtcagagtcctggcaggagactgatgcctccctgaagtggagtcactgaggagaatatgataaaggcctagttctcagctgagggtgagcatatgggaagcagcttgggatggtgggctcaggagacagggaagggggaaacaggatgtgcaagggcatgttcttatcctctggggctgaaggggttaaaaaaaccaaaccagctgagcttctcagtggtcagaagggaccagaaccctgagaagtagatgcagctaacccatgagcccaagaggacccgtctgggataaagccctgccgcctgcctccgcccttccccttccccacggttctctggtgtttccctttagaggagccagagatgaagatagtgaggaagggatcccgtggatagattgtcctaatgtcaccttggtgtgggaagggagccggttgctctgctgggcagtttgaataagtccagcacatatgcattgtgagtgagtgtgtgtgtgttgcacgctccttgagtacctggctcacaagtgctagtgggattagtgaggctcccagtggtcaagtaggtcatggaggaggcctgttaatatttaaagatctttctttcatccctggtaaggtagcttagttgatagagagcctgcctagtggacatgaagccctgggtttaattcctagcgctctatggtctaaaccagatctgacagcacatgcctatagttatggaggctttaggagttcatcatccacgtagattgaagtcaatctcagctctatgacaaccccaaccccagcccccataaaagagtctcagtcaaaacctcaggcttttgaggtaagtttccatgcttagaggagggtacaaaaacaaaagcgacagactctttcccaaggtatcattcctatcctcactgttgtatgtgtcccccacccccaccgcaggccatggagtcctttcctgaaagctgagagtggcacttattgttctctctctctctctctctacctccctaccttacttattcctttaaacagggtcttcactgaacctgaaactggatcagtggccagcaagccccagtgattctcctgtctgtaccccatatcccagagttggggttacaggcccttggcatatggcagtgacacctagctattttttttgttttttcgagacctagctttttaaggtgtgtgctggggttcacatttgcattctctctgttaaaccacatccctagcacagagaccagagatagacttttggccttcctcacttcagggcttcctcggttcttctctgtcttgtttgctgagacaggagctcattgagtctggagattctgctcagctggcagggacctttcccgtccccgcttccccagccagggagtgtgtttgtatgtggtgctctcaaagtcaacactttagactgagttacctccctaccatgggggttcatccagttgatgtaagtctctggttttgttgggcttttttccgtgtgtgtgtgtgtgtgtgtgtgtgtgtgtgtgtgtgtgtgtgtgttttgtttctgaggcagggtctcatgtagcccagtctagcctcaaatttgataagtagctaagaatgtctttgaactcttggtctagctttggcctccctagtgctggtattacggatgtgtgccactatccttggttagtctagataattctcaaagaatcacattggctatggctttctcttttctctcctcatttctatgcacactgtcttaattttttttagatttatttattattatacgtaagtacactatcttaaaatgcaccagaagagggtgtcagatctcattacagatggttgtgagccaccatgtggttgctgggatttgaactcaggaccttcagaagagcagtcagtgctcttacccgctgagccatctcgctaactcagtagcacacattttaagagatactttcttgccaagagaatacagaaaacttgccaagcgtcagcgcagatgtatacaagttgtccccactttccgtgatgcagttcatcttggtgtagccccttatgcagacagatgtgagaaccttgggagccacattctcacagctgtaaatacttgcggcaaggctgggtttgtcatatagctcacctgggggatgcagctttgaactcagcctctgcctctgcctcttgttcttcatgatctggatccttccttccagggtttggtttttatggctatcagtgcttttaaacaaccctctcagatggtgttctaggatcatttaggtctgtgatcactcttcaaaactggccataccagtggagaggtgatgtgtttgcagacggtcacatgccatagtgagaactgcagtggcattgggtttggtttttgaagaaattgtctctgtgtgtgtgtgtgtgtgtgtgtgtgtgtgtgtatgtatgtatgtacacacctcatatcagaacgagattgtggaactgtccattgcttacaacgtgatttaaaatgtggtgtgcagtgcgtatggaggcagctgcccgaccgtggtatttgtcacagtgtgttttgggggtgagggtgcagcgacaggtttgatgtggctttcattggtcccgcgtgagtctgttagctcctctgagtcctaatttctttctcctgacactccccaccagccagactgggagagttatggagtaacaggtgtcaggtggttgagagcgccctgggcacacggttaatgtgagtggcatcactgctgctgtccctctgaagctcctgtgccaccctcattgaaagagcgtgcgtctgggtcgtaagcagggcagaatcttactccaggtgactgggccctatacagaatacattaaatatcccttgtgtaaaattaccacaaaccatctgaaacctttctccccaacagccttccattggtctttgggacaccctgagtgattgacagctgtcattcaaagggatgagcccacaggacttaggttctttgtgtatcaggttgctatgaattctcgggcgagctcagaaagactgacggacagctgtgttgtccaaggtgcccctctggccgtgttagggtcttacagactgtgctgtgtgctttagccttggtgagtctccatgtgcctggcaccaaaactcagcaaatactgatgatccagcaagactcacagaagcagcatccgtgagaaggagggcatgtgacagttattaatattatcaacctcctccgatctaagatcacctaagaaggcctgcctcctcgaatacctgtggaggagtatttagatgaggttggcccctggttgagtttgtgagcgattattatcttgattagattaacgaagtgagaaaacccatcctaaaggagcagggccctgggaagaagcaaagctgaacacgaatacctctctctgctgccttggctgtgggcgtggcgtgacggggcttagagctactgtgccctgacttctgtggctgtcatggagggcacccttaaactgtgagccgagcacaccctctctcctccaagttgcttctttcagtgtattttatcacacacacaggaaaagtgaccaatagtgtgggggggggggtaggagggtgttcgtgggacggtttgccttttaaattcccccaaacaggcctctaggagatgacaaatgccccagagaggggaggctttggaggcagctggctatgtgccaccttccataagtcactgtgtttagaagctcaggcctccacgcttggcaccgcatagcgggctgttctagggccaggtgagccgccttaccatcagtatgggactgtgagattcctccatcccctgcctccatctctctttctctgctgttcttcatgtgccggccatagataaggctcctgttcccccttgaagtttggggctggcactttgcctccctgatacccactttggcagctcactctttttcttggctttgtccattttaaccaaaaacttagtagaatttaaaggccctgcaacactttcccgtcatttggcccttcagctgtccgctacttgggtcctaggtggtttcaggtctgtctgtagcgtgctgccacacaggtgaggtccatctgcaaacgctgttgaaggctgtttgttcttcactgttcgaatacctgggctggaacttaaagtcactgggatggcaggttctccttaaagcgggatcagtacatgccgagcgaggctgtgaactgcatccagagctcaagtattcccgggaaggccttggtctttgccaggaagggtgtgtctgtggttaccaaggggctgtggccactccctgcaaactagcatacagccccatgactttgtttaactcagaactcaagtcctgtgatttttgactttacttttagcaagtgcccctaatgccacttcccttgctgtgcccacctgtcattaccacttagagcctggcttgccccgtcctgcaacttgaagttttagaaataaggtgatcaagttatatgtgccaattagataagatcacactgggacatttaaaaataaatgagtaactaggggtaaccaaaagataaagtggccctgggagggctggttgtaatccatccaggggtgtctgtgttatccaggggtgtctgtgtatgtcagactcgagccggccgtaattgccctcataaaatattattgccgtttctgagtcacccgaaagctggcagaagtacaggaaagagtttagagtcagccagagccccgctccgcttcatacagcttctttattacgttctttcctgggtctttatcgtccaaaattaaccaagatttttctgagtaaatgctgtgagtgctggattttactcttgacatctcttagctttacatcagttccctgtttagacaacaaaaaggcaggaaaagggcaatcatgtacaggacttaaattttgttttgagttttattattattattattgtgtgtatgtgtgcgcacacgtgtcacagcatgtgtgagaacaactcttgaaggttcattctctctccttgatgtgtgtcttccgggctttacacaccagccaacagtttgggaatcaggcacttgactcactgagacttctaactgcctcaaacacaggtctttattcttctgcttgcctttgtaatttgcttgcaagtttgaggccagcaagactacatagcaagactatcttttccttaaaaacaggactgtttaatactaataggtcttattacaaaaagggggatgcatgcacatcccatagtagttacacttttattgcatttgcatgtttattgtgggtgtgtgtatatatgcatgtgtgtgtctatgtgcatgtgtgtgatggtcagaggacagacaataagagggagtcagtcagttctctcctatcctgtgagacccaggagatgaactcagtttatcaggtgtggtagtacacttggaaccatcttgccaatctttattattatttttgttttacagttaattattgttattggtgtgtctatgtgtgcagatgcggatgtgggctcataggtctgatgttaccctggcactgatgttcgagactggtagagaaatggcaggatgggatgggtccttgccctttccgtgtgtttctctctttttttttttttttaaagatttatttattaattatatgtaagtacactgtagctgtcttcagacactccagaagagggagtcagatctcgttacggatggttgtgagccaccatgtggttgctgggatttgaactccggacctttggaagaacagtcgggtgctcttacccactgagccatctcaccagccccccccccccccccgtgtttctcctagagattaatttgattttaatcaaattttggaattactttggttttacttttaagtgtgttaatgcaaggaaattattgatcctttctgcatagattaacacacacacagctccactataaatgaagagtttgcagtcatcatgtgtgtaaaagaaatcctaccctacttgtccctcctagccacgtccctgcagtgaacacgtatcataagtgtctcttacagagtgaggggccattggagccaccacagagctcatgggtttacatatagcataggtgacaccttaggtgatttccatcctagtcatagtgtagctattggcaggaatagcaatttttctctctttgctaactagaggacccattgtctctgagtttggaatatcctgcactggggctatctggaaccaggtatccaccttcccttgctgaggggctagtctccctgctccctacagccacatcctggctctctggacagtgtgttgagtgagaagttgttgtttttctcctttatcccttctgctttggggtaaaaacaaatctctccaaactattggagaaacaaattagacagatgcttaacgaatctctccccctccccccccccccgttctctctctctcagctaatttctaagatagttttcccaatggtttcgaaatgtaaaggtttcccccagtgtctgcagccaataaaattgtggaaaggcccacagtgctcctgggtgtctgtcctgtgcttagtgttttatcttgctgtccctcatgtttctcgaggcccacgtctggacagtatggtggtttgctagagtgacctttctctgttctttccccaccctcttccccggtattgtgtaacttctactgttaccagagaagttaaagggactcattgcctctggtgagctgggtgtggtgcccggtgcactgtatttgcctttgcagcacgttttggaccaggaagacttatctctgacatgcagatgaagaaatgtaacgaagaacacaagtagtgacgctcagcctccactccaagtagcacagcatcttagcaacatgggcaggaaccacgcgggcatatttctgtgctgttgggagcctcctttctagaatgttctctagagaagctctggcatcactcttaacctcaggagctacactctgtgccatagagagcgtcagtaccctggtggcaggggctgtgggtagccagcagtgccctggcagtgtgagccgggtgtgtgtgtgcacatgtgtgtgcacatgctctttgcagttcctggcggtgtgagctggttgtgtgcacatgctctgtgcagttttgaggctttgctccctcaggcctcatcgtttcccagcctgatggtcctgtggcctctgttggccgttataggtattcccatatagtttattgcctgccttcttctagaggtcctgctctgggaaaatggattcaccttgcccagcatcgcttgccccgttgttttctacaaatgatgttaagtggcctgcttccagcagagcccaagaaacatgctttgtttaggccgaggaagcatgatggactggctctgaggataccgcccccacccagcttcctggcagtttgaacccgagtgtagactgagctcctccagtatatgagggagccagaagtctggaagaggcagagagcaccaggcccagtgtgtgggaagctgtgttgtagcctggtgggctcctggttgtagctagtcacctgggtgaaagggactggactgatctacaagactagacctccctgaacctgggcaaagtttgtacatgttgtgagccgtggcaatgtgataaaaatgccagctgaggcccctctagaaagtgttacttgatgacaggtgagtgaactttatggtctccagcttctatgtgagaacacctccctacagagagcacagaggcccagagcctcccacctccagcccacactcagctctgcagcccttcccaaacctctgctctctactttatcctctgagccaggctgctccctaccctgtccaggaggggctgtaggcctgctcttcagagcagagtcctctgataggaagcccagaactcccacagggtcaccagccccctatgaggtacataaagacagaactccgcctctttcctggactatcctgactggttctctaaagcttttgttccactctgatccattcatttttctcttccatctgcatgcaaactgttttctttaggctgatggaaaaataacctctagcaaacagttatgtgtgattacattttatttctcatatatatgtggatgtatgctgtgtatgtgtggatgcatgtttgcatatatatgaccatatgtgtgtagggtatgtgtgcatgcgggggcccggcattggtgtcgggactcatttatggttgctttttacactttattagttgaggcaaggtctcagttaaacccagtgctcaccactatgactgttgtccctaagaggcttgcccagggatcctttgtctctgccttctgagaccggagttactgacaaaccctcatgctcactggacgtttgtggatccagggaatccaaaccccaccctcataaccaaccagttagccagctccccagctcagtgagaaagagacagacagacagacagacacacacacacacacacaggagacagagccacatgaagatgtgtgcatttcaatgtggtttacattaattcacagtcacaagtagctgctcctgggcagtggctgcgctttggagcacagtgctgacgaagatggccatttagcttttcattagctccctagtaacagaagcagatagttgttgtgccgttgctaagtgccaagcccagtgttgtctcgtttcatcctcactacaggcccaagaagcagaggttgttacagcactcccatttatagaccaggaaattggagctcagagcagttaactatcttgcccagggtcacacagctgagaagttgaagtaaaacttggactccagtctttaggactccagtttccatgccaaccaagcttaagggttgccctttgaaacactattgagtaatgcattttatggcccagaaaaatcagagtcagtgatggcccaacatgtaatacacaaaattcaggccctgtggggacttggtctaaaagtgtcctaaattgtagtatgcaagaacccagcgcagtgaggcacagccccactaatgatttattgctgattactgatgaacatgacttttagtgtgtgtctgtacgtctcccccgtctctcctccctacaggtgctccctataggtgctcccacctgacttagatccccattgatgccctctccctgagtcctgaaggaccagcccaaatctcttatgagaagctcccttacctgggcccttctcttcctggagccatagagcttttgagttgaacctgaacagaggttcggggctctagggcagagggagagggagccagctgtgcacagtggctttgcatgcgcagcttccttgaagtgcagccacattggctggttacatctttgcttgcttttgtgttgtcctggttgccagggtggagctgtgttgtcaacaacagaggccatggacttcagaggtgaaaagattccctctggccctttaagaaaaagtttaccaaacctgactccagccgggccagttgacagtagaaagtgtcaagagctggacctcttcagagtgggctacaggatcagtgagggacaatagaggacagatagacggatcttggtctcttggtgtcctgccttcacctcctggtgctgggatcacaggtctttgcacagatctccgcacctggctttatttagtgctggggatcgaacccagagctttaggaatccatagactgactgagagtccccagtaaattcttacgaataccataaccaatacatttgatagatggggtcaaaggttaggaatccaacagcatgctggattgtcctcttctctagcctttcttctacctggctaagtacacaaaaccactgttttcctttgcctggcactttgaatcattctcatatccagttagttttctaaaatatattctgaagtatcgtgtactccccctccccctcatcgttcctcctctcccttctcctccttcctctggccttacacaactcagtgcctgtggtcattagacctgcatactgagtctgacccagacccctctgggcaagccctgtggccactcccagtgcctgtgtcccccatacagcagcgcctccttgtccttgttcttcccggctggtcgcttagcctcacaccttttgtcttgttcctctctggaacataaggtgcgtgaaggcagccacctttctgtgtgggtgtggcttttattcattaatatctcctccatggtgactggcaatgaggtaaataagaagggggcggggagaggaaagaaggaacagacaaatgaaggttggtcaaggtcgtcagtgagattgggtaatgttggaaatatctccagaagtggcatatgagaaccatcaaaaaagtattccaaggtcaccgagagaacacacccagttctctctcctttttaaaacaggacaggctcctgatggccaaatcccccaagttcagcccatgagccccacattaagtatgtctctttttactgtcaggagagacctttaccatggaaaggggcgagaaggacgaaaagttcccagccattgtcttagaccgatgtttgccgaacactgttggctgacctccagctaggcatacccactaccttttaaccagaacacaaatacacgttacatgggtgtacacacaaacatctcattgcatttttctactatattttctacagatgttttctgccctttaatgtttgattttatgcagtcctataagacaatcctagttatgacccattacgtggtttcatgacctgttaaggcagaagtgccatagagcttgaaaacaataagttttcaaccatggagctctagtgctggggagcccagcagggaagagcccaggacctgaggtcagatgccagcacacacataagagacaggttgtgcctgtgcccacagtaagcctggctctgggagagtggagcagggaggatccctggggcttgctgaccattgccagccatggtattctgctttagggtaaggcagagtgctggagcaggacagctggcatcctcgtcccttcctgtcctttccccacagtgcaaacagcttgcttggtacatgcacagacatgtgcacgtgtgcacgtacacacacacacacacacacacacacacacacacacacactgtgcctttcctaaggaattctctatctaccaaaggaatttgatttgttacgtttaactgctaagtgcattttacagggctgtaggccatggggttttcagggctgtgggccacagggtgataatgaggctgtagaaaggctccctccatccagacctctctaggagtctggaagagaacacaccttttcctggtaaatttcatttaatgttcccccccttaaacttacttactttcttccttccttccttccttccttccttccttcctttctttctttctttctttctttctttctttctttctttttctctcttctatggtgacttttgtttttattatcagtggagttagtggctcctcaggtagtttttaactaaaaagatacaaaaacttggcttgactttcaatatcttctcactaatttttccactcttgtcttacattggttttccctgtggagtatgatgtatgtgtgtgttagtgcatatacaatcacataatacatgcacatacatgtgtatatatctcaaaaatgcacccttcagtgaagggttttattgttttgagttccttaacatttaatggtccgtgaccttcacagttatttccattaaaaaggtttgccttctctttttttcggaggagatgcagagatttccataactgctctgaccctcagagttattacacaactataatcaaattaaaccgttctgcaggaggcgttccatgccgtgtttcctgaccctcgaaacttgagccctctggtcgctatgcatttccatttcagaagtttttagctaaaccatctgaatcgccacatgaaaccaaagagaaggcttgacaatgggtgtgtttccagcctcttcctactgccccaaaccccaaggtctctctgcttagtgctttccccacaggtgcacacccaagaaacattgcatttggcttttctttggaatgcctgcacttcttagagtaggctaacactaaaacacagtgtatcgtcagcacctgtctggtgagaaaaacaatagaaactccccccagacaaagaaccagcaaccccagacctctgtggggtcagggcacaatacgtttctctggatccaaagtgtgaggttgataatgaccttgtgctcattaacacaaagccacacgttctgaccaaactcagaaacataggttcaacgatcatgatagcaagacctaggcaacaggaaaatgctaggagctgggtggttgtcagtggtgtgttatgaaaccctaacatggtggccatgcccgagtaaagaagttactatggccagaactggtgtgtagggtgcacgggagggtgcacgggaagcggagagagacaccggggaagggggggggggcagggttagactagaataccaaaagatctcaccaacctatccagcacgtgagcagtggccatgttaaacccttcagtgtgcaagaacccctctcctgcctctgctggagtcaaaactccatcagatgtgaggttatggagcacgtctaggcaggtatgtcctctttcttaagatctcttcagtgatacatgcgggcatggccaccatgttagggtttcataacacaccatccctgggccatttgcctgtctctcaccagtgagggagccatgactttctccggcaccatggatggctccagacttcccattctggttctccacccttccactcagcagctggatctcttactggggaactattgtgcacagtcagggctttattctatccactctaaataacattacagcattataaacaggatacttgagttggggttgggaggagcgcattcttggcttacagttgctcacccaggaaggctggttgggccctgattgctttgttggggggggggggttccaggtgggtgaaagatgaaacctgccctgccttgacagctatctttgttttgttttgttttgttttgttttgttttgttttgtttttgagacagggtttctctgtgtagccctggctgtccccggaactcactctgtagaccaggctggcctcaaactcagaaatccacctgcctccttgacagccatgttgatgaaaacaaaggcccctagttaggcgcctgctgctggggccatctcctggcagaagtgtttctattgcatcttggctatggtcttccctgcagcttaggacatgctgtgcactggtctcctggctcagggctcaactgagagccttggatgaagaaggtcaggccagccctcccacctgcagcttggtgggtgctttgatggcttcttttacttcagtgtggtaactcactgtcttcccggctctgcccacaccttacctttttaaagtacaccatgcatcatactccacaggaagagatagagggtgtagaacctgctttacttggaaagtctggtcaaaccctgcaaactatgccagacttaaaaacatgtacaggaaaggaaataaatgactttgagatctttgactgcccagatcattaaaccctacagatatatcttcagcatagatgctctgggaccagggaccaggtgaccggcatggttctgggtatggcctttgaccatgaatgactttgtaggactgccctgaccccagaacactgggaatggttcattctaggtgtcctgctgctgttacacaggcttgagaactatttacgagtgctgtgaacacacaaggcttgtaagaacactacttggtgacgtgataactgaaatgcagactaggaaaattcttcaaagattttttttttttggaatggcttagatttagtggtccttccatgtgatctccttgtaatttgctgcctctctgtgttagtttaaaggttttcatgtttgcttttctcaatgttggaagacaccaccaggctttgtagaggagagtgagggaaattacaaaggaagcatgggtggggtgggactaggtcatttagcttcttttcgttccaaatccgtaaatatttactgttgaccttctcaaatggtttgggtacactgacccagttgaaagcagggcaggcgagagcagctgttccccacccccacccactgttaaagctgatctcagaccaattgcctccagccagcccaaaagtggccttcagggaaagctgcccccttccccccagggaacagttttagccaatttacacttttaaagtgtgacctcttctaaagattcctagagacaagagcagattgctgtgaactgaaggacaccccccccccataaaaataaaaaatactttgaattctggcttaggtttgctattgttgccaggtcttttgtttctgaggggaaggtaattataaattccattccaagcataaatgttcttttgtgagcaagggggacgggataccaaaaacaatgagtggattacgtttccatttttgtaagatcgtgccaagataatgtggtttaaaacagctggggtttttagagcagagatggagcttcgaaaggtcttctcagcgcccatgaacgtcagccaagttagagacttctggacgagtctgaatattcctccagattcatactgagaaataagggattttgggttgggggtagttcagatttgacagtcatgttattgcatcaacataatctggtagctacatgttcatctgacctcatctactcggggcaaagaggagcagagagcatttaatggtgtcctgttgtcagcctgagaaatcattagcaaatgaacaggaaactttggagaataactacaatatagccctgtatttgcctaccacaaaattctctgtactgtattaatatgttttcattttaatttttctttgcagagtattgggaaagggtcattgtggtgcatcgacccagagtatagacaaaatctaattcaggctctgaaaaagacaccttaccacccacctcctactcctcaggcttatcaaaggtaagtgactcgcactatcgggggtttttgttttcttaaagtctcctggaattttgttattttagcagagacagtctctaaaactaatttagtaggccgtatgaatgttttaaaaataactacagactaatgggaaaaagaattaagtctgatgaggaggcacatccattggctatgcatttcctgggaagcttaccgcttctgtagctccgactgagcgggtgtggctccggaagggctcctggtaggtaaatagcgtcttcctgggtagaatcggttacagaggaaagtggacagcttttctatctctgcgggtcacgctttgttggaataagagcggtgaggcacacaggtgattccaccttcccatggcctgcctctagagatgtggaaagaaggcaggctcggttgttgtcatccggtttccatgtcgacaggctcctgagtgatgggtttgttgtggttactaagtgtttgtcttgagaaccatggccactttccctcctcacgtgtctggctgtcatgagactgaggtcatgagtgcatttttacaaatatacaatgggaggggtgttaggtagattgtcacagtttaaaaagcatgtcagtgctaagttagaagaaagggccttacagaacaaagagccggatttcaacctgtggatggagtcttagctcttcacggtgcttgtcatcaggcccactaagaaagtttgaaaattactttattttagtgtacagctgtttcactttcatttatgtactgtgtagcatttgaatgcttggtgactgtggaggccagaagagggcatnnnnnnnnnnnnnnnnnnnnnnnnnnnnnnnnnnnnnnnnnnnnnnnnnnnnnnnnnnnnnnnnnnnnnnnnnnnnnnnnnnnnnnnnnnnnnnnnnnnnnnnnnnnnnnnnnnnnnnnnnnnnnnnnnnnnnnnnnnnnnnnnnnnnnnnnnnnnnnnnnnaaactgccagtggagtagacatttatgttaattgggaaatggcccggtgtcagaaggctggggaattttacagtccacttgcagatttttctgttctgatgtttattctgcaggagggcacacagagtgagccttccaacgtggcattaatgaagttcttgtgcgttccatcacagaccctagacaatcagtctccggcaagagacgggagaagcagctgggctctatgagaagactgctgtatgtctgcctttgctaggcgattagcgtgatggtagccatagtaactggagtgtctccatagtaacgcgtagctgagacaggtgcacttgcatcacaaggctgtttgttgcctggcaaaaggacaggccattagtacttagacataagctgttgccttagaaacaaataaccctacatagcaactacagttggttcgcaagggtatttttggggggctgggggaaggaaggttgtagctgcttttgtctgtgttcataaaaatcagtggaagcatactttatttgaaatgacaactcgaggtcatatagctgtaggaggaagagatgggattttccagagcagcctagcctacattgtaggaatgtccagaaggggagagccatatgcctgcctctcttcttgtgatggtagccattcctgaaatagaagctgggattggggttagagagttgcttttttatggggttggtggggagcctggcactaattattgcaatactgtcgatattcagtttccaagcccaccccactagtttctctagtttctcccttagaagtatgtcacacccgtttgcttctagcaagttaaaaatgtaagtgttattcactgggtcgtgtcattggttcatttaggccagtgccttgttgccaaatgtgacccccagggaaacactgcaattatttaataatttgaaggattataatagaactctgggggtagcaagtagaatacacacaggccagaggtattgtgagctggctgtaacctaatgacttctctagagtcttagcacgggcatgaaaatgcagatgaactagggcttttacagtaaatgatttccagatgaccacttcagatccagttctgtcccttgcagttaaccagctccttccatatcaaggtgcttagatgtcaagtccatcagatcactagtgaggcgattccagcccacatcttcatgatttgaatccagagagcacggtgctctctccatgccttggaaagggtttgcttgagaagccagcctatggtgtgagagctcacaccgaaactggtgaagaatttctctgtaccaggccacttggtgatgtaattccaggaggccggaagtggaacagccagccataaacagataccaaaatgctgagttaacctgatctggccaggtctactgtgactcaaggggtccttgtcagccccatgtggagccactgtgaagggcacctgggtagtgtttggcttccacagagctggtgtttggcatgtgagagaagacagtgattatacaagaagggcagctaatgctgtcccttgcaggtgtgcttggcagcagccctggcctaagctgcaggtggctggaagctctgtgaggaaatccaggagtctgaaaacactgccccaaaccttgttcccatccaaacagaatgctaaacattgcagtctgttggcttgcgcctgttttccaagattttgttagaatgttcccctacacctgttttctctctcttttttttgtcctaaatactgtttttaactaaaattcgaagagccaggtgagttagccattgtattaatttacataggccaccctgacaaagtgccacagctgagtgagtcagacagcatcaggaattgcctctcaccccatgagcccaaggtgttagcagggttggtttcttctgggagctgtgggagaggatctggcccagcctctcccccgttctagtggcttgctggttatctgtgatattccttggcttatatttcacaggactgtctctacctccgtcttaggaggaggctaagcctacctgactaaaaactctccttattccagggtgactttaacttctccaatgacacacacttgaaatacagtcacattgtgacatactagggacctaggacttcgggggggggggattttaggaagttgtaattcaacccttagcattctggggaagcagaaagtccaggtgtgttgaccatgcggaatggtagaggagtttcaggacaccggagtcaacctgaaattgccccaatgagctaagggatgtcactgcattataaacaacatacaaaccgagtgtctgtgagcaggagctgatggagacagttgaggtccatttctcatacacacaatcccacataagtggtggaaacagttcttccctaagaacttcttggaaagagtggactgtcgaggaggggtcctaaaggatcgtcttagtcagggtctctattgctgtgaggaaacactgtgaccaaaaagtaagtcggggaggaaaaggtttattcagcttacacttcccaattatagaaggaaatcaggacaggaactcaaagagggcaggaacacggaggcaggagcggatgcagagaacatggaggggtgctgcttttactagcttgctcatggtggctagctcagcctgctttcttataaaaccctgaaccagcagcccagagatggcaccacccacaatgggctgggccctccttcactgatcactaattgagaaaatgacttacagctcttcttggagacatttccttaactgaggatcctgtctctctgatgactttatatgtcaagttgacacgaaaaaaccaggctgtccaatgatgtttattgtgagcaaacttgacaaatactagttgtcaatcgaagcgcctcatctgcgactggagggatggctcagccagtgatgaagagcacaggctgctcttccagaggactcaggttcaattcccagcatccccatggcagttgtgtagtcagtctcctacctctgtggaaccgatacctcaggtaaatactaactaaaggatgacttgggtctgcagttcccattcgtagccctctggctactttaggaatgtggcagttgggtacctacaccaggtacctacaccttggcaggagcacgtgttagcagggggcctggcacccctcccccattacctaacttccttctagtaggcccctcctccattatctcccagccacaagctatggactgacccgttagtatgggggggggtctttggagtagtgggggcatgtaaattccaagccaaaaggtggtcttcctgctgaaacccataagctcgtcttaaccatggggaaaaactcaaaacagtggctttgtcctccatgaggattgtctccaaaaccctgaactggcactcctcacagccgcttaggtcatcagaagcaaggaatgtctgaaaaacttgtgcagactagaggaggctgggagacagggtgactacacaggaaacatgatcctggaacagaaagggagccttagacagaaaaaaaaagtgcacatcaataacttgtgcattcagctgagagtaatgtgctcatgttgactccttagttgtgacatatgtgccacagtaatgtaggctgtacggtggaaacccgagctgggacatggaaactccccaggttgtagcagaaaactcgctccccaaacacagagccactgaagtgctgaccaccaggacttcttccttccttccaccctttgtaggatatgcagagccacaacaagggtgtcacggtcatttagcaagcacagttcttggctctttctcattgtgaagtgctcagctgtgctttgtagagtccccacggctgagttcagggactgaggccaaatcagcttgcataaggactctacacctttgccaaggcggggtgcaggcacgggcttcaggaaagggagggctgttatttttggatggatgtcttgccttttctgctggagagcacggtgggctgatttaatagttagtgtgtttcctatgacagcccttcctcgatggggcctctctcaggacaggataggcattcttttcatagatgcttccagagtgccttcttaattacatttatttattcggtgtatatgtgtgcattcacatatggggtcagaggacaacttgtgggagttcttttcttcacctggttcgcaggaattgaactcctgtcttcaggcatggtgacaaagtacctttcttaatctgctgagccatcttgtcagcttcccatcaatttgtaaatgaaatttccagctcacccccaaccttttctatgtctgatggttaagttaaaagatagcatcctagtgggtgaactaagcttgtgtctcttggggaccttatggggtggcatttaaatgttgaaatattaaactgatgttccagagaaggttgatgctcttacccgtgtttgtgacatcagatggttgtagcaagtcttccgtgtggctctgctgcagtgtttttattggtagaggcatcagtccagcgtcagtgtgcaggagaacaccgtggtccgccttcacagatgagggcaggttgtgtgctgcccaggccgggtgctttctggagcttcctgcaggacgggtttttacagagtggaagcagtggtttttgagccaggcttagtgagttcggtaggttttctggaatccgtatatttcagcagcttgggctactgtggtcagagactcagatcaaggggctcttagctccccatcatggttctcatgacttctttaaatattattgctctgagaataatggcaccttgtctcctcataacttattttaatgcggtgtttagaaaacacttgaagaaatttttcttctcactttttaaaaatgtgatgtcctccatgttctttcagtctctttctctgtgcctccttcccccatctctgtctctgtagcagtttaataatgtggagcccttccaagcatttggtgtttctgatggtaaggttctttgtggaatggatgagttttaatgtccagtcatcggtttcagtggatccttcctactactgtagccttgtgatttatccttatagtttttaaatagagtaatccagtagtctatggtcattgtgtagtcacctcaggggctcatccatctgtttgttttgaccaagtcctgagagagcccaccaggtaatagctttggcctaaaggataagagttatgactgctcctggccccctgggaaaagctgttggtgcttgggaaactcactcagttaggagatcagtaaatcctgagaatgttaagcttgttaacctaacagtgttaattcctccactgaaatgctgaatttacacacagcaaaaataacttattcattgcttgggtaggatgatacatcacacacacacttacacacacacacacacacacacacacacacaccatcctaattttgtaaatatcatgtggtagaagaactacgaagccatagtaaagccagtcttagctgttaggtcgttgtgttcttttgtgtttccctttgggcaggcctgcagcacaggagaagacaggattagtgccatccgcactgggctcctgcttcatggcaagggccatctgatgggaatcataaacagttctctgaatgcccttcggtgtcagaacacattcatataaactttatttttaaagggcgatgtattatatatttggaaagttatgtttaagtcgggactttttccatagagtcctttttaaaggaatattaaaagattgcaatcgatatgaagccccattgtgctaaattgctaggtgagcgtgctgctgtcgtaagggggcacaggagctctctgcactagtatttctagatgtgcgtctcatcttgtcaggaagattggagtgggtgggtaatggaaaacatttcaaatctaggaatactctcttatttgtaagagttacgctgcccagtgtgagctttaaaatccattagttgactataattttattttcatatcaaatcacattatctattgacttccattatgttctgtcagttggtctcacagaatagctttgacctcggcgtcttgccttgggtgtgctgtgcattgtacatttaattcttattcagcgctgcgtgattttatttacttggaaagcagcccgtgttatctcggagcggttagagtctaggtgcatctcatgaatactgggcccattcactgcttggaaggcaaatgtgtgtgcggctgacagtgtctcttttactcaggtactgaataaaattcctgtcccagagagccaagctagttggaggcatttgtcatcttctgtggtctgggggcacctgcagcgcctgcttcatgtttagagcagaagtgtgaggagtccgctaagtttttgctgccctaactcctgagccagggaaaacaaagacacccgtgtgcttttgatgcctcctgagaagaaagctgaggtgtggatggagcccagaggggggctagaggcttttcatatttgcttagcgtctattcctctatttgcttctccagacagcccagctgagggcttggcagctccctcacacctgaggggacgactgcagatggagctgactcgcttgctcgcaaggcgcaaggcgcagttggttgtcaaaccttccactttccaagaaggggaagaaagggatctgtggcggaaataggaaacagctctagaaagggaaactgcaccagaacaagtgacctacagcaggaagagaaacggcttttccttgcctttgctatagtgtaaaatgacaagtgatttcttcagcagtgcaaaaccaaccaccccacaccacggtcccaccagagtctccactttctccaaatttaaagaggattcgggcactgtccgtgagacggttcagcttggtcaggcccgtgcttgccaagccggacccaaagccaatcaccagcgcccagagaaagatggaaggagaggaccaattctgaaagttgtccccttacttcagcacgcgtggacacacaaccacacggaacagtagtaggaaggaaatgtacaatacggagtgagagagatggctcagtgggtaaagcacttcctgttcaagtgttagggacatgaattcggttccccccaggacccatgtgaaaagaagtgtatagcgtcacacgtccgtgatcttagcaccggggaggaggaggctagagcatccctgggcctcagaggccgtgccaaaacatgggagctccagacaggggagaccctgtctcaaaaaatgaagtggggagcaatcaggaaggatgaatgatgtcaattttagtaactgtcaccaccattcatatgtgtcagacacatgcacacacacatgctcgagagcatgcgagcacgcacatacacacaaatacacacacacacacacacacacacccttgcatgcacgcactcgcagtttaatagatggaacagtggaccatgattcctaagagatttgaggcagtcaggagaaggatttgtctcctgtgtgttgtcagtcaggataggtgcagtcagtgatcttactaagttatcagttatctgatcactcactcccagctccccatccaaggcttctctaggcagcttctgttcacaaggcagggctcctttgaaatgagaggaaagcctgctgccttcctgccctgccgcctgagagaaccaacatgacagccaaaagcctaccagaaggagaagctagcagacacctgcaccgtcagcgaagcgggatctgaagtcatcgacagaaagatctgggctcaacgtcagaagaatgatctcttgtcagaacagacatcaaagctgggtggactcttgggttgaggcgtggatggtggacagaaagactgaggtgaccctggtgggcgcggtcagagccaggcagctgcctgggtcgtctcaaaggccttccccatctctggagaactcaagcttccccttgcagactaacctctcagatctgttggcctgccagtggggtggagtgtacttgcttggtgtggtgtttgcagctctccaggcctacagtgtgaagtgcaaaccaaacatgagggccggcaggcctgccctgctcctcagaagcaagggttcaggcctcaggcctcaggcctcgtcctgggagtgggtccagctctctggctggactgacttagttctttgttctgcttcgtctagttctttgattctcgcccgcagtttacctcctcgttttagtgacacttgcttccttgtgaattttgacctgcagtgttttgctaagaagatcgtttccaaaagctgtcgatcaaaccatgcagactgtccgtcccccattgtttatccagtgaattaatgagaacagtcctcacccttatagaagtcttcttgaaggagccaggcaggtatccttgtctcgtaggatcaagtggtttttgtccagagcctttgggtttttttcagacaccaggtcctgcttgtatcgttcatcaactcattactgagaccctgcgaatcttcaggaattccaaagccctccatgactggtggtgattgtcctgttgtctggagaaaacgcccagaagccaccagacaccagtcttctaatcttatctttttccagaacatgttgctaatcacagtaggccaggttgagacctgttctgtgtgtttactctgacatggaaagttcttgtggaggtctgttnnnnnnnnnnnnnnnnnnnnccccccccccccccccccgccctgttcctctaagggacttcgatgccccctccccatgcggtgctcctgaggagtgaaggtgaacaggaaaacagggtcagaggcagctcctccccgctatagctttctacatctctcccccccttctgctttgtcttccttcccctcccccacctttctcctcccttgccccacttccctccccatttgcgaggcttttgagcagaagaaatttgtttttaactacaaggagagcagtatttcttcctcctccccctaagctaaaaccattcctcacctgccatctttttttttttttttttaatacccttggagaaactgaggcacatagaggttttaatccctctttacacagagggagaacttgctggcctggcctcggcaagcctgtcccacccccggtccgcgtaaccaacttcccctccacctgcactgccactctgccatggagagacctaaatcactctacagatggaccgagcagctggggcatcctcgggaggaagaaggaagaagccagttgggaaggaacatgggagcagaaaaatgaaaatgacctaaagatgtcaggctggcagaggctggcagtggcttccccagcccacacccccgtgtcgcccctttgtaggccaacagtcatagcagggctccacctttagcccatatccagtcagcatggcgcccttggctgctttgtcagcgggtgatggaaggacataagatccacaggagccctgccgcagactggtgtcctcggcctaccaggcaccctcccagcttctgtatgcacacctggtccagagccagtctcagcaagtctcagaaaatgactcttgcttggtcactccctcagtaagcgaatgtggactagttacttcagctctctgaactcattcttgttgtgacttgagaccacctgcctcaggggaggacttctgaagggtacgtgaaggaagcatggtctctgctcgacactaaactcttgtgcctggtcccggaggagcaacatatgatttctcctccttgacaatctcatgctcttggttttgcctgcgctacatatcggttggttttgtgtcaccaactctctctttatactttctaatctgtgctgtctgttggatttaaaatccatggaaaccagggcccatggtaagctctgtctgtcttcttggtcttctaagcaaaggtttgtatagaggtttctttgggagatgttcagtggtgggcagctaaccttacagtggccagcacactatgagaatggctcaaagtgttttcagccccaagtccacaaatatttggagggaaacaaagagctgagttctgtgtctctctcctgaagcacctgagtcatttgggcaaggtgtttctgcctcctgtcctttccccatctgtctgccgagccctgctgtggtgtccttagggacagaaggaagcctgacttgtttggacactgccattcctgaagcccgggaggcttgtcctgcttgcctctgcgtgggaatgttcttttccccaggctgtctactccgataccagcttctctgtgtgttaggtgcctcaggcctgggttggcccagctccgtggctatccagtgcccggtgctagaaggcttccctctgaggcctgctgtgctgctgatgggcacttgaaaggtaaggcctggagctcctgcccctcgcccctgcccctcatcctaatgggcaaagcttccaacccaggctggccaaacagtccattgtgttttctgcatcagacccttaatcctgccttcctctctcagcagtaactcattagctttcccccctccgttctttccccctttgatgagaacaaagctggctcctccctgcgctcaatcttccttttccttcccagggaatagccctgagccagtccatccccttagccagaagtccctggaatggtgtcaccaacagaaggggcatctcctccttgaccgcttggcctctgtgctgcgccccgccccgcccaggatcccactgcaggtgtgcctgggcctgttgggggtggggcgttgccttgtgtaccgaaagccccccactcagcagccgcagcacccagctctttaaagggaagaacagtcgcacataccacatgttaatgccgatggaattttactcttactaaagccctttgaagtccctcgtcctgaccccgcccctcttgccctcagctcttagatgtggtgggctctgtcatcagggttgctggagtcaaagttgcaggaaaaccatctgactttctctaatacaactctttgatgttgagtgaaacaaaaatctatttctacccaatgctgtagacttctgagaggaactctggaaggcagcccctgtagcatggttagaatttcaaattgatttcctcttctcttttaaacctcaactgtactgtatttggggtgactaggcactggagtcatcaggccagctctgacggagcacctactgtgtgccaggtccctcctacttcacccaggaaccaggtcgtctagacttccctgctttttcccattgcatatgtctgagaggaaggttagccatgcgccgcagatgtctgaggtaggaccaagccagcttgattgcactgtttctcttcccatttcaattttccacctcgcggtcactgtcgtttctggaaacactgcccggtgtctaagagttgatgcaatccttggtaaggaagaatggcatccaagatggttaatattgttaactaggagaccaacctaaggttaattgaagtgagaatgcccaccctaaaagtgggcagcaccatttccgggctggaagtttcagacggaataaaaagttgggggtggggaggtaagagcccaagcttcacaagccaggcaacctgagcaccactcccagaagacgtgtaaaagccagagagggcggagggtccggaagcttggggcccactagccttatgcagcatagcagaagcaaatcgtagatggagatctctccccccccacccctttcactcacacacacacacacacacacacacacacacagagtagtaccgagttgtcctctgactgctacatatgtgcctacgcatacatacacatgcatggtagtaataaaactagaatactttaaatggggaaaaagcgagctgagcctccgtctctctcagctgcctgatgctctctctaccagtgggatttccctgccatggtggaccagactcttgaactctgagccaaagatcaacttttccttccttaagctacttttattaggtattccataggcaggatgagcctgtgacaccgaggtagaaactggcaaggcatagccaaaataggggccactggaaagaggagggccactggaaggagggccttgaaggatgttgggaagggactagaaggaaaagacaacttgagcaggtggtgaaggaggaccctaggggacggggaggagtgagtggggtacactcatgttgcagggcgcctccagtttagaaaagctggaaaagcaggtgtaggtggagtcaggacagatcatactgtattttctcaaaatgacttggtttttatgatttaagagttatttatattgactttagtaaaagaaagagtcgaagtccactgcatccaaaggctttcttgttcttgaacgccaccattggaatccatcttgttttcttcatcctgcagaataaatgttcacacatttttcttgtagttctttatgtatggaaaattgacgagggctaaccacttttggatttgagtattttttttttaaaatcattgtgggtaaagcaatgtattttgctaccactcatcaaaaagaaagtgtctctaagcaggagcccacattgtacgtacacacacacacacacacacacacacacactgatcagatgatctaaggcacagtgtggcacactcaggatcaagcagtgactgtcttataaaactgaatggctgcctggcttccatggattcgcttctaacagttagaataggccttaacgttggaggtctgctaagacaagaattggagtctgaaaggagatgcaccgtacagtccttttggtttgtgtatgccacatcaagccagctgcctgggggacaaaacacaacaggtccgaggctcttttcagtcacctcagcagaagtgttgctaacgagagaattatctgcaattaacgtggcaggccattggctccttctcagttacttttggatttttgctgttattccttcccagtttttttttttaagtaaatttgataaatatatattaaaggttgaaacctaacctttccatgtatgtaagtgtgtattgtaaaataatgctcacaatcaggctaattaatgtttccccctcccgtgtgtgtgtgtgtgtgtgtgtgtgtgtgtgtgtgtgtgtgtgtgtgtgtgtaaagcttaaggcctacacacacttaacagacttaagtttatagatgttattagctgtactcacctttttgcatgtgagatcttaaatctctcatcataattccaagtttgcatcctgcaactgttttctcccacctgctctggtgtcctttccaaacagtcgctgccctggtcctcgcttctggacttttcagccacggtgtcctaaatctttagtgggtttttatttgatctgataatctccattttattttgttccgaatagaaatttgttcttaaaaggaaacagattagtgtttcaactgtggataggagtgggtgctgtgtatcttttgggaggtgcagctcctacggtttgtgcttatttctgtttcttgcaaaggaaaacccatgctaagatttttcgtcccacatcacagaattgctggagttgacaggacttttccgtgacccagtgtagagctccccaaagggcttggtaggaccacctgcagtagacattgggatgccccttttgattttatgtgactcttttcatggtcaaaaattggggggagtgcaactcacggtgtttctttgtagtactagagagttctctactttacgaaactgatactttaaaaagtgatggtaccctagttattagcatagtctaagggataccagtttggaagaaaacaaatacctaaaatagcgtgtcttaagtaatttgtcactctgtggtggcggtgagatcagtttagtgcctgggactctctctctttccgagaaataatggagtcggcagcagcagatgttgagagctcgctcaccgtagggcagggttttgtgcaccttgagtttcagttatgtctgtgtgcttgtgtgaagtcagtcagaacgaaacatctatttcttactccagaagacagccaaaagtttctggagaacaccagtctaattcacttcctctttacatggaaaaacacttgagtctcctgtgggggttatgatcacttgcagaggtcgaccagagaatctgaggcttttatcttctctctcccccttcattcagcacactggctaagtacacttaacaccttgttaaacgacatcagtgctggtgcaaacaacccagaggccatccgtaggtggtcaggcagaatgtgcacggggaagcactagtcagccttaaaaaggacgtgccgcaacgtggatgagccgtggagacactgtgctaaacagcctaaggaagcccgtcacagaaatctcctctgtaattttctgtttgggatgatgctctggagacagataggggtagagttgattacacaataggaatgtcccaaccgtcacctagctgcacttaaaaaaaaaaaagttcagatggcagcttcatgttatgtatgttttagcaccctccctggaaaaggcacaaagattttgttttgcgttttagcacccatcccttcctttggttccacccctttaggggtgcaggtccagacaagaggatgcaaacaagacaggttccttcctcctagggacccccagagcgcagcatccaggggcagccttaaggctggaattctctgcccacatctccacagcttgtcaggctgagccatggtctcatctgcactagcggtcatgattgcaaccgtttgtgtagcggttctcttagtttctccatcctttgggtgatgttttgccctaaccagtagacaaatggccgtaatctccgtttattcttccttttataagctctgcaggcactcttgcaaatagcagctgagatggcaggttcctgggcctgagtcacttagagtgatttctctgcagatccatctctgcttttgccctactttgagattgagaatcaaaataactggatgaacagaagtaggcaggggcaacaggctcctggaagttggatgtgtgtcttttctctgagccgagtaacatgtttgagactttaatacaaagcagtttctgtgtgcataaagttaccacagcttggagtcacctgccggccttgaggattttggatactttcttactgcaagcacttctttgcttttgacccccctccccctctaccaaccaggtctgtgtttccagcaaccctgccagaacctccgtagcccccagatcttcctcaatacaaagcgccccctttggctctgccagtggttactgggagctaaggagcttcagacatcatttgttacattgagactgccgtgataatgactttggaactcctagcttgcctgtgggggtcttgggtcgactctcgtctttcctacgttagctctgctggcattcagaactggagattctttagacatttagaagcatacataatctccacccgtgagataccagttacactctccaagatcaaaaagaggagtgggtggtggctggtgtgcccaggatgccagagtaacactggtggaggaccacctggcaaaccccacagttcttctgaggtgtgtatattgagcaccctattaggttttctatttaggaaaaaaaaaggaaaggccctggggttttatcctcagtttaatttgtttaatccccattacattaatacagaactcagctctttagagggcatatgaagtctggttagctggggaagtctgcctcccaccaacagttcctttaccagtgctgagcctgctctgtgtatggcgaaaggcgatgttcagtcctgccacagtgatgtggtttctggtgtggtctctctgctggaggattacctttttctctttttcttcttttnnnnnnnnnnnnnnnnnnnnnnnnnnnnnnnnnnnnnnnnnnnnnnnnnnnnnnnnnnnnnnnnnnnnnnnnnnnnnnnnnnnnnnnnnnnnnnnnnnnnnnnnnnnnnnnnnnnnnnnnnnccacccccggccgtttctctgacagtgtttctctgtgtagctttggttgtcctggaacttgctctgtagaccaggatggcctccaacttacagagatccacctgcttcagcctcccaagtgctgggattaaaggtgtgcgccaccaccacccggcgcatctccttctcttctgttttgctgcttctcctataaggcatggtaaggtcttgtggggttaccaactgggcagtctccgtgagcttgtgtagatgaagtctggagtaggggtgccctgtggttccttccttctcttcctgccagatccagtctcacgctatttattcccatgcccccttgtttttctctccatatctattttggttggttggttggttggttgtttttttgttttttgtttttgtttttgtttttgtttttgtttttttttttttgagacagggtttctctgtgtaccttggctgtcctggaactcactctgtagaccagactggcctgaaactcagaagttcacctgtctctgccttctctacatatctgaatagagaatgatgcttgcctgtcttcttaagtggctggcagtgctgtggccagactctcccatggtgcttacatattgggatgtagtatcagtcacttgatatttgagaattccttgtggtgtggacttcttccacagtcttccatgctgtgctggcagctgtgtttctgtgtgtatccgtcctatatttctggagttccagtgagccactctctgtgggggtcccttggatatatgataactaaaccaggttttctattgataatcaaagtgctgaccccatgtaggaggatggatgtataaatctccgtcagcttaacaaagaattaggtttagcttttctgtctctttggagttcctccaagtactaagggtctacagggcagtggtgactttttgtttgtttgtttgttttgtttttcgagacagggtttctctgtgtagccctggctgtcctggaactcactctgtagaccaggctggcctcgaactcagaaatccacctgcctctgcctcccgagtgctgggattaaaggcgtgcaccaccctgcccagctagtggtggcattgttgaagtcactagccagtgttctggaagaaccctgctggggatctgaaagctaggtgttttatgttaatgctgggtaaactcaggtctcttcatcttcacggaactcagtatcttggcttataaacccacgtggctgggtggtgtcatctctgtggtcctttctgacactgaatgcactgctgacagctgcaaactcatggtctgccaggcttgtgaagaaggtatatcacacacttaaaagcatggcttccttgctcactaagaggactctgggcaacaggaagcctagcaactcttggagcggtagatcctttcaggaggtaaagcatgagttagaggaagtaagccaaatgtctcatccaagcccctctctagaggtattattcctgacagacagctcggacaacaccgtctagagttgagtcaaagttacacattgcatctgctccacaagccgtacgtaagggtgtaggatagtgtaaatgtcgactccatgcctctcatttcatcgttccaggactggggacctcacagatgtcagcagctaagctactcaacaagttactcaacaagggaggacagtctctagttgttaagcgtgtccgtcatgttttaaatgatattcaggatgcccccttgctcttccctgtgacaactgagcatttgtattgagatttcagtagttttgtaggcagtctcgcctgcaagactacatcctgagaactcgccgcatgtcagcttcacttcttggtcccccaggatgcttccttggtacacgaagaccttattgtgatcctgtatatacatgggctgttcgttgctcttccaagggtgtaattgtagagccagcgattgcactcagccacctggaaggacccccacggctctggtcagaccgcccccacacatgcgtctgcatgtgtactgggtacacaggaaatgctatagaaggagtgtcagaaggtggaagcgctcgatgagtgggcgttgagcgaacccagtgcaagaggatgagtattttatggttctctgctctccctacttggtgccctttactgtgggttagtagatgagatggagtgtgttctggctgatacatggtcactggttatcttcagagacagagctttttgtggttttacagctctggctttttttttttttttaagcagtgtttactatttctggccattatgtacactaatataaaattttaattagagtctttcttttcaattaattattatagccttgtttgtttgctttctcaacagagcttacattatgggaacaagcgagatcaattttctatcacagaattcattacttctgactatagtccagcacgatgctgagtgtgtagctcactctggtgacttccccagcagctggaggatggtggggtgtgacaaggatgaggaatcaggggccttagtgggaggatggtttgggtctgagaagaatcccgatgactgtccttctcaggtcagtgtatgaatgaagtcaaaattctgtgtgttcccagacattgaaaacccttgtgtcttttttattcctttgtttgtttgtttagtactatccagactgttgaaattggtgtgtgctaagaaagattttacccttgttaggctgttttctctggcaacatctattaaagaaggtacatgctctttctgaacacaggggtctggcattgtgctcactgccagggtccacactgtgtgcctggtagatgttaaatacataaacatgagaagacgtgacataaatagcaaatgtttctctgcatcattgattttaaaagtattttctggattaaagatggtctgtgcctttgtctgcagtaactttctctgagtaatgtcttaggtagtgttggcttcagtgctgtatattatacagcaagtggacttggttatcaaaaggtgcagatccagcccagcacagtcctcatgactcaagggcagcctgtggacttggagtctctctctctctctctctctctctctctctctcacacacacacacacacacacctggtgcagagccaagtgccactgtcactagccttatgatgttggggcatagcatcacctgtcttgttgtatatcaccaatctgtcatacaaagccaggaatggttgccgcccagtgaggtccatttacaagtgtgttatgttctagtgtggccttgcgcagtaacacatgcacacagaagatgcacttggagatgttttctatcaaatgtgcctagtgtggttctcttgatgttcccctgcacactgactgttgataaatatctcaacatcatatgtagtgtttttttctgaatgtgaaattagaagtgttgtcccaccctcgataatttttggtcattgaactaatgttgccagtgctggccagagctagcagcttgaacgtgtatgtaattattttgaaagtggctcttcattctctctctctctctctctctctctctctctctctctctcttttttagatttatttattatagataagtacactgtagctgacttcagacacaccaggagagggtgtcagatctcattacgggtggttatgagccaccctgtggttgttaggatttaaactcaggaccatcgttcggaagagcagtcagtgctcttacccattgagccatctcaccagcccgtggcacttcattcttaaatggctcagaccccctatgatagtgatttacttccacatcttacctctgtggtgagggataaaggagcttggtatgctatgtctgaggaattatcaaggacagtttagaaaactgaggtgcaaagccccttctggaacattccaagcccctacaataagcttttccagcaggcccaggtcatagtgttagtggcatgtggagctggaacatgaccacgggcagcttggtcagcgttcgcctcctgtgtctctgtgtttgcctgtcttgctctgtctctgccctctaatgttctggaccttgtgagtgactgctgtactgctgtgtgtctgccccttctttaggtcttggcttagattcaacttctcacaaatgccttccttggttgccccatctggaagagaacctcttgccctctctcttttcttcccctcttgacatttctctcttgtttttgttactacacacatcttacgtatttccttcctgtaagttccttcactgcacaggcagtgacttgttcagggctgtgttcttgggtttgtcctttcctgctggatccagggtttagaaaggtacctggtccattgtaccacaatgtgtagctatttttgaatgaatgagtgagtgaattactgtgctccccgtgagcgctcccattgatgatcctttcgaagcatatgtctgccccaaacagttgcacgcagcagcttcatccctgtttttgtgaatcctgactaccctacactccccttcttagtctccagagccttgcgggacgctctttattttttgacagttctgccatattgatctcttttctgttcgctgtatgcatgagcacctgtcctggctcttaaatttatggacacctctccttagtagaggttaacttgaggacagaaaccttgtctctcttctgcccatcccacctcctcttccggcttggcacctagcaaagaagaggcactcacaccttactgccagatgaatgaagccgggtaatgctatgggcaggccgactgagtgtgctggaagtgagtctcaccctggaattaagtgtttctttggcactgtgagatcttagtgctcaagctgtgagatttaaaggcaaaatgcttcctgctaattattaacagttgccccgtaagaacaaagtcattatggggccctgaaccctggcattgtgccccctcccagcagcaaacaatgccatggagtgggaggttagcaaaagccactacaggcttggtacccgccagacctcagattacccagagaggattgcagtgtcggggccacaagagtagggagtggataaaaggatttggaatgagattataacacctaaaagatccttgcttttttttttcaagaaataatttagtgggttttgtccaggcagcgagacaatccagttgaggacctggagtgtagatcaatgtcctggggctcttcagatacttagaaataagttgatctgtaattgttgcttcttgtgggggaaaagaagaagaaagactggaattgagagaagggagctcctgagtgggctcagatctatgaggataacacaactaagaaaggccatcatggtaggcaaggatcgggcaatccacagtgggagggtgtagcaggtttcctgcagaaacaaggaatgggcattaccttttattagtgacttctgctagctgttgtcacctcctataggctccctggcttcagcagctgggatacaagcattcaaaatatgagcctttgaaggacatttcaggttcaagctataacacaaggggacccagattttcagtgttctctctctctctctctctctctctctctctctctctctctctctctctcgacagggtttctctgtatagctctggttgtcctgaaactcactttgtagaccaggctggcctcgaactcagaaatccacctgcctctgcctcccgagtgctgggattaaaggcgtgcgccaccacgccaggcatgaagaaaactttcaagacccccattccatgaaatgaagccttggacagcaggtacaccttgttccaaacttcactaccaaatctttcctttgaccttctgtcactgacagtccacctgaagccatggctttgcactgaatgagtgcgtgagagctggtggcggtgacttagctggaatgctcacttcggtgtaaatgctcactttatgaggatgtaacaatggtcctacccttgggaggcctctaggagtgattccattttcagtatgtttctgattagagactctgtcttgtccctttctcttaaaaaccaggactgggaagatgagtcagagtcccttgctatgcaagtgtgagagcctgggtttgaatccccagcacccagataaaaagccagttgtggctttgtgtccctaccctagcattgtgtgtggtggtggtgatggtgcacacagggggtaggggtgggatagagacaggaggattgctgggaccttctggttccctgcctagctctggattgtccaggatagaataggtggagcatccccttctggtcttggctcacacatgtgtacacatacatcacacataaacacgaaagaaaaaagaaaaaaaaactgtgtaaaaatgaaaaatggagcgacctggaccttcctcttatcccttgcctgaaatgttttttatttgaagatggagctggttgaggttgagttaattaaagctttaattgtgtttgattctggagcagacctaatgttgacttacccgaataatgaaatgcagattggcatcttcctggggacacccttcctgggttggtcggtaaggaactgatagcaaccttaaaacctgctggctctgctctgaggcatctttgtatgtatttttgacaatctgtttggatatgggaaaagtgtgaattgtcatccgactgtgactgagaactgctgtcagtggccgacttgagtgcttgtgtgttggacagaagatgtcaacttacaagacaagatttagctactcttcaaccttctgaacagggttagtgtcacagcctgaggctgcctgccttagagctggccttgcaggattggccctggggctggtgtctgcaaacatggtatttggagagggtttccccatctttccaaaacactaaagagaggctctcggtactcacactgctgtataaactgtgtgcttgatagaagctgtctggaattttggtgtattctggtagatcgtgcccaaatgagttgtctccagtaaaacctgtgagctttctttgtgtgtgacatgactctatgtagacagcacattcattccatgtgttgtcaggatttgttgctgaaaggagaaagttcaccctgtatggcggagaggcttcttggtagctggcactacagtttggggtagacttgaccgtatgagcttttacattggctggctttggtttttgacctcctagtgacttactgaacctagaagcctgggctgggctactcctaaattttctccagcactatggtgtttcaagcctgtgctgcctcttgagtttgctcacccgccaagtctctcctaccttccagtatccagacacacaggcctgttgattttgcacctgaaggacctctggaatccgggtttcccatgataattgttcgcctactgttccccatcttgctgcagtagcctgtttttatttctttcccttttccttccagtccatcttaatgctgttttgtctgaaactaagccaccatagagcattgctagtgaaataccgagacagtgtagtgtgtactgtgactacggtttgaatctcagctatgctcactatccgctaaattctattactttactgtgcgttagtgtctgaataatgtccttcggtcagtgtgtgcctaatatccttagaagagtgtttaatacatcctaggtgcttcacatctcagtgtcagctgaggttatggtttttttggttacccaccttgttgctgtcctctggactgtcctctgctctctggcattgtgactgggcgtgactctttaataatgaatgagaaacacaaggttggttaagtatagttcacatatgcaatgaacttagtgatttttgttatgaggctctaagacaccttaactgattaacaatgtaagatacgcctaggtcaactaatgtcagactgtagagagggacctctgagtaatgtggaagaagaggttgaccagatggatctggtgagtttcccaactcacgcttgtcgccatctcaggtttctagaaagggggcagggaaatgttgggatttgttgtgccgctaagaaacaatcatgggagagaagtctgccctcgggatccttagattccacccctgctgaagcttgcctttctcccaagtgatatttgaaggtacttaatgcagttcgggcactttcaagagaacaatcatggtataatgatttgtgaacaactctccagggtgtctagatttcctccggttcctggacatggaaggaactcacagagaggaaaacacaggtctgctggggtagtgggtggggctgcagggagaaccactaagtcttacattccttagttgatagaaagggttagtctagaatgtctgttgttggtagaagcgactgtgctatttgccacatgccaatagtcttgtccaaagagttttgttagtgatacctacaggcttttgctgtttaatatttaacattaggtaggtatccatcaaaaccttcacatgggactgcatcatgagaattactgccttgggatcatggtttgctgtgcatgtttttaggagctagaacactatattagttattatctgctgtataacaaacaccacaaattaagtaacctggcccttgttaggtgtgctggtaggttggcctggactcaactggaatgatgtattgtcagttcctgtgacttttgtttgtgctcagttgtgtatttagggttctttcggggtagctggggcctctttctccaaggagtctaaaatctattgataaattacttcatgtttatttacaagatagtataggaatccccagtggggaataagtaagcctgaatatttaaggatattcaatttctgtgttgtatttgctcatatgccattggctgcattaagtcttgaggctaagctagactccacgttggtatatatgcacaggatgtagaggcttggttgaggtccattgctgtagtgaattacaaggagctcacgacagaaaccaaatcaacactacagttgaagtctccctccactattgtcctccagagtgaagttcacagccactgtctgcctgggcccctttagtactgcttcccttctgcctcagagattgataggcatcgtttgtctctaaggggccactggaagaatgtgcctggatcaacacaaatcttgggctgacggtggaagtagaagaggaactgagtagatagcaagtaaagcccacacagagtgttgtgacaaaatgacatctcaaatcccccgcagttgtctgagcccgggctgtgtcttctttccattcttgaatgtatctcagttctcaaatgccaacaagttctagatctgcctgttgtttgttcttctgacagtgagtgggcattagtgtgcagtgcagtcaagtacgcagacaacagaatagtggcatacagagagacccaggaccccagtgcttcagctgggtcagccacctgttaactttgaccttcagcaaagtggatggattagataacatctggttttatctgacttgcagtgatttaatgttctgtatatcgggggttctagtgttaaatatatctggtgattaactgtgctaactcattaaaaatgttgtcttgggttataccaagagaacagaattgagggaatagctgtgtttgtaggccgatgtttaattagaaagcctaggataggctaggtaggggaagaagtaagcggagtggatggatagtctgtgagacttaggataaggctatgccttgggccagacacctttatcatcccttcttgtttgacaaagccagtgatggggtttagttgatatcaaatgtgtcagggaaacaactggaggagatggctagtcttctggatgtggttccctcgtgggaacctgttgcgaggtggcatcttatccaaacagagaggaagaatcaaactgcagcaagaatgaaattctattctgtgaatgaagtttagaccagaagtctgagatggctgtgtcaggtgggacacgttttcctgctgtggtatctgggagtccttcctgtggtgcatgctcttggctgaggacatcaccaagtatgaggtgatactatcagtctgtgtgtgtgcgtgtgtgtacgtatgtccacatgtgtggatgtgtctctgtgtgtgcacatgttcatgtgtgtgtgtgtatgtgtgtatttgaggcttggcatagaaccagagaagcccacactatcctgctcatcttgggtcttctgtcttctcaggtatacaggaaacaggaactgagctcatcttggccacaatatgtccctccctacctttgtgtactgtccaatacttgttaagtactcaagaataatgaacaaattaagaaaatttgggcaggaattctaaggatgtaactcagttgcagagtacttgtatannnnnnnnnnnnnnnnnnnnatactatcagtctgtgcgtgtgcgtgtgttcgtatgtccacatgtgcatatgtgtgtgtacatgtgtctctgtgtgtgcacatgttcgtgtgtgtgtgtgtgtgtgtgtgtgtgtgtgtgtgtgtgtatgtgtgtatttgaggcttggcatagaaccagagaggcccacagtatcctgctcatcttgggtcttctgtcttctcaggtacacaggaaacaggaactgagctcatcttggccacaatatgtccctccctacctttgtgtactgtccaatacttgttaagtactcaagaataatgaacaaactaagaaaatttgggcaggaatctaaggatgtaactcagttgcagagtacttgcgtagtgtaggagagagcctagaattggtcccagtaaaagaaagagaattagaagacattttgggcaacctgggcattctaatgggccacagctggcaaacctagacctacacatggcccgtctccaacccccaaccctaaagtactgattttttgtttgtttggttggttgatttggtttgtttttcgaaatggtttctctgtgtagccctggctgtcctggaactcactctgtagaccaagctggcctcgaactcagaaatccacctgcctctacctcccaagttctgggattaaaggcgtgcgccaccattgcccggcaagtactgatcctagtgtagccaagtatctatccttttgtaatttatctctatttccccagaaataaaatagctttactgaatgttctgatcagtaagttagtgtacagacttggttgctctaggagacaactcaagagggaagtgattatagtataacaatccaaggactcaggagatggagttagggaggtcctgagtttaagtgcaacttggaccactatgtagggaaacacaatggagatgtaagttagactcactgtttcagaggttcccattcatggtagtcgtttctgctgtttctgggccatggtcaggcagaccatgacaccaaggatgtggcctggcagatttgcttatcttggagctaagaatggagggggtgggcaggggtatctctttttagggtatgtcaccaatgaactaccttccccaccttctgaagttacatcacccctcaaaagaatggcaatagctaggagccagttacacaatacatgagtctgtgtgaagcacagcgtgttcaaaccttagctcatgctcgtgtagagtagtcaggtggaggaacacaaaacactctaaaaccacccctatttccatgttgttttacatcacaggaaaactattaattttttcttattttaaaattgtagtcaaataatatatagcagaagatcccataatcacttgtgtttattttgggatggggggatattgggtctcagatctcagcccaaggtggactgggactcactgtgttgtcagcttagaaactcgagccctatatcctcctgtttctatctttcaagtgtggggaacacaggtggaccctgccatgtctgaccaccatgtgtatggttctgtcatgttgagtgtacttgcggtattgttcatatgacctctagaactttctcacctttaaaactgatgcgatctggttgaggcagccaccattctgttttctatttccgtgtctgaccacagtaggcatctcatccgatcatatagtactgacttcttcacgcctggctggcttcttactgcctctgagatctgtacatgctatagcagctaggtgtcaggattttcttccctttcaaagctaatgctccctttgtatgtgtgttccagttactcagcgagcagcacttccttggactgttcctgggtactgagaatagcactattaccaacatggattgtcttagtcactgttctgttgctgtgaagaggcaccatgaccaaggctacttacaggagaaagtgtttaattgggggcttgcttacagtttcagagggttagtctatggccatcatggtgggcagcatggtgacatagaggcccgcatggtgctggggaagtgactatgagcttaaacatcctgatctgcaggcaaagagagagacaacctggtatggactacctgttaataagttactgtacctttacatacatggtttatgaataaaataggtggtactttggagtgtgaatatttccctcaagagtgtgccatgtgcatcaacattaacgtgtgagatgctcttttatgccccatgtttaatgtccccatatgtagatttaggttattctctgtaaattggtattataactgtgcctcagtaaacatgctgagacttggcacctttgcctgataataaaaatagtcatttcagtcaaatcttgagttggattttctaggagcagagcctgagccaggtttgcatgtgagggatttgctgagggagtattgggggtcagggaagggactaacacagcagatgaagagagaccaagcaaagaaggcctaaagttgagccttggcctcgactggagtgtaattacaccagcaaatcccccttgggaccagaagaccaggcttttacactgtcaaccatttatcttggaactctgtggcctcttggaatcttcagctgagagcagtttgttaaagtcgtggctttgagcagttagcccacagggcagctgaggggaagatcatgggccctggcacagagcatattggcagatggctgctgcaggtgctggtaacatctgtgaccctgactttaagctgggtgctatgctaagtctgtaaatgaaatgctaacagcatggcggcctagatgctggtgtgtctccattatgtggatgaaatagaaaaactgtcttctctgcatcaggggaacaagtggagctgagacagcttttggtgaattctaaagcctgggttcatccttataagccctggaatagaatctacattcattcctgaagctgagctggtgggccacttttttttcctgtaatctttgcagggattgagagccctccttgtgtttcctagtcaccattattctttcagtcatgtggtagactttcccacaagggtctgcatcgtctggatatccccacactggaaacgccgcacgtgtaatctgacattacagactttgtaatgacaccgagttttacactgagatgacactgaggcatcttgctcgttcgaaacagccaggaatccaaactcagatgcccatgtttacaaaattcagttttatggtttggaccatgtttccaacctaactcccgctgttgctgggaaaactgcatagaaagccatctccaccgctcctggctcatctgtggctccgcccttccctgccccgaaccagtaaacgaagcttttgagttcctttacattagttaaagcatagattgtgccatgagatgcacgcgtacgcacgagcatgaacacacacacacacacacacacacacacacacacacacgtatattatcagcatctcctgtgtgatgggagaggctggggcttagatttggggcctccctgtttctgtcctctatagggctgtgacgaggtccaggacagatggagcatgctagagcacttccagaagcacagatttggggtcctagaatattgatccacaggagctacagtaatcccaagcctctcacacgggagagacctagtgaagtagaatggcctataaaggggtgaccctggtgggggaccctcaaacctgactttgtagtttggggtcttctgtaaaagaaacttttaaactatcctacataagggaataataagcagggctggaatattcatctgggacattgcacacatgtgctcagtgtgtctgctcggacaagtgtgtctgctcacaccagtgtgtctgctcacaccagtgtgtctgctcagaacaatgtgtatgctcagaccagtgtgtatgctcacagctagggaacaggtgtccaggctcctgggacccatctcagggcgtgcttgtttgtgcctgccctctgccgtgacaccgttgttttctctacaagctgagcccctctgcttgcaccctagcttccccttcagatcccagctgccttttggcctccggtgctttctgcatgcacttcctcctcagagttgtaggagataactgaccttcaggtttctgggtgtctctttttttttttttttccaggccaagctaggtaggtcactggttatttgaaacgggtgccttttgtgatctgctcatcggttctcccagttgctgggcagcttgaccatcagtgtaggcatgtgtggtaagaggtgtgccaccggcctcaggagagcagtgtgctcgctcaccaggtgtcctcagccctcctagcagcccttcccactgcagactggaaatactgccattctttcagccagcatggtgggcctgctgaaaacagagcaaggaggtatcctcagctaagtctagaagattcacaaccatcttaggacgagtagttctgtcatttataagcaggagaataaatacaatttctcattgtccatttggatcttctagaagtgctgtggtcttgaatactgacagggtctggcagtcttttctctctttctcatgccagtgtgctgcacccaagggttatgtgtatcggcaaaaggtgagctggttttctgctgatcagtgattactataggattattcctaagtgatcctagatggcttaaaagatagcactccttaaaggtttggttggcagtgggattgggatggtttgggtaatctcattgtgaacatgcagaatacatgcagaatacatgcaaaatacatccaaaacatgtatgttgggattgaggagctcgctcaagggtgagacgctgcgtgcaggtgtgagagccattcccagaaccctcctaaaagccagatccaggtttgtgggtttgtcatcctggcacagggaaagcagaaacaggatgtttggggcctgaccagccctgttagccaggttggagaactccttgaggtactgtcccaaaaactagggtggggacgagcttgagaaaggtccacctgtctcacttaaacacacacacacacacacacacacacacacacacacacacaccagaatgaggcaatgaggcaaaagtcaagcaactagggagctacaggaaaagctgcaagcagtgttaagcgcggcacccaaaggacagagcaacaaaatcagcgagcgagcgtgagcatgcccacaccttcttctgatccgacttcctcaaggggctcacgctctgtctagccttagctagtgggcagacttactcacacacccaccgtaattgattccatactcccctcagccctgaaaacagtctgcatgctttgatttgaacaaccagaattatttccacttaaacactggtgtagatttacacagatgatctaaggagcccccagattgttccattcataacagcagggaggagagagacagtcgaagcaaaaacagtttgaatttgtatgtgcggaggtggagggagggttgggttagctgaaaggagatggattccaagtcatgattatgaaatttaatagtaatgaaattagcattccatggggactattttctgggaattctggtagtgcagtcactgaataatgcattctccgagcagcccagactaggggcctcacggtggcaaatgggttgtttgctttgtttcagttgttatgtttaaagttcatctaaaatcaatttctgtctccaagaactagcctctttttcccccctcactgtaggcgtctgtaggctttttctataaagagtaaaatagtaaatatatagtataaaattagcacacacacacacatacatgcacactcaagtttgttgtgtccactaaagttttatttctgggtactaaaaatttaatcttatgtaatctgcagatgccattaaataggggtcttttaatccacactccggaacactgtaagccatctttcccatctaagctgtatggcttagctttaaacatgaatagagtttaatttagagaaaatgctgtatattttacacaggagacagagctggattggtgtgtgtgtgtgtgtgtgtgtgtgtgtgtgtgtgtgtgtgtgtttgtgtgtgcgcgcgcgtgtgtgcccgcccgcccgcccgcccgcccgcccgtgcgccttctcctcagctcccctcatggggatgaagcagattctttagagcagaagaagaggaagggagactcctcaggaagctgctgagctccgcctctgtaagaattcatgaaaatgatggtgtggttcctgattgggtatctttgggttctacaccctcacgcttgaacatccacaaaaccaaggatatttacttgggggaaaaaatagaattttttaaaaggatatatttatttattttatgtatatgagtgcactgtagttgtcttcagacacaccagaagagagcataggattccctcacagatggttgtgagccaccatgtggttgctgggaattgaactcaggacctctggaagagcagtcagtgctcttaaccactgagccatctctccagcccttgaaatagaatttatcctgaacatattatacatgccctttatcattacttcttaaacagtacagtattgtaacagtttatatagcatctgcattgtgtttggtaacccagagattagctggtgcatgtgtgcatatactgtgctatcttgtgtaaagagttctaggcacctgtgggaatttttgtgtccttgagagatctggggtgactgacattttacaaaggcttaggtctcccaggccccttttctcacactcttcttaaaacacacacacacacacacacacacacacacacacacacacacacatacgattgccgagggggggggttgaaatacaaatgtgtgatttgtttagtatcatatttgtgagagtcagaaaagtcatagaagcacctaagtttctgtgatcatgaacggaaggcaaatctacattatagatctatttaataagagtcattcttggattctccatcccaatttcttaacaaacatcaaatttaaatatttatctgttttgaagttagtctagatctagaagtggccctttctgatgggtgggggtggggaggggagctggcttgactcttgccaggcagctcatcctgcctggtgttggctgccagcaagctgttggcaataagtgcaaatccttttgtcttgttaagaaattattgttaaagatgcagtagtgtataaagtccgctctgtcgttcaaatgactgtatctctggtgataactccccacactcagacaatcttggtgtcctgttgaagctaataggtgcaaattttagtaggacttttaagaacccagtaccccatatttacaagtctttctatgtaatcaatttctttaccacctgccctaaccctcccccaagcagtcagaagtctggactggcaggatgtgtccccgggatcttcatggcatctgctcttacagtcaggtttctcagtctgggctcaaacacgacagtctgacatggcagacctggtgctgcggctctgtcatttgcatggctttgtgtgtgttgtcttatcttttgtgttttgctgtgagctacatgactacttgagcatcatgcagacacatgaaggtatgttcatagctgcctgttttttaaagtcgaagcagctcagactaaaaggggatccgctttcaggacctgctcaagtttccctgcgacagcatcagagctatttttagaggagtgatcaccaggaagagccaggacagctgcattcaacagcagccgcagagacagagggtcgtttgtgggactgcagaggttgagcctgttgatatgggagacaaaggggcatgcatatctgtccttcagttaggtaggccacccctgttcagagcccttgaacctttgcagctgtgggagtgttaatttagtgcttggttgccttggctctgagtccagccagatgcagagataggggccgatggcaggactgccctgcagagtgcccagtctgagaagacagcgacttattctcactcagaaacagctaccagactttcagtgtttgaattctcagttctcttttgcttctgcagacgacaaaagtcaacagatatcaggaactggctgatgcatgtgtgcgtgcatgcgtgcgtgtgcgtgtgtgtgtgtgtgtgtgtgccttggatcccttactattcctgcttgacacttttaagtgacgtcaccattctgaataaagagcacttagcaaaaaaaagagggttttggtaactggtctgtatacttcatagagctagttagcattcttcctttttattatttgtttttgtttttgggacgggtctcactcactgtgtagccctggtgtcctgtagcttactatgtatgtagaccaggcactatgtagactatagactcacagagattgcctgcctctgcctcttgagtgctgaaattaaaggcttgtgctaccataccctgctccctccctccctccctccctttctttctgaggcatttgctatacacctgctgttgccatccacttaagagtgtgtgtgatgcatataaagacagactctatctactttatacatggagcgtggagaaaaggagacagcctggaggggcagcattgtgtagaatgaacagagcttgcattaaggatggggaaggcagctgctttaagtagagggtagctgcctagagtagacactaaggtgagagcatttacttgtacttgggaggccacaagcagcctggtacccagagaatgaaagagcacgaatgtgagggatgccagaggaggaagccagagcaggtgtggcgctcagcaacctggaagtggcaccgatcagggggagccagaggccggtgcctttcatcacctgctagatggcctggactatataaaaggtaaaaacattgctaagtgcgtgcatggatctcctgtgtaaggttcagcagctccatgcagttaaaggatgtcctacatataaaggagcttccctagaaaagctaagagcaacagcaacggagcagtcctcaaactgaggccatgtgactcccgtgacgaaggcagaggtggagagaagcatcggagaaggagggcaggagagagggagaggagccacacccttcaggaactctcaggttagagttctgttgagaagggtgcatcccacagccagttagcagcagacgagaagtagaacctacacatcccgtgtcaggaagcagtctcagcggaggccacaggagcctgaggttttcctgagtaggttgaaggctttaattatgtggactttctctgatgccataggaattagaagcagaaggaacagggaatagttctgtgggaagaataactttaatgttccctgcaccgtagagtagctgtgattgacaacaattaattgtgtgcttcaaaatagtagggaagattttgactgttcccaacacaaagaaatgatagtgtgtgaggtgatggatatgccaattacctggctatcatctttgcctgctgtatacacacatatgaaactcacacgcaccacagctattatgtatcagttgaaagaaataaaatcaaaactgaagaacagaatatccagtgcagccacaccctccttttacacctaggaaaaatgtctggagaagtgttcagtgtagagctttgtagcgcttcagcccctgaacacgccaagaggtctctgcccctctgccctggggagggggtgggggtggaggggtattacatattgaacttaggtctccctcaggtctagccaggtgctcttccgctgggctttgtatctagtccccttttgacagggtttcactaatttgcctaggcctgccttgaagaaactttgtaacacagacggactttgcggttacgatcctcctgcctctacctctgcaggagctagaattacaagcccatgcccccaaggcccagctgactttacttttccaaggctatgttcattgtggatttacttctgccatggaagtgtagcactgttctctggcttttgcttccagaaagggggtgggggtggggtgatgtttttctgggttccctgggaaagctgcatgctgttaggagtgagatagatacacagggggagtccattgccctggcatcagcccctgtgatgttggaagaggaccagtgtgacttttggggtgcagggttcctcaggcttactggttgctgactctggaggcgcctggggaacaatcacaaccaaatgactataagaacggctgtcaggagacacctggggaggaggacaagggactgtgtcactctagtgcagggcagcagctatgaatgtgccgggggaggcatccagacaaaggccagtcagtgccagtcgcaagtgtgactctggcagacgtcagtgactacttttcaggaatttaaatagatttgttctgctttcgagccagcttgtaaataagtccagcatcagcttctacctgttcttgttcctcaggaatccactttggggagcctgggctcccttccctgatgacacacttaggcagggctcctgctgtgtcaccagcttcccaaattaccatttaattttcctgtcatctttggtgggtataactatcaaagaaactgtctccaggagactaaggagaatctctgttttccagacaaataggccgttttcctcacctgaccagcatcctgaggaacaccaagaataagactgtgtcagaaatgtggatgaattaaaatatttagagctctgatcttttcaaaaactccaaaaataggttctagtggcttctgaatgacagaaatatgtctttctttgaaagtggaattatttcaggggagacctgagagggtggcagtaatagtcccatccaacatgtggtggtgactgcctcaaaccagttctggattctatgttctaggcctggtccaaggacttagaaaatctgccacgatcaaattggggatgtaactcagtgctgtctaaagccttgggctttctctgggaaaaccccgtggttccacccttcaccattgccaagacctcgggagaccgtggtataggaaggtgatggactggggcttcctctgtccttcagccccagccccagccttatgtatgtgagtcctctctggggtcataacggcctgagtggatggcatgggaactgcccccttcagcttgctccaacccagagacttgcagcatttgagaaatgcccccttccccacctcccttaggtacttaggtttctatgttagtggttactacggtttggccattgtgtttatagtcacctctgttaatgacctggttccaggggttgctgttgggcaggggtagtgatgatggaagtttgttttatgaagtgaaggttggttccacaaagtatttgagatgtagtatacacctgccgttgccatctctaccatgagacagacccctatggctaagggttgccatgtgtcatctggactttcagcctcacacatgatgagctaactggcccttcttcatcaagtcagctgcctcagttgtctcatggtagtaattacttttaagctatgctttattagcgcaatgaagagagtgtattgagcggcttctacttggggttgtaataataaaccagaatttactgagtgtgtgcaggggcccgagcctatgcctagtaagtaagcctagtaaaggagttagcacattggcagcgtctgtaatttctctggtggcagcagggcttgcagcagggaactggctgggcagttggtatttaaaatcttaagtcaacagcagtactgttggggcttagagaagagtcacgtgagtcacaagagaactcacttcaggcggaggggttcttagtggcttctgccacactaaagggacaccagaagtttattaacagtctggtcatggaggggtccagaagtgactaactctccaagcatgatgtgccacggtcatcctccatctatcccagagtcctctattttatctgtgtgtgggggcatgtttatccctgtctcttggtggacaggacagtttctttattgctctgcctgcattcagggtacgggtaagtggtcgaggggaaagagtaggggtgggtatttcatttcagtagcctggaggagtagggatggaggagcaaggatccctgcctgcttagcgaatggctgctcacctgctgatgtcctgtttgttatagtacaaaccacttgagccatcaacttatcaagagaaaaggcttattttggtcccgcttacgtgggttccagagcatgattggtgggcccatggctttcaggccagagaaaagcggggagcaagtggcagggaccattgtctttgggccaggaagcaggaagggggaaattgagaagaccagggttccacaattcctttggaacaagttcctgcctttaaaagtatcagtgcccttctaaattgactctgggaaccaagcctccaagacatgggttttgggggacactcaagatctacattatatccacccatccacccatcttccactcatccatccgtccgtccgtccatccgtccgtccatccattcatccgtccatccatccattcatccgtccatccatccatccgtccgtccgtccgtccgtctgttgtctcccacctattacccatctatttatgtcctgtattgtctatcatccgtctctagcatcattatctataatctgtcattagtctatctgttgtgtattgaagtgtggtgaaatgcgcatgaagtttgccatcatgaccatttgcaagtgtaactcagtgtagccactcaccaatgtgctgtcagtaaccatattctgcctctagaattacttttctcttgtaggactgaaataataaccatcaacagccactccccagggcctttccacccatctcccgtcaaccagttctactttctctctatgactttgatgactccaggcacctcagatacatagaatcatgtagaatgtgtcttttgtggctggctcattgcacttagcataaggtcctcagggtttatctatgttactgaatcatcttccttgagagaatattccctatgtgtgttctgtgtgtttagcttatccagtcatctatcattgagcctcttcctacttcccctacccttgacccctgttgtcaataaggccgctgtgtcacatgatgaatagatacctagagtccttgcttctattggcgggggtggggtggggcttatatgttcagcagtagaacaactgatttataaggttttctttctgtgtgtgtgctgtgtgtatgtgtgtacacatgtgggtacaggtgcaagtgcacatgtgtgtgcatataggccagaggagaatgttgggtgtgtttttctgtggctttctatcctattcccttgaaataggacctctcattgtaccttgggctcactgtccagtttctctcccaggcttgtggtcagctagccccagtggtctccctgtctctgcctttcccgaccccaaggttacaggctcaactattcagacatggctcatggtagggagggggccaaactcaggttctcatacttgttgggtaggcacttcacccattgagccgtctccctagtctttgatttgtgaggaacccctgtgttctttccattgtgctgtaccctgttaagagtaagacccttgagctctctggtggcattgaccataagcctccctaactgcctggatggaccttgccttttcgctgtgttcctccttcatgggttgacatggatagacctggccatgtacgcacagtggactcatgtctcgaatgctcccggctccttttagaaagtgtggggttgatccctgaggtctatgccaggtgacttctgtggaaaccccagggtgctcaggagcttaagctgggaccagaccggccctagacttggagttaggaacagctgctctgctctcctctgccaccggttcagttgtgattagtaggttcatttgcatctaaaaggagtagttttcttatcagcaccattgagttgggaaccagtgtactcccatttatgtagagtggcccatttaaatggggcccattaagcagtaaaagtaaatgtgggtgttttacaaatgcaaatacatcatgcaaataatgtactttctgctgaatggtgccatggttttcatatgtaaaattagaaacgtgtagcactaagataatgataaacacctttgcaactgttcagggagatgtacagtgagctggtgcgtgtggaacccagccctgggtttcggcagcatttcctcagtgcacccaaataggccttccatactatcaaaaatgtacatgtacttatctagttatttatatattcctgggtaatcaagaaatcacagaaaagaggagttcaaaatcacctagcttatcacttaccatcagtgatgagatctataatcttctttccatttttcagtatgatggtagggaaagaagatgtggtatgggcatgctcctttgtaaaaagatttaattatagctctattagagatttgtgtttaatccttagagcttgagtaattgtgtcggggagatgcaagcagcattctgccattttcttctagtagaattatgacaactgtctattgtgtgcagtgacctcagcctagctctaagtggggagtcactgttgaacaatgcctgcacgcctgaaggatgaatgaaaggattaaggcaccagagtagagagacagtgtggactctgctttattcccggagggactagatagactgtaagtgccagaagaattcagagagctcatcgggttgaagttgtgggaaaatgccttcctggggtctgaaatttaggttgatccttaaaggcagcgtctgctgagaacatagacaagggcaggcaaagcagagaatgggctcagatgggtcctaaaggcatatagtctgtgtgttaaaggcttgccccaggcaacatcttaaggacagcgggaaggtgttgggaaagggtggcaggacttgtgagctcacagcaggacttagcacagactgttcctgccttgccctgcgagcttttgtttccgctgaagtcttcaaatgcacgattacacagcagttcactatgtagagaggacttacacaaatgttgacatggaacaagagttccagtgacacccctgaccccagcgatacccctgtcagccccagggctggtgtgcgtgtgcacactcgctttgcagggattaggagaagttatgcttggaaaatgactttgagggagggagagcctgggtggggagacctccgtgatgttagggagaacttctcaactacacaaaatcagtgagactacagaagcagaggagggggaggtccaggggacattagggagagtgaacaggaacgagcagaggaagacaacggggcagcatcagcgctagagactccaggagtctgacagggaacattttgcaagtagtcacccaaagcagatttgttatattctctattgttaggagggatgcagagttcaagtttaatctttcatccccaccgccaacatctgaaagttacaaggcaagtcctcagtgtgtgtctactaaataaaagattcaagaaaagaaaaccacaagtgtgctgtgtctgggtgtcgaacgtctcacgtgagaagcaatgacagatgttctgtggacgcctccaaagccatgagttggtgtcctgacgctctagtacctcagaatatgaccttgtttgaaagtaaagtccttgaagatgtaattagctgccacaaggtcctgtttcagggggaggaccactgatccaataggattggcctccttacactcaagaggggtttcagacagatgtagagagtggggggacatgaaagcagaggtcggggtgacagttctagaaaccaagaagcacccaggtttctagcaagctaccaaaatctagcagaaaagactggaaagtaaagggcctgagagcgttctgaggataaaggtgagaaggattttttagagagataatgctgcaacaatggagactttatataaccagaggcaaagtcctgttacttgagcgggtgggaggtgaggaatggggaagaggactggctggtgagcagtttccattttcttcctctttttgtactggtctcctagaatctcccaagcttggcagttcttaaacaacagaaatttaattctggggcctgagaaaagcccaaggtcaggttcctcatcaatgaatgcaagcttcaatgtggtagcagtctcttgacatgtttatagttacagaacaactggaagccatcaagcaaatgggactattaggtacacatactccagcaaactctgctacagtctcagatggtacctttgggtttctggaagtgagtgttctgttagtactttctgaaagggtttatcaaatagaaggggactggctactaaggggctgaagaaccaaggtcatttggctacagacctagctctccaccatcaccaaagctctggtccatccatttgcatggtaggacttcaatagggttctatcgtcccccccaaaactaattgagagtggtgagcaggctatccccattgaaataaaatgagacagtgtgtctgtcccaggccactgtcacttgtcagttgcttatgggcatcttaggctgtagcatatggggacatgggtggccatataggctgtaggctctctgtgggggtctccagcaaccacacttgcttaggttacaaagccactccgtttctcactgtgatctgtgttttgcctccagagaatcttgccactctagtgcttatgctctctggggtcccagatggtgcttgtctgtctggtcacttcagtgattgcctcctgacagttgtcaacctccaaacactggccagccctgggaggttcccacctgtctggttttacgtttcggaggaggaggaggaggaggaggaggaggaggaggaggaggaggaggaggaggaggaggagtcgtctttgaagctgtttgtttgctattgatgttttttaaacaattggttgtgtctggactaaggaacagttgcatttggaaacttttcaaacatccttcaggaaagaaggaagctgagaatcccttatctgtcatgggatgcagagaagagccaaattccaagagcccaggatgcttgaggaagggtcggcactgagccacaactgcctcaagagttgcagtatggccttgggtttcttggaatgtggggacttctgtggtctgcagatggatgccactctttgacactctcgtttcttatgtgctgcacacaatcagttgccccacaggttacaagcatacagttgaggcttgggcaaattaaaaagatctaaaatgttagaggctgcattttaccccgtgcactgtccacagcacttcagataggaccagctgctttagatactcccattttattgacctttcctccccaggtcctgtttccataactttagtttcttaaagtcttttttattgtttaataattcatacacacataaaatgtgttttgattaaagttcctcccctatttcctccccttcagctcctctgctattcccccaccactcttccctcctaacttcgttggtatgagtgtgtgtgtgtgtgagtgtgagtgagtgtgtgtgtgtgtgagtgtgagtgagtgtgtgtgtgtgtgtgtgtgtgtgtgtgtgtgtgtgtaacccactgagcctgcagtagcacttcagttagccattctggctggcttgatctcatacacatcaccacagcaaatatgtccagtagatagatgctgcagttgcctgctccctctggctcttactgtcttcctacctactcttctgcagtgaccctggtggctccttttttattatgagaggttttgaaagtgtggacagagtcctgagacttgtggagatttgcttacacaccaagtgatgattccctgacagtaggggtgatttgttacccccaacttctgtggctgtgtctgtctaggcactcctactggctgttacaatttcacagacttaacatccatctctcaggggttgtgttagggtattaggtaggccttgcttctccattatcttcctggcaatccatccacagttagtttaaagagatgaattccaacatgcaacagaaaaattcagtggtgtgtgtgtgtgtgtgtgtgtacacgctgaccattttattcctggcaaaacattcgatggtggatgtacaaatcctaagctcagacccccccagaggactgaggcaagctgagccagcctttctgtgtgctctgggccatttcggtgaacagcaagggaaggtcagagggagtgtgaattgcccctgtcttcctgcccaacactcagggcttcaggtcaagcaagcgtccatgccagagcccctctgtatccctccacatcacttggtactctttctccctgactctcaatttcataacttacggtaatactcatgtaacataaagtgtaccactgtgctcatttttaagtgtgcctaactgtagtgtgaagaccactggactcactggatagccagtctccataactgttccccttgcaatgccaaaattgtgaccattaaatactcactgtccacacccttgtcccagcccctgtcagtgccttcctgcttccatctcttagtgaccgctctggagacctcatggaagcacactctgacagtgtggtcctctttctggcgttaatcatttagcattccttaacattccctccacactgaagcatctcattctttgtggtctcttgttcatgtttggcatctgggacctcagaaaaacacacttctcttagtattgggctcgtaaaaagtccagactggtgaatacagagttgggtgtgcagaactgcctgagctttgggcttataagatgcccctgtttcaccacgattgaagctcacgtgtatagggccgacatctgattccaaggactacctcggggccctaccacctgttgacgcccagcgtcctctcgggagtggagaaaagagcatgcggcccaggagtggctgaacactgtggcctctgggggacgcttggtggctgctttggagaagctgtgctctcttggattttgttggttcagcaccaggctcagcaatgttctgaaatgccagttccgagacagactttccgacaggcaggaccctcttaacctgttggcctgcatcctctgtcgctgagttggtccctctgatagtgctgaaggtcactgttagcgaattattgaaatgagacatttgcagtgcgggccttgtattgtttctgctaataggagcccactgtttttctcacatacggttagtcagatcactttttctagccagggacttggcctaggagagatgcctaacaaaagaccgtccgtggggaaggatggctgagttgtgtctgggaaggcagacagggcaagctggaagatgaacaaggagaggaggcaggcattctggaatcccagggttgctcttgtgttgactctagcttagagtcccataacctcccaggactgctcacctctggaatgggagggtgatctctgtctcctgccggccacacagaaccagaggaaacggttgggctcagtagctgaccactctgctgtcctagtgatcagcagtgtggggaccatggtgagatgatgtgaacccgttcagttatgggtccttctcggccgttttgcatagaagtgacaaccaccagccacttgtatttacaggacaaggtcaggagcctgttcttatcacgtgtctgccattccatccctccactcttgatttggaaaagggggcaggaggtagcgcccctcccaaacacaacaccgctattttctctgaatggctgcagttactgtgtgtttttaaggaacttcatttggatgtatttttagccagctttgagttctgaaggccaatcagccagggatgcctccagctgtaggagtaacagtcaggtttgtactttgccagcccgcagctggagccagcaccattagccttcccaccggcatttcgtctctctagacggcatcagaggaaagtctgcagtaagttctcagaggtcacagataggagtcttattaggttttttttttctttttctttttcttcttcccaggcttttgtagcaccaaacacagttctcaataggcgcttgataaatccttaaatccctaacagtcagatgatatcattttgagggaaagaaaaaaatctaaaaggagcccgtggaatatggcacctgggagctcaaaagctttgcagttagtgttgggggaatgcccggctcacttagctgctagaaacacgtgcacaccatctgcatgcactcacacacgtacgcacactatgcacacacctctattctttgagtatagcaagaggccattgcaggaccaaacctccatctacctcctgaggacagaccagagggacagcagagaccagtgaccacagaatactgatgagtgacttaaggtgttaaaggggtgctatagaaatcctccggtagatttctatcatacagggaattttccttatctaaaaccactgggtttatctgacctcagctccccacatttgctccatcctgggtgtctgctcggttttcagccaaatcaaggtcaggataaaaaggagatttgggtggcagtaagctggatattcaggcttctgcagtaatactcaattattgaattctccagaagcattgaactcctctatataatgaagtcctcagtttttaaatatctttatgaatcagccagttcagtgttggcagcagccagcttgctgtttcctgctttattataaagataaggtggtagggctctgagaacttgctaggctggttaaacgccagcctaaacattttaacgcaccttgttcttcttgactgagccttttaaagcgctgccaaatgccataggaaaggacccacatgggagaggagtcagcttgccttcactgtcctgcagccccgagaccccgcccccagcatggtctggtactgccctgtgcacctccttgtcacccagaagcctcactagccaaggctgagacccaagactgcagggacacttgatttccaatcacttttactatagtggatccaaagcaacgtaaaacaaaatctatgagcattcaagtccctaggacacgcactgctcagatctgcaggttctgctgagacctccacaacagagcaggtgctgcgctaaagtaggcgagaccagtttctggatttccagtacatataagggttgtatttaacatgctgtatgtacagtctgttgtgcttgcagtagtactacatgtaggtgtagaaacctcaattgaaagctcctttgttgctaaagaatgctaaggatcatgggaactgaggacaggggtgctggtacagttgcttctcacagggtgatcaaacctataattcattaaaggaaaaaaaaaaaaaaagacaaagcaaggtacgtgaaagtggagtgcagaaaaaacgagatgcccgtgtgagcaagcacagttgacattaccatgctatttaatagcattttatgcggtagcatttttttctcttttctaactcctcctcaatcatgtacagtgtccctatagctgtgacagtatttgtacctctggtaatgaaattctggcaggcagaatgcaccggcatcccccggccttgttaacagcatgcctatccttcacagccagactgcggctgactactgaagagttcttgtgttcactcaggggtgtgtgtgtgtgtgtgtgtgtctggctggctggctggctggctggctggctgatggacttacagatgtatctctttgaccaatttcaatttgttaagtgttgaatctgattgatgctacatcaaccaacatcatttgccatatactattttggtgagagtaatttaaattgcctcttgggctggatgcgctaatgtgaaccgacggctttctaacattaatcttaagcgagtccttgattgaggataaccccctttccacttgaagggttttttactaagactgggcagctataaagttttccactgacgactgtcttaagacagtgaaaatgctcatgtagaaatgcagagggtgccttagtgatagatcgaccttgctcatgttcttgctgctgctgttatgacaatgtgggtggcaatccatccaccaggtgttttatggggtacagagtgcaacattttaagccaagaaaatgaaaacaagatgcaaaacaatagacgagggagggcgggagcagagcaaggttacatctgtgtgaagagggtttgtaagaaagagggcaaggaaggccagcttcgctatagagcagacaagttctgatgtgtaaccaggaggtgccagcggccctggtcagtcacaagactcggacaagacttgtttgccacatacttccatgagctcacgagcaggagagctggccttctgtgctcattgctacctaccacctaatcaagtcagcacaccgcatgcatttgccaattgcctgtagatgatctcagtggccaggtgtgaccctagccaagactgatgctttttgccttggcgaatagaaagcctgtttgttttccacctgattgtttttgaagcacacctggggaagtgtttccaggccaccacaagtgaaggttggaggaggggccgccggggaaaggagagtgagtgggtccctgctctcaaagtctcacgcacatctgtgttctcttccagcacatcaggtccacccatctggccgggcagtaccttcttcaagagaaacggagccctcctgcaaggtaggtgtctaggagctcctgttcctcctcctgtcctcctctgtgcatggtcagccaggagcgctcctgtctggttagcagtttctgctctctggaggggcgtgactgttgtgcccagggtctgatcgcccacttcttcttcctgctcttgtgtcttggctactatgaattgagtgtttgaaaccaggcctctgtcccaagactgttgctctggtggagtcgggatggtgtgacagttggaccgtgacagtagtgcacactggctgatgaaagcaaactcttagtgtgtccaacacctgaggtggttgaagctggcttgaatgttttgacactttagtcatcatggagatgcagatgtcccttgctgtctcctaacattcctgtgtacccgaaaggttggctgcagtttgtactgatgctccaggaactcctcatttgtccctagtgtcattgctgagggactctgttgaccgtgttcccgtccatcctcagctgcctgtgctcctctcaaggaactcaaatggtctttcacccctggttttgctgttacattgcaccgcagtgccaacggtgaagattgcatggttaaaacagcggccatgcgtgcccaggtcttttagaagttacctctgggttcccactgttgtggatgtccgctctgtgggtgagctggtcctcagacgtcaggggttgggaatgggaaggacgctcagaccctgaaagcatgtactcagggttatccaagagcttcagcccaagggctgtcgtggccgagggacttgatgccttttggtcggctgtttggctcgtcttgtaaaagaatgcactgaagcgagccatgtgtacgaaggagtcaaaaaacccctgtgcttaagaagagatatctgtcacccggtttctggactagttccagcaatggtggcagatgtggttcttgtttcatggaccacacggtttcatgctttttaatagtccatgaaatgtggagcaggaatgtttctgtgtttgtcgtgtgcagataaagttggctaaatcctcccttgatagccaccgtgggtgccccttgtgtcctaagaaaggaaaaggaattagcactaaggtagcaagcagtgagggggccgggcttggagttttctcaagcggagttcagtcagcggcttctctgcttggctacgctgatggcctgggtatccttcaccattgcgttgtgtttggagctgggattttgtttgcttagagctttttcttacaggattctgttctgctctacgttaggtaagactctctctggggatgaggtttttgggtttgtacctatgatacaacaccatggaaagagtcgatgatgcctaaagctgggtgaacgggtaggttctgttccatgggtaggtgtgtctttttcttaattcatgattttaaaatttcatgattcctctaatacactgggaaataactagtacaggtttcaggtgtacattggatctatattcagttgagtataacatgtgtctgactgtctgtcatctatagtgtacgtttaaacaccatagaaatccaagtttagagctatgggcagggatgtgctagcattgatttctgtgatgttttcatcattttgccctacctgtttagagtctctgagacccctctattctgtttagagtctctgagacctcttctgccctacctgtctggagtctcttgagatacccgaccccccaaaaaaatatcattctcaggctttaagggtttcccaaatggaattccgttttcctttggggcttacagggctgtccagtagttgtgaatgcccatagtcagctttctgcctaaagatactgggatgcaaagaaggggtctgcccctccacacctgtcagaagctcacgttagaatcttatctaatccgagtccactttctcagcactatctcctctacccttgtcttccctctggtaagtgaaaggtacatcttcagactaggaaggaatccagggtcagtgatgatgtgctgacagcatggtggtgagagtataggatgcaggagtgggaggtgggcagctgggctgtattgggaggaggaggagtttgaaaaagaggggcatcacttcctagggcaactaacacttgagtaaggacttgaaacagaaggaggggtgtgtgtgtgtgtgtgtgtgtgtgtgtgtgtatttgtgtgtagtgtggatgtggtgtgtgggtgtgtgtgtgtgtgtgagtgtggatatgggtgtgtgtgtatgtgtggagtgtgtgtgtacgtgtatgtgtaattcatagatgtggcattgccagagaggaaaaccacaacagcacatgtcctatcagagggtaagacaatggggacatggggccagacacgtggaacctgactgggacatggcaagtgttccttgatggaatccaagtaaactgctgaaagtagaaaatagtatccgcataggtcttcacctactataccattgctgagcagcgcaagtcaccgtgaagtgttggtgctttgtccttgttaacgtggggctgatggcatttgcaccctgtcattactgcccagtgtcataaggccctataccttaggaaggatcagtattgaaaagacagtttctttttttcttgctctttggagatagtcttatgtagcccaggctgccccagacttgctatgcaataaaagataaccttcgacatctggtccttctaggactgcaggtgcgcatccccatgcctggctcttcaagggcagttccccctgaaggcatacggcattcacaccatcaggaagttgaaaaataacaaaaccaaacccaagtaagggcgtcctgtaatgtgttctaatcccgtggaaatgagcacctgaacctgtgctgagaccagggagcccgtctcgtgtcctctaacacttgctgggcttgtgagctgaatggcacgttggtattttctagcctaaatcaagccagtaggaaggagtagctggaagtgctcaaggccttgctcagacctcaaagttggcaccgaccatcttcaggttcaaaatcataggcaggctgggctgttggtcaccccggaggagagtactggggggagatttgctttggattatgtcaggcagagcttcttcacgtaattggtcattttgtcaattcccagtgtttattctgaatgccatgtagtctgtgaaagcggtttcagtattctagcagttctaacggactagagagcccttcaggttttgtacaatagaaaccaagcagagactcccaaggggacaagcctgttgtctgacaagggacctgggcatctaaacacaagtggagtttactcagaggcttgcaggggtgaccagctgacaggtgtttccaacagaccccgtagctttgagtttcagtttcgtctgtgtgtttcaatgtttatatatataaatacatacatgtatatgtacatatatatatatatatatgtgtgtgtgtatacatatataatatgtttaatgatgtcttattttctaaaaaaagaatgaagttctttaaggatttcccttcccatctccaagcattacaaagttagatttaggttatttcatttaaaggtcactgtggcttgaattattttcatgagtctgtatctcataattaaagatgtttctcaccctggtctgccccttcacctggcctctgatggtttctcaccttaaaaggacacaagacacccctcaccctatcacccttcgcctcctgccttctgctacaacttggggcaagctgagcctgaccttccctgctgctcttcctgtccttcgtaggcctgatggccctgaacttgccagtgtttgtttcatgagaagcacctcccgcacccatccacactaagctacacctccatttctgtgtcagactggagctgtccaagggacgccctgggccagtctctcagccgctcagcccagcttctagtcagaccgaggggaaggcctgaagccaactgctaacagcactgacaagaactctttctcagacctcccccatcaacaacctgacaccctgcctcctctggcttcccctcaccttccttctccttcactctggctagcactgggccactgctatcattaccaactattatcaaaataagtcattaccaaatctgtgctcctagcatgcagtgaatgaatcaaagcattctatcacacccaacaggtttttctttcttggctgctgacagcccacaggataaactaatgaaatggaaagaaatccttagagacattttcagtgcacagagcaggattaagccgccacaagccaacagcagaagggaggagcagggagacagaccagttctttgctggcagattcacgttgtctctgtgtgtgcacagtgcatgcagcattgggaaaccatgcatgatgatcactgctctgcactgctctgcggagtgggattatccatgtcctgggttggcttcatgctggggctgctcccacctgcccaccgcagccctctgctgccatagcccggccatgcggttcactgatagatagatgagggaattcccacttggttttatttcatgccacagaaggctcgagggtgaatgctcagaaaactcaggttttgagtcagatccccaagccctggtcctcattaactccatgccttcagtcaagatgcataggaaacgccatgcagtcttcagtgtaaactgagaaacgtccctctgggacagtttcctccctgaattacagccctgaccctccctagcaatgcctaaaaatcaaaatgaacgagggaaaaagtgtgacctttacctgtctttggtggatccaagaagatgggcagaatgtgtttgccagctgcccgaacaaccagatatcaaacatgatcgttcccgaaagctctctcagttcgtcatgtattacagattcagacaacctagaaagaaatcttggcttcctaagcaagtggcttaacccttgtaatagtgtgagttccattactatagcaaaatagctgaagtaggataaattgtaaagaaacgaggttgttcacagtctgaaagtgtaaggcacagagagccagcccttgtaattcttcctccgacaagggcctcatgaccctggcattacagtgataggaacacgcagagaagaggtcacatggtgagacaggaaacaaaaaaaaaagcgttgttgttgttattattattattataatcttaggtgtatggttgttttgcctgcatgtatatctgtgtaccacatgggtgcagagcccacagacgtcaggagagggtgtgccctggaactggagttacaaatggttgtgagcagccatttgggtgccaggaaccaaacccaggtgacccgcaagagcaatcagtgcttaactgtcacgccaccactaccgtccctgaggggctcactgtgttcattttttggcaacgccctttcctgtgaatctactcctcaggaccagcattcacctgttcatctcgtctatctccaaagggttcgctcttccacacactcatggagaaacaccacaaaatcttcccaggagcattcttgtcagtttccactctgaacgtcagcccagccagcatctctttgctgatcctagcaggattcagggaccactctttggcactgagttcttgactccaagggcccgcatctctggttttgttgggttttctgagaccctcccccgcccgcctgtccctttcacaagtggcagctcgccctgggctttctggcatctttcatcccttccgcaagctgactcttttgtccactgtgcaaaggagggcgttcacctcttgcataaatctgcttactgcccccaggcgtgcccactaaaaaaccttagcacttacagggagggggcagcccctctccacatttgccctcagatgcccactgccttctgttctccttggcccggggtagactctgagtcttcctccgcattgtttgtctttttgtcctgcagtgaggaaagctttttctggagcttcagtaattgtcagcgtgccggtctgtttacagaggtgaagttggaggggtgctcctgggctcctctaatctttctctgtgtgctttggaacatgcttttatgctcattaaaaaataacaaggaagtacgactttcaaagaggccgctagttcattttgatctttgctggtccggttatttatttattttggaatgaagggtcttaggtatgtagtatacctaagacttgcaatgtccatttacctttcaagtactgggattgcaggcttgtgttagcatgttcagttggtatatgatggagactgaaggctttgagtgtgccaggcaagagctgagccgcaccccccacacctgtgagcccagctgtctaaacttcccatgccagtagcctgctgtacagtcgaaggccccttcagttccatagtctgcatttccctgcttgaccctaactttagctaatctccagacccctgtctctaataactgtcttcatggaagtctcatattgccctctgagaaagcagccctgtgagcagactgctgagtaagacgttatggccagcaaggctgaggacaggaaattgaaaacatttaccagagacttcctcaagaggcaaggcatctgtttcccccacttcccctctgtgtgtgtatgtctgtgtgtctgtctgtcttttgtctgtgtgtgtctttgtgtgtctatgtgtgtacacacaccgcacatacttgtaggtatgcccgtgctgtggtccaagtgttgagggcagaggacatcctccagtcttcgtacatgtgtctgccttttttgagacagggtcttttcacctaagtacttcaggctagctgacctgggagctgccaggcatcctcctgcctctgcttttctgctccagtaaggggcctgcactgagctcctggggtttgaattcaggtcctcacacttacacagagaattgctttacctatggagccagtcccccaacatacactttatgattgctaaagattggatggagaatagaaagtcctagaattagccactggaaggttagtacaaagaataaccctactgctgagcactgatcttacttgatgttcatttttatggatgtaactttagactaaatacatcaataggaatgttttcttttagattgcatagcgtttaggaatgtttctgaaatctattaaattatacccgtaacaagactatgaagtgtagagatgaaacagctttggatcctgttgccataagtaacatgtgtcttatcaaagagccctggctttaagtacaattggaaaggaaaagccattccccttgaagctctgtggaactgctggggtggaggtctagaaatatttttgtaaaattaccaaaagacttaaggataatgaagcttttaggatgtgttctgagcaagctgttcaaatgatggtttcagaagtggacttaaaattaccccctctaagcttccgaagccaagtttatatccattctttctgctccctgtgggtttccttcctaagcccttgccaagcggcaggccttagggttttcatatctgtgccatcacgcacacaatgggatgtgtgcctacatttgtgtgcacatgtgtgtagcccaggttcttaagtggaatggccttaaagagatcgttactctcagtggtccttgcagcctgtagaagaaagttgcaggctctccagatgtgggtaatggaaccctgggatgacatgcccctgccgccccaaccatgtgccctcaagcagctcatctgactggtgcaggcctctgcttcctgcccagtccaaaaagcaagagtcccaacttgatgaacttggtgagaattaaaaggcacagcattcgttatgttcacggtaacatctgtgcagactcctgcagcttcgtataccttcaccctcaagcaacaacaacaaacattctcccccagttgactatagagatgcctttagggcatttaaggtcactttcaatctctggtgtattgaggctgggaaagactcaggctctcctcccaagagcatcccatgcagttcttgccatgcttgaatgactgtggtcccacagaaatggaacaaacacaaagaaggttcccctgggtctcactggagttgcctgtgatctgtagggcttgttctttgacttagtgtgctggattatgcagaataaaaccagacccgacaaaggtctgtttcagtaaacagggaggtcgagcattgggaagcgagagccagctacttatgtggtggaaagaaacttaggccatccttgaagaggggtcccagtaggcctgtcccctccctagcagttaccaaagcatacgtcagctagtgcttcttaggctgtagatggtttttattgggggggggcacattgggactctttatgcagccaaggctggactgaaacttctggccctcctcccttagcctctcaagctccgatttcccaatgtgtgccattgtgtcgagctcaaacaagttttctggggtgtgctcaggtaatctgattctaattggacaaccaattannnnnnnnnnnnnnnnnnnnnnntgaggcatgtacaaagaacagttctatattgaatccgtcttgttctcaagccgtgctcttcagcctcttacttcacacagcatgggaatgggttgaccctttctctgctggctcacaggcctaccgtctgtctaccagtgcttggaccacagctcatttctaatcgtgtaggaccaccgtggacctctaagtcctacatcagagcgtttctgatggacactctctggccttggcgacaggtcgagcgtagcggcatggcccaggccgggccagggttgcactgtactatttatttttcttgggtttggacgctaactatcatcaactaactaccctgacatccactacaccctagtttagaaccaaccagtgtgattaaaaaaaaaaaaaatagtgtaaacacagtgaacctgggataaggagctactttatttgttcctgctgagacaaggtaagcccactttcttacctaggccagtggaaagtgagcttctcttgtgttcaaccaatcaaggtcctctaaagaaacagtgccagttaaactaatatatatatgtctccagtgacttctgtgtgtcacagagctgcagttctcttgtagaggcctcctgtgtgactgtcactttgagtgcatggggcgccttccaggacggcagcttaagccggcaatgctaggaccattgtccttaacgagctctaatgcccctgtacccagttatgcacacccagttacagccacggagcactggttgcacacgcatttgcttcaggagacctgagcagcatctacctgctctcgcaggtagagcaaaacaagtgcaaatcacgtatttggccaaaacaaattgtgtatgtgtgtaaatgaacatgtagctgcaggtgtgtgccggtccatccatgctcacgtgtgcatatcatgtgtgtatattcagaatgattgccaagttcaggcctgtgacgtagaggctattttcagcagtccccgttctcttcaggtccactgactcccatgtctgacaaatgcaatttgtagctagatggcctgtgtagaggagaatattatatctgccctccctgtggctcccagcccccagcagacaagtgtaggagacggaacacatctttcatttagcatcttttcttccccttattgccatttgaattcatcgagaacagttttgagtctcattagaggagtcttaatttaaaaattaagttgggaactagcaagtgaaattgaagaggcaatacctttggttctgaactgagttttcattactcagttactcttcaaattatactgatttcaggtgtgaggtcccccccccccccacatagattgggaagaaggctttctagacaaacggttgtctgtagctctatttcccgctcatccacctgaccccaggggcgccttccctctacctgttgtgtggcctgtctgtgagcctccgccccacctcctgttctttccctccccagtcccatccatgagcatggcagtttcggtggccctggcagcctctgtagccacatgatgctgctcaccacggtacagctacgccctgcgggaattgactggcatcgtctattagtgtccactcctaggaccacaccactccctgttccctggatcagaaacgtcctagagcgtggcgctgtcctctcctcagcttccatcctgtgaggggtgacttcagctatctaaaggctgctatttcccgccctagtccatgcctttccatagctttccaagacacacacgctcgattcacttactaattcacatgtgtgtggtgcttggtcctagcatttagtgtttgctcctttactttgtgggtttggctaaatgcagcgtaacgtgttgtattttgcttgggaaccgcaagtgctattacaattgaaatgtgcactcatgctcctcagaccctgctccttgggagggtagatttagaaaatgtagagagacaggagcctctgccaagtcttgcttgatctttggtttcttcttcagaacccacagaggcctcttgcccactcacatcttcctccagctggactgtaatctgtttgaggccagagggtttcttatctctggccctagtacctcccagggaactctgcttagaaaagaaatcaacaaatatttgtggaagttgtgtgtgaactgccctgtcggggctgcctcgtgtgccctgcctctattcacgatgaaggcagcccccagcaggacttaacttgaacatagagcctttaccaaggtgattaagattcattgagagcaaaggtggagactccctccagtggaactagtgtctttataaaaagagaacgagacaacaggggcatccctgtatggcagaggagggcacaacaagacattgatcatcggcaagctaaggagaggcctctggagaaaccaaacccgctggccccttgaacttggactcccagtatccagatctgtgtgcagctgagttcctgttgtttgcaccaccacatttgttgtggcagcaaaggctagttaatatggtcaccagctgtccactttctgtaagattgcaaggctaagaataaaattcaacggctaaagggaatttggagatctgtagcttcctatttaacgttaatcctcagtaatggacagctgaatcctagccctcatctcttgtgtaccatccatcgggcagcatgtcccaggccagcacccctaccaccccaccccaccactacatgcaaggagagtgaatgttgtctaagattcttagtccctgggaaattatcttagcctgaccgacactatatgaccttgatggttctgcattctcataaataatagcaattatcagaaggagacaaagctagaggagtctgcacactggccttagaccttctgctgactagctgtgtttgcttgcgtatgtaacctgacctttgggtgcccatggctgtgtttcttaaaataatctgtgttgctgtaatgggcagttactttttcccttctcagaaactgacccagacttgcaaatggaaaaccttccttccccaaccgtgaattcatctgtgaatctctaggtaatgcctcagtcaaaccagcctctcccatctgaaccgctgagcctctctccagcctgagatgtattcaattattttatgtatatagtacactgtgctgtcttcagacacaccagaagagggcatccgatctcattacagatggttgtggccaccatgtggttgcttggaattgaactcaggacctctggaagagcagtcagtgctcttaaccgctgagccatctctccagccctctggtttgtttggttttttttttttttttgactctggagacagactaggttcagtgatggcaggtagatagggaatggtgtgtactgagtgtggactctcccaacaggttcatgtgttcgcacattgaatcttcagctggtggtgctgtgtgtagagcctttaggaagggaagccttggaggaaatggggtactagaagcatgcatgaggttttatagctcagtcccatttcctgtcatttctctgtttcctgtccagtcaaaattagaggaggcccagatgtatactacctgtagccatgtcttctcccttccatgataggctgtgcccttcaaactgtgagccaagatgaatccttcttgccaggtattcaggacagcaagaaaagcagatattacaggagcttccccaaggagagagtcaccattgaaatagagaggagtcgacattgagacagagaacagagctcagtgaatactgttggaaaggtattgctggatgttgggaacaaaataaaaggggggccctggggaccttggagaaaagtgaggaggaaaaggggcctaacgtctggcccgagttcctgtgctctgggcaggcggacacaggcagagttgccagatgcttttccacacggccctgggtgagcatgcctgaaccacgtggcaggggtggaaagggggcagcccctgaccggggacccccgagctaccttgctaaagccccagggttgtaggagagagggaagagggaagaagttcccaacactgcccagagtgtgcagcgggtcttaatggagcagagactctctatggtttaagagctttattatagaaatgcagggggaagagagaagggaagggggccaggagaagacaaagagaaagggaagaggagagagaagtgagaggaaagaggacaaaggagtaagagtgtaagagtaagagagtgtggtgggggctgagcaccccttttgtggtccttactgttgctaggtaactggggaggagtttagcctgaaggtcagaagcttgggccattgcttatatgactactgaccatgcttctcttgtgggggctgtgggaactggtaccttaggcaggggccagagttccaggagcatgagggaacgcctaccatgtcttgtaggtgaattatgaccatcagggttcagacctgagcgcgactggagaccagcctgcaattccccacaactggccatggtttccccagctccataacacctctcaagatgcagagattcacagttgatctattgttctattaatacttgctccatacactatctaggaccctaaccgcatagcttttttaggggagagaggcttttgagattgaacctaggctgtgtgaatacttagttcatactttactcctgacaccccctccacacacacacacacacccacacacacacacacaatcctatttttagatgcatgtatgtgtatgtgtactcctgtgtgcgtgtgtgcaggcacacatctgtgcatgtgcttagagaatctaagagtataattattcctcagacaccatctactttgtttttgagacagggcctgtcactactgtcaccaagtaggctaggagggctgacattataagcatattatgtccaccaagcattcttgacacaggttctgaaggtgaaacgccggtttttgtgcttacaagtccagttgcaagaccgatccatctccccagtccctgcaatacaattttaaaatgtgcttgtgaatgcaaaggctgtggcatgcagtttgaactctagcagttgtttggaaaacccagtaacttaataggtaggttctatagcagactctaaggacctttgacaagatatatgtaccctcaggtcagtgtcatcttttacccagtaagccaatggaagctgttgtcattatctgtcgtagattaagatgttttcccacagtctccagcatttgaatgcttggtttccagttagtggcactgtttggagaggcttaggaggggtgcccttgttggaggaggcatgccattggaggcagactttaagagtttaaaaatactacatactgttttgagttcactctctgctttggagctcaacttctgctccagccaccatgcccttccgcaccttgctgtattagtaatagactaattggaactgtaagcccaaataaacccctccttctgtacgtttccctgatcatggtgttttgatacgacaacagagaagcaactagtacatcatcgtcaatgggcatcattgtaccattcacaggacggggaggaagagaagcctttgactgacatggttgacttgatggccatacctgcatggcatcctattgaggggagagccttctgtttgggttgatgagcccctgtctcctcaaggtgtgaatggcctttgtttgctgaaattgagcagggcatacagaaccagtctctgtgggtctcgtggagaccccttgtcctgtgagcttatcagctctcatcgcattgctttggcttgctgttgactgtagccagggatggtgtggaaagacaagccagggtctgattatccttggagagcaaggtaatgtctggagagatggaaggcgggttctctgggagccggcagccttctgtttattcctgggttccaggcggatgcgtggggcagtttcactgagctggctccttagtggaccttgctgtgtgtgttacatcgcgggggaagtgttcagaagtgaaggagcagtgtccatttcattacacttccttgatttcagatttctattacacacacggagtgagcctcagaattcttccatgattaaaaaacaggatcgacatagattttgttgaatcaatgttaatttagagctgggagaaacacaaaacacaccagaatttctttgacaattcaagcatgtggccctctgaacccgtgtgtattgataccattagtgtgatatttagactccatcttgaacagacccgctgacaaagattataaaaatgtcaatctctccccagagaaggatttttttttcttaactcataacctgagagttcattcacgaatgcaggttaagatgggcttatatgactataaattaactctggcaggaaaaaactttgaaaatgtcttggccaaagcacgttggtcagtcatccaaactttaaatgcttatatagacagaagccttctcccagtccatcgcatcttgttggataacagttgacaaagtaattttggtttaggaatcattattcaaaacacattgggcattttgctcctgaagaaaagtttgtgcctgtaaacatccagggttttgaaaatgagcaggcctcgctcaccgtgactgcgatttctctttgcggtggtgtatgggattaaccagtgtcatcagcagccaaaggcagagctaagtgcgctcacacccttggaggtcatgtggagaaagagaatccttcctctgcagattttgtccgagatgcgggtacttggtaaagcctggtagatcactggtccattggttaccttgagttgaaccaggagcctccatacctcaatctttgtagatactaagtgataatgttcttttaaatgattaaaaaagatgcgatttaacttaaaacaaaaaaatccaaatttataatattccaaaatttgcctacaagtggaggctcccacgcctcagcttgtatggtggttggatccagcatcctcaaagtgttgttcgaaatttcctgtagggtacgtgtataagaaacacaagtgaatttcctgttcagacctgtattccatgatcaagatagttcattatatgtctggaaatagttttttaaaaaatggaaagaaagagagagggggggagggaaggagggagggaggaagggaggaaggaaggaagaaggaaaagaaaaagaagcaagttttcaatccgtaatccccagataaacaaaactcagcttgtatgcagaaatggctttagtgtttggtgtcctctgccagttgtgaaatcggctcatttcagaggtgtgtgtcctttgttcttccgcagttctaattctgctctggtgcccttcctgtgtgttcaggcttcaggtgaaatcaggagcactggcttttcctggaccaagctcatttcaatggtatttctgatgcacgtaggatgatggccattctaacggtgtaccatactttaccctggcctcaggattgtgtgtggtgtgtttgttcaggtgctaaccagtaagcctctgaaggacaagggtcctctattccttggttagccacatcctcagtgggcaagcaagaaaactggaccagacatcaggctttgctctgctgagaggatttctccccaggccagtgtagctctcctttctccagagccaacttcccttctcttgtgggatattcagagatagggacaagagggggagaagccctgactctgtgttatcatagagaaccagacatcagagggattgtcctgctgtgtgtggtcagtgacagatcactcatgcagtgatggtctgtgagatagcagtagagctgtagtctactgatgatgtagcatgtccatgttccagcgtggcacagtatttccatgtttgtgctatcaacagcctgtgacaataattgacatatttcatattggtttgcatgattaattctgtgtgtgtgtgtgtgtgagtgatcattctcttcaggctgtttggagtacccaggactgtcagcagtttttataggctgaccagccataatcagaaagctctaaatctgaaattcaaactgctccaaaacctgaaacgtacagggcttcattagtgaaaatcctacatgttgaatctttgttgattacaggaaatatttttgcaggccgtgtgtatacaatgtaaatgaaacattagtgaatttagtgtttatggatcccatctctgcagtaggtatctcactacatatgtgaacatatcctcaaatctgaaaatccacgtaccttgtctgctgcaccaggctgcaggcttccagtctctggttacttctatacatgagatgggaagagcagcctagtgccttgcccaaggaacaccgtttaagaagctcagtgtggggtctcctgggctgggttgcaaatcgatgcagaattgaccatcgcttctgactttgaacttaggcaggttttatgtttactttaaaatgcacttagcatgcagttcacaccagcttccaggtgtgtcctggcaaccggagctggaaggaaagtttctgttggagagttgagctcgaagctggacagtttcctcagagcccttgcctgacttgggcactccctaccatctgcttgagagcctactgctgcagagggctgcatgctgatggctgcattcaattaatttgtctaatggatcccaccatgcttcccaaagcattttcagtagcttacaaaaagtgctgtgcaactagaggtttttcacaaaggatgtatagaaaccataacaaagagagaagaagctagaaactaagacaacattgggttggttcgcagaatgactatgtaaggttgacatatacgttccatggattgtttaaaaagatgtagtgtgtccttcattgttgttaaaaaaaaaatacctgggtatagcaactcagggaagggaaggatttattttggctcagtctgaagctcacagtctgaaggtagaaggtgaggaagtcatggcggcaggagccagaggcagctggtcatagtgggtccacagccagaggcagctagctggtcacagtaggtccacggcagaggctgtggtcacagtgggtccacagccagaggcagctggtcacagtaggtctacagccagaggcagctggtcacagtaggtccacagccaaaggcagctggtcacagtgggtccacagccagaggcagctggtcacagtgggtccacagccagaggcagctggtcacagtgagtccacagccagaggcagctggtcacagtaggtctacagccagaggcagctggtcacagtgggtcaacagccagaggcagctggtcacagtgggtccacagccagaggcagctggtcacagtgggtccacagccagaggcagctggtcacagtgggtccacagcagaggcagctggtcacagtaggtccacagcagaggcagctggtcacagtaggtccacagccagaggcagctggtcacagtaggtctacagcagaggcagctggtcacagtaggtcctcagcagaggcagctggtcacagtaggtctacagcagaggcagctggtcacagtaggtccacagcagaggcagctggtcacagtaggtccacagccagaggcagctggtcacagtgggtccacagcagaggcagctggtcacagtaggtccacagcagaggcagctggtcacagtgggtccacagcccgaggcagctggtcacagtaggtctacagcagaggcagctggtcacagtgggtcaacagctaggcagcagagggatgaatgccgctgcccagcttgcttttttgtttgtttgtttggttggtttggatttgtttttaacttagtctggagcagtggttctcaaccttcttaatgctataaccttttaatatatttcttcatgttgtggtgacccccccaaccataaaactattttcgttgttacttcataactgtaattttgctgccattataaatcacaatgtaaatatctgcaggatatctgatgtatgtatgacccctgtaaaagtgttgttcaaaccccaaaggggtcacgactcacaggttgaaatctactggtttagtctctatccgaggagtggtgacatctgcattctgggtgggtcttctcattttagttgacctaatctagaaactcccttacaaacattatgtatgtttccatagtgtttctaaatcgcagcaagttgaaaaccaagattaaccttcaaggatggtcagtcataaatttggctctgaatttccttatagctgggtcatttattttaagtgttgaggttaaaactgacttgatactaagaagagacaaagaggtgccttgtactaaaacctgagggattttgttcttttgttgcagagagcgtgggacagtgaccagagaacaaatctgtctcataaaatagcaaaaaggatttgtgtgtagtttaataggaagtttctgtacctgccgtaagcagagccgtgaccatagacactcggtagccactctgttaatagcccggacagatattgtccttcctagtctgcgttaggactttgggatctggagttgattcatctgcgcagatatacacagggccctgcgtcaggcagtggggagcacttacctctgtcccagctaagccagatggtggcccctgcaggaatactgagctgaggagttggtgcctggcttacctgagtgtggaagaaaatgggagagtgggactcacactgaagagggggttccttcctatcaggggtgcttcctgtccttcacccctttctccgtgcacttgttagaaaatgacattgtggggactggagagatggctcagaggttaagagcactgcctgctcttccagaggtcctgagttccattcccagcaaccacatggtggctcacaaccatccgtaatgagatctgatgcccacttctggtgtgtctgaagtcagctacagtgtattcacataaataaaataaatcttaaaaaaaaagaaaagaaaagaaaagaaaaagaaaaagacaatgacattgtgcagatggaaaaagcctcttgtgagagacgtctgagaaaaggcacactgagtaagtctttgtgttgagttactttatgtgtgtcttcgttgatgaaagctgcctgcatgtaataatcaggtatttccaaggctttcagggtccttgctttgccccggactactgttggttactctctgtctccctgagtgccaggccctgagcctggcagtatcctggctgctgccaccaccaccgccgccgccgtctttgcctgtatcgaggttagcactgcgtcggcagcttcccttctcttcctttctttcccagaggtcagagatggcaaagaacacaaagtcagaattatcctctattctgaaagcagaaggcggctggggaacgagagctccttagttctccctcttctcaactcctttgtcagccacagcgaggctgtggaaacactactacacaacccgcttcttgctgcctctccatacagtgggctacagggaatctgtgatgaccttaagccccagttgtgcatgcgtgctgtgtgcatgtttagagatgttatcactttttatggtgcgtgggagaacagttttggtttcatccttcatgatcagctccttcacttttcaaatttagaaagacaagtgtgactgctcccctgtactgtagggtacagtgtctgaggttggggggcaattgcacatacgttgctctttccacaggtgtgttctgaagagatggagcccagaagagagcttgcaggcttccagacaccttgccttgtagtgtgggtgttagtggagagcaggacctcaacccaaagctagccgtcgatttcagagtacttaacgaaggttcacctggaagggaagcccagcggggacttaggaatgttctagtctagtgtcttccaggagcatcagattatccacagtttgataagtaggaagttctgtttttaaaagattgctctgaaggagagttcatattcttttcagcaatgtgcttcagttgaaaatttctaaaagtcgtttcttgtgctatatgagattcttcttagggtttagatacagtcttctttacttttgtatcctgaaaaagagaacattcattccctacatcttcatgcatcatgctggcaatgccccctggaatctccatcgtgggcactcagggctcatcccctagcaatggatgggtctggtggtaacagtggctgatggaggccaccccgacctgccttccctccagggactgaaggccattacatgataggtggccaccaagctgcttctttctcaaaaataaacttgtttttttaccgggatcaaacctttgccgtcaaagccacttgagtctgtttgttcctactgagctaagttgctactcaagcagaaataatctgctcttcggaaggtccgatgtataaatgaacagctcgaggagaggaaatacgcagctttatctggggtctgactctttgaagggtagactcacgggtccccacctgcccaggctcctgttggcaggatatcaaaccatggtctcgtggccagatcttcactgaataatgaatgagtgagcatcaagcaggtcagaaatagaaatcaataaagctaaactctaccaagaagagagctgtgcacgagactgatgaagtacgatgaggctggtgggagccagagacacgaacacagattgcttccattctcccagatgaaggaatgtaaaaagagaaacctgtggcttaggaaagagtcccaaggaccagggctagagtggctgcctctcatggtgggaatgaggaagaatgttcaaacagccagatgttctgcttcttaatggctggtgcagccgtcgcttgctgttcactgctcctgagggccaggcgccaaacatcttcatcaatcatatgtttgcagctgtgtgaccaaaatagatctacaagcagcctgtttgtcctggccttgtggaaagcgacaagaccgtgaggtcatcagagaagcctgtgattctaagaagcctgtgattccggcccttgcttttccccgttcctccatctgcccatcaggtccacctgcctgtttaggtctaactcacccctttgatctctgatgacacaatctcactggccaattgattttcgtttgtgggagattgaagggcattatgtgagagccccttttatgccaattgttccatgagaaacgctctatttccccattgaaaatgacagcgggtgcccgtaaagaggcagtgcagtgtgcaggaaggaccggctgcctcccagctcatggaaggccactggagaaagtagtttcattaagtactgctcgcgtgcgtgccttgtggggtggtcacacccatctcaccatgccctctagaccgttgggactcggaagaactggtttcttccttaggtgtcttgggacgttttttcttttaatgaaccacttgagactgctctaaagggtagagtaattactgcatagtgtcaagtctgtctttgctctccccaaagcccctactctcgacaataaggagatggtgagtatgcctgccgtatgccttgaaaatcaaagatggctgacttctgagctaaagggactcctccagattttaacgattcacttagaatcttgtttgtaatcttccaccgagaactctgtccagaaagtgtccagaaagaaggactatacgtttagcctgaaccctaatctttagcagaccatcagatgtatgcagttgattggacctaccatgggccataccaggaagggagtgttgggtgggaccctttcttaagaccatcctggagaggggacatggttggcaagatgacttatttggtaaaatgttgcaagcgtgaagtcccgagtttggatactcagtatcccacattttaaagaagccaggaacagcagtgtctgcctatgatctgaacactagggggaggagacacaggaggatcctgggagctcattggtcagccagtgcagtttcgtcaataagctccaggttcagggagagatcctgcctccaccaaaaaacaaaaaaaaacatcagagagtaattgaggcaagttcctaagattgacctcaggcctgcacacacacagactgtcatcccatacgtgtgtaggcacacacgaaaagactccagcccgcctctgtctgagggaataggcttttgtcagaagtccttttctacttaaattttcaccatccttgggatctattactctgttcaacgtggagtgaatggatgaacaggactcgttgttaaaggcagcccgggccagctgggaacacaaggccttggttttcctgtgtccagcttacatctgcatagacagaaactcagccaccaggagaaacaccacatgtgtgagactgaacacaaaatgtcgtggcgtggattcctctgtggctattgaggaaagggtgtcgacgtgagaacttcttgagagaagctcaaggatgtggagtgtggagtcacatagtcatctggatgccagcggggtgagtgtcgcagagcagtctctggccttcgggaacttggcctctaagaatctgagctggagttggaaatccacatagggggcggggcgggggacaaagcttttccatcagtcccgagtgtcaataaagcacttccctctcctgccatctcagctaagtgcctcttaagtgctcattagtgggaactggtctgcagagggctgtgttcggattgtgggcaccagggtgtgatcagcaaaggtggctttggggactctggctctaaaaaggtgagagggaacccgatggactatgtactcagatgctggcgtttgatattctttaggttgggctttggcttgggggtttgtttggttgtttggttggttgtttattgaaacagttttacatagcccagtttggcctcacactgtccttgaactcctgatccccctactcctaccctgccacctctacctgcccccaatgccgggattacagaagtgggccatccagtaccggaagcagaagtaaccagggatcctgagggcttcggggagagcacaagtcggtggtttccaggggagatgggcccaccctgcacactggaacacaggagagttttgttgattggacgtattgattttgaattcaggaaatttcagatactggattgctggcttctttcaacaaccgggaggcacgtggcagcatggccctgccttgttccggagcagctgcagccagacatgagtggccactgcagtgtcacccgggtgcccagctcttctcagcctgcctgtccatgtcccctcatccccacttcacccagacatctggattagaatgctcagtggggagtgtgcttgctgaattctgagtcctgccaggtttgtgtgaccaagcagtgctgtagaaagagggataggatgaataatgggacagagctggtgacgctaaccatccagcttaactgtgaaattatatgacactgtgtgcacgtgagctctcacacacgctcacttttatcatccatccactcatatcctgggaaaggggtgctctgactcccaactgcacacaaggaccacaaagtcaggttggtgtcagtcacgcaggtcagcaggtgacaccactgaggcacccaccaagcagctggctccaggacccatgctctctctcgccagcactgacactaagccttacactgactccagcacaaacatggatgctggtaaatcataagacagtgatgctcagaatacggaggtggcactgctggttcctgtggggacgctcggaccttagattctcgccacaggcattgagccagatgctgggtacaaaccaggatgcaggacttgtcagattaagcatttgcccaggaacatagctggagcctccccgaggacaacagaatcagggaaacttgccagattttgagaatgaatttaggagctccacaccatggccggagagagggtacaagaacacttgggggtggggcagtgatggcaagtattatctattaatattaggaggtctgagacaggcatgtctgcacattccatttctgtgaaacatagttgaattttggttctcttttcttcattaacaagtttagttggtgctccaacccaaaggaatttgctcccattagccagacattttagacatgactgagaataaaataaagaccttccaccaccaccctttttactcactctgaacttgaaatgggtttctttatcctagggtatgcttggaaagggtcctttacttcttccttagaggccacatctagcaaaacggagaacacacctagcaggtgaacttagaccagattgtccaccttgaagcactgcagagatgctctgatcctgggcagccctccctcgagagtcctcagggtcacttgtttaaacccttagtatcctagaagagattgctaggtccccgcaggtcattgtttctccatgtccatgagccccctgtgcacacaggccgaggacaccgccagatgcacagtcccctgggccagttttctccagacccaggctggcttacattctgcccttgccgaacactgacaaggagggagccatttatagttaaactagtggcttcaggcagtctctggccctgtccccaagatcagcacagggaccaagctgcagatgcttcatgcctttataaccctctgcctgaccttgcctcttatcgctgtacagaggttccccacctccccaagtaaacctggtcaccccagtgcctcaaaactacccacccgaggaaatggtactgtattctctgccccagttaaaagctcacgcaaatgccaaattcagtttgtattgtatctttctttagttagtcagcttttttgaggcagggtctcctgtagccttaaactcaatgtgttatagggaaagccttaaactgatcccctgcctctgtgctaagattgtaggtatgcaccaccatgcctggcttgtattcttttgatacagccatatttctgcttaccttttatccccccagagaaatggagagcagaggcttaggtaaatgtaggcttcacctagaatctgggtatcttcacagagcctctggtagcatgataggcttcccaaagtcagagtaagagagttcctcttaagctctaggctctatggttttacctctggttaactgaattattatcccagttggcgctacttaacctcttccttcctcacagtgcttccaggtcctggatgctttgtaatgattatctcttgtttcctgcagcttttggagaattagtggcctgtgtgttgtttggacgcggacatagctgccaagaagcatgttgcattatatgatacaaaagaaataggttaaaaatgaagaaatactcagtaaaggagatggtagttgattgtgatcatgtggaaagaaagtgtgataccttaagtacttgattaactctgaggactctttatatttgaaggctcaaccctgtatcatagtggaccaaatacatcccacattctgtgtaaactataaagctcaagttcctcttggcaagttaaagcagtgtcatgttcttacacatttaaccgagccctgtttcaagtaaaagcaaggtgctttggggatgaatattatagtccagtctccgtgccatcatagactggaaatcttggcttcccaagactgacaagttgggaacccgatggctgagttggctcagagaagtaccacagcaaaggaagggatttggggacttaagccagatagcctagactgtcccacaggaccagtgagctgctcaccagtgggtacaggaagcgcctgggaggcgggaggcatgacatgggaggacacacaaaggcttgctccagtgcatgagttctgtttgttccccttttgttcccctttttgatgaaagcactgaatgtaaacccagaactttgcatctagattcttcctctttcctctcgaatttcagagttaatagcatgcttccagcccgagccgggcacatgcatgacaatggcagaaacgttagggtttctctctgactgggtcactcctcagggcatgaagggaaagttggatgtctgtgtccaggttctcctctgtgaaatggagacatcaaagggtgacctcctttgtaagcagcagtttttgtgggctctctccaaactgctgtctcactaattatcacacagcaagctggagtttaatggtttcatacgtatttgtatcccactatcagaagcaaaaccccaaccttcagtcatgctctcttgcgccttttcgggaaagggcaacatgccgaatgttgtggctttccatgtcatccaatggcttcattctgctggcagaggtggggttcagccaagtcggtatgaacactaacggtcatgactcagttcagaaacaatctttattcatgggcgttaatatttgaatttcatatcacattcatgtgtcaggagttatttttcctttttttgatttttttttttcccagcaatgaaaatatgttcagaccatcagaagccccagctagggagaagcatacagctttggcccactggctgtaataggagcatgtccaaattcctgttggaatctcgcacactgctgtgtcttttctggcattgtcccttgctggcttgtgcctgtgtctcctgattgagcggggaccatgagcctttcctccctcagtcgccagagtcccccgtgtataataggtgcttgctgagtgccttccaaatgagtggtgtagcaattatcccccttgcagcatgaccatgtctacatgaaacattctgaaaaggatgtctctttcctagaaagctgcatctgtctaggtaggtgcctgtggaaggtgtgcggcctcaagtacctgatgccgcctcccggcggccccctcacagactatggtaggtgcttgtcaacagatcctccctcaccgacagcttctgcctcagacgcttacctgagctgtctgccatgaggactctgtcacatgaaaagggagagacggtgacagtgggtgatgcattggagaatgctcctttccaccgttggcaggctttagtgaagagagcctatcggtgaagttcagactctcgggagactcatttcagtgtgccccggagattcctaatttacctgtgtttgtatttttaaggcaagagctttctttataatttcaattatggaacgatgtttggtattcagatgagttggtgtttgtactggctccatggtttcccaccagaggctcaagatccttgggggaaagatagccatgcacagagttgggtatgtgggagacacaatgccaggatgcacaaagaagaaattacaaccatttgcttgtgtattattttctcaatttgaagcacttgaattccagagctcttgaatcaagaggttgaattcctggcattttaaagtatcccacttgaataagctgcttaaaccattcaaatggattttttttaaaaaaaatatgcctaccttccccttcccccaaatctccagtttctcagatcgtttgctcttgggattttacttaattgaagtttcacctttttacttcaaatcaaaatcatttctgtagtcaagtaagttttcattgtgttctggagggccgtgtggggttcacgttgactgttgcctgtcaggttaaaggggttttccacagacctgcggtagcccgtgcttagagaaccttccagaagaaatccctccggctctcagtttctcccgggagtgtctcttatctgtaaatacagcaccacctacatctcctacgtctcaggtccagtttgactaaatctagccccggagagaagttatggccagagtcacagccggctctgccgcacacatgcacgcttaactacagatcagccgcctggatgcacgagtgtgaagagcagaactaaactggcagtcatcagtttgcctgtttgaaagaatctatcaagaggcagtgagccggttgtagggtctttgccctggtggcattttctatggtagcaggaagcaagcagagcagtgaatgtgtaatttggtctcaggtctggctcagtgcccaaaacgaagaaccaagcaaagtagagatcaggctctgtcgagggtgaggtgttagttttagaccaagtagctcagaatggccttcctgaaaatctgatgcagagtcccaaatgtgctccaactggcgcaagaagctctgtggtcagagggcaagtgcaaaggccccgtggctggttaataatagcagagggctgggcgtggtggtgcacacttctagtcccagcactccagaggcagagggctttggatctctgagttcccggacagccagggctacacagggaagccctatctcaataaaaccaaacaagaaaagtgaagaaataacagcggagtcagaagaatgggcaacaagcatggggatatggggttttgctctaattgtgatgggaaaccattagtagcgatggagatgcctggaaataatctgctgacttcttattaaaatgtcttaatggagcaggagggagacagggaaagcctttgtcatgagctgctagataagtatgatggcgacttagtgaaagccaggatggaggagtgggtaagtgagactggttgctgaccattgattcttagagagtagaaatttagtatgtggttgagtgggcagatggagaggggatggatgatgggtagataggtaggtggagggaagatgggtggatggatggatggatagatggtaggtgagtgggtgggtagatgggtgggtgagtatgtgtgggaggaaggataggtgggcagagggaggatgcatggatggatgaatgcatggatagatgggtagggtaggtaggtgggttagagaaggggtgatggaaaggtagatggagaggtgaatgagtggatagatggtcaggcagttgtgcagtgaatattcactaagaggaaaagaaggcgatgaagtcccccctcacacacacaccaccctgtccccatagtgggttggcagagggattgcttctttttatttatttatttatttgtttatttatttatttttcaagacaaggtttctctgtgtagccctagctgtcctggaactcactttgtagaccaggctggtttcgaactcagaaatccgcctgcctctgcctcccgagcagcccattgtctcgggctatgggtactcaacccgggccaatcagcctttgagctgctgcagggcaggtgcccaggcttggatgaagcctggccccaggaaagaggatcatttcatctataagcccggcacttgaaatgtcaacagatccctcagcctggctttcccctgtgagaaaggccactgatagtttaaggttaacagaaacactgacttcagggagaatggttttattgagttacagttcacaaacccacacactgtgaggttcaacgctgtacaacctggggggtttagtaacttcggggagcatgggcaggcatcactacagtcagttgtagagtctttacatcccactgtgtctggggaggaggacaactgtatgctctctagccatcattcttcctcgataatggtttaatgaacgaagctttgcaagtcctggacctgctggaccatgatccctgatgctacatagtcgaggggagcggccgtaggtcgcagcctctggcacagggaactggtggtcctgttgaacgagtgtcacttggggtgctgcctgtgctgtgaacattcaggaatctctctggttgatctcaaggctgtgtatggcgtgcagacagaaaagcgtcacttagttaaagtcagagatatgtgctctgaagcatccagaaatgcctgtcagcagtgagtcccttcctcccttcagaaccacattccaaaatggtcccggtgcatgggccttcttcgttttgtttcataaatggtttctagcccagaggccggggagctagaaatgggtggtggggtgggggcgggggcgggaactctgctccaagaaatactttttaaaggaatctagccaaaccaagcccttaatcaccctcccccgaaacaaagccaaggaattttgaaatgaagactgtatcatgaaatagttctcattttgaagtaaaccgtttgctctggggaattccatgcccagaaaacactttgttgtttcaagttcgagggtaaggatgtcaggctaggtcgatggaccagaacagcacaggggcggggtcaggaaacagtggtaccccctggggtcttgcatgcacttccaaacatgatgatgagcaatatccatcgcgctcagcttccctttgtctttggtcctgctttggcacttcttcctctcatgagaagtggaaacgctcctggctggttacttaactccacacttcagagtgctcagcagtggagtttgttcagtaatgtgtaccaccatcacaccttcccacagcatgcatcttccttatttcccacatgaccttcattccccccggggtgaagagtccgagggcagcaactccaccctctttccattctctctgcagcctatgactgttcttgattgatagatacatgcaaagccaagatacatacaaggtgttcaggcagtgtgaaccccagcaccctcgaggctcatcattgatcgcatgggtgatgcacaagaaaactatggaaggggtgtgtgtgtgtgtgtgtgtatgtgtgtctgtatgtgtgtgtgtgtgagtgaagcctttgtgttcctgtgccttcccttttaaatctaaggaaaagaagttaagcgtgaggaatttatctttttgtagctatgtaatgtcaaggcaagtggcttttctttagtcttaattgaaataaacttcttgtttatattctatcttgaaggataaatttctctttgtacatttcagcttatgcaatagcacacacctacagcctacacataggaaatcagacaagagtttttgtttttgttttgagggactagctttaggctttcacacataacaatgttttcatgacatttggcaggtgaactgcgcacatctgaggccacaggcagatccctgtgtctctgcttactgaagagacacaagggcttgtggatgacactttgaggtgtgagttagacaggggagagatatctgaaggacttgcctggagttacagttatattataatgtcacatgtgaaaacaacatgaaagaccagtgccaacattcttgatttacgtctaagaaaatacttggttccttgaagagacgtgatttcgctaaggttcgagcactggccccacaggcctgcatccagtccccagtcatatggagacaatggtttggaggaatgggaggcttggctgctcagactggcattgcctctgctttatatgaaagggggctctagatagcgaagattacgactgcttagattaatgactgtgttgacctttctagttgactgtggattaggttctgggtgtgttagttcatcttaactgtttcctccaggcagcccagttgttgcagtgctgagaggttctcctgtgtagccaaggctgatatccgtactgtttctgctctcccgttagatggagttgagaggagtccttgtgggaactggcgcttcctgggggaaagctcctaaggttcctcaggtggatgtgatgtgttagctgcatccctcagaggccacacccatccatggtgtttgctcacctccacaggtcacagaaaatagcaatgctgggataatcttttttggaagcactgttgttgtagctgacactgtcatttgctccttcggttgtgtttcctgatgtgagatttgcagcgttcacccacagaagagggaaaataagccttctccagaaataaagggcagcatcattgaaagcgtcctgcactccccgactgctgctgtggcgtttacagtgtgctcttgcgaaataatacaacagagcttgacagatacaaatagcaggcgtatcaaaaccccggctggctttaaagatgctgccctcctcccagcccgccttaaagggagaacattaaaaatccaaggctgatctttctgttgctcttattggatgccttctgaatgaaggattagctccttacaaataacattataaaataaaacttgagttgtaaaaactcaacttagccaaaagagatggtagcctggtacaaatgagtgactgtttcttaagactctggacttagcttcctctcggtcatgaggtatctcaactggctcgtgagaaaattttaattcagtgttctagataaggcatatgcaggcttcatagtaataccacttggcaggctttggggagtgcccaccctcctgggggtgtgtatgtgtagtttgtctctgatcctttctgagttggtccttaagagtactattagatcctggcttcccgcctgcgctgttacattttctatcttccaccaggcttgaggaaactcttgcatgaagtataaattataccttaataaaactgatagtcttttccccccaagagaccctgattaatgggctctgtcactattaagtgaagtggtttttagaaatagctgtgtgactggagtgttttggtttggagtgtgtgtcgctgggttgttatttttacacagagctgtgataggaaaatgcagggctctcttatcatagcacatgcaatatttagattggctccccatcctcctgcccgacactgatttcctgcctttcgccttcgcctttgcctgatgcttaagcatcaagattcgggcattttcccagagtaattgttgattaagtgctgaacattctgccatgattatgagattactgtattcagcttttaatcttgtgagtgtcaaatattttactttaatgccatcttcattattattattatcatccacagctcttcctatttgagtaatgcaatcaagcaaaataaaggtattgctgcaattttggctccccccccccctccacctctcccagaattccttaaatggaaagtgccctctgcaagttgtttccaaatgcttaataaactgggggtggaggtggggtgggggggagaaatcaagggttttcttggttgcaagtagttgaaggagaaacacagcggcttgttgaatgaaggtggtttccagaaatcggcatgtagccagaagtcagcgcactggcgagagtgggagttatgccagcacctgggctttctgggtgtccttgttttctgccctgtcatacacagggggtgctctgtggtaatcccttatctactgctgaagggcagtatggagaaatattgtccagggacagtacgtgagggacgagcctctgcaggggaaacaggctcgtggtgaatagctgatagcctgggttgagtgttcttgtttgggagaggtgacagcttcttgtcccgccttcaatgatagtcaactgtcctttgttcagtcaggtgaaaggagcctcggatgtcttgagttacggtctccaagtagagcaaactctctggtcttctccagaaccagaggcacagatgtctccactttgtgtataaacaaataaatatgtaatcagccgacttcacacagccagagagcagaagctgggccacttgtccagtcagatccaaggcctgtcagtgcccttcagcatgccatggtagatcctgaccccttgccccgaagctgaccatggccaactcagtattgatgatagtgggcagctaagaggatgagctgttcagggtcggcctgagtgagacaggtgttgagttcagtccacaggccaagtggtatttgaactcaaagctctgctctatagacacacccacacaaaaccaatctgaatgattgtactgggccagactgtccaatcgtttggtgtctctggaccacaatgtcatcccagaggtttgtgtttgagaaccatgcatttgagttaaaaaacaaaaaccaaaaaaaccagagtttttaaaaccctcagtgttttaagtgaggttataattttgtgctgggctacattcatagctattttgagctgaggttggaggtggcctatgggccacaggtttgtccccgagccattggccatcaaggaacagtgctgttgtatccctgtggggaattcagccgtccttggcttgtcactcagtgcaccaatgcccgcagtggggatggtgctaatggaaagttggatcttatcagagtcaacggttagtaaaccaaatcacgggccatggagatcgcagcagttcttctgagagtgtcccttggtattaactgagacacagaggaaagaaaatcactctccccgtacacacacgcgtgcacacacacactgtggaagtggaaggagccccaggccaggagcaggaatcccaggagtcaggctagtccttacctgaccatctgtggagctccaggcacgtagcgctcatctgccctactctgtgtttcttttaatgtgctgagaaacaaaacatctcaagatacagacataaacatagcaacacacctggggaagggcgtgtacatttaccctgtgggaataagtcacacctgttgttcacaccttttttgttttttatcacgaagattactttctgtcttatttagttgactccaaatctggactttataatctggatagagcatctgtatcaaagcaactctactgtgcactgagcatgctcatacaccagctttctggacgggtctcctcaccagtctagttcatnnnnnnnnnnnnnnnnnnnngcgtgtacatttaccctgtgggaataagtcacacctgttgttcacaccttttttgttttttatcacgaagattactttctgtcttatttagttgactccaaatctggactttataatctggatagagcatctgtatcaaagcaactctactgtgcactgagcatgctcatacaccagcttctggacgggtctcctcaccagtctagttcatctgaaagtggtgtgtgtgtgtgtgtgtgtgtgcacatgtgtgtgtatatttatttatttattcattcattcatttattcccctcaccagtctagttcatctgaaagtggtgtgtgtgtgtgtgtgtgtgcgcacatgtgtgtgtgtgcacatgtgtgtgtatattcatttatttattcattcattcatttattcccctcaccagtctagttcatctgaaagtggtgtgtgtgtgtgtgtgtgtgtgtgcacatgtgtgtgtatatttatttattcattcattcattcattcatttattccccctcaccagtctagttcatctgaaagtggtgtgtgtatgtgtgtgtgtgtgcacatgtttgtgtatatttattcattcattcattcattcatttattcccctcaccagtctagttcatctgaaagtggcgtgtgtgcgtgtgtgtgtgtgtgtgcgcacatgtgtgtgtgcacgagtgtgtgtgtgtgtgtgtgcgcgtgcgtgcgcgcgcgcatgtgtgtttatttatttatttattcatttattcccctcaccagtattgcttgtccaaaagttatgtgtgtgtgcgctcgagtgcgcatgagtctctctgtgtgtgtatacacatttatttatttattcctttagttgagcaagtttggaaatctattgtatttctttctctgttatttcctatcacgccccttgcctcattgctcacctatagctaactgctctttcacgtcacatcttatgtttttagggagaatgacctaagtgcctgtgtgctttgctttctcatccgaggaggctgatatgacagatgttcttggaaacaaagaacacccagtcctaggtcccacaccaactgctatagctgccatctttgcctccttttgtaacttgtgcggaggtgggagcctgcaggctcccttgcaagcccgacacttgatcttctgatacttaatttaaccgcctatgctctgtggagtggggatttggccaactttttgctgattgggcaaaagggaaatcagggcctcgtggatgtgtctttggggtcannnnnnnnnnnnnnnnnnnngtgtgtgtgtgtgtgtgtatgtgtgtctgtatgtgtgtgtgtgtgagtgaagcctttgtgttcctgtgccttcccttttaaatctaaggaaaagaagttaagcgtgaggaatttatctttttgtagctatgtaatgtcaaggcaagtggcttttctttagtcttaattgaaataaacttcttgtttatattctatcttgaaggataaatttctctttgtacatttcagcttatgcaatagcacacacctacagcctacacataggaaatcagacaagagtttttgtttttgttttgagggactagctttaggctttcacacataacaatgttttcatgacatttggcaggtgaactgcacacatctgtggccacaggcagatccctgtgtctctttgcttactgaagagacaccacaagggcttgtggatgacactttgaggtatgagttagacaggggagagatatctgaaggttcctgggttatttgggaacttgcctggagttacagttatattataatgtcacatgtgaaaacagcatgaaagaccagtgccaacattcttgatttacgtctaagaaaatacttggttccttgaagagacgtgcatccagtccccagtcatatggagacaatggtttggaggaatgggaggcttggctgctcagactggcattgcctctgctttatatgaaagggggctctagatagcgaagattacgactgcttagattaatgactgtgttgacctttctagttgactgtggattaggttctgggtgtgttagttcatcttaactttttcctccaggcagcccagttgttgcagtgctgagaggttctcctgtgtagccaaggctgatatccatactgtttctgctctcccgttagatggagttgagaggagtccttgtgggaactggcgcttcctgggggaaagctcctaaggttcctcaggtggatgtgatgtgttagctgcatccctcagaggccacacccatccatggtgtttgctcacctccacaggtcacagaaaatagcaatgctgggataatcttttttggaagcactgttgttgtagctgacactgtcatttgctccttcggttgtgtttcctgatgtgagatttgcagtgttcacccacagaagaggggaaaataagccttctccagaaataaagggcagcatcattgaaagcgtcctgcactccccgactgnnnnnnnnnnnnnnnnnnnnagagtgtcccttggtattaactgagacacagaggaaagaaaatcactctccccgtacacacacgcgtgcacacacacactgtggaagtggaaggagccccaggccaggagcaggaatcccaggagtcaggctagtccttacctgaccatctgtggagctccaggcacgtagcgctcatctgccctactctgtgtttcttttaatgtgctgagaaacaaaacatctcaagatacagacataaacatagcaacacacctggggaagggcgtgtacatttaccctgtgggaataagtcacacctgttgttcacaccttttttgttttttatcacgaagattactttctgtcttatttagttgactccaaatctggactttataatctggatagagcatctgtatcaaagcaactctactgtgcactgagcatgctcatacaccagcttctggacgggtctcctcaccagtctagttcatctgaaagtggggtgtgtgtgtgtgtgtgtgtgcacatgtgtgtgcacatgtgtgtgtatatttatttatttattcattcattcatttattcccctcaccagtctagttcatctgaaagtggtgtgtgtgtgtgtgtgtgtgtgtgcgcgcacatgtgtgtgcacgcacatgtgtgtgtgtgcacatgtgtgtgtatattcatttatttattcattcattcatttattcccctcaccagtctagttcatctgaaagtggtgtgtgtgtgtgtgtgcacatgtgtgtgtatatttatttatttattcattcattcatttattcccctcaccagtctagttcatctgaaagtggtgtgtgtgtgtgtgtgcacatgtgtgtgtgtgcacatgtttgtgtatatttatttattcattcattcatttattcccctcaccagtctagttcatctgaaagtggcgtgtgtgcgtgcacatgtgtgtgtgtgcacatgtgtgtgtttatttatttatttatttattcattcattcattcatttatttccctcaccagtctagttcatctgaaagtggtgtgtatgtgtgtgtgcacgagtgtgtgtgtgtgtgtgcgcgcgcgcgcatgtgtgtttatttatttatttattcatttattcccctcaccagtattgcttgtccaaaagttatgtgtgtgtgctcgcgagtgcgcatgagtctctctgtgtgtgtatacacatttatttatttattcctttagttgagcaagtttggaaatctattgtatttctttctctgttatttcctatcacgccccttgcctcattgctcacctatagctaactgctctttcacgtcacatcttatgtttttagggagaatgacctaagtgcctgtgtgctttgctttctcatccgaggaggctgatatgacagatgttcttggaaacaaagaacacccagtcctaggtcccacgccaactgctatagctgcccatctttgcctccttttgtaacttgtgcggaggtgggaacctgcaggctcccttgcaagcccgacacttgatcttctgatacttaatttaaccgcctatgctctgtggagtggggatttggccaactttttgctgattgggcaaaagggaaatcagggcctcgtggatgtgtctttggggtcatgtgactttctctagactcagtttctcttaaatgggattgataatggtgtgcagtcaaagcgtatgtttaggatagccatcccataatgggtgctcagtaattagaaactccttaaggtcattgttgctatcaccattgccatcagtannnnnnnnnnnnnnnnnnnntgtgtgtgtgtgtgcgcgcgcgcgcatgtgtgtttatttatttatttattcatttattcccctcaccagtattgcttgtccaaaagttatgtgtgtgtgctcgcgagtgcgcatgagtctctctgtgtgtgtatacacatttatttatttattcctttagttgagcaagtttggaaatctattgtatttctttctctgttatttcctatcacgccccttgcctcattgctcacctatagctaactgctctttcacgtcacatcttatgtttttagggagaatgacctaagtgcctgtgtgctttgctttctcatccgaggaggctgatatgacagatgttcttggaaacaaagaacacccagtcctaggtcccacgccaactgctatagctgcccatctttgcctccttttgtaacttgtgcggaggtgggaacctgcaggctcccttgcaagcccgacacttgatcttctgatacttaatttaaccgcctatgctctgtggagtggggatttggccaactttttgctgattgggcaaaagggaaatcagggcctcgtggatgtgtctttggggtcatgtgactttctctagactcagtttctcttaaatgggattgataatggtgtgcagtcaaagcgtatgtttaggatagccatcccataatgggtgctcagtaattagaaactccttaaggtcattgttgctatcaccattgccatcagtataaatcggatgaatgatggcaggcacaggagccattgggtctgagaggacctgcatcctgtgacgcagaagctgcacctgtgagaatttctgtgccctgagactctcagctttctttcaggccttgtcttgtccctctggctagacatagtatagaaatccatccagttcctggctgtagaaaatcagagagacttgaaagtaatttacttgaattctaagaggaaaaaaaaataccacccccaccccgcccacctgaggcacagaatataggtctttctctctggatcccttgacccctgcttttgagtttaacaaaggaggatggatgaactcaaggctctcaaagaagagatggggacctcctaattgatcctcacaaaacgcctggttatttacaactaggaaaattgcttgcttggagagagtcattcagttctgaggatccgtgggctccatgggagacattctctgctccttgctgaaagtgctttccgggaggaggtgtgcgcagagggaatctcatctaactggttaacgccatctcattcatagatccctgcccccaccccgcagctgatcgttcagtctctctcagtgtgtaattgttcattttaaattttcgtgtttgctatagctgggtgtgtgttaattacaggcagactgcaattatgttgtctatgtgttgcttgtgtggcggcaagggtggtaagccagcgtacttccaatagcaagagtcttgacttaaaatctccaaagccatgtagagatccatgtgtttcatccacactattgatgaggtgagagaacccattgatattgctgtcattttctgctgagtgaaatactcagaatttgggtttatccactgaacttataaccaaatgattgagtatccaataaatatgagatgtttataatagatccctggatgaaacggtcataaataaagtatctggcagttcatgtagctgacaggacaatccaggtgaccgtcaatgccactgccttcttagtgacatgagttcatgtcccctagggtactaaacactcatccactgaacatagtataataattagaactggtgggaagaacctagaaattgctggcaattaaagttattagatcacagtccagccaccaatgatattggcagctgagacacatttggaatgcataataataactgtaaggttatcaaattgatcccagatgtctgggatatgtgtgcaaattaaattagaggcacatcaaactaatctaggcaagaaacagggctgggatcaaaagacatgctcttcagggcgtaaggcctcgaggggagagtccaggatccgaaggctgtccatgatccacagggatgactctccggttgggctcagctgatgtgatgctgggttgttcctgctgcatctgtttaaaatatgcatatgtatgcatatcctcccattgaattctgttatacttctatccaaaaaaaaaaaaaaaaaggcttttacacgccttgattactgaaactgtgtgaatcttgaaattggataaactgattcagaactttcagggttcctttgtcttaattaacttctagttcctctgcctccccatgtacgtgtgtacatttcaaggtcgtctcgtccgtgtctagagaaatacctcgctggggttttgacggtaattacatcacacctctatgctgttttgaggagcaaacaacatcagtctctgaattcatgggcatggcttcctcttccttcatttatctattgcttgatttgttttctgagcatgtacacttttcacccaaaaaaacctatgtatattttgttaagtttactccaagtgttttatattcattgaaatgtgtatatactttttccttttgggtcccattttgttataggaatataattgactttacttatatgtcctgaagcactgttaagtgagcttgtttgttgtagggtttttgtggcttgacatgttctgcatatttttcagttggggggatttttttctcttcctcttgatccatatgccttttattatattttcttgccttattgcattggcttgaactttgagcaccatactgaatacgactggtaagagcagccatccttttctccacctttaggtcaaaacattcagtcttctctgtgaagtatgttaaatatagttgtttttaatgctcttttgtaatttcagtaggtttccttctgttctacttagataagctttttcttttttaaacagtgattacatgttaaatgttatccactgtttttctgtattatctgatattcatcatatggtctttttgtaacttgatggaacactaacatgaccatgtgaaatgattacggaatatcaaactggcctttcatcctagaataagcctaacttgctcatggtatatatttctatttgtatagttctaaattctattcggtaatgtgttgtgttaggattttcgtgtctatattttgtaaggagtatccgtccgaaagtctccccttttgttctgtttttccttctgtccagttgggacagggggctacagtttctctgtcagtttgaagactaaaaatgtggggctctgagtaccggagaggtggctcagtgaccgagagcatttgttgcgcttgcagaccttccctgacgctagatggtatgagtagctctgtcatctagagatcactgttttgttctcctctgttagttgccatgatcctcttatgcctggaagggaaaagccatgctgcagcagtgggagtatctgtcgtcgccgccgtctttaccacgacttctctgtggttcactggtggatgttggcaatttctgaagtctcactgacagtggaggtggtggtcactactctcaaaagttccttccgttccctgtcctcagccactcatgtgaacacagaggagcctaagtgatccttgttctttctcacgttgcccaagagcttagtgacccctaaagaatgcagtacgtagccgaaattgaatgatagaacagccaagggtactaccctgcctctactcagcttcgagaccttgggcagaagaccttttgtccacttcagattgtccattggaaaggacggatgagctgtgcattcatcacactgtgggatataacctctaattacagcccctgaaggggaggctgtgagcacccttggagcacagcactcggcctccagttgagctgcattcatttccagacacctggcggccatgtcatgttatcatccagcagaaacttctagtcacagaagttgatggcttcctagagctgctgatgtccagtggtgggcttatcttttggatcttatttttcaaagaaatatggcacagggatagaggtcattggattcagtgagaaaggatggaacatgaggtcctagcagaccctggtttcaaaagtcccttgtggtgagttttcaacagaacagtacttctgtctatttttatcttcctgccagttgacttcagcaaatgtttatgagtacctacaggaggcccagggatttaggaagcagcagcccatcctctgagaggagagagagagagagagagagagagagagagaacacgaaagcgcacaaaagtgaccaaagtagataaaatgccattgaagatcagaggcaggtgaccttacgtctggctggctgggtgaataggggaactgtcagagggggttgaaattgaagtagaaactgagaatgtaagtaagctttcagtagccgaggttgggctggcactactacccagggctagaagacagccagccgctcacagtggtcagaggacatgtgggccttggctaaggaggtgtgggcaccatctctaacatgtgcccaacccctggaacctgagcatcttcttcctcaaaccatggtgttcctctcttcaaggtcttccttctccgtggtgagttcaggccgcctctgtgcattagtgcacatctattctgtcttcaagatttcctggtattgcaggctgacttgtgtccattaagtacctagatgtcccagtcctcccacagaacccagaaaggagactttatttgggaataacgtttttttttttgttgttgttgttgtttttttttttaacagaaagtcaaaggtgtgtttgtatcagcttcagtccaaaaggattgatgttccttgtaagactggcatgtttgaacaagacacagcggccatcgaagcagagggttctctccacaggtcacagagggagcatggccctgtcaacaccctcactctagactctcagcctctacaactgtggggcagtcaggctgtggtgtccgagttgtagtttgtgggcacctctggggtgcagtacacctgtggggcatgggtgcttagggagataaatcagattgtacccagagggccttgtttcttagggaaggctggctatgccactaacgtcacgtggctgttagctgatctttgtgggcagtctggtcattagcgacccattttgattttctgagcagaatgaacaagcccagtttttgttttgttttgtttcctgatacctccaggaatccccgagtccagccagctatagcatgattcctgttagaaaatgaggagctatcctggggtccaggggtctaggccaggtgactttagttcatttattctagcccattctcatgacaaatgacaaattgttccatttaagcatgtgtaactagtttgtggtcactgcctgcagcatgtgaacctgagctcaaacctgttttcttttttgaaatgattttagtagagtcagggcaaagccttaacaatatgtattttataagatgcacgtgtgtctggtgtgtgtctgtctgtctgtctgtggtacatttacatgagcatgtgtgaaccctggcatgggtgtgtagctcagagggcagtatgtaggagctagttatctcttcccaccacgtgggacctcagacactcaagcttggcaggaagactctacccactgagctatcttgcctgcccttgatctcaagtactacatcctacatccagattactgaaatttctagggactcttaagttctgtggctctgactttcaaaagttgtcttcaaggcacagaattttagcttaaaagtagcaaagaatcctacctgggatggatgggatggccaaaggacttacaaaagagagataaagtgagaagggggcacggtagtctgcaggaaagggtttgcaagaacgatcaggtttgcgtgaccaatggttctatgggtgtttagatcaccatgcatcattaggagacagttgtaggtggtggtaccttcctgcgtctggctcctagtgttgacattataacattgatagcaccggcagccgttgtgtggactcagatattacccacatgtcactttggccttgttctagttttccagccttctgttaagggaagtagagcagctaatgtgtttgaattggattttggtttttccaaccgtcttgacatcatgaatgcaagcccattaatggcagcagggaggcgtctgtggcttcttggttgctataaatcaatatctcccctaacaggttccaaagagtgtcatctccaaggcgcatcgtctgcatgtgcaccctttgtgttgggcgccccaaatgcactttccatcagcaagacataaaaggagacacaaggaggggtcattttgcttggcagcacacgctgaaagcaaaagagaggtgtttatttttttgttgttgttactattattgtttcaggggtccctccgacaaagaagtgcagtgtctttcaaatgcctcttagtagaaatgtttcccatcatccatcatcagtgtcctgccattttgaaatggcagaggtggctttagcacttgatgcggttatcatgctggatactggagaccatatccttagagagattgacctggtggttttcttctcgggtgcgagtattgtgattgctgccacgccacactgtcactttaacaaactgtcaccctgaaatggggctgccccatccagcaccgtggaaaaacaaggtcagacgtgcaggagactcagatgagctgctagtcactaggattagttaagccaatattgaaaaaaatgcttggcacaactccgacagcttatgttacttctgcagaaatgtgttctctccgtcccccttggtacacatatagttaaggccacaccaggacctctgttatgtaacccttcctggttatataattaagggttctgttttttcttgtcctggtttacatcggttaaaatggggtaaaaggtacagtagtttgtagtcacatatactagccaaggtagtaattttattgattaaagtacatggggtctactcatggtaagtaatactgtatgcagcacaaactgtggatagtttgtggctatagaatggaggaacttcagatacacgtgccatcctacagagcagtttttaaaaaccaccctttagattctggcttattcgaccctccttcttcatgcctgagctgctagctagctagaaatcctcctcagtcatagagagagaaatgtgtgatcaagcagaaagttttatggtctccatgaggttactcctaaaaccttaaccagccttggccagggcagatggcatactcagggctcagctccatctgtgctgtgtggcaagactgggtcccccgactctgcagcgaacgctgcctgcatccactcccatcttggacccttgcagctcttacagatgtcaacttagcagccacagcaggctgccctgctcactccccaaacagtggatttgagctgacctagaaaccgtttaccccctgtccccgttgccccggttatggagggatggaagtccgtgtgcctggactccagaggcggtcaggaaaggcaggtcctggccaggtagctggtgacaaagagtagctgtgacactgcatatcccctctcttgtctccacattgaaggctccatggctggcttatgcaggactcttgagtccctggctgatacccttttctagaaccagatgctcatgtcctgctataactaactctgaatcaacagaactgtgaatttgcctctctgtgtttccttttgtagcaccagtcagatcaaatgaaacctccactgttccctggcgcagagttcttggctcgttagttcctgtccctcccttctgtcctcaggcttgactcctggaattcccagtgtggcacaccatccaagtcacagaaacaaaaaacaaaaaaacaacaattctgctcttttggcagaattgtaataattgaagcaaatacagatatagctccacctctccatcagggcttcatctcagtagacttgccataagcaagtaacgtttgaatgtcctcaccatcctagcctagccgcactgctcggtggaggaccaggtcctctccctgccttgtatcatgaaagaagatggaaccacaggaagaggttctatctgaatgcatatcacattcacatgatggagtgtgtcagactgttgcaagtcagggactatatgtactctctatgaagcaattccaaccccagatggagttctaggaaaatttaattccttcttttcttttctttttttttttggtttttcaagacaaggtttctctgtatagccctggctgtcctggaactcactttgcagaccaggctggcctcgaactcagaaatccgcctgcctctgcctcccgagtgctgggattaaaggcgtacgccaccacatccggctctttaattcctttctttatacttttgtatttccttaagtgttgtaccaagggcgtggggtactctcctgtgtgtttgcagtatacatgcatatatgggtgcattcacacatatatgtgtgaaaatgaagccagtggtgggtgatgctggggctttcatctctttattttatttactgaggcaaggtctcatgctaagtggtagtagtataggcaggctactgtgggggtactggggatccaaggtcacatctgcacggcaagttctttatccagtgaaccatcttcccagcaccctccttgttttaattagaaagaagattatttaagaaagtgttttgggacaaagaagcaagaaccaactcatctcttttgttcagcagaacaagaacaacaaaccactcagggtaaatcagtcccggaaaacttacacaggcctgttccttctcagcaagcagtcagtggctcttcacaggcgtgctgtgggacactgtcttttttttaagcataattcctcaatgttttaataaaccacaatataaactgatacatacaaagtgtctttatgatctgttacgacttaaattaacatatcatataatgtttaaccacatgttgacacctaacctctgctcttcttcagaattacctttgctacagccagtacgtgatcctttttgataactctagatttactttcacaagcatttgtcctggactcttctgccaatcgctgaacaaaaagtaggcaattcaaatggatcaggaggtcgtagcacctccccagacctaggtaccgcttctgctttaaggtgcgcttgaggaaggcgccttgcgctttacccgcctagggactgtggtggagggcgccatcctcgcggcccgtccctttttttttttttttttttttgattgtttgtttgggttttttatttgattgtttgtttttgacactgtccttatcagcaatctctagccctgggacttatgctgggctgctcggtctgtgacacaggcttgtgtcactcacacgagaagtgcatgttctttataaatggaagctattatcttgagaaaaggtcagagctttcctgtacattgaaaacaacacagaaatctaagttcagcagttaccagttaagcgaggcaaagatgatgactgtcccacctccaaagtcaagtccgtctaatctgttcactgaataaagggccatcggctctaatttgtgcctggcaccatctggtgcttgggattctttggtaaggacaaccgagaagtctctgcccttctggaacctgtgtgggagacaagtacccgggcctgagaagatggcacagttggtaacgggcctgctctacaagcaggagaggtgaagtccagatctccagcatccgtgtaaaagccagacacagagctatacatctgtgaccctagcagtggggaggcagaggcggccagatcccaggcctagccacacaaaccacaccttcacatacgtgtgaaattaacagcagggtagctgatgctgagggtagtgatgcccactctgccaggtgtgtctctccgccctttgtgtcctgtgtacctgagggcgctagaggggattatcagccacactgagggcgagcagccatcaatagtgaggaggtaatacatccaaagtcgcagagccggcaaggctggagttctggctcggccagcctggccttcctggcactgggtgtttggtaggaggttggagagataccgtggttaggaatggaaatggcagaggaaggggaccagccaccgggaggtttgtgagtattctgtgcctgcatccagagaaatggaaggagcatagtcactcctattagggatttcagtctgccaggatgcacaggcatgcgatgatgggctgtacccgtgatccttggtttcataggacagagatgccacaggggggaaaaacatttgtttctgtgatactttggtttggtttgacagttttttttgtggcctcgtggtctcccaattctgatgctcttatctctcatgccatagtgtgtcccacagctttctagagcctggagcatttatcgcattgtgactgtgtgcacacagcctgagcaggtgtctgtgtgcagctaggactggtcacccgttgcattgatgtgtgggctacagctctgtttggttctcttggattctcccatcttcctttgctctcttggtggcctcaagtgtgtgtctcaggacgtccttgcttcccattgtcacacagctctcacccacacacattttcaccctgccccatatattgctcagagaaaacatgtctaggaagaaaacgccactggaaaaggaaacaccattggctgttaatttcccgatctttggagatggggggnnnnnnnnnnnnnnnnnnnnggggattgctggctttcgatcttgcccaaaaagcagtagtatatttattcccccagcctatctgattcgtgtcaccagggcgttacttcggtgcatagttagactagcacaaatcccaattgtgtcaggtttttctccatgtgtatgatccctctgccttccagtttccttcaggccccaggagagtaacttgtactagtctgctgagacagagagcctttcccaggagtaaaagccaaggtggatcccagaacagtttcacattcttcagtgttggggactgaggggcaccagcatgcatgctgaccaaggtcacccttgtcttacttggagtctcattctgaacttacaaaaagaacctggaaactgagttccaggtgtgctgtggtagagtttaatagaccattcccaaaggtaggtttgcctccatctctactttcttactgtgttgggttactaaggatagcaaagtgccacagaccaagtaggttaacactggagatttatttttgcatggttctggggacttagaaggctggcatcaaggctactgtccagggaaggatctgcccaaaccctgttttagcttgtggacttgtggcggagaactgtcttcacccagggagttttgctgactcagcctctgacctcattgccccactataggagaatgctggattggaagcatctgtaatgttggttgcactggattggtagcatctataatgaccctgttcccaaatatgcacatgttttgaggtgctgcttgggacatagacatatggtggggccaggggagggaacccttgaacccctaacacttcatggaaaacagttcagttttcctgagtcacacttctcccttgctgcgggtgcactgatgggcaggagccactgggttcctcctctagcaatttaccatgtcctcaccaaaatggcatccttgcctttgtacttcattttggaaatcaagtttctctcattcagtatcaaaaattggtcagtcgtcagtcttaaactcacttctggcatagacttcttgcccagatgccagttgtctgccgacctcacagaaagccagggtcgccagggtcccaggctgtgtcttccatgaccttaccgtgtaattctaacacgtaagagaatgggattgcagaaacatgggtacctatagaacagagggaggcagaagaaagactcgagacaaattctgaactggatgcatttctattgacactccatcctgctcctgctccccctagcagttctggtcttcctgtgtcaatagccatctactttcccggataatagctactgtttgaatcttccctaccagtttggaagaggcaagatctgtatttcttggtggctagtacaggatctggtatgtaagtatatctgtaaattgctactgaaaactgaataccttcaaattttaaaaaagtgctgtatgggcagaaaaccatttggggaagaaaacaacattctgatatttactcgttaaaattaatttttattgaagttaaaaatctaaagccttgccttttttttccccctaaggctcttaagagctgttcacggatcccattattttatttataagcctaacagtctctaacaatcacttttaaagaggcctttttacaaatgtttggtctaatttgcaaacttagctaattaaactcctttaaacattttaagcggcatttgtaaaggaaatcgaacttattaaatttataagtactcaattgcctgactcaacaaacaagtctcccagagcactcaagcaattcttataaatctaattaagctcataagtatatgccacaccttagggtctgctcagctttcttaggctgtaagtgacctccatgaaattatgacttaaagttcaagatgaagtatattctgtagcccacagactcagctaatatttcaagactattctgttctgcagccggcactaactaaagacttggtcttcttaaacaggtttctgctgtttctacattgcaacccaccccatccccactaaaataagtctccctcccatggggacgtccttcccctctgctctccatggctttctatgtgtaaagggtcactgggaaccttctccccagcatctggcccacctttgatgtaagccccaaacagccaggagacatgcatgcatgccaagtgtttataagctgagagcaactctgagcattcagagaggaccaggcaggtaattcaggccttgtgattgctacattccccatccactaagcagtgtaagaagatggacaaagatcggggattcggctcagttgggagagtgcttgtctcctgtatactaagaccctgcagggttcagttcttagtgccacataaactgaggatcatggcgcacacctgtgatccagaggaggaggcaggagaagcagatgttggagattatccttttaacctttgctgcattgtgagtttggaaccagcctgggctacatcggttcatgtacaccagccctttgccttcataggcgcctacagtgagtagagcagatgcaaaaagcagtaggagtctggtacagggactgaagtgaagggtctgtaccctgcacacctacggtgcttgccactgtatccagacatttagcatcaccttccatggctttcccaggtcctctctctgtttgcccctgcattccctcaccaggcacgagaccccatagaacaagaaggtgaattctcagtaggagccttgatcagagccattgcgatcactcaaaatactgtaaatagtagaattataaacaaaaaaggatttctgattcaaaataaaaataacaataaaaaataataaaaattccagcactctggaggcaaaagcaggtggattagtgagcttgaggccagcctggtctacagagtgagttccaggacagccaggactacacagagaaaccctgtctcaaatatagcaaagcaaaagcaaaacaaccaacagcaaagaagcaaagataaagccctagggtttttgtctttcagaaacactatagccagcacagtttacatactttctgcagaacttttaccatcaaataacaggttataaaaagaaacagttctttttcttctttttcttaaaataaataaataaataaataaatgagaagcagagaaaggaaaggaaaacatagaatattagtgtctgacactaaaggggacatcggctgcagtcacctgtgtcttctcagtgtggggaggatgcttgctcccttgggaaggacacttcctcctgtggggagactgtcaccaccaccacccctcctttctggaccagccaccttctggatcagcggctgtcagcctaaacttggtcaagtgtctcttctcctaattactggaacgaacccccttctgtggtcattttctatgtgaggctcaactagaggagggttttaggtggcccacatacttagatttaaggaaacactactggagtctgcacctattcacaggagtctgtatccataccctctggctgccacttgactggagtccaaagaccttgaaattccatgaatatcctgtctgattcttttatattccctgtctctgggaccagacagggttggcagatgttcaagtgagctgaaaacacctagttctagttgactctgcccagagctaccgagggcccaaataggcaggctcagggcagctcccaagtggcctcctcagtacagagcatcaagtagccagcacctgggtatgggtttccatagtgatggttaagtccacagtttcaatgtttcaagtgaagcaggtagacatctcgaggcagtgtttatgtattctcttaaagggaatactttctgctctccgggtgtcacagaacgctcttgctgaacaaggcaaacatttgcagaagtctgacaaaggcctttgatccaacgaggaagttggtaaaagcaagctctttgtaactgccttaaagaaaaaccagaataatacagtttggttatctattatttgttgtaaaatgttaagggatttgcgaggctctctggctttcgctacctatatcacaaatctgactataaccaaaggttatatataatgcggtgtggtgaataatgcatgcggactgataacaggctttaaaagggagagagagagaaggtggcttttaagtacagtgtggcatttccctttctgccatggtgatacatgatatagtgctccgtggcgtgcaaaatgttattggttgtcatagcaatagaacaccatcggcaaggaaggaagaaatgctctctaagccgctcggctgacatggaactctcgttataacagaatgatcattgttgctactgtatttaccgtcaggtaataaaaatccatgctacaccttttttattccccctcccctcttctctatgtcagccgccctggcacctgcattatacacccggttgtattggttgtcttggttgcgggttttggactgatagcttttgctgcttgccattgtaaaaataggccgtgcgtttaatggatcctcaaactcttgtcaagctgctggccccagcccatagctcgagagcttgagcaggtcctctgtggagccctgtaattagttctccatggttctcttccctgttgtggctaccctacctgatggccatctttgacgcctgtgttctgtgagcttagacctgagtgaagagtcttcctgcagaatcacctaacctgggctcatcttccctccagggctcttgagtgactatcggggagtttgcccagggctggatctccggggtatctgtcctgttgttcaaattatgtgcttggaaatccatcaaatgcagccatcgttgtcaggttgctgggcaggtcagctgcaaaggcaggtgtcccagcctgccttctttgtcagtagtgggtgcatcctttctcaacctgtgaataaaactccttgacccatcagtagagtaggctgtgagggaaagctgtgtgtctgtctgtatatgtctgtctgtctgccttgtctctgtgtgtgtgtctgtgtgtatgcctgtgcacacatgcacacttggtgacagtgctgtggctatgtccttgtgatctgacaagatattgcttattgtgagtgccaggaaccctcttgcctcactcagtcctcacagacacacgtttcatagataggagggctgaggcatagaaaagttgactagctaaggtaacatcgttggtaagtgcccgagctgggatttgagcccatctcacttgactccagagcacaaattccctactactactttgtgtaatctaaactggaatcaaggaaggccccaaaggaatccaaaaaccctggtagtgctgggagacacactgcttgctggcagtgcaaaagggagaaaaaacccagaggagaagggccttagaaactacgcatggcttccaaaaagcaagacagagcagactagagcaaagccatgctctgcttggctgcttgatgctgttggaagccagctgtaaagctgtaggcaggctgtggatagcagggacccccatctcacactgcaccccagctgtctcagggttgtcacaggtcaccatgtcacatggatcaaatagaatatccagcaaacgtcagctcattggagctgcacccttctcagggttggcaagttggtgaacggcctaatgggcccagcatccccaccagtgaaggagttgctattacccccatttcctagacatggaaactgagtcactgagaagtcatctggtactaagctatacctggcgagagtagccagcacccccttcgggagataccttgagagctctctgaatatggcacatctgtgttcctgcatgtggtgacaagtgaagtgttatcccgtggtggggataacatgtgtgtgaacttgtgcatacaactgagctaggagttctgagcatccgatgatgcctgccaagtatccaagaaggataggaatttcttaggggaagacaggactttatagagagagctagtaatgcctccgagtgttagctgagaagcagtgtaagactaaatgagcttgccttatagaagtcttgagaacgtagtgtgctgagctgggcatggggtctgagtgtggatgcaaaggcctcaagggtgtaaagtccagagtgagagtagaggccagtggatgaatatcagtccagcctccatcttacagaccaggaaaatgaggtccagggcatctctctagtgcccgctccgtggaagagccaccccatatgtataaaaatcagacacacacaagggcactcacccatagcattctttgttagaaaaagttagaaaacaacctagtccaggaccaggggaacactggagtgcgccgacgttttcctctggtgcagaaatgagaaggaatgagccacatacctccgtccccagatgagcgcatgccaagactcagggttcagtgagggggaacaaagcaagttacagaagagaagtatgtgtccatttatggagagtgctcacactcagttggtactggagtctttatgtgtttatgtgcaagtgtgcatgagggggatacacagcacatacgtacacagccgtgtgggaggaggcagagatcgggtcttccagacagggtctctcattaggacagggtctctcattaggaccatctattgccctggatggactgagctgtgagccactgggatcctgctctctttgcctcctcagtaccaagtaagtgcatgccccatgcccagctttttatatggggaaggcatgggtatcgaactcacgtcctcatgtgaggatgcaaggccagattttactcaactgaaccacctcccttgacacttccttgacagtcaaggtacctgtgtgtgtgtgtgtgtgtttgtgtcaccttcgaggtgacaacataggatttagataacctgtattgtaaaggcttagttttcaaaataagtgactgccacattcatgggtttaaaagtacgtgtaacaaaaaaggtacatgtattggtgggtgtagttgtatacactgagttggttgaagaggcccaaggagtcagagctgctctccaaattcgcagggccagccaggtatccaggtactgcacaggccggtgccagtgtagacgcagagccctgtgcttgccacatgtgttgccagggaatccaggaacataacagcgtcagtgaacaaagcagggttttgctaaatgagtgggtttggtgtcaggaggaaaaaaaaagaaaaaaagagtccaatttctgatggcatcagtattccacggcagaatcccagacaggagaagggtacaaatggcgctgttcattagcaaacagaatacagatgtcaggctcattttgcctaagtgtagcagcatcctggggatggcagcatcctggggatggcagtatcgagagccaggcggaggatactgcgggctcaacatagaggagaatcctcagaggggaggcctgtggccacttccaaggtttcgggactggacttggttaccttcctcttggccaatggtgcttcactggtgaggctgaaaagctaatggctcctaaggaacactaaaactaaaatctcctaaatatatttttattttgtcaaaaaaaaaaaaccaccttattttcaaccacagtattgttaagtaatgtatgtttggtcccctttgaaggagaaactgaagcccagagagagaaagcggctcacccaatgtcacacagcaaacgaatggtgtagtttagaaagagcccggcaacagagtgctgaccctgttggtctgttggtgctgttctgactagcaagtctggtggaaagcagagagcacagaagacacgctgggctatgatccctggccttttcttactacaactgatccttttccacgcagcgttctgggcggcagcatcccttgtgaactcaggatcggcgtgtaagataaataaagacatcctttggagaaaattggcacagcataggtcccggctgggaaggggagatacaaaaactactaacgtgggcacagctattccccagaagcctctggcttgggtgtgggtcagcgaaggtcaaaaatcttcaaggaagctgtgcgccatgacgggaacaccctgctgttgggatggtcggagacagacttgcatttccgagtatgcccaccttataccttacatagggagaagagaggggctgtcaaaatcaatgcgagtaggaagagaaagcacccgtgagagcagccaggactggctggcgagtgtggagccagccacgcagcgctgaaggctaaagaagctaggggagtgggggagagagggaggggggtcgtctttatattttatcagcagagacgtttggaaggtgagctgagccttctatggcccaagtgatattttcccacggctcctccccatccacgagcgcctccttccagccctcccagtacatctgtccacagtaaaggaggatcagctagtgtttgtgtggaaacagcgtgaccagagcaagctcaggggtgagccaggctggctggggtgaaccaagctgcccccctagctgcccatctctggaacagacatgaaggcctccagagttaggagtcgtcaagccactgctgcagttattttctgtgctgagaagttgctgcgtgcctgtaaggtaacgggacggagtcttcggtatcaggagccggttcctcctcagcccacataggcccagcagttaacacagtaaggcaacaaagccatctcattcttcagatgtcagccatgcatcaccaccagtcacaggacagacagacagacagacagacagacagacatgtgcgcgcacgcacaagtcacaggagagacagacagacagacacaccagtcacagggcagacacacacgcatgcacaaatgcatgcacaggtcattacccatccatctgtctgtctgtttgtctctgtctcctttttcttcacccccttttaccttctcatgagtgcaaagaaaaaccaaaattccatctgaagtccagagtacctggatacccttgtgccctgtcctgctttcccctgaatcctaaacctagctaaagcttcctcctttcttccagtgggtaacactcagtcctagtcgtatatgttctgcctcaagggcataaaattaatatagaaatgacattttatgtagtggaagcctttgatacaacagtgcaaatggctctgctttgggaagtcagcaatcagacatgaaatggtaccattgggctgctcactgggacagcactctggctttctgccctgcctcccacccccaaaatctaactctgaaaagcgacgcaaaaaggtatttggaagaggacaaggaactgtggttattttatgaagactagctctcagattcacacagcagcattttttccacctttttaaaagtcttaactcagacaagaaaaattggatgccttcccccaatagagtctctgaactgtacttaatgaaagcttgggtaactcgtttggattttgaaagacagaagaccctgcccgttgctgactagggtttaattgcgtaatgaggcagccaatccgatttttatctgatttagacgccttgcaaaataagctcccacaggtctgcccactttttgccaacatgtcctggcaacttctgttgactctgtttactacaaaagtgattggtttcataaaggcccgctgactcatttttttgtttatttgtttctagtctaaggtagcctaggctgacttggaaccccccccccccctacatagccagggatgaccttgaactcctgatccccctgcttctggcttgtattgtgctagggatggaacgcaggactttgtacatgctaggcaagcaagtccatgaagatgttttcattccagtctatcgtgaacagtggccacatttgccctttcttatcctttccagttccccgcctccctgtcctgccagtccctttctgtccccaagtccctccttatctatttatagagtgagtgtggatgcatgtgtatataaaacctatgttctgcatgtgaaggaagacatacagtatttgtccaggctatttctcttaattctcctctcttcaagggacttggcttctttacccaggaattcattcagaactctggccctgtggtacacatcagagaatggagccgtatggctcctgaggagctggctgtagcctgtatttcttcttttaagaaaataccctatgttgctagaaggtgttcattcacctgatttagttcccaccaggctgagaagggggcaaagtacagaaaatatggttgcctcctgtcagatccacccacctccccaggcaagtacagtgcaagggagacctgggtgggtgggtcagggtgaagggcctgccagagaaccccttaacaatccccaccttcacagccgtaactgagagaagactctcactaaagctgctgtctgcattctccttctgccccaaagctcacaaactaggcaggttcccagcttggagctggctggtggaagcccgggctcttgtttgctgtggagttgtctgggcagcagagcagagagacatgaagagattagtcaaagcagaaggcccagaaagggcagtcctcccagcctggccaggagggatcctgtattgggtagaggaggcaggggcctgtctccagcaaacttataggtaccaaaccttgtcctttctaagataggctagaggctgtaacctagaagatagtgcatctactttggagattcacacaaccaacccctggctgcagataaggaaattttctcatttagcagataaggcaatagaggccatttaggctgggtaacctgccgggacctgttgttggataatcaggaagatatcatcgcagagaatatacgctgatgtatttcttcatctttaacagtttcctaacttcttgagatgtgttctccatagttttgtttgcatgctgcccctaagggacttaggtttttttttggtttcgtttcgttttgttttaaatcttcagggatccctggaaaaagctcaacacatggtaacaacatgtacaatatggtaataacagtaccatgtgtgtgtgtgtatgcgtgtatgcgtgtgctgcatacacttgctggcataggtgcgagcgcgtgtgcctgtagctgctcatgtgtgcacatacatgtggaacccagaggcccatgccagcttcccctggtgtctttccaccttttttgtttgcttgttttgacagtttctcactgaactgttttggctggaccggccttagggctctacctgcctctcaccacagatagggtcatacatgcccccacgcccagccttctgcctgggctctagattcctaacctcaggtcctgcttctttggcaagcactctgctgactgagcgttctctccagtccagaaccatctctgtttctcaataacaaacgtgttagggttgtgttgggtagttacaaactcttagtcaaaaaccacactgcacgttagtgcatgtgaaagtttcacaagcacccgagaccttgggaccctgttttctgtcaccaaggaggaggatatgccgttctcttgtactgacgctccagagggaggcctctgcccaacgggtctcaatccagctcctttctgtatccgcgcctctcatagagtcccataaaacttccagatccttcccagaaatacacacctcaagcagctcccagtaagccctttatggactgaactcctgacccaggtccctccttccctatcctcttggcctccacattcaggtttgccccttcttcacacaggagctgcctctgtttggctcttcatagatgctaatgagaaatagagggggggggagggtccagctcctgaggggaggggggaggacaggctctacagctgcctgctgtgaaggactgagtgagctctcttctgccaccttagtgagtgtgtcccagatgacctggtggaagtaagcattgagcgtcctcagaagtttaatctctgagattgctcccagtttgggctctaatacaatgtttgatgtacagtggtgtccgttggttttatgagacactatataatagaaagtattgctatttttaaaacgaatcaaataaattaacatcttaaaaagaatttctttacctgtgtgtacaaggcccaagtggaggtcagaagaaacttggagttacttctcccccagtaggtgagtcctagagatccaactccagtcagtcaccaggatcaaggcaaaccagccaagccagccaagccatcttccccaccccaagtgtgagtgtgtgtgtgtgtgtgtgagtgagaaatggaatcagtaatgaaatccacattggattcattagctatcctttttgtttgtttttgcaaagtgcttagagaaaataggcagctagacattgtggagaaatgcaaaaaaaaaaaaaaaaaaaaaaaaaagctattgtgttctgcagccccaaatggacagtttctttggagaataaaattaaaaatcaccccctcccgtcccctttttacttctaaatcttgctgagtaggactaacccgggctgcccctgaacttgagccaattctccaagttcctcggattcggttgtctgtgtgtgacgggttcttgtgtagcccacgctggcacacagctccctatttagccaaggatgccctgagcccctaaaccagagtgctggggtgtcacaagagtactgccacactcagcttatgtttatggtgtgtgtgtgtgtgtgtgtgtgtgtgtttaatttttatttatatttgtggggtttttgttttttgttttgtttgagacagggtttctctgtgtagttatggctgtcctagaaatctctagatagaccaggctggcctctagctcagagatctacctgcctcctgacccctgccctctgccctctgccccctgcccccttgcctcctgcctcctgccttttgagtgcagggactaaaggcatatcctgttttacttttaaaacataatccattttgaccgctaagtacagctcttgctgttgctgttatcacctatttactgtgcacatgagtccatgtgtgcatggcatggtgcagttgtcagaggacaatgctgcagttgaggctgggtttctcctgtttatgccacataagccaggaaggctgacccaggctagttatcctgcctctacctcccatatctccatgggagcgcacagtttacagaagtgccctgcagcagatggccgtctgcgtgcactcccgggatgcaaacccgggtgatcagggcttggacagcaagtgctttctttacctgtcgagccatctccctggcccagtgtcctgtttctaaccttttctttcatcaagtaccactcagtaaacaaatgggatacgaagttcagttccgaactctttttaattgaaatgaggaagggtggtgtttaatctgtgacttgtctatcacggtgacacttgggatcgatatggccgatgctcctttacagagcagtgagcaaagccccggggacaaagccttccttttaataggctgtgaggttggttgtgagagtggcggtcagctgggtggtgtgtggagccagagtcccgagaccctagcaagccagcacgtggtcatagaatccttgctgtgtgtggcgttagatttcttggccagtaaataacatgaaattttttcaataattactgtaactttgagaatgtgcccctctataggttcttccttacccgtctggatcattgtaccccgacacttgatatatgcagtttgtattggtggccacatagagagtgagctttgagatgcaaatgttccggtctcaattaaatgcctttggtgtgcattcacacccagtccctttgctttctcttactgaaccaatagaacacagtactggggtagtgtatctctccagcgacacgcctacagaagcagtgaggtaattattcctcttcttaaactcttagcttgggacacctctgaggaatggctttatttctccttactgaataaagcttttacaaatacagaaacccacctttcactctcaggcagctccagtcacagagaagtgtatgggtaaaaactgtatttcttcgaagttcatgcctccaagtgggaatcgcccctggcctgggtttggatgtggacaggacttgtctgtgaagccctctgcctctgtccttagggaacttgggaatttcccatctcattcagccccacaaaggctagtgagatattcattctcattttctctctctctctctctctctcctctcccccccccccccgtgttgactctgtctggattgtgtaaggggctactagtaataggcaaaggcgcagatactcctaaaaagaaagggctgggaggtctgcaggctcctgaaaaccagagaggaactgactgacctttgctgcaaagtgagttggtagtcacatggctgaaaaaccgcgttggatttatgagctaaaactctgggatgatcttttagatgtcctgccttcttgtttgcacgcatgggatacacagagaatccaatgtgttttgtgttttagatatccctgggaagattccagttggggccctgtgttttgttaaagcgacagagctcctgtcttctttctctaggcatggctgggatggagaggttccagtggggcctgtctactgttagagactgccaaccaactcacccagggctcactcttgctttacctgggcctatctcttctttttcatcaataagatggtttcagaggataacttctgaagtctgtgtttccctgcccaatgctgagacctgtctgtctgtctgtctgtctgaaaacccagacaagtttgatttcctgtggaatggtttgtttagtggcatgattggagataagttttgatctatggccacataggggtataaggtataataaactaataataaattggcatttttcagtgacctagagcctccatagctactttttataaaatgcccaagtgaaaaactgatcagaaattgatcttttcaacttggtcatttcatgggtaattagactgtagatacacagtaattactggtatattaatttgaatggttgctttggcctttcccacatgtcctgaaagaagacggtgttgaggctccagcttactgtgtgtctatttaaagtaaaatatttctcagtggaaagggataattaggaaaccccaaacagatcccaagttcactccccagggaataagtgtagatgcccgaccttagaagtttctggggcattggctgcccatctctgtgaggtcactgggtagaggctgtatcctccctgtttgtacttcccagcatggaggccaggctgccacagaggtcaatgtggatactgtggtcacattctagaaagagagctgtaattatgacttctaattatgtgcagttatgcctacagagttaaacgtaagggcagatcctacttggaagtttaagttaattgtctacagggtcagaagggtgctaccatctgtnnnnnnnnnnnnnnnnnnnnnnnnnnnnnnnnnnnnnnnnnnnnnnnnnnnnnnnnnnnnnnnnnnnnnnnnnnnnnnnnnnnnnnnnnnnnnnnnnnnnnnnnnnnnnnnnnnnnnnnnnnnnnnnnnnnnnnnnnnnnnnnnnnnnnnnnnnnnnnnnnnnnnnnnnnnnnnnnnnnnnnnnnnnnnnnnnnnnnnnnnnnacaagagagggtcacatataactcctgttccagggaaaaataaaatttgatcaggtcatgacccagcctgccttccctgtctccctggtagctgtcttacaccgtgggaacacttggactttcatgtcctgagccctgactttgttgagaaagagcattaatcacctttggacaggtagtctggtgctttattttggttttgaggggttggtttgataccatcttattgttttttattttggagtgtgtgtgtgtgtgtgtgtgagagagagagagagagagagagagagagagagagagagagagagaaaacacttcactttgtataccctgtctatatctgtttctttgtgatctttttaaaaatattatttattacatatatgagtgctctatctgcatgtacacctgcatgccaggaaagggcctcaaatcctatattgtagatgcagatggttgtgagtgctgggaattggattcaggacctctggaaaagcagccagtgctcttcactgctaggcccccttttctggtctttttagtaagattccccaacaggatctgagcaaccagtttttataaatccttcaacagtcctgacttagccttgcaacactgactttccggtcttgaaccttttcccctctggctcccacatcagccagtgtcccgctgagatggattctttcctcctggaaaagtgacttggcacatatgcccagctgaagccagagctaatgaagatgccctgcctgtggaatttctccatttcagcagcatgggtcctgctactcagtggcagaagagagtggatgaggggaattctgagcacctcacagagcggggaggtagtgtctagggtggaagcagggcagcagctggtcttccagtaaatgggggtagttgactggggcagggggcactgggcagcacagagagaggaagcgcgctgagtgcggacaggctccactgccagttagtgcccagctgtctggtgctcccactgcccctccctggtttctgttctcatctcatggccttcatgtcatctccaactaagagacttaaaatgtccttccttccagatactaaggtgggggaggcagagaggggagttctgagctcttgtaggagccccacaggaagccagcatgtgccaaagtttctccctatatccctagtttaaaaacaacaaaacaaaacaaaacacaaccaccagtaagcaagagggttcaaaatggagatgtggagcccaaagggcatctcacggacttaactcctcttcctgtgacccacaggacaaatcctaacctgtatcaggtctcgtacctctgtcctcttcaagtctggaaatttagattgttttgtgcaatccatttcagcttgtttgcctcccaggcagctggtagagagacatctgtcacctagtcagaggcgctacagaggcagacgttcgtgaaatttagaacagcaggtgaaaggtgtccgctgataatcaggacgaaaactgcagtcactgtgctcgattgctttggacacagattcagcaaagtagacagagctcaggagacatcaacagtaaggtccttgctgccaggagaaaatggagaaacagcacttgtgaccctgagacccagcccagacactgtgccaccctagccgtgggcagtgtagacctagacagaccacagccctggcatctgagctcagttctgacctcctacaaccttccccggcatccttttcaacaggaaacagagttgggggtaataagtgggtttggttggcaaagtgagaaagctgctttggactggggttgtcgcttggataaactttattcccctcttcggttttcagagttagtgatgatgccggcctgtggattcagtcaattctttcttttccttaggtttgtctggtcaggttttaatctgagaaagactaaaaggatgtagaaatgagaacctgctgacatctaagctacaggtgtgggtcacccatcctcccctggcctgccttgctacagattcttcccgctctccactctggctgttagtttccatggtttgagctgtcttcagagcaacaagtttggatgcatcctatgtggagagtcagatttggagggttatgtggtgtctggctctcagataacttgcctctgagatggcactggtgtggccaagctggaggtgttctcagtgcctctaagtctccccttcttgagggccttttaattttttaaatttgtataattttgtacatgtgtgcatgtatgcttgtgggggagagcttgtgccacctcacgtgctgtgaggagttggtctctctctccatccagcttgttgtctctgctctcgtttactccaggctagtttgtccctggagcttctagatctttcttctgtctctgcctcccatcttcccaggggagtactgggattacaggggcaggctacatccagcttttcctcggttacaggattcgaactctcagatcatggggcttgctcagctaaagtttttatcctccatacaatccctcctccacttcccctgccttcagtatactttgttttcggtcaagaagtcactattgcagcagtggctggcctggagctttctgtgtagaccatgctggcctcaaactcatgggcaatccctctgcatttgttcccaagtaccaggataatggtatgccagtgtgccacactattacctggaaggtctaaagtgtccttgctatggctagaggcctgtgtcaccagcccagctgaccctgagtccttcctttcgatgcactcctggtgtgctctgtgctcctccctgcgtgaaggcagtgattgaagttacaccctggcatcagcctttgttaggccgcttcttattcttcccaccccccatgatgctgctttccctaccctgaggaaaagccatagttctgatgagagtccctcagtccccgtgcctgtagctccttccttccttcctcttgttcctggctcttccccagtgcttctgtcttcacaacacccaggcagaggggaagtagaggtagtggtggcaagtgacgtcaccagagccgaccgcacaaccaactcccttctgctgccggccagaccacttgcagctgctttagattggttgcaatggaagccaaaggcgtcagtgacttcagagtcacaaatgcaaatattctatatctctctcagagattttgcacgaggagggcaggggagacagggataagcaacaaggtgaattttcatgtctcattttttgctgtgttctccttgaggcaatgattcagaggttcccttctcagctgtagcacgtgtacatgttaactcagccactgtttctctccactctcatcgtatggactagataatgctgtatcctgcactgcggagtgttaaccatcccacccagtcatgatgatcaaaactgtttccagacattgccatatgtccttgggcaagggagagggaaatcgcccccagttgagaaacagggctcagttagaagggctttgctacttcctggagcgttttatggcttgtttctttgttttctagtgtttcttggtcctaagagagaatcgggtcttttctctctatttttaggaattaagcaaatacttcttggtatgtcgttctcacacgcagttacagaaaatgggtaaagctgtctcagagctaaatgatcaggaaaagtcatgggaagggaaggctttcgagggagtgctttctattaggcctcaagaagatggctgattgaggtgcctattacccagtcaaagtcggcacgggccacgaggttgtccctgcatccctcagttcctacctgttaatgggtcctcctggatggtttaccccaccacctaccctgagctctccaacccaggggctgctttatagcccagccatttgggctacactggccccttttcaaactctttggcctctggaactcttagcagacactccaggctcctctctcttcctctccttatgatggatccctgctccattcgctggccatgccctctgtggactctcctggatgcctctgcctgttctctcccttatatccacacaaacttgctcctcaacccatgtctagagaggtcgtgtcctccttttcttttctccgtccgcttgcctttgctctgggttctctccagtcacattcacagcccctgcacggagtcttagcttccctctgcatgcacaattcagtgccgtctggttttgacagagtccctagtgaattccactgtccatcctgagccccgcactcaggtgccatccctagccaaggactgagttctactcacccgaccagtggctaagataaagtcacccattcatttatcctgtgtgtgcttcgctccacactgataggtcccaagtaccatcttaagcagcaagtgaggcaggcaaggaagaaccataacggcccacttgccttgtagacaggcatatgagaagacgccagggtgcacctctggttgtccatatctgcactactatatttagtatgtgacattttccccacatatattgtctttggatcaatcgtgtgacattataacaccatgaaaatcacttgacgtgtaaggaggagtgggggaggggaacacattcactgatttccagaagtgatcagactgcccaaggtttctatctgagaaaactgtttggtaggcctgccagctctgagctggtttgttttgttctgtttttttttttttttgtttgtttgttttgtttttttgagagtgaggaccatgccttctgtctgcctttatattctaaggttgcttaaatgcatagcctttccagacacttctgtctggtacccaacagaagtcacaccaagaacccgccaaacacctacccaacaggccatggctttgcaggagtggtatattctcctggctttaaagactgtcctctacctccagataccttggagcagatgctgcatctggaaggtgccgcttggagtccatagttctgtcagtcatgagtctaaaaggaaaaaagatgtcaggtgacattacagatcgttagaaagctgtggaaactggcatagactctggcttctctcatgtctgcagtcacccacaccattttataatgagtgaggtcaggcccagcaacgtgagagtcccatgttaactagcagtggacccaggacttgaacctagcaatccccctgcctggtttatctagtgcttttcccatcctgcccacagaggaaagcttccaccactcccaggtggagccatgcccctgtgctgggaaagcaagattcaactttatcctaatccaggtagctgagccctggatgagagaagcttagaagcctgttttcctcatttgtgtgggtcggcttgtgtggacattcaagctaagaaggatgggaaacagactgtgccaccatttctcggtcctgtacagcagaaaagctgcatcgtaatgaaatgaccacaccaaaggtccaagttgacatgcagcactggcaacgttcagagaagcaatgctgctgccaaagcataatcagggactctttcatcacaggatacatgcatggatggtggtcctaactctaccgagcaccatggtagcatgctgggtactaacctgtagcacctaacttggcttcctgtaccaggacgcagagctagggactatcagggagggtcccttatcccaaaataaactgtcatgctgttttactctcctgaacctctgcctccctgtggtttcccagaggacaacaggaacgttaactcctgtgtctgtgagtcccggacaaaacaccatcatctcttcttagactgataaaccacactgaacggcaacgggaagccccccacctcaccttcggcaaccaaggaaacctcttccacagcccgcccacttcactccttccttgactctcgtcctctggaatcggtgttcctcaggagcagacatatccccagacccccaaacagctccccagtcctctcaaatgttcccagctcaccccaaatgggcacttccatcagaaagtgtctcggcttcattcaggtggttgatttttattgaatgcaaacgagaggggaagcctatgaaggccctaagtgcacccagtaggacagcctgtcacccaaggggagtcatgagctgatccccagagaagctgaggtaggtagaggaaggcgtggcacaggaatgccgaaaggagccgtgctgggtaagggtggtgggaaggggctgtgcagaggcagcgtgtaagcatgcgttaacatactgtaaacatgtaaacaaacagcatgtaaacagcatgtaaacatggccaggatctgtggggcggaacttcagctccaggcggattccattatcacccgagatgcttcaatacgccattgcagaaacttttaataatgttagcaaaagatagccaagatacattattgagtgaaaagaaattaggctacagccaactgttttgcacatacggtactctccccttttcagcgggagattcattccaagaccctcaatgaacgcctgaaacagcagatactaccaactcatgcacacacatatatgttagattatgagaagtctgcctgttacgttcccccagaattcctaaagagagaggaggtggggcttgggttctctgagggccatcagcatcctcatccgtggaggcagaacgtctgctcaaaggaaagtaggggagggggttagcatcctgtgttttccaacttaggcgcgtctgttcgtctgttcgacttggtttgggtgggtggagcgtcatggggagatgctgggtagcccctccctcgagtttcggcccacctagatccctgtaagagccgactgatgctattctttgcttctcaggctctctttctttcactaaggccatgcttgtctgtgatcctcagacttcctcctgagaaggagtggaacttacttttttgtctcctaatttcatatctgagcttcccactaccccagggaccctcccctttgggggggggggagatagagaccacgtagccagggcaaccccgaccacctgttgcacttagaacttaaaaagatggcagtgaagttttgtatgggaagaagaaaaggcacagcacatatttgctccctgagagcaaagtggggccgcctcagggcttgtcccttgccacccatggggaccaaggtcttcactgctgggcagtagggacccggcccaggagcagagtggaacttgaagcttttctgtgactcactgaacatgtatcagtggggaggaattgactgtttgagcagtgtcaccccaggagttgccaaggaagctaatttacctgtttctcctgcaatgcgcttattaaaataaacttttgccccattatggcatttggtaacaggcctcctgcaggcaaaatagaaaagggcagagtgaagtttctttacctttttttcttttctttccctaaggcattgtcttctgaaaccagcatcatccatattattaatcgcttgtggggctttatcatgcattgcattactcccttggaattaaactacacatagaaagtatgaaaaatgcacttttttaaaacagtaaaaaagtaattttctcgcataatacccaaaataaagtgccatggagccattagtggtaaattgaattttttggtatgtaatttgtacaaaaactgacaagtacgaggccccctctccccagtcattagttactgggtttagcggacacggaggcagtaatctgcaagggcaggcattttgatgtcggcttcaattgcacacttcatttatttggacaggggacaggcggcagcttctgtcacaaggcctcactgcactattagcgaatttcgccccagggcagctgggacgctgggctggggcagatgttcttttcagcctattcagtgaccattcttgggggttgtttaccgttgccatggtgaccttcatttccatagcagcagagctgctgtttctcagagggaaatgaatttagttataaagggataatatttttctctgtctctatataacctgccatctgtcaactggtggattggtaaggattcagaaacctattaagaattatagcaataaagtgatgtgcgttcgggagagagcagattaaaagcaataataaatgaggacataagccttcaacagcagaacttcctcgattcctttctttatgtgctttttaaaaaaaaaaaatgccttcaccacctcttaacaccaccgtgtgtacacatacccttgtaaaatgcaatttctattctgctgacggatggaaatgaccaaatgtcttgtttgtatctgtctggatgcaggtgtttcagagctttctctgatgctgtgagttcctccccaacattagagattcccaggctgaccttcctattgttactagctcacctacttctccaccccagggtaaaaaactgagggcgcccagaccaacagcttatcagacacccacagggcagacccaacattaacaagcacgagaggacatggtcatagatcttaaagaagaagaagaaaatactagcatgttctttgaatctcattctagaataacttttctttctcttaagtccgaatggtgtgagagtcacctctgcagtccttcatctggatgtttttttttttttttccctctgtcacattcataagctgtaacttgcagggggaaaaagacacgtacacaccagccccgttgtaaataatgttatttattggttgatttttccagatcctgacattgatgctgccagtgccatgatgcttttgaattctccccctgagatacaagcaggttgtgagtagatatttctatagcatacagcaccacagtttgtgaacgtcacctctcatttacatcctaggccgtaggaagcactaatgctgacatagctctgcacctggagcatccccttcaaaactgaacatgcacatgcatgcacacatacagccacgcctatgcgtgagccagtgcagaggtatgcttcgagttctcactgtcaggaccgaggagatgagaaagggacccgctaaccactcctgctggagatgtcctcccacccccacccccccaccctccccccggcaggagtcatccccatgagtctgtaggagagattccctgggccatcatagtgagctaagcagtacccagttgtaaactttttttttttcctgtctaggtcttcaataatattagggtacattctggagagtttggcccgcctatgagtggcttggccttaaaatggaaccacagtaccacattgcatcacctctaccctgcctactaagtggccacagagagaagggcagggctgatgtagtttagtagggctcacggagcagtgttgacttaatgatgacaggttgacaggtcgctcgttgccttgcttgggcctgactcccacccactgcctggtgtctttcctttccctttctcatctttatagctgacctgaagtcaagatgtctcccccgcctcacagcctgaggccattgcatctgtccatgccccacatctggccagaaccacactgagccgagaggtggtacactaagatctgcgtgtcttctgtcagggtgctgctcggtcacacgtgcagaaagtaacttgacatggctgatcctcctgtgacactgctagtgactgctccctacctatcttgcgcctgtgactatgtttccggctggcgtggagctctggctttctgaagatatcattgccttccaaagcaatgagaatccccccactttggagacggtggcacttcccacaagaaaacatcgctcccaagatgcacagtagattcatggtggaatgataagaattccagacccctgtcccgtcgtttttctttgtaccaattttaaaagatccaagagatattgccaagtgagcatattcagagagcctggccctgtgtctggggccacccttacctgccctgactgcagaacactcactccccattgccagcctccttttcctggcctatggaaggcaaggctgctcacacctccagccagcctactctaccgctaagcagatagcaggtcacctagctagcctggaatgtggctcttaagtgtcagaggaatctgtacttaaaatccattcttagatgacatttcaggaagaaattatagactccagtggtaatcaagtcacaggctgcaaaggttcctatgataaggtggcatgacctgtcttagtggaagcactcagatctctcagagctgtgtaaattgaaaccccttcctcagctcgatgccactgtgtgctgtgggtattacttcatgtgtatgtacttcagatagactggtccctaggctgagaagggaatggagagtctaggaaagtcaaggggtgtggagtgagcactaaacagatcttcagtgtctctcctgaaagtctcttattcctggcctcttgaccacaggttgggttctcctgaattgctaacaggattgctttttgatatttccttggccaaacgagcctttcctctctccatccctgtaactctccaactgtaattctctttctgcaatatccacagtcctatttacgtccaagtgccgcactgagttttaaaagcgctcatgtgttaaaggtgtggattctttttccattctttctagggtggggttccacgtcatcctggctggcccccaaacttgctgtgtagccagggatgaccttgaactacttctcctcctgccgccatttctctggcaagcaccaccttaccttatgtgcatatgtgcgctagggatggaaaccaggactctgacggagctctattacccagctctgtaggatcattttagtgggctttttaaaaagaaagcttttaccaacattctgtgaaagtgtagccacacccttctcgagggcccaggccaagaaggctctccagggtcctggcaggcaccactgggatgcccatgaaggtcaccagaggacacactcagagacaggaacagcagtggggactgagaacaagaagagcgtggacactggcttcatatctgccttcccatctggaggtcaagtgtaagcacagtcagtggcaggctgcagagcccctaaagattggaaccgtgccatagttagggatcatgtcaaatccatcatctcctagtggacacaaccagagggaagtatatccacaggtctttttagcccattccaactatagctttattttcctctacattgcccggttggggttgggagtggttttgcaagactgggtttccctatgtagctgtcctggagcttgctctatagcccaggctggcctcaaactcagaggtcagccttcctcggcctcccaagtgctgggattgaagatgcgtaccactactgcctggcaacgttgctggtctattgccttgagattggaggcagtgcctcgatccctaaagggagaaatcatacagagccagaatgatgacgatgctgtctcccaccctgctactgttgccccaggcctaggtatgaatcctcagtaaatgtataaaggcaacagccagcctccatgatggagaactggcagcgtgcatagtgaagctcgtggttgtgtgtccctctctctgtgggttcacacagaccttttcccatggtcaggagctggccagcctggcttctgagaaccccatatgttttctgctgctctcttccctggggctgggtgctgtgaccaggctctgtttatagagcctcctcgcgccttgctatttatagcttcctgcttcacccctgagctgcccctctgagtggcaagctacccacctcctctcctggcactgttcagtcctggcaattaacaggctagcttggttgctagaaagggctccccccaccccgctttgtcattgtgctttgtagccactgcacttcaggtcaccaagtggcagccccttagatttcttccctgtttggcatccgaaagtctaagccagggccagcacactgtctctaatgctcagtgagttttagaaaagagtctgcctgagacgctagtgagaacccaggagccctgtgccccctgcaggggtcggactgcagtcccgagggtcaccccctcttgtttcagttgtctactgcaatttgcagagaggcacagttaattaaagccttggcttctaacagttcgtgcccctggtgtcactcagtgtgtgggatacattctgcaagaagggccatcgcgcgcaaaatgccacttccagaacagccaagagcatggctgtctactcatcttaccttctgaaatcaaaatctatccacctactccagtctctccctaaaacgtggtggtgtagacggatctcagctgctcgcatctcctgaatcacctgcctagtagctcccttgacaatccttatgaatcatctttaacccctgtggagaaactaggtcaccataagccatctccaaaggcttatataatccttggttggaattttcccagagacggaactctcaataataaacaaaacagcagaatggaccaagaggggtggggaatgctgtctggaaccggggtatatgtcctttatatagggctccacagaagaaagaccacaggaaacaggttgtgccctgcctgccctgcctgccgtgacagcccttccccagcctgcttccaagcaagcaggtggaaagggtgccttcaggggaggaatgatggcaggaatggcctgctgctctacttatggcctctcatagtgttagccagggctgccctccaatggcagagctgcaagctccctgctgaggttaattttagaccttgcaaagactaagggagatgcatatcaaagagcgaggcaggtgaagtgctgatggccagcacagtgtgcaggaatgtttgttttatgcctcggacctttcagaacagaaatgagctttagaccctggaaagtggctccgtcagtagtacttgtgtgagcacctgagtcccagacgtggggtttggggttagggaatacatgcctgtaattctggtgctaggggggcagggacaagcaatccctagctcaatggccatcgagtatgcactgatccatgctgcttctccctggccaggtgtgagtgtcacagtctagctgatttgagaaggccttggagacatttaagaaaaccagtaagtgctggggagtctggtgctgaagcctgtgcagtggctccagcaaccgttctcttctcccgggttgctgggagaaaagatgggaatgctgtcgaccagaaagggatgcttagacctcttctactgagcacacagagttagaagttgccttcaaatgtgtattttctttagtatttgactgagctgcctcctaactccatctcagaacgtgaggtgatgggttgtgttggtctttgaatgtattgatttttttttttcaggaggtgcatagtgagagaaggggtcttagtcagggtttccattgctgtaatgaaacaccacaaacaaaaagcaagttgggaagaaggggtttatttgtccaggtcatagtccatcattggaggaagtcaggtagaaactcaagctgggctagaacctggaggcaggagctgatgcaggggccatagaggggtgctgcttactggcttgcttcatgtggcttgctcagcctgctttcttatagagctccaggaccaacagcccaaggatggcgccacctaccatgggcttgggcctcccccattgatcattaattaagacaatgccttacagctggatctcatggaggcatttcctcaactgaggctccttcctctctgatgactctagcttgtgtcaagttgacacacaaaaccagccagtacagaagggaaagaaagatgctaattttaggctaagggcaggcgactgggctcatattcctgcctagtgttcagtggaaaaggagacggctctcaatgcctttttccacagagccattgtgaactggctgtgccagtttccagagacctcattcctgacacttgcgggtggggacagaaaggagaagagatggaggcacacttaagtgtcacagctggctcttggcagccagtgagcgggcacatgcatgctcaccatctcagtctggagtgtgctgccagtgaggaaaaccaagaaatggcagggactggaggccagactcagcagctcccctgagaaggagggctgggttcagagggtgagccaccttacgtaaacgttcccaggcagtttcaaatctcaggcacacatctgctactgctgccaggttgctttgaaatgaatacagcacattaattgggaagatgtgtatgtagggttagggctagctaccaaaggcatagtagactggaaagaattgaatttcccccattaaaccgtgtgccttagagataattcactggagtttctggagaggtgatgtgggctgcttgaaggataatgggagcagagttgacattaaagcacacatcaccagcccctaggctaagcagttttcatagccttccttatgtaatcctcagaacaaccctacaaggtgtgtttgtgccacctgactagggtgggatacccagtgttatctgatgccatgctacacagagcccttcttagactctgcacagtgggtcaggagtatctccaaagcctggcctccaataggtgtttgctggagccagtttcttcctgttttcccttcctgccgaagtgtcctggtgtgtgaagtgtctggacgttcaggcagagaactgtgcatatggggcatgggcctctgaccgtgggtcctcctcattggcgggtgactcatgaccacatgagtgtgccctgtgactcccattggcccacttcccttccaggggtgatgctgacagtatgtacctgggaaccaaattatcacaggagccgtcattgctgtcgtcattgctgtcctagccactcggtcaccaggaacgcagctcaggcctagctcagtctagctttcgtcttgttcccttttgtgggttttcagctgacctgaggttggggaggcacagtgcctcggggttcttctgttgaacgtgggtctgacgatgataccgactctcacgcatttcctagatatgagtgcgtctctaacctcagtaaacctcccctgcaagatcactttggtgggaacaccacttgcagggggtgaaacatccctggcttacttgagttgacatagcttgcttcagagacaaagcaattaactggcagaagtggggcacagacctggcgttcctagccacctccttgcaggccactttcctgctccggactgctgctctgggtaaagtcccagtgtgcctgcattccttagctgcttctctgttgctgctaggatgaaacaccatgaccaaaataactcaaggaggagaaggttccagagggatgagtccattgtgatgggacggtggccagaagccgaaaagtcacaccttccatcacaagcacagagcagagggtcggctggaaagcagagccaggctgttcactctcagagcccgcctccagcaaggctacaccttctctacacacagtgtcaagtgttcaaatgcatgagcctctggagggcattacttattcaaactaccacagtgggatggcctcctgcagcaaagaccatgttcttcgtttccttttgcacgcagtgcatttatttttaccgtttctgagtatgcgggctgcttttctgccttcgaggtccagtgcagacagcgctccccataacaagtcctcagggcacctatacttggcatcaggcatctccatctgtgcggcgataacccccacaccaaccttagaacttaccctagcatttcttcacacacgcacacccagtctctctctccgatttaactatagttaccctgactcagaggaagacactaattactgacaatggttagaatcatggtacagattttcaggatttaagttcttttgtgacgtggcccattgtatccgatccatttactgttctccgtgagagccacagtgagacgcccacagtgtcagcattaagctcatccaatgactttgggaatgccatcagaagtcttcgaacccctctcccgcagtctccagacagctgacaaaagcccatacacactcagtagactacagcaggtagctgcaattctgagttctcctgaacctgtctcttcccattgtaaactataaatccatttatgattaatcttcacgtgcagtatccggtaagggtcaaggtttgtttttatcccaaagggttaatcccgtgctgtgatacttcctaacactctgctgccttgatacctacctttgtcaaagctcacttggccatactaagtgtgagtctgttttctaggttccattttgtccctgtggtgtaaatggcgatactcaaaagagtctcacactgccttaattcaagcaattttatacaaagccttggtatcagataatataaatcaggtaattaagctttcggacactgcatcctcatggagtaactagctgaatattgcaacactacccgcattcttagggtgactagttatcctcctgtctccagtaacctcaccggtcctctgaagttaggctgctgcttggcaatgagtttgttctgactgtgccttacacattgattagctacagtgcgagactagggatgtttctgaacacagggctgtgctgtgggactgacttgggcaagaacggcagtctaagccttcatccttcttttggaagaccttctaacaagaaccttgtataaacctagaagagaaatgtcaaaaattcattagcaagaattacggaaagcccaaagtaatggacagcctattaaagaagtctatattcaggcaggcaggacatctcagctggcaaaggtgtttgctgtgccaacctggtaacctgagtttgatccccagagcccacataaaattggaaggtgagaacggattccacagagacatcctccaacttccactcgtgtcctggcgtgtacgcccccacggaggaaccgtatcctggcatgtaagccacacacaggcactgtgtacacacacctaataatacaatttgtaggaattatttcatattcaagagtggatgtttaccctacatgaagcaatttcaaaaccccctcctgaaacaccatgtagctgaggatagctctactgaattcctgatctccccgcctgtgcctcctgcatgctggggttacaacacctgctggtttacagggtgctggcgaccaagcccagggctttgtggagtagacaagcattctgccaactgagcaatattctcaatcctgaaaacatactcttagagacctcaaaattatgaaacatgagtgtgttagcaatttgtctcataaaagtattgtttgcaaataacatgggttttaaattttgacatcaagactggttttcatttttaaatgtataattttctagtatttcattgttgcttgtttgaaagggctctatttatccacttctcttcagcatgtgccaggattacagggagcagaagaggtctagaatattctttagagagcagaataaacatttggggatttccacagtgtcacacaagaagtaaggtaggggcctcataatctatccacaaggctccccgggtcccacagactcgtggccggtccctgtaagtgcagcatgagctagagaagctgtctagtggaagctactatttaggaggcgagggaaggtcagatgtccaggactccccggaatgtaaattcttggggtcacggtcagggaatggcctgccacacaagatcttatggtcactagtggaaagttgttagagtgtatatagtagaagcaccaggagaaggaatgccggagagggccatgcgggaagacggacaggccccgattatacagaagccagggtttgtgctcagcccacccctccaggcaaccccaggaaaggcaaatccctgggtgagcttgtaatgtggagaggcagtctttcagataaggatttgactgtggttttgttttaaagctgctttcttccccccctcccattttggatgaaggacaaataaatagatattcccaactttaaccaaagcaggcatgagaagtgtcatcgtttaatcattaggtcacctgcaggcccattgtaatcttggtgactttaaatgttcttggggaaagaccaaatataagagattttactaatagatgtaggaaatcccgttttgttctattttgtgtgagcgtgcgtgcgtgcgtgtgtgccatgtgttttgaacaggtgactattcaggcaggtgtgcctgtgcaccctccaggccattgagtcttcctctgtcactgtccaccttgctgccctgagaaggagtctcctgctgaatcagaagttcgctgggctaggctggttgccagtgagctctcagccctgtgcattaccctactgctaagaattcatactgtgtggtctctgtgctcatagagcaagcactcttaaccactgagccttctattcccagcccggatgtctgtctgtttgtttttcttcttttatactttaaactcgtgtttgattgattcttttttaatagaagtattaataatttgtaagctattgatgactctgcttgcacattgtctttctttctttctgtcttgttctctgcactccttccccttgtgtgtgtgcgcgcacgtgcacgcgcatgcttgcacacatatatgttctgcccttcttttctctctttcagagttgctaacttctttacatttgaattcactcctgatgtgtcttttttttttttctccttttgcttttctagtttctccaggagtgatacaaaatggagcgagggttctgagtcgagggctgtttcctggtgtccggccgttaccaatcactcccattgggatgacggcagccataaggtaagagaagagcttgctgggcggaacctgtctgggtagtggggaaaccatccctctattgcctggggttagagagcaaagggcagcacacccgtccaaacgccccctcatcgtcctcccgggtgagcagacaggatacagctaagggttttcttaagttaacagggcaaaatcagctagaaggcaagggtgagcagttgttgactgggcactggaccatcccttcccatcctgtgaccctgcgatggcgtctcatctctctggacccgccttagttccctcatctgtgagactttatgtctacatggagggggtgcagtaaaacatgcaaaattgcatgtgaaatgtgatttggtaagaggtatatgaacagcgcgggtgtcgtttcccagtcactgagcgtcaggtcaggggacactgagctcttctttgggtgatttctttcctccgtccttctcctcatctccatcagcaaccccaggggtccggtccacctctggcttagagccctcacatgcagcgagacagtctccttgttctcttcctcatgtatcagtcactaccttaccagtttcctaaaccaagactcccaggagctctttccatgactccctccttccgtatcacccctcctgcctctctccttgagctaagtgtgttcaagggcatcttagtttttttcatattgctgcaataaaatatcccgaccaaagcaatgtagggggaaagactggtggttaaggttaaggttacggttaaggtccatgctgggagggcgatcagagcaataggagctcgaagcaactgatcacagcacagtcaggatgcatgcagggaatagagaatgcctcctgtcggtcagctcaacgttctccgtatacacagcccaacaccccctgcccaaagaacagtcctacctactgcggacgacctttctccttaccctgtgagatattccccagaggcaagccaaagggcctgtctcctaggtcttctgggttctgccaagttggcagccaatactgaccagcacaggcaaatagtgcatgacctgtatgccttacttttgtggtgccttctgtagacttccctcagcgttcagattccttcagaacactttcccagaagtggccaccgccacgtgcttccgctgtggcccttttggcctgtagccttgtgtgtattttctcttctcaggggcttgatgctgggggtgggactgagtctttctcagctgaccaatcacgtgagctgcttgcttgctgaagaccctcccctcagctgccctttctttctttctttctttctttctttctttctttctttctttctttctttctttctttcttccttccttccttccttccttccttccttccttcctttctttctttctttctttctttcttttcccccccacacctgggtcatgctcaccttgtgttattttcttttctgttgttgtcgtcataatataacttagggcagaaaggttttattttgtcatagttccagagtggacacagtccatcatggtggggaagctgactggttatcatctctcacacacacacacagacgcacgcacgcacgcacacacgcacacacacgcgcgcgcgcagaatattgtccaaatatggccttgtgcctgcccaatctcctcagatttccaaaagaagttgttgggggggggggtgtactaggctctgtcatcctggggacatttgcttgtggttcctggcctcttttagggtgaccacaggcaccacagtgagtatgcagctgtgtgcacatttacagattctacattgcctgagactcagtaagatgtgtgactgggagagaaatcttcttctcactccctttcatcataaaatttaagttcggccacctgccacttgaacctaaattcacctgcgcttgagaaataaacagtccagtgaagaatggagtcctgaatgtctcctgcaggtgcacaggacagtgtgtgcctgagggtcctgcaggtgttccaatgttcacctaggagagtcactagcacccactacaggccagggtccgcctctcctttgtgtgacaggttttctacgtaattctaagcacttcccaacttaagtgaaaatatttgtctttcagggattttttttcccctctctactgagtggcaaaggccatgtttgtttgtcttgagtctgaaactgttattgacataggtgaagtgttacttttattagctgatcgttacacagcttgtatttgctgggttcctttgcatataattatgatgggaaacctccccgtaagagcatctgtcaatagtgtaattgactcggccgtgttgactttttactcaataacctccaagattggcccatccttagacatcggaaagctgcttatctttacatttgccgggccgtagcgtgctcgggatgcagcccctcgcggtcactgctcacctctgcgccctgcctgcttcttctattgcttttcctggggggaatcccagcaggggtgctacagaatggctggaaatgatgtcagagtgcccccctgacacccatgagattccattcctaatacaacagatatctatatgagagagattccatctagcggagcacgtgctcacagacctgggagaagaggcagacagagttcttcccacttagtgccctgtgctgcctcccaggtagggaggccacaaccctgtcgggtctgaaacagcttagttttaatttcaagatcctttttttaaatatagaaagttggttgtgtttttttgtttgtttgtttgtttgtttttaatttttactgtacatgtgtgttttgccttcatgtgttgcccactagagactaaaagagagagggtgttgtgaattaagaacgttgcgagccaccgcgttggtactaggaactgagctgtggtcctctgaaagagcatgaagtgctcgtaaccactgagcagtccccaggcactctttaaatgtcatgtgtctgggggtggggagcatagaggtcagggctatgtgcaggagcccatttcctctccccactgtgtgagttccagggtttgaactccgattctcaggcttagcagcaactgcctttagcagctaaaccatctcactggccctttggggccaccccaatgaaaacgacctgactcccccagttttcccagaggattgagagagtgggtatgaggtgagcccttgtagggccacagcgtcctgaatctatgcagagaagctcaggaaacagactcctgggtgtggctcagagagccacagagacctgtatgggtcccatgtcccagagacctatatgggtcccatggattattgactttagcacagctgtgagccctgcgcataccaagtcagctccagtgcagatgcttacagtagatgtgaggagccccatagcctcccaggtctccttcccacgaaccagaggctgggtcctgaacatcaggaagtggctttagctgaacaaccgctgccacctttagtgcagcgcagacttgtggtaaggctttaaggagtgatgcacgtctagccctctgcatgccccaccgtaaggaatttccctgtagtcgccatatgagactgcttgatttcatttgggtctctaagaaccttgaagacatttccgaggaacaggaaacaaggcagccattgctgctggtcacactaccagttcttgaggtcagaccatctggagaacccttcttggccagctctgttcctggttgcttggagatgttccgagggtgtagcattgatggatcctgaagatagaagtagaggggtctcttcacacactgtcttgtgttgtgttgtattgttgtgttgtgttttgcaagaccaagcagctgttgtcttttgtctctaaaactgtgaccttcaaggcagcttcagaacatattattaaattatgtgtgttgggcgatgatggcccctttaatcccagcactcaggagtcagaggcagaggaaggcaggtctctgagttctaatacatcctgctctacagagtaagttccagaatagccagggctacacagaaaatccctgtcttgggggtcggggggagataagtttcgaggcagaagaaaatattaaaaagtgaggtggagaaaggatccaaagaaagccatcagaaagaacactagagtctctcctgggcctcgtgtcccagcaacagtctctgcccgactcctcaagcgcagcgatcagcagccactggggcatcctttgtatctctggtgcttggaagtcctaatggttcctttcttccccctgtatccgaagatccacagctcctgcagattcggggtaggccactgaatgtgggagaggttccggaccttcctttcctgtttgtgttctgtgagctcgtgcatgaaagccgtgtttgtcattgtcaccttgtatgtctctgtatttgttgaccccaggaagtggcagcccctcagccctagactccttcccctcgcctcccctcagatgggactctaggactaaaaggagccatgaactttattttgaagatgaggttcaggtagaattaggctgaagttctctgacgaatgctggggaaaactacaaaccccaagttctggcttccggtcttctgaagaacttggagaacttggcttggtaagatggcgttctctaagcagcttttctgaagtgattctttgcctgcctttccttaccatccttcttcagactggtgtgcttggatcggctcaaccacccccacccccaccccctccgacctttatgttttgtgaatgttttgtctgattgtatgtctgtataccacatgtgtgcagtgctcacggctgttagaagagaacaccagagcccctggaactggactttgttggttggttggttggttggttggtttggctagctgggacgccatgtcttcttccggcatgctcactgaggttcattacctcatgcggctgtgactgagtcatttttactgctgtgcagtgctacactgtgagcgtcccacaagctttaacaggaaatttggatgatttgtgctcatctcaccagcccttgatcctgatattttttttttttttaggaagactcgggcatgacggtacacgcctttaacttaacccagcactaaggtggccgtgaattcaagaccagcctggtctacatagcgagatttttaaaaagagagaaagaaaatagaaagagtatgttacagtaatgacaagattctgtccagtcccactttgctatatcttataattaacaattcttgaatttcatttccccaaaaaaaaaaaatctatcaccttaaactcactgaagttttttctaactttttctttactatgatgaatttcataataaatttgccacctccacacagcactttgatttctcagcgctcactaccttgactcattgcgttttaacatcttgctggagtggtacctggtatctcagacgaggatttgccattttgtttatgttgcccgtctctctagctccgtccttatctggtttctgtgtcaagattatgttagcctcgtaaattaaattgagcattcactctcattaatcacttcccccacccctctctatatgaaatctaacgcctttattgccgaattgttgatggaactcatttgcaaaacagtgtggtgctggccttgtccttatagcatggttagttgttagtgtaatctgtgtggtgattatatggtaaggtaggcttggtatttcctgttgagctaatttggtaactctgggaatctgtccatttcaccaagtatacaagtatcttggcataaagttattctcagtatttactatctcttaaaatatctttcatagcttggttttttgaagtttcatttgtatcttctctttttgcttgctaatactgtcatttttctcttccgaggtctcgttttatccgattagtttaagaaggataagtatatttgtttaaatgcatgtgtgtatgtgtgtgtggatcaggtgagtgtggtccccacagagaccagagagggcatcagatcccctggagctgaagttacaggtcattgtcctcagccagagcagcccgtgcccttaaccactgagccatctctccagccccttcttgactttgctatctcttttcctctctttttaaactcttttctccacaaagcttaacattttaatttcctgcaaaccacagccttgttgcacccgtgatcttaagtagtttctactttccactctgatttcttctatgagttacacttatttttagaagtatatatatgactttccaaaccaaaaaagggttagtagctccttactcttcagtttccacttcaccattcaccatgaacttcaccatgaacttgaatgcacgctgatgggagacttcttggaaatttgagacactgaggcctagactgaaagccctagtacttatggtcaagtatagacagtataatttagtacagatcaatttttaagtgttccacatgtgcttttatttttaaagtgtcttttccattgtttatttgtttgtatatgtgttgacacagtctatataacaatctcctgtgtgtgtgtgtgtgtgtgtgtgtgtgtgtgtgtgtgtgtgtgtatgagaagcctggttggtgctgaaagtgatgtgtcaaaatctccccatcacactgtgggtttggctgtttcttctggtagcactcaggctgtaggagatgtattttgaagaggttttattgcaagtactcattttgagaactgcttcatctccctggctaatagaatatgtgtagattataagtagtccgttataatggtgtctggcttacaacctgtgctcttatttcctgtggctgcagcagcgtgacccagctctcccatgtgcgagacctttcttcctccattagctttaggttctcccctgattaacagcgtgctttgtttttattttaaatccacactgccaatttctacctttcccactagaggtttttagccttttttgtttggttggtttggtttggtttggtttttttgagacagagtttctctgtgtaaccctggctgttctggaactcactctgtagaccaggctggcctcgaactcagaaatccgcctgcctctgcttcctaagtgctgggattaaaggcatgggccactaaacccagctagcccatttttattaacatatttgggttcgcttctggctaagtttgcacaaacttgtgtttatccacaaaagatgggaactcccactttccatccctcctggttgcccttacatgccatgcttctcttttatcgccagtcctaggactttgggtgggaatatcttaaaatgctccatcagtgtcttaactttggccagtaccaaactttttgaatgttttcactttctttctctcaaatgctgagctaatttgcccaaattcttggcttctgttttgcttttgtttgcttttgagctccccgtagctgcaatccagtcaccatttgcttaggcctttgctaaatgtttcttcctaagccccaggccttccttttgacatcatgttcatggttcccaagtacgaagttcctttagtgaggggctgtttgtaattaaagtcttgagcttgggtctgctcctgctctgaaggtctaagctgacagtctttttttttttcctttcatcttgagaatgttgtacacacccgtttgctgcatttcctatggccagctgctgcatctccattctcgatggtatgttctttctaccacttctgcatctcttcgttgcccagttcttgagccttgaaatggcagcaatagtcttgcctcgtccttccaagtagctgggactgcaggtcatggtgccgtgcccagctgtcctttgtggttcaggttaactggttagattatgttggttagttggttggtttctttgggtttcctgtgaccttggttgtttgtttcttggcttaggcttttggatttgatagtgataggtgggcatgggtttcactgtttatcctggcagcgcttagtggctgtttgaatctgtaaatgggttctagaaaattctcagccattaattcaggtgtttactcttcctgtgcttttctcaccccactaaaaatccagcccaatttacgtaaatgttcttgtgttcaggttttggtctttggcttatttggttggttggtttggtttttgagacattgtctcatctagcaaaggttgaccttgggctctctatgtaagtaaggatgaccttgcattccaatctttatctatctacccaagagcttagattataggcaggtatttccaataggcgttttggagcctagagctcattggtgggttgggctagactgtctgtgaagccccagggatcctcccacatccactgccccagcaaggggattgtacacagacttcacagctcccagcttttacgtaggtgctaaacaggcttccaggacccggccacctcctcagcccagcccctcctctggcattcccatctcttaaccggactcagctaccgggtgtataattcagttttcagtccttaaaagagggtcttgtggtatagcccaggctggcccggagcttactacccttctgcctcagcctcctgagcaccagtgttacagggctcccctatctcctgtggctcctcttctgtttattttaatcactgacccctcgatcagggtcaagttgtctcagcttgtgcagtctttgtagttcgggttctctagttgtttctctgttccctctccagcttataatagtgtatttcccttgtgcttaatggtttctaaaatgatgaacctaggttctgtgcacgctaattagtcggaattctctgcggttggatttgaagctcattcttccagagaagatttgcttttcaaacttctggaagcctggggggacaatgtccattttaactcccttggagcgaccataaaatccatgaagctgacaaaatcagctttccacccccaccccctaccaccaccaccccccctcacctttcttcctccatcagtctgggctcttgccccagtcctggggtaggcatttgttccagggaactcctggcttcctgattgacccccattgttcaccttatttttaaaactctccatctgtacatagaggttgggaagggtgggtggcatccatccagagggcagcgctggttctcctagggtccccagggtcacactcgggctgtcagggtcgcacagcaagcatggttttgccagccctcattatctagtgaactcagaatacctttaaaatctatacctgcacaggctctaacaccttctgtgttgtaatcagagaaacctcttctacacgggcctgccttaccacctggtcagaagtgcaagtccctagcctggcccttgtggtcgcctttgtagatcattgcactgcctcggatcccctacttccacgatccttatgttaattctgtctgcttttcacctttggcaaggggtcagtcaatgccttgggaaggctactcttccaaaagacagccagtaggttccatagagaaccaagccatgggtaccaggctttttacatgggtacctgtgccgtttaagtaggaaggagcagatggttaacggtagggaaaatcactaactagcataggctgcacctcagcgtcttagttacaaatgttgatcatttttggcttgaactactgctaggtctcactgcctttattcccgagtagtcgacaaaagaatgaacaacaggtttgagattcagagcccgtggcttcattgggcctggggtttgaactcctagggtcctggcagaatctggtggctttcgtttatgctaatctgtgatcactgggagggtcaggacttatggattcggccgacaccgagaaactgcaggcattttcactgtagtgcatgttaattcgaatgaatggtttggggtttttggttttgaggaggagactgtagccagaaatgcaccttccaacatgttcaggatggctgatttcttttaagcatttggtgtcccgtaatggcaacccccctgcagcaggaggcactggacaccagctcagtgcagctggcctatgccagcaagagtcacagggcgccaagctattaatgattgaaggagcttgtcattccctgcagagtttggtgtgtaatttatggattataaacccgtgctgaaatctcagagaaagttaatttcattaagtaagaatgagatcgggctataatccaagtctcacagcctaaaggtgcatcagtgtgcctgtcttcagccagaaagtcctggctgtgtgtgtgctggttctgtctgcacagcgcacatcctccttggggcggcggggagatgttccagttgaaccatctagtttcgagaactccatgtgggaggggtctcgggttgctctgcatttttgtttacccataaaaggctgagcagggtggggctccaagccacatgtggattactgtcaacaggagactctgggtgctccctcccacagcacagaatccaggaccatgggaaacccctctttcctgccccgcttatctacatgggctctcagaagaggtatctacttaaagtagtagtaagctgtcaggcttggagccctgtctctcatggtgtccttcctgacatttctccctccatccaccctcaatgttttcatgaaaaggaaagactcaagaagcaccgcccctcagccagacccacccactagggagcaagttaggcctcgtcctgcctcctgccccagcccctggttttctcgctcttagtgttcgctcagccgaaagctacgtacactctgctgacctgtgctactgaagttgtcctcaagtctggggttattataaaacataaggacttggggctgggaggtctcagcaggcctgacaacccaacagtgatccccatgacccatgcaaaggggacaggagagaaggtctccataaagtggccctctgaccaccacatgtgtccccccacacgaacatcattcgcacacacaacccaatcatggcccggttctctcgtccaaatgtatttgggttccctaagaaactgtttcatacttaggtagaagtttgttttctatttcatagtatctatgctcaacacaaaaagatcgggaaaagcactggtggaacgtaggtttttatctgctttgggtaacgattgagagctagctatacagttaatcacgtttgtctgtatacctgcagtgctcccccggaatctgtgtcggccatgtttatgcgcccagtacacagcccagaaaggaaatcgagaggatgagggtgtagagggcaggcgttaaggctcagggctgcatcctgaagcaagcccttgcatgatgggttctgggttcctatcctgggacttaactttgtctttatgctggatcccttcatccttctgacagaaggagaaggaaactctccaggcgatatacacagtggccatggaaaatagcagggacctcacggtgggaaaggagagttaggaaaagacagcaagcagccacagagaaagacctccgagccagcctggcacaccgtcaccattttgcatcctcacttttgccagaatattccccattccccgggtccctttccctttggctgtaagtaaccctcgcctcctgagctcatccatcccaccggcttccacctaccccgagcatctgctctataccagctacatcaggaagacaacagagagagcacagtcactctccctacggcaacgaggagacggggtggtcagtggcctcctagacataaagacacacaacacaagaatcgatccagggcctgaggggcaccaggaaagctgatgtgaagttctggcagggagccatgttatcggggattgcaggagagagctagtccaagtggtggagccggcttatatttcggtttcagtaccaactccattctactctgtggctttagtaagtcacttcttagcactaacttctgagctatgtaaaataaggagttaaacatgattgtgggctcagtggggcatctgtttgtggtgagcacgagagccgtaacttaccagcctcacttccatgattcagccttgacggctgttttattggctgttcccctgggtcctctctgaagggatgcccctctctcacatgctcagcgattggcagattgagtgggtgactgtcatccggaaggcaggctctttgccacatgtcgtatttagccttctgataaatgcagcagttccagaagagaatatgccattgactctgtggtgcccagccagcatctgccagcagtggctttctccaccgtgctggggctggtgtgtgaatgattcacctgcctgtcacctcaaaagtattgttttaacaactcagacgcacaggtttggagaaggtgtcattgggagcgggaagggaaaaccaagaaagataggactgaggattggggccccatctgcaaagctcacactcctgttagccaggtcttggaattgctagcagggtttgcaggagcccagatgcccggcgtcgtcaccagagatgtgatttgttgttccctctccgtctgcaggaatagcatcaccagttgcaggatgcggactgagagcgagcccccatgtggctccccagtggtcagtggcgatccgaaggaggaccacaactacagtagtgccaagtcctccactgcccggagcacctctcccaccagcgactccatctcctcttcctcctcctcagccgacgaccactatgagtttgctacgaaggggagccaggagggcagtgagggaagcttccagagccatgagagccacagtgaaccagaggaggaggaccggaaacccagcccgaaggaaggcaaggatgccctgggggacagcggatacgcatcccagcacaagaagcgccagcacttcgccaaggccaggaaggtccccagcgacacactgcccctcaaaaagagacgcacggagaagccgcccgagagcgatgacgaggagatgaaggaggcggccggttcactcctgcacttagcagggattcggtcctgtttgaacaacatcaccaatcggacggccaaggggcagaaagaacaaaaggaaaccgcaaaaaattgaaacaagtctctgatttgttttgaacttatggccatttggtttcagcatgtcaggagatttctaatgatttgtggcaatatcagcaatttttttcttttttcttttctttttttttcttttttccttttgttggtttggttttcttttctttctttctttctttcttttgttttttaatttgccccccactcctttgtttttggacccttaaaattttttctgtttaaaggagattgaagccatagaaactcatattgacactcagccgttttacaaaagcttttctttatctgaatacaaaaaccgaaaggaaaaaaaaaaaagccaaaattaaccattgcttcctgcagcctgtcagaaacctgtggctaaacccacagggctgtccatgttaatgccacaggaacatggagcaccacctaggaggcacacacgcacacagagtcagtcgtcactgctcagcccaacccttaggtttaagaagtcagttgtgtttggagtgaggctgggaagcagttacagagactgaagagcccttgtcccctagaggataaccccatgctctggccctggcatcccaaggtaccacaaatgccatcggccttgctgtgtggcaagcccagggcctggctgccagtcctctgtgtttcttagccttgagcctggtaacatctcccaggctgaataccagactgttcaggtgtattaggtgtcagtgactgaggagggaaaacagggatcgtcagagccattgataaccactgagttctgctctatgttaaattaagaagacttccaaagccataagcctgaaggttggtcctgtgtgtgtgtgtgtgtgtatgtgtgtgcgcgtgcatgtgcacacaaacacacaacttaaaggtgatgcagaaaataggctgtgccctcttaactgcccaaggaaaagcaatcatgcccaagaaatgacagtagctgttaagaaaaatggtacagatttttttcctcctaaataaataatctgacccaagttgggagggggggtgctacggaaactgccattagtattatggtgtctttatgagattaaaggcacattgatggactcaacaaagcaaaaacatgacaaacaatacaactcctgtactgtcctcaaaaagggtttgcaattaatatcagtactcatttttgcaacaaagaaaaacagaacagatcagtgactttcacattcagccagtgtagccagcagaaatttctgatccacaaatgcatggattcctttgaagaaaaagaaaaaaaaaaaaaagaaaaaggaaaaaaaaatcacaaaaacaaacttttttttattcaaaaataacaaagttcttgtaaggtaaataatgtatttagcatgaagcatgaattattttcatataaatatagagaatagagagaagactatgcctctaacttttaagccctaaagcttagaggccctttgttctttttctttctttctttttccttttcctttttttttcctttttttttttttgttattattattttgtttttttgtttttttttgaagcaggtgtttaaggtttaaccttcttcagggacaaattctgactgttggggaacttactctgcaatataaattatcttcatgctctggtaggggcttggatggttgagctctgtactgccttgtctgcactcagccccgaccccctctgattctctactgaagagtgtgtccttccctatgtctgtatgtgtttaacacgacgcaataattcgagggcaaacttagtgtgtacgatagactcgagagagttatgggacgcttacttgaggaaaatccttaccgtgatctggttctaggaaaaaggcagtgaataattatgcaaattcgccagaagaaggggaaacacgctaatgggccttactgggtgagggtaagaaatgggtacatgggttggaggaagtacgccatcaaggggttggatggagcagccccgagcgagcgagcgagcgttctactgtgacagtgtgattgcgcagtgaggagggggctggccatctctgccacttcggcacagtaaccaccttgggactaagaccacctagatagtgagagctgaacaacaaccagaccatgtcacacaagccagaaactccagttacctttgccaaaaaaaaaaaaaaaaaaaaaaggaaaaaagaaagttttttccttgaggtctaaacgagaaatccctaaaacaatatggcctcccgtccaaatggagggaacatttaaaaacaaaatcactaccgtggctcagggtcagatatttggaagagagaggaaagtaaagtgaccttgaactcttgaaacagggcagtggtgggcctttaaagctgtgtccacctgtcagtaccaggtaccatggcaacggcggcagccacttccccctacctaacctgagggcagcttttgggtgggaggggggcacccactctagggcaggctagatttacccgcagcctgggctctctcagcgtgagggttcggggttagatgagagcacgggtgtgttctccacaaacctctggcacccaacaagccatccacagctctggaaccctgagccacgctttggtttctgctgtcaacttaccaagtccaaaaagattccccacccccacccccaccccacccccaagatgttcaaactcagacctgaaggtaaaggtaagcactcagcactgtttgtggcagggggcttcttccgatgcaaaccccacacggctgtctcccctcggttcattttttctgaaggggcagaggcccctttcagaggtgacaagatgcagtgtgtgtgtgtgatttacttttctgatctcgtggagatctggagaactatcttatacaagtgtgttctgaaccgcagaaccactccgtttgcataaatacctcaccgggcagctttctaagtgttattttcctgagcctcccttggcaccttcgttggaattttctggaagacttgttggggaaactttagtaagggtactgttttctattttccttctgttttgggcggcatacgcattatgcataaccaaaacaatggctcaattgtgtttaactctgtattttgactgttgaggcgaaaaacaaagtcatcaatgtgtatgtggctgtttgtagcgaagtctgccgaatgaggctgtccgtgtccttaacaagccaaggggcaggaggcaccctctctttcccctcccccaagagcagtagagaatttaagcacaagcctatttgtgaaagaatattttgcttaagtgtaattcactttagtgttggacttccttcccaaatgtcaggtgttcttttagctttcaaactagcctgtgtatccattagtctgacagatcgcctgagcatcattaaagggatgtggtggggttttgtttttggttttgtttttttggttttttccttgcatttctcctgtggggagaagtggcgggttaatgtgtcattccagtatctcacggactcacatggggtggggggaggggcaagtggggaactatagcaatatctgcagatgctttggggacacatagcaccgcgacataacaactgccggctgtcagccctcagacacagttaagagaagagagagactcactctcttttcttaggtgatgctcacatccacgtgttttaccccgctcctgacagtctttcctcattctctagtacttttttggagaaagggtctgcaccgtacttaggttttctttctaatatacatcaccaagctcctacttccctctgcatctccagtcagtatgtttttttttttttttcaggagttcttttagtaaagctggctctctgaatctaaagctgaaccaaaaccacacacagattgtggcataaggaactcgtggtcaggatgactggggcaggtctccatcttggggccacgtctttcaaggagggatgggttggcgccctttcccaagagcgggtttttcctgtagtcgctagcctgtctattgcctcctgttcagagcagttccgaccacggagctttcttgaaggacgattgcattctgtggcgcccgagccacagatggggtggttttggtgcttacagtcccaacacagcaggcccatgtgcaatgtcccaagccaccaatttgggctttatcgatgctactccaacctctgtactgtcccttggagggtggaggagcctatgacatgatgccagagccagagttagggacgagtgaccggaatggggagttttcccatatgtgggattagactaaattcagtgtgatttctctttgccctttcaaaccttattcaggttgggactcatttctttctggtggatcacagctacccagatgtgtagattgatctctatgttctatagagaaatccttttctttcatcttcagcagggtttttatttcatttttattttgccaccaaaagaaaacattggagcatacgtcccctcttgattgtgactttccagtgttgaccgttcagttctttgtgttgtaggtcccagcccaccagtactatatcaaacactgttaggctcatgatgcagcactgtgatctaatttaaataatacttttttattatttatactactatatataatatacatcaacacttttgctatataacctaagtgataaacccctttttttggttacctgtcagactctagactttggtttctattgcagttaacacagttacagaattgtaatggtgtcttggttgttttgttttgttttgtttcttttttcttttttcctttgtaacggaatgtgtaaatcaaagtatatacattgtgtggtgttcctgtttcttgggatgtcatgaggagttacacacagcattcagtgttctgtatagacctgcccacctttgtgaattcatctgttaactcctcctttgagagcacgccagccacggtggctaactcccagcgtcctctctcctgctggctattcttgaattaagcacagactcgtccactcggttgctttatcatgaataatgggtgtgacttggtcactcttccgcccttcagcaaacaagtgctagcttcactgaccaaaaattaaggaaggaaaacaccatttttaaaacgatccaccttttcatggccgagacggatgttagtctacggtgctgcctcgcgctgccgagcctccggaacgagcccgctgtggaatgaccatttctgacttgctgtgggatgctcaaaagtacccttcctgtctcgttagtattggaatcaagactctttatttggactctatacagcagtgttcctccactgtgttgcatttgcaaaagtagagaacatgccttctccacccttttgcaaataattgatactccatattggattctcaaaagacttcgatatggtgatcctgtcaaacctagaaattgtattatcttttcatacctgacttccccgtttctaaaagtaaacagcacacttttagttacagacacagtcgccatttctagagtatgtgtgttgaagccatccaaggtcatagctggctcagccagcctcactccatcgttctcactgcctgtcctgccatggtgaacatggggagagaaaaagaatctgtgtgtgtctgggaaacagctacatcaactttttatttttactactctgattctgtaacacttctgagttttgttgtaattttacagaaaacaagaccacaatgataaagcagaaaaccacacggtttgtggctgaatcttagagtcacctgacctttcctggccaacaggtctacatggccaaattaatttacaagagtaataatttcttcagaagccaatttttttttctgtatttctgtataaaactgccaatatcatgaagagaaggggagaaccggaaaggagaaagaaaacgatgtttggtggtgtttgtgttagcctaaagcagcggtgtggagatggctccatcagccgagctccagggacttggtgttgcttgggagggatccatacagcattttgcgttcttcatgtgtaatcatattgccaaagacaaactacttcatcatttattgtaaataacacttccccagacctaccataaagttctgtgatgtattgtcttccagttgcaataaaaattactgagttgcatcaattgaaaataagtattgtgtgttgtgtaaacaatatctccatgtgcaggtaggcactgagtatgtgtgggcatgtgcgtgtctgtgtgtggtgtgtagtttctactagcctgctttaagttcggggtggggtgaccatgctaccagccatcaccctagttcccttggatccacagatgaaaaaaaaaaaaacacacacacacactagcttatttttaataggatttttagcttaatggtcaagcacttctaaaccccctgtggctaacattcccttgccttcactcccagctcaacacccctgaatctgccctcaacttagttgccctgttaccttctccttaccttcttgctcagcaccctaaatctgccctcaacttgcttgcatttctaatctgcctgctaccccaggcccagtcagggaagatgaaacagcagccaatggctactccacccaagatctcacacatggctggttgttctccctccaaagcatggcaaatcttctttccctcacctgggtctattatctgccaccaggaacctggaagtcccccctcttctgcccagtcatcgcctgctagcattgtttattgatcagtcaagaaccactggggaccaggaccttcaacattcacgcacagcttcctcatcaaagcaccagaactactccccacgtgcgtgtgtgcactctttaagtttgtnnnnnnnnnnnnnnnnnnnnnnnnnnnnnnnnnnnnnnnnnnnnnnnnnnnnnnnnnnnnnnnnnnnnnnnnnnnnnnnnnnnnnnnnnnnnnnnnnnnnnnnnnnnnnnnnnnnnnnnnnnnnnnnnnnnnnnnnnnnnnnnnnnnnnnnnnnnnnnnnnnnnnnnnnnnnnnnnnnnnnnnnnnnnnnnnnnnnnnnnnnnnnnnnnnnnnnnnnnnnnnnnnnnnnnnnnnnnnnnnnnnnnnnnnnnnnnnnnnnnnnnnnnnnnnntcatcagttagctaagctggcatccctgcaagttctaggacccctccgcttctgcctggggttagaagcatgtgcatgcctttatttatgtatgtaatgtggataatggtgatctgaactcgagtctccaggcatgccttttaccacctaagccatccccccgccctgagagattccatcctgtgtctggacccgcagaagcaggtgtgtggtttcagtctggttttagggtctcagctgtaggtcatacccatcttcacacatgtctccattttggtgggactcactgcctgcaaagctgctcgtgcaggacacgcacaaggctcccttcacaagccataaaatgtattgttaaagaccactggtccggtctgcgaggtggcatttctggggtctgcttacctgttcaatgatgacatcccaacagtcatttgggggtttatacctccactgttgaagtgcccactccagcccaccacacatacataccttagtagtctcttttctgttataataaagccagctgtatgcagctggggagagagggagacacatcacatggcaaagtgggaagggagcgattaagggctaaatttgttctttataacaaccccttgtcctgggaaataaccaggtcctctgaggaccacattaatatctgctgagtgtgatgccccttaggacctaattatcttccaccaggtctcacctcttaaaagctctgccaccatcctggagggtgagtagtttcagcagatgagtctctgtagcacacaccctttcatggtggttttgatttttagtgaaattggttctccagacttgcacagccatgtcttttaccctaagccatctcctgagccctgggagattccatcctgttatttaacctgggcttcaccaacagtacagggctaacctcaatcaccaccccctataaggtacctctgaggcctaggaatctcacgctttatctcttaccgtgcatcctgggtcacagtccaggtagcagtcatggtctccaaggaaccacctcagtgtcctgtttggcctatattgctactctcttggagtcttctgtgtgtgttttgttttgttttgttttgttttgttttgttttgttttgttttttaagacaggatttctctgtgtagccctggctgtcctggaacacactttgtagaccaggctgacctagaactcacagagatcctcctgcctctgcctccaagtgctgggatcgaaggtgtgtgccaccatgcccagcaccatcttggagtcttgcgtttcaggatcaccttgaaagtcaccgtatgtcctccagattgctgagtcagtgttggaagcgaaacatcactgggacaaagagcaggagccattcactctgagccaaatctgatgacttaggtaattttccatgttgtgtaatacttgaggccaactacaaggggttagcctcagagaataacacatacagttgtatgtatgtgtacatgtttgagtcatgtgtgtgcatgcacatgtatgtgtgggcatacaagtatgcatgtgaatcagaggtgcacagtggagctccatctttttgcttttgttttttcaagacagggtttctctgtgtagcattgtctgtcttggaacttgctctgtagatcaggttggccttgaactcagaaatctgcctcccaagtgcttggattaaaggcatgtgctgcaacaactgcctggcccatctgatcggtttaattactactaactttacttctgtatgtgagtgttttgtctgcgtcaatatttgtgcactgcatgcatgcctggtgcctctggaggccaaaagaagacattggatcccctgaaatcagatttacagatagttttgagcctctgtgtgggtgctggcaattgaacacaggtcctccagaagaggatctagtgctcttaactgctagtgagagtccgtgtgtcaggtggacataagctgcaggctctacccctggtagcacccatctatggtttaagtttcagctttttgaccacacgtgtgtgcatgtgtgcgcgtgcatgttcacacaggaccacagggatctcagaggcttttaagggccttgatgctgagaccgggatgcgtgcctgtgagggccactctccttcaatacttccttgtctcatgaccctagaaagcataaactaagacttttcaacctcctagaaggttctggatagatgagggtatttcagagggagcctggttgctaggagacttttgtttgtgtgatgaaagcccatgttctgtcccttcacttcccagaccagttgtaagtataattgtttgagacagtctcattgtgtaacccaggccggtcttgaactcacatagagcctgcctctgcccccacccctgggtgccaggagtacaggcgtagtttatcatgcatgcccagccactgtgtattttccctcccctccattataaggaatacaaaatcagagagaagttcatgaagaatgacttcttttttttaaattttggaaagaggacaggtgttggtttgtttgcttgtgttttcacggaagcaggagtgaacgttcggtgtattgaacgtgtgccccctgcacttgaatcagcctccccagagccgtatgtttgaatggtgctcaaagcagtcatcccttaatttgaaatcattcctgggcatttgtggataaagcactctaatggcttgagaactgcttcatgttactccataataaagtgctttgggagcaggcagctaaatctccctcagatgcagcaagccagccgaggggggttgagggttctccctccatccctccctccccatctgctacatgtttcatgctggcttctaaaaatacgtaacacggcaagtactgtatgatggaggaagtctgaaaatctgatagtggctgcttctgtcaatccccaggacacagtttctttattaagtgggtctattctgttcagatcagaaaactaggaagaggtctaaatgttttatatcactcataaatatttttaacaaaacagggagagtagaggccactgaatccaaacttcccaatgcatagcccaggtatctgaagcacagaaaaaaattaagagatttcccctgaacaaccacactatctaatggcagagtttgacttaaaagagtggaaatgttctgtcctttcaactgtattcacttatttaatgtgtaattataatcaccatgtgggaagaataggcccacctcacacaatatcctgtcctacacagttcacatttagctagggtaaaaatgacaatcttttgggatgacacaaatatgccaccttgtttctcagtgtctgatgtgcccccagtgtccccacctaagctcccattacaatcaacatgttcaggcagggtcttgtccttatctttatcaaatttcaccttataattggttcactgtttgaagccagctcagattgacagtggagtagccggtgtggaggtcttgattttgtctagccagaacatttgttacctcaagtcttttctgttcctagcaacagttacaatgatgagtgtgaaggcagtcacttgagatcccagtactgggagggtaggagtgtcaggaggttcaaatccagccccaacttagtgaagaaaaacaagaagcaattctacagactggggaagagttattttatctgacagctctgattcaaggacagaggctgtaaagcaaggagcgtgcaggagacctagccacactgggttccagacccctctctctcaagttacatcagtagtccgtgagttgtgagtgaactaatgtgttcatgagggctgagccatgatcaccccctgaaggtcccactcggtcccaccctttactatatcacaactgaacttactctgttgtatttctgtggctgtgataaaataccctgacaaaaagcaaccgaggggagaaatgggtttattttaccttaatatttcaggttacaatacaacatcgcaggaaaatcaggatgtcaggagcttgaaaccactaatcccatcacatccccggtcaagaacagagcgaggcgaagacattcagtttaggattgcactataggctcaggatcccctgcctagggaatgattctgcccacattggagtggatttttcccacatcaattaattagcaattccctacagataatctcaacttagaagaaaatccttcatttgagtctctcaccacaggtggttggggattctaggtgtgtcatgttgacaacagataaactttcaatattgttttcaaagggcacaaatggtgcccaggtgccactcaatacaaaagccagaagtaccttttaatataccaattaggtcaatgctgtctcttctagaggcccctccgcaggtccccttggacctcactcattgtttttaagattacctgttcagctaagttatgtgtggacctgagtttctgaagatgctagctccagtttttaattcaatcataagtttgtcctgggggtgggggtggaggggaagttgggttaagaccacttgctgctcttccagaggatccaagtttggttcccaatgcccacaaggtgtttgggggcggggagggggagagttagctcacaatcatctgtagctccacttccagaggctacaacaccctcttctggcctcctcaggcactgtatacatgcagttcacatctatacaagcaggcaaaatacacaaataaaaataaacaaatattttgttgttaactttggttcagagtctgtctatccagcccaggctggcatagaactctcacagacctgcctgcctctgcctcccaaatgctgggattaaaatcatgtgtcacccatcatggccaacaagtaagcctttaaaaaaaaaaaaagtttgtccaactataaaaaataagtacacccttgctatggtttagatataaagtgtcccccaccaaatctcacattgaatatttagtatcctc

SEQ ID NO: 1032 - DNA, 3697 bp, Mus musculus
ctccagcagcctctggaagtgtcgcctagtgattatgaagacacctttgtcctttctggagcgatgctgacctggacccattctaggagccttcacgtaaatgggtccagtcatgcctgccagtaagaaggccgagagctcaggaatcagtgtgtccagtggactgagtcagcgttaccggggcagcggtttctccaaggccctccaggaagacgatgatcttgacttccctctgcccgacatccgattagaagagggggccatggaagatgaagagctgaccaacctgaactggctgcatgagagcaagaacttgctgaagagctttggggagtcggtccttaggagtgtcagtcctgtgcaggacctagacgatgacaccccaccatcccctgcccactcggacatgccctatgatgccaggcagaaccccaactgcaagcccccctactcctttagctgcctcatatttatggccatcgaggactctccgaccaagcgccttccagtgaaggacatctacaactggatcttagaacatttcccgtattttgcaaatgcacctactgggtggaagaactcagtgagacacaacttgtcattgaataagtgtttcaagaaagtggacaaagagaggagtcagagtattgggaaagggtcattgtggtgcatcgacccagagtatagacaaaatctaattcaggctctgaaaaagacaccttaccacccacctcctactcctcaggcttatcaaagcacatcaggtccacccatctggccgggcagtaccttcttcaagagaaacggagccctcctgcaagatcctgacattgatgctgccagtgccatgatgcttttgaattctccccctgagatacaagcaggtttttctccaggagtgatacaaaatggagcgagggttctgagtcgagggctgtttcctggtgtccggccgttaccaatcactcccattgggatgacggcagccataaggaatagcatcaccagttgcaggatgcggactgagagcgagcccccatgtggctccccagtggtcagtggcgatccgaaggaggaccacaactacagtagtgccaagtcctccactgcccggagcacctctcccaccagcgactccatctcctcttcctcctcctcagccgacgaccactatgagtttgctacgaaggggagccaggagggcagtgagggaagcttccagagccatgagagccacagtgaaccagaggaggaggaccggaaacccagcccgaaggaaggcaaggatgccctgggggacagcggatacgcatcccagcacaagaagcgccagcacttcgccaaggccaggaaggtccccagcgacacactgcccctcaaaaagagacgcacggagaagccgcccgagagcgatgacgaggagatgaaggaggcggccggttcactcctgcacttagcagggattcggtcctgtttgaacaacatcaccaatcggacggccaaggggcagaaagaacaaaaggaaaccgcaaaaaattgaaacaagtctctgatttgttttgaacttatggccatttggtttcagcatgtcaggagatttctaatgatttgtggcaatatcagcaatttttttcttttttcttttctttttttttcttttttccttttgttggtttggttttcttttctttctttctttctttcttttgttttttaatttgccccccactcctttgtttttggacccttaaaattttttctgtttaaaggagattgaagccatagaaactcatattgacactcagccgttttacaaaagcttttctttatctgaatacaaaaaccgaaaggaaaaaaaaaaaagccaaaattaaccattgcttcctgcagcctgtcagaaacctgtggctaaacccacagggctgtccatgttaatgccacaggaacatggagcaccacctaggaggcacacacgcacacagagtcagtcgtcactgctcagcccaacccttaggtttaagaagtcagttgtgtttggagtgaggctgggaagcagttacagagactgaagagcccttgtcccctagaggataaccccatgctctggccctggcatcccaaggtaccacaaatgccatcggccttgctgtgtggcaagcccagggcctggctgccagtcctctgtgtttcttagccttgagcctggtaacatctcccaggctgaataccagactgttcaggtgtattaggtgtcagtgactgaggagggaaaacagggatcgtcagagccattgataaccactgagttctgctctatgttaaattaagaagacttccaaagccataagcctgaaggttggtcctgtgtgtgtgtgtgtgtgtatgtgtgtgcgcgtgcatgtgcacacaaacacacaacttaaaggtgatgcagaaaataggctgtgccctcttaactgcccaaggaaaagcaatcatgcccaagaaatgacagtagctgttaagaaaaatggtacagatttttttcctcctaaataaataatctgacccaagttgggagggggggtgctacggaaactgccattagtattatggtgtctttatgagattaaaggcacattgatggactcaacaaagcaaaaacatgacaaacaatacaactcctgtactgtcctcaaaaagggtttgcaattaatatcagtactcatttttgcaacaaagaaaaacagaacagatcagtgactttcacattcagccagtgtagccagcagaaatttctgatccacaaatgcatggattcctttgaagaaaaagaaaaaaaaaaaaaagaaaaaggaaaaaaaaatcacaaaaacaaacttttttttattcaaaaataacaaagttcttgtaaggtaaataatgtatttagcatgaagcatgaattattttcatataaatatagagaatagagagaagactatgcctctaacttttaagccctaaagcttagaggccctttgttctttttctttctttctttttccttttcctttttttttcctttttttttttttgttattattattttgtttttttgtttttttttgaagcaggtgtttaaggtttaaccttcttcagggacaaattctgactgttggggaacttactctgcaatataaattatcttcatgctctggtaggggcttggatggttgagctctgtactgccttgtctgcactcagccccgaccccctctgattctctactgaagagtgtgtccttccctatgtctgtatgtgtttaacacgacgcaataattcgagggcaaacttagtgtgtacgatagactcgagagagttatgggacgcttacttgaggaaaatccttaccgtgatctggttctaggaaaaaggcagtgaataattatgcaaattcgccagaagaaggggaaacacgctaatgggccttactgggtgagggtaagaaatgggtacatgggttggaggaagtacgccatcaaggggttggatggagcagccccgagcgagcgagcgagcgttctactgtgacagtgtgattgcgcagtgaggagggggctggccatctctgccacttcggcacagtaaccaccttgggactaagaccacctagatagtgagagctgaacaacaaccagaccatgtcacacaagccagaaactccagttacctttgc

SEQ ID NO: 1033 - protein, 477 aa, Mus musculus
MGPVMPASKKAESSGISVSSGLSQRYRGSGFSKALQEDDDLDFPLPDIRLEEGAMEDEELTNLNWLHESKNLLKSFGESVLRSVSPVQDLDDDTPPSPAHSDMPYDARQNPNCKPPYSFSCLIFMAIEDSPTKRLPVKDIYNWIHFPYFANAPTGWKNSVRHNLSLNKCFKKVDKERSQSIGKGSLWCIDPEYRQNLIQALKKTPYHPPPTPQAYQSTSGPPIWPGSTFFKRNGALLQDPDIDAASAMMLLNSPPEIQAGFSPGVIQNGARVLSRGLFPGVRPLPITPIGMTAAIRNSITSCRMRTESEPPCGSPVVSGDPKEDHNYSSAKSSTARSTSPTSDSISSSSSSADDHYEFATKGSQEGSEGSFQSHESHSEPEEEDRKPSPKEGKDALGDSGYASQHKKRQHFAKARKVPSDTLPLKKRRTEKPPESDDEEMKEAAGSLLHLAGIRSCLNNITNRTAKGQKEQKETAKN

SEQ ID NO: 1034 - DNA, 482119 bp, Homo sapiens
ctttgaaacgagatgatccatctcacactgaaagtttcctatcgtgaggttcagtgtcatctagagtcaacggatgaagtataagtgttcactgtggaatttctacaacacaaaaagaagaggctggataaagaagataaactgaatattgaaactgttccttttccattaaaaaatagcaaaaaaagttttccctgtaactacggagggttttgttgttattattgttgtcattgtcgtctctttcttttggcccaaactctagtgtattacgttctctgtattacactttcataggaaagactcctaccagtgttaccagaaataagtatcaacacgtgccccatcttgcccatgcagaaaagtacttgagattaaatttgcttacatttctggttgattcacttagcaccaacaacccaggtaactagtgaaatctcattccatggctgcagatgccccatccctaagtgtatgttgtcatgacaggaggagtctgaccagtcagggatcagcaggaacaccatgccaccactggaagaataatggcttgttggtgcaactggtatccatgatagagactctgagaggagactcctgcgtcagtcaacagaagctgagcatggctgatctgggcaggaagggcatttatttacaggatggtcggtggctcacaagggtccttaagagagctagaggatcagctccaagaggatgcagcctggatcaaggcctaaattaaattcgtgcagcagatagggcaggtgatggccctgctatggacaccaatgctgttgtgctctgccacagaggctgttgccactcctacagctgctggatgaagcactaccccactccctcctatccccagctgctgggggaacctaggttatgccccttgtactctcaactgcaagaaagggtgggcatgtggtctgtgccatttccagttttagcgggggtggctttgcctccagagattggggattccgcgggcacaggaaggggtcacatcctgggcaactaaaaagagtgacaaatgtcattctcatacttcagaactggggctatgccctaacctagatccattaatgccctgcgggtagcagatgcgaacccaacttttgattatgaacgctctgccaacaggcacaatcaaatgtccaggtgtagctcctctacattcaggagtcacacctcacagattgccaatcacctggagagctgagcaacttgacaagacagacggtttgctttttaaagctgtgactctcacagaatccacttaatgtagccatattctattcacatgctttgatgggagggatgtcgaggctcttcataaaactcaccattcactcaatgaaaatctccttctgggctgggtgtggtggttcatgcttgtaatcccagcactttgagaggctgaggccggaggattgtttaagtccaggaaaccagtgtgtgcaatatagcaagaccccgtgtctacaaaaaatgagaaaaattagcacacaccagcagtcctagctactctggaggcttaggcaggagaactgcttgagcctggggaattcgaggtggcagtgagctatgaccaagccactgttctccagcctcagagcaacagggcaagaccctgtcgaaagaaagaaaggaagaaaggaagaaagatctccttctgaccccctgcgagtacaatttgcatggtattaaaaaatgagaacataaaaggatttaaattatctgctccttattaagttagggaaagaaaagatatcctcagcattttaagatgaacctctcaaaaactactcagagtggcaagcggatataatctacagtgttatttgacaagattgctcttcctagtcaccacccaccaaaagggaaagcttggagctgattgactggcaagccattcattttctgtgaaataagggaagcactgggggcttatacggtaaggttatcaagtatcttacatccaaacctactttaaaatgactgccacataggtagtggttttaccggatagtaacatttgctattttaaggttcaatacggtaccttgtaggcactgaaaacccaagggatttttcttggtggtgataacagctagagataacataaattgcctcttattttggtaacgaagacttggcatgtttttggtcactatggaggtatcttaatatagtacactaaaaatataggtaatctattagtccattttcatactgctataaagaattgcctgaaagtgggtaatttataaaggaaagaggtttgactgactcacagttcagcatggttagggaggcctacaggaaacttacagtcatggcagaaggcaaagaggaagcaaggcacctttttttacaaggtggcaggaaggagaagtgtcgagtaaaagcggaagaaccccttataaaaccatcaaatcttgtgagaactcactcactaggacgagaacagcatggggtaaactgccctcatgattcaattaccttgaatcttgaggtctctcccttcacacgtggggattgtggggattatggggattacaattcaagatgagatttgggtggggacacaaaacctaaccatatcaggtgaagtatgacacccgctgtgtagccattacgaattttgatgtattttcataagattattgttatcattagatgagcatttgttgcaaaaacagaagagttcacaccactcacccaacttcctgtaatgttagtactcaaataaccatgacacatttaccaaaactaaaaaattaccactgatacagatgattaactaaactacagacttcatctggagttccccaccatttcttgtgaatgagagactttagcaccaatttgagctagagggtccaagcagccatagcagaactacattaattcagactggctgggactaaacataaagatggctcaaacaagctctaacatctaccacttggcgtgccaatactttgcatgcatgatctaatttcatcctccacaaaaatccaggttgggggagggtagtggatactatcacatgcactttgcagataagaccgtggggcctgggatatcaggcaatatgtggaagacagctgagctgggagacaacagagcccagatgtgaactaagacatctctgattcaaaaacccacgatcacgaccacaatggcacagactgaagtgcacctaatccaggtgtgatgcagagaccgcctctttccaccagcagtcttgcccaggacccaccttccaaaggtcatctggatcaactgtagcgggtgaccatatgtgggaggttgtcccgtaacaatgacatgcgcctctcaatgacacggggtgttctgtgatgtgtggagtcagtttccaccctcgacacccctaccctgcgtgtcgcaggagaagccctcccggtctccagcagcctctgcggctctccttcctcccgggctgggagtggggcggctcgcggctggcctgctccggggccagagcagctgggaggggcgcagtgcaaacatccccacgcgccttttgcttttctttcctgagtggtttaaggcttaattaacgtgtgtaaagtgatctgaaatgcgggaataaaaagagctggggaagtgcagagtgtggatgattacctgaggcgagacagctgagaaagggaggccgagggagacaaaggggggtctggagaggctgggagaggccttcccgcagcagccagctggttggctgagagccagattgggctgtttttttggcagcgttctgccccacgctttcctctcaaggccttcttcgcagccctgcttggtagtcaggccccaggataaatgattcctaaagggcctgagccagaactgagaagggggtctgagaaacacaagctgtgggccattccatgactggctctgtaggagccggggatgagatgccgcccattagccattattgccaaagcaagcccgggtttggtcaacgaaggaataaatgtgatagatatcagagagacaaaggaatcaaagtgagttttgtccattcctcttgacaagcatagattcataggactgatttagtgctgtcaccgctaagaggcaataaatcccttataaaatggtgggtaaaagtaatgacatccaagtcacgtgtgatttcaccatctcctaagcctgcgttagtgaaagggtgaggctatcggtttcatggggaatgttaaggcttgtgacttcatagggtgaagacgggtggcattttattgcaattggaagcatacaaagaagcaagtggaaaatctttctttcagtataacctgataccacctatatctagaaagctggagagtgttccggggatcttcccagtacagtgaggatttcggtgcatccctgtgtgtatataaacggtggcgatatatacagcctattctaaactgtttatgatgatagaggggaaaaaagtttgtttggataatccaaagtttatactgggctttcatcgtgttttaacgttgtgcttgggctgatagttgcgtagttatccatcttctgagcctgcaaaccgaggatggggctactggtggcacccaagcttggcaatccaagtgaagagaaggatcctcgcttcccctggcttcagttagggaacttcagaggaccctaattgtcctggcatggggtcaagtgtccagcatgctgtcaagtgcccaccctgggctcaatcctgctgttcccactcaacaccaggaccatggcgtggaatgagaaatccccccaaaaggagccaggttgccaccccgctttgtgtctactgcaactgggtagttaaagtggccagaagacactgttgtcctcagcctgttgcaggggcagccaggacccccccgtagttatccactgtgttcttttctaggcattgcacttctgatggattcctccgagagttgtgtctgtgtggtgcctttggtgtgtgtaacatcacacatcacccatggatcactgaagggtcatctgaagccaccaacgatgaattccttcaggtctgcatctgaactaggataataattacctcctaataagtcaccctgccttctgatatctacaacattttggatcgaaatcatcctccatacactttctagaattatcctggtaaaacacagtcttttacaatgtgatggttaattttatgtgtcagcttgactgggccatggggtgtccacatatttgggtaaccattattctgggtgtgtctgcgagggtgtttttcagataagagtaacatttgaggccaggtgcagtggctcaggtctataatcccagcacttcaggaggccgaagtggccaggagtttgagaccagcctagccaacatggcgtaaccccatctccactaaaaatacaaaaataagccgggcatgagggcacacatctgtaatcccagctacttgggaggctgaggcaagagaatcgcttaaacctgggaggcagaggttgcagtgagccaagatcacgccactgcactccagcctgggtgacagagcaaggctgtctcaaaaaaaaaaaaataataataaattaacatttgaataggtagacgaagaaagcagacacccaccctaatgtgggtgggcctcattcaatcagctgaaggcccaactagaacaaaaggctggccctccctctagtaagagggaccacctcctcctgcctgactgcctcgagctgggacattgctttttttcctgccttcaaactcaactgaaatatcagctcttcctgggtttggagcttgctggccttcagactggaactacaccattggttctccttggcctacagcttgctgggtgcaaatctggggacttgtcagcctccttaatcacatgacccaaatccttataatcaatcccctttttttttctctctctctataataaatacagcctactggttctgtttttctggagaactctgactactacaaataactttttatttattaactttattcattcattaaaaaaatttattgagcacctactatgtaccagtcactgttttatgttcttgtaaattatcattgaatagagcaaagattcctggccctgtagaactttattcagtgtgtgtgtatgtgtgtgtgtgtgtgtgtgtgtgtgtgtgtgtgtgtgtgtggtggaacagataatgaataacaaaaatgataagtaaatagtaatgtattagaaaggggaaagggaagaagggaaaaagcaggatgaggaggagtaagagacattgggaagggaacatttaagcaaaggctaatgggagataaaggggtttcccaagtagaaatcacaatcaagttcaaaccccagtggactctggatcctgctggcatctccagcaggatctgcagacgccccctcaaccgaagccttcactttagcctcgttgctccccaggcagtgcactggcccgcctcgcattttcatcccccgacacctttgcccagtgcctaggatgtcctctccagtggggactttcttctccccactctcatgtgcatctcagtgaagtcacccagaaactaaccccagcagagagccaagaacgtcctcacgctggacagttaacaggaagtggcagtgttacctgagcccagggcctacagtcacctgagagaagcctcagccagatgcagccactgctagagatgccatcagaggcaggagagacatgatgacgttctctggcttctatcttcttttcatcctccactcctccagtgaccctcattggccacatctagccaccaactaactgacccaagcgtctgtgaaactcagcctgccagagacagctcctagcaatacagagcaaagggcaggcctggaatggcttagaagacaactggcccattatcagggcagttggtgtttgaatatagagcaccagtgatctgagcacttgtttggaggttctagcaggggagcgcagctattcatacacccttgaccaaagaccagtcctcctctatcagggacagtcgtcctcttcgatggagtgcgcagcttcaggagggacgcagatggagcggtgaaggagaaaggggacacctgcctagccagccagatcagctgaatcaaccctggagatcaatgggatgacagatgtcgcagccagattgccctcatatccccagtgtcatgattttactgctccactgataccactgcactgcaattgtttgcctgtctgtgggctccatacgataggagtgcttgaaaactttattttttctacccagagcctagaacagtaccttgctcgacatttgctacatacacaattggacgaatggatgaatgaatgaatgaacgacagtttctcctgaccagtacctttctggtgtgctctaactttgagctagaggtgaactgagctcaccaccagcatttcttcccagcttctcatcatttgctactggggctaagattgttttgagcctagcatttgcaacatttgccaggcacatggatggtgtgactatgaagtaattagaccagttttcaacaaagggatcaaatgaatttatcaagtaagttttgcattaatccttccaggaaggtcatacgcattttccaatgatacgaccgtgcctagccccgtccttgtgaacagcacaagaaaaggaatgaatcacttttcagaatgaaatgtttctgttttttttttttttttcagttaaatgtcacccagcccgtcacctggctgatatttaaggacacgtcatcagagaagttacatttccttttggcagagaggaggaggaaggggaccgccacacacagaactgggtggtgactttaccataggtgcaggagggctgagaagggacctatcaaagttccaggggtcaccaggtctggacagagacaccctggatgccactaataggccaccttgtatatgaatttacagagtttttgaggcctttcggtgccgggactgctcatagaaacccaggttcaatttgacaaaacactactcctccatgtgtcaagtggagtcagttcttaatttctgataaagagcaaaaagacatatgggggatgaggcattgctcagcctcagagtttgaagtcttctgccggccaggttgccctgggcagctccaggacagaaatctgaccagtgtgggtgggtcttcctagccatgtttctcattttagcagagactaacatatttccaacaagcctcatatttgcttgctggtaaattgctgctctgagacaggtaagaaatgatgactaaaaaaacctacctgcgtttttgtttcggatgcttcattttccgcagtacttacagagagatagttgggaggccaggtgatgtactcaaaaaacagggcttgttgaaagcggagacaggatgggattccagctgctctgctcaccagccatgtgatttttgaacaagtcactttaccttttgggacctccaatttctcatctgaaaattgcagattattgtatctgctttctcacagaggtgtggtaaagatcgcatgagatgtatgtgcaagtaatttaagattgacaagtgtaacatatgacaactagttcttggcgtggatataaggcatcagagaaggtgcctttgatgtttaattaatactaaaaatcttccattacacttgtttagctaaaattggaaagggggagggcaagaatacttttcaaagggacttttttctgcttcaaaaatagaaatcagaaagcacatatttgattttccttatggtgtaaaccacagtgccattgttattagcagttttacagaattgcgaccttcaaacttggtgatatcaaagactgaaaaaaagctcccagtcttgaagcctttcaaacaggcttttctaactaaagcacttttattttgaattaagggctaatagaattgtcctcttaaatgagcacttgcaagattaaaagttgctttccaggtgggctgcagtaaatgaatgtgccaagaggttgctgaaagcccttttgggggcaaacgaggggaatctgatatgagttcatgtaacaaacacccttttccctttgtgaaagagaaacctggaatttacagtctttctaattgtacatgagctgatttgtgtatacatctaggatcataatttactttcagtttactgaatttgtgaattttcgcatttgttttaatttgtaattaagttctctctatgaggcacgccatatgcctccattaattctttctcgttgatttcttaggagatacatgagtgcatattttcatgcaatttttgaggtcttttgaaaatcaaatgactacatgtttagccatatggggctttgttatttaaaagagcatattataaagtaaaagaaggcgaaatgcaaaagggcctgttgtcaacagggggaaaatattgggaaaaacagtttaaaacattgttttaaacacacacattttcaaccttttttctttttagcgttatatttttgaaatctatctttatcgatcccgtaccgcgtctcaccgtctgtgaacggccaatgtcaccagtgcacccggcaaacctctgtctgccaggtactgcccctacgcttaccctcgggctgcagatcctagcatctgccttctaagagttcagttggagccaatgtctttcttttgaacatcttgtgccaggatttgacattaagctccagttcatccgcacaccccgcggccgctttcgcaagggaccgagagggtggcggcctcgcccggagactcgcggcgctgggagctgcctgccctcggtgcgggctgcagaccgggccgcgaggcgggcgcgcggcgcgcactaggacccagcagggctccaggccggggtgggagccgcgccgccgaccccgggcgggcgccgggcgcaggagccggggttccggccgcgatctgctgcagctcggccgggagacggcgcgacccggcggcggggccacccgcgagtccagcgtcgccgcagccccccaatgcggccgcgagaagcagcgggggggcaggcgatcgaaggtaacgaaaatggggctcatttcctgcctcctaatctgctcgggtttagcattgtcacgagaagccctccgtgttcaggctgctgcattttggggcactctttgattttttttaaaggtgtccgcccccctatttccacctggtttcagattgatttatagcttgcagcccaaatgggaaagatccagccatggcaagttgcttattttcattagttttgtctcaaaagtaagttcattaaaaaaaaaaaaaagtttcttaggaatgtgtggatagtcgctttttaaaattttttttaaaaaattgcagacaaatggatatttataaaaataatcaaataattgatgcaattctgttaattacttttagggaagcacacttctgtgggctccccgggcgttacttttattttcaaggaaggaacgtgttaaatgtggagtttgtttggctgggcagagtttacagcattgctgtcgcaactgtttggctatcaattataaacagtgtcaaatctatgggcagtttcagcctcttttcaaatactgtaacgggttatcctgatatgacatctacagatgagtttccactgagggtaataagaagatttctctttttggagaaacattgttttgaggggaaaaccatgattgccggctgggaaggctgaagagactatttttcatgctttgtttatactcccgggatgacatttggggaagggaaatgcaatctttctccggaggttttaattgtgggattattaatttatttaatttattagtttcaattggttgggctcggggagccctccgtcacaggctgtgcttaaggtgacacatttgctagcagttgggacacatgattgcaaatgtaaaatgtgcctcacccgaaaggactggtctgctggaagctcccgtgtggagctgtcgtaggcagggtgcgactggctcattgaggaaaaagggaatcgttttccttagctaaggaagacatcctgttatattccttttgttccctgtttttcattgatcgccgactctgccttggagaggagagcagctcggagggtgcagagctctgaaggctgcacgaatgactggagcccactttaactctcacactgattggtcagttagattgagacttatgaaaacagtcacccaaaaccttcttttaaaatcgtgctgtagtttcagatagccctcttgtgcacagatttctgcagggtcggtttttcatttgggtgcagtttgctcgagatacctttatgtttaattttttgttgttgtttctatccacataaagtaggccattttggtgacaaatttctttgcagacgtcagctactagcttacacgtatacacagcactttacaatacattctcaatgatttctgctcataagttgtagaatgcaaagttgttcaacttagaataatgattcctaaccgggttttgatctgagtcttttaaaaaaaggaccatcagtagatggatgcttaactgtatcattactttgataatttaagtgccttgtgcattagcacgtttcatgcactaagtctaaaactgtgacagtgaaaggaaaagacaatgaaaagcaaacaatcaaaatcagcctgcacactattctgagagattgtggcatctgctttgaggcgaatgcatttcacatccaagaggaagggcattctgcaccatataagaatatgaattagtaaacactgtgaaatgttatatctgtaagacaaactgtaaagcccatgaacatcttcatttgagcctttaaagcgatttcattaaagaagcactgtcccagaagttgttaaatgtataaacacttttctgattggcttaaaaatttagacacaggaagtggattgtatctaataaccgatgagtggagacatggttgttatggaaaccgagaggagtaaccccaccccacccccactacacatacatactctaccatgaccaccacttaaaaagaaacaaaaacaaaaacaaaaacaaaacctgcatgtcatcacagatgcctggagaacttgttggcttctgtaagctttcccacagcatctgttgaaacctgagatcgcgcctgtcaaatcaaggtcattttacaacaacaaccaaaaatgtggtctcctagatttcataactgtatttttgttggaaatatttgaggaaagagccttaaactaaggatgagcccccaggcttactttgcattttgctacctctgagctgtgcaagggaaggctaagaacaatgtatttgaacacttaattgtgggatcaaactgacttgtatgtctacagttagaacaaaactcttttgagagccagaaaggttagaatgttacctgtggatgaggattcatcgggggaagttataatgaggtgtttgtgtttacaagagggttcaaagttgaactcaagcaatggaacttacagactggtggcattttgaaggctgcgtttgtgtgtggggtggtgggggtgggggtggggagtgaaagggagggatgaagattgcctggtactttgggaaatataagagagggtgttctcagaggctaaccagggaaaggaaaatctaaatgaaaataagaactgtttcaaaaatcccattattattacccagttgacttaaatagaaaagtttcctcttttgtggatggggaagagtgcttttgtttttaggataattgagacgttcccagtatcaaaattgcaaatatttccagtatcttggtaatgatttccatgaggactataaagaaaaaagtttggagacctcccctccccccctagcctccacccccaaccccgttcattttgctaagcaaaaaataaccagaggccctgtactaaattttgactttgaggatcaacatcgaaccttgtaaaatataaagcaaatacatttcttatatttttctaatcttgttaatggcagtcttcagattttatgttcttgatattcatttagaaacgtcttcctttaagtcatggcaatttgaagcattgaatagctttatcttaattgataatggtcagttttaaaacttgttcaattaacaatttggtctttttaaaaagcagcagatttcccttattttcatcaactaattgcatggggagtggggaggaggagagtcctaactctattttaatgtttaatattctgcatgtatgtcgtagaaatatatactgtagaagttaaatatttgacaacatgggattatgaaatatatgctaaatcacccagatatttaactgattaggacttggtaaagaagattaagtttaatgggacaactggtctcttttagcaaggatttcctgtagggagctttcttatctgcaagtgtgttcattggcaggaaacatgtcagttgcttgtttttacaaactgaaggaaatgaatgggatttgttggtttctagaatctaccttcattctctattgtcttgcaaatagttggctcagaacacttcgtttcgaaaggggctttggagtggtacaattcattctctgcaaacctgtggcatttaggtttatttctttctgattttggaattaggaaaattgatcgtggtacaaccatgtgcaacttattttcctaatacaaatgaacaagatgttcaatacaattccaattcattttcagttgtcagctagttactcacacactcactgaagctgctgtttttggatggctatgccaaatttctaataattattccagaataccaaccaaatgccagtgtcgattttggattagtgtagagaggtaaagagaaagaggcagcttcattcttctcattgcttataacaaaaggtccataaagaatacacgttaggtatatgccaaccttgctgatagcaaaaaaaaaaaaaaaaaaaaaaaaatcgaaattggggatgggttggctaaatccagtttatagtacacatgagaaaaacaaattttaactttgaaaggatttgctgtgcagaagtctggattagtttctgaatgttgaaaatgagtatatttaattgcttcaattcctagatgtttcaaattcgggaagaggagaaaagggtaagcttctttaaaggaaaataaatgcatccgcctccatttgcagagagcagcctggtgagggaggttaagagtgcctgagggagacggaaccatttcttgcaatggtttgcacacattttcatagacatcatttttgttttctacttagcaacaaatagaatcttatgcaagaccctaatatatgagtcaaataaaaacagagctgctctgagggaactaggagcccagagcctgctattgtcacctgggctgtgcccagggcacactctggaacccagtaccactgtgtacacagtttgcaaatcactgcttctaaaatgttctctagagaagaccttggggaattgcttgcagagccctggaacctcttagcgaaagagagaacttttgccttgacaatttaagaggctgcttgtgctcatagtgagcaggaaaaaggtggcaattagtgacgtaatacagtgtaccctaggaagcctacgtacatacagaaaaagatgactgaccacaagcatgaaagagccctggcccagtctataatgagagggaaggcatatttttaggggttacttataaaccagggccccttttatttataaattataggaacatcatatggaggtgtttgagattagttggttataattttgctggaaatgcatggctttattctatttccacctcaagatctgttctatcactgttattctattagtcagtgaaaataatttcatatgaagtgtcattcatgaaatgaaaatttgccaagctatataaatctgcttggcagactcagtagtgttttgagtgttgagtaaaatgataacacacagatgatatttgcatatcatcaaatatattcacattatctcctcaatgatgagattgttctgaaatggcagtattgagatcgggctcagttttcccccttacatcccagaagctgtcagtattgaggatttctaggggtggcaggcagaggaatccccttcagttccactcttgattttcacaatcactagattcacctctgcctggtatggagatgagaaatcaggagactcttcattcaggcaaaccgcagtagaactgtgctgctcatggccacagccaacctccctgcattgtttctcagagggagttcagttgaggagtctatagaagtagaaaggacagacccctctgtacattctcctgttactttcattgtgcttgccatgtttctactacctgcatggggttagagatgacaattaaaataataagttttccaggaagccaaagatcttccaacaatttgtgctgggaaaaaaaaattacatatgaaatatttcctttacaaagatgaaactagcataaggaccaaatagttggctgtggtaacgatgaaatgatcgaaatgatggtggttaactattgaattgtgttgactgacgcttttcatgttgaggctgtttaaagctatctccttcctcctcccacctgcatttcaaagaagaatgagtgtgtaaccaacagaaccgtcccagggtgtactcatgataatggagcagtgcttctttgggagtgagcattaagctcccatggtttgggggactttctttttgaactgaaggatacatgccagttaccaggaccttgctgaagttgctaacaggtggcttctccaaatgtgtgcctagtaccttcgcagtgcctttgcagatgccactttcttaaggttcagagagtagcaggtcccacttggagagggattttagtatattatacaagtttagattttagataatgtaagagttttttttttttttttttttgagacagagtcttgctctgtcgcccaggcaggactgcaatggcgcgatctcggctgactgcaacctccgcctcctgggttcaagcaattctcctgcctcagcctcctgagtagctgggattacaggtgcgtgccaccacgcctggctaattttgtatttttagtagagatggggtttcaccatgctggccaggctcgtctgaaactcctgacctcatgatctgcccaccttggcctcccaaagtgctgggagcacaagcgtgagccaccgtgtccggacttttttttttttaagcagggtctcactctgtcactctgtcacccaggctggagtgcagtggcacagtcagggctcactgcagcctcgaactcttgggctcaatgcagcctcgaactcttgggctcaagcagtctttccacctcaacctcccgagtggctgggaccacaggtgtgtaccactatgccctgctaattttttatttttgtagagatggggtctccctgtgctccccaggctggtctcaaactcctgagctcaagcaatcctcctacctcagcctcccaaagtgctgggattacaggtgtgagccaccacacccagccagtttaagagctcttgttgcactctgaaatttcctaattcagcaaactgaatacttttgcagcttttaaaataaaacagtgactctataaggactacttaataaatatctctaaattaagaccatcatgttttttcttgtgactagattcagcatttagaatggcctcttgacacttctggggaagtgtggcagtattgggtgatacagaaaaatcacatcacactagcgaggggccttcctttgtcagatgctgctctctgcattattttaattggttctcatattagcttaataatactgctactaatacctaatgataatatgcattaatgtcccattctacagatgaagaaaccaaggcaactgtgttcccagagtcacccattctttggtacccgactattaatagttctcactgtcaagtcccctgactccaaatcccaggctttcctccgagactgaccacctcacaactgctcctctgactgtttctatcccagggttgaagacttccccttccacacagaaaatggagttcccttcggggggaagaaaaagcaggatgggttggggaatatttgctgtaattcccaccggaaataggattttgcttcttcacattctgtgttctcacatctgaccattagtgatggaaggggctttttaggtcccttgtcagtgattttttttttttttttttttttttgagacggagtctcactctgtcgcccaggctggagtgcagtggcacgatctcggctcactgcaagctccgcctcccaggttcacgccgttctcctgcctcagcctccccagcagctgggactacaggcacccgctgccatgcccggctaattttttgtatttttagtagagacggggtttcaccgtgttagccaggatggtctcgatctcctgaccttgtggtccgcccgccttggcctcccaaagtgctgggattacaggcgtgagccaccgcgcccggcctcattatttttctttatttgtcttcaccttttgactttctcttcgtccatccctgagcacgtttacctacttggtaaataaaaagtcctaattccagaattacccaaagattatacccagtctaactggctataattggcagcatgtctaacacaaaaaacagatttcctagacagcactcacttttacacttggtctgaacggctcaacaaactcaggtgttaagatacactgacatctccttgatttctttcagaataagaaaaactggcttaagtcagcagatcagcaagatattcagtcttctttttggggctcccctgtacccctaagtcatataaagtctacagagacgaagttaggttggggttcagcttgattttttcatctaagcaagagctctgctcttgcaagagtgtaggggaaacttaaaaattaaatcatcactgggcatgccactgtgcctagtatacgtgtgaccaggtggaactagcaatggaacagatgtagacattttcagtcaaatgtgtgtctgctgcttttctaattctcttaaagagttcaggtgaatgatcagaacttgatggaactaattaatatttcacaggtctgatttcacatatttcacatgtatgaaattattttaagagatcaatcaacggaaatgccaaagacatatgcacaaatcgggggaaacaaatcatcctcacgttcattcagtgagcagttgcgggcacctactgcataccaggaactgtgccctatgatagggatacgagggtgaagaaatcattcccagacagactatcccctgttctgtaattctcataggtttcttaactggaaatatccccaaatgtggctcttttgaagttcatattctaagcagatatagacagactgaagtgccaccctcatgagatccttcctggagatattatgcctttggttttaatttagaaacagaccctgcaagggggattgaagggtggatggttttcttgggagaccatcccaggaagacaccagtaggtgcaggagagggaaatgaggaagggaaggcagccagtcgtgagttatcccatcagatccattgtgggcggtggagctcagccgcactggggcacgtggggcacctatgccagccacgctgctttcggtcatgggttgaagactgctctcagggcgtgttgatcccagtacttgagatctatgaaagctgtcagagtagccttcagccagagaaggttctcagggacttcttgatgccgttggtagcaggtggcagttgggctggcatgccctgagatggtaaagcctgaaagccatgtgcccaggacatcagcaggttctgctaccactctttcctcttcagttccttctacagtcttgcaactatagatgttttagaataatcatttttaatagtccctttaagcttcaacatgaagatcctggcagagtggtttttcagcctgaaaaatgggaacaagaggagtggcataatttcagagttaagcatttaggcagaaattatccataagggccctcatttttttctccctcggttacaaccattatccttatttcccaggctagaaaacttggaccgccagccgccgccgcccccgccctcgttttacatcacatgtatctaatttatccccagggcttctcattgctttctttaaaatccacctcctgttcatctccacaacccttactggtgcttccctccaaaaaaaactacgagtgaccttgatcgtgctctggaagacttctgtccctaaaaccctcttgaaatatgggctttgaagctagacttcctgttctcagaccccctccctgccacttaacagctgtgtgactttaggcgagttacttaacctaagactcaagtcctaggtgatatttccataagtactatggaaataaaactctgtaatgtggaaatcctgaaaggattattgggagggctaaatcatgagtccctgaaaagcacttggcacggagcctggcacgtggttgcaactcaaattattgtagctatttttattgttatgttgtcaatgttgttgtgttccttgtctactaagaaccttgatgccagcctgggcaacatggcgaaaccccatctctacaaaaaatacaaaaattagccgggcgtggtggtgtgcacctgtggttccagctactcgggaggcttgatgtgggaggattacttgagcttgggaggttgaggctgcagtgagccatgattgcgccactacactccagcttgggtgacagagcgagaccctgtctcgaaaaagaatcttgatggcttctcattgcccagtctaccaagttctctctttttctgcctcactttcaagttcttttataatcttgccccacttattaaactgctcagagaatgccccaggatctagtcagtgtctcttcacccctgaactcgctgtggtccttctagcttcccagcctttgtacatcttgttccctggccacaaccttcttcctccatgttgtacagtcaccactttcattcactggaaaactccaatgtacagagaaaatgcagtttgttcattttgtctacagtgagccttccttcccagcacacacccattgatcgtcaagagaaagaataacttttgatcacacccgttaaaaaacttagttggatctgctaatccaaacagttccctaagataattctagtcttccataggaaaacaatgctattccctcaggttgtctcgcctaccccatccccagttcttcgcctatgatagtgcatgtgggaaggaatgtcaaccttgctcttctgtttatttcttatgaaggaggaacaaactcagggtccctaggctcggtggcctctgctgttggaggcaaggtttcttgccttctgggagctgcttgtttagctatactagcagttgaagtctgtggttttataacacatagtctagtctagtggttttcaaagacctacagtaagatatagatacattgtacaccacatatatgtatgtatgctgtggatagatgaaacaaaagtttttataagatagcatgtataggccgggcgcggtggcccacgcctgtaatcccagcactttgggaggccgaggcgggcagatcacgaggtcaggagatcgagaccatcctggccaacatggtgaaaccctgtctgtactaaaaatacaaaaattatctgggtgttggctgggcacggtggctcacgcctgtaatcccagcactttgggaggccgaggtgggcagatcacgaggtcgggagatcgagaccatcctggctaacaggatggctaacaggatggggtgaaacccccatctccactaaaaatataaaaaattagccaggcatggtggcgggcgcctgtagtcccaggtactcgggaggctgaggcaggagaatggcgtgaacccgggaagcggagctttcagtgagctgagatcgcgccactgcactccagtctgggtgacagagcgagactctgtctcaaaaaaaaaaaaaattagctgggtgttgtggcgcatgcctgtagtcccagctactcgggaggccgaggcaggagaatcgcttgaacccgggaggtggaggttgcagtgagccaagatagcgccactgcactccagcctgggcaacagagtgacactctgtctcaaaagaaaaaaaaaaagatagcatgtatagttgaagcataaattttaccagattttatcatccctgctacacttaatccagattgacctactccattctattttagttaaggaaagaaagattggttgggttccaataagtgatccagtttgctaaatatgttagcctggtcatcctcttggctttatcagaacttgtgtggcactccctgctgactcggtcccacctctgtgtgcatgggcagcaaacttgagtccttttttttttttttttttaagacacggtcttgctctgtcgtctaggctggagtgcagtggggcaatctcggctgattgcaacccccatctcccgagtccaagcgattctcctgcctcagcctcctgagtagctgggattacaggcatgtaccaccatgcccggctcatttttgtatttttagtagagacagggtttcaccatgttggccaggctggtctcaaactcctgacctcaagtgatccgcctgcctcggcctcccaaagtgctggaattataggcatgagctaccgggcttggcccaaacctgagtcttagccacttggtggtctttaaatggggtcctctctgctggccacaacagatcttgaggcaagctcactgctctccagcatcttaatgccttctgtttgcaaaagtggctgtaccagttaacaccctcaccaacattaagtgtctctgttgtttcatattctcactgatatttaatattgtcagactttaacatttttgccaatttagtaggtgtgaaataatctcattttaattttaattttcttggttattaataagcttacgcatcttatgtttattggtcatacatgtttcttcatttacgaagtgcctgtttggctgttatatttcagtcttgagtcaagccagaattgttttttgtgtatagtgtgtgaggcaggtatacagttttatttttttattttattttttttttgagacagagtctcgctattgtcgcccaggctggagtgcagtggtgcaatctccgctcactgcaacctctgcctcccaggttcaagcttcccctgcctcagcctcctgagtagctgggattacaggcgtgcgccaccacacccagctaatttttatacttttggtagagttggggttttgccatgttggccaagctggtctcgaactcctgacctcaggtgctccgcctacctcggactcccaaagtgctgggattacaggcatgagccactgcgcccggctacagttttatttttatactacacacactccaaattttgcacatgtattagatacatatgttcaggcgtgagaagtcctataattctcttttcttatcaatttttttttcttttttgctggcttcaatgctcaaccttgatcttatcaaattttggtatcaatgtttttctatccttcttaaaataaagagtttttctattatctggcatagtctgtataagactagaattatgtatacctcaaaatagtagttaccttctgatagtagtcatctgtttatctggaagtggtattttcttttaggaagattacagctactaattcaacttattttatagtaagactaatctggtgttttattgctttgtgaatccattttaccaatttatgcatttctaggaatttattgacttcatctcggttttaacattgggaggcataatgattgtttataatagcctctaattcttatttttaatctctgtgccatcgcagtttttcatttgtgatatcatttatatgcttgcttacttttttttttaatctcacagattacatattatcattttaaactatatggggcactaccacacctggccagtttttttactttttagtagagatggggtcttgctatattgcccagcctggtcttgaactcctgggctcaaggaatcctcctgcgttagtctctcaaagtgctggtattacaagtgtgagctactgcgttcagcctctttttaatttctgtttgtatctttattcttcttacacttttgtgtttaatagagtataaaacttgtatttttctgacagcttagttaattacttttgaagttttcatttctaatatgttaacaaaaacataatatattttttctaatataaataactcttcatgttctaatatttaagctgcatttttatatatgacatgtacaaatgtagctggatattgtttttgtgcagtctgaaaataattgtcttttaactgaaatacataatgcatttatatttattgtaattacatgtatattctaatttatttcttcatttttttccatttttcctgcctcttccatatttctttttctttatttcttgctttcttttgaattcttttgtcttattttatgtattctatagtagtttggaagttttattctctatatgattcatttagtggtcctctagatattttatttctagatccttttctagtggttctttagaaattttaacatgcatacttatcaaagcctaaagccaattagcatctttcctctcctctcaaacaatgcaaggaccttagaccacttaactccaatcactgctctaccaatttaggtttcgtttttgcccagtgttttagttttatcttgttttttttgtgtttttttttaatctcacagattacatattatcattttaaaccagaaatgtttgttaagatttacccatgtgtttactacattttttgcttataattccttcccccaacccacccccttcatcacttctcttaggtttcatttagtgaggataaatcgatggaaaactctttaagctattgttcactggaaaaatgtccatttcccccttgttcttaaaatggaatcttgctaggtatacaatatatttttgccaggtataaagttatggttattttctctcagcatattaaagatgctcaattgttttctgacttccactgctgataaatcaatgctaagtctcattgccatttgtgttgaaggtattctttctccaagagtactttacgactgttttttaagatattttctttgtttttggtgtttggcaattttatcataaagtgttcagatgtcaacttatttgtatgtgtttattttgtttgggggtttggggctttataattttgtggattggctttctcatcagaactggaagattctcaggctgctattcctgctctgtactctttctctctaattccaggtttgagattaagcatatgttatacctttgttctgtcttttccatgttttagcttctctgtcatcttttctatttctatatttctatgtgctgcagtctagataatttactcagttttttccctctggtttcctgtgtctaatctatctgatctagctcgattcttatatactcgttcccttttatttatttaaacaatattttatgttttgtgtctaattttaaagtttgaagtctttgttggccgggttctcctctctattgttttcactggttgttgttcatggtgctttgtttctctctctctctctctctgtgtgtgtgcgcgcgcgtgtgtgtgcgcgcacgtgtgtgtgtgtgtgtgtgtgtgtgtgtgtgtgttttgttttgctttgtttttggaaactctattagtgggaattctttatcagtgggttggagttgaaagtgagtttctccagaatttgcatttgtttttgtcaggttcctaggatcattatcaacctgcaaagcaaggacttaaaattctcaacttgaggttttggggacaaaacaggtaatcagtttgtcctgtaaacccctgtgaggattaccttgtggttacacatttttagtaaagacttttccctttctacttagcacttatttttgagacaggcagtttaaagtcctctctgtagctggatgcctcttattatacactctatcttggtgggcctttgtaaatgtcaccaagtttatctgctttcccctgtgtcttgctaagttgtaaaaacagaagctcaggttctcccagtttgttaaatgccttcaaggtgaaaactaatataagccctctgttctgaatgtgccttatttttttgtgtgagctcatgaatatgtttcaaacaatttttgaggaaatattttgtccagcatttttggttgttttcagttggaggattggacaggtacttactctgccatcactaccagaaaagaaacttacatcctgctttctctttgtgttccttctttaataatattaatatatcccgaaacacatgaatgcctttggccaactacggtacagatcatatgtgcagaaagcagtagagaaaaaagcataatccttattttcaagttaccacttccttctgcaggtattcaggggtattttaagttccaacgtattagttgaggtaatgctagcttctttaacaaaaccaaaatggtgccatgaatcaaaacaatagaaattgtttcttacatacccaaaatgggtgacccgattagtggataccactctttaaggttttagcaagccaactacttggcattttaggactctgtcattttcaacccatggctccaaggtcacagtgcttatttggatcataatagcaaaaaaggaaaagcatgtggaggctcatgagtggctggtttttattggctaggcccagatgtggctcaatttgtttttttttccctttccattagctagaacttggtaaggtggccacatctgactgcaagggggattgctgggaaggtggtctaggtgtttgcccaggaagaagaagaaacaggtttgatgaacagctggtccatctctgccacatatttcctctcggaaacttcattccacccttacttttcacttctctgagctcttattttacttataaagagcactatcaaccttaggatttaattaccccaaatcattttatgtttgtataatctaagtcaccaactgtataatacattccttgaggtgtgaatgttgtgctggacttttgaaaatgtcacctgccaggcgcagtggctcacacctgtaatcccagcactttgggaggccgaggcaggtggatcacaaggtcaggtgttcaagaccagcctggccaagatggtgaaaccccgtctctactaaaaatacaaaaaattagccgggtgtggtggcaggtgcctataatcccagctactcgggaggctgaggcaggagaatcacttgaactcggggggcggaggttgcagtgagccgagatcgcgccactgcactccagcctgggcgacagagcgagactccatctcaaaagaaaaaaagaaaaaaaagaaaaaaatgtcacctaccactcagttttgaatgcacagtgtgctttaaaaaaattaagcctctgaatgcctgaaaatgttcttgttctagggagatacctgctgacatatttagggatgcagaccatatttatggtctgcctcttactcattgtattattccttcaggttttcttctttttctttcgcatgtgtttttttttttgacacaaagtcttgctctgtcacccaggctggagtgcagtggtgtgatctcggcttaccgcaacctctacctctcaagcttaagtgattctctcacttcagcctcccaaatagctgggaccacaggtgtgcaccaccatgcccagctaatttttgtattttttgtggagatgggctttctccatgttgaccaggctcaggttttctttaggtttgaaagttgccaaaataaaaatgtggggaaaaagctaaatccctgaaggggattagaagggaccctacaaacaatagtagaatatccatgggacatcagattagtctgtctcagttatttctgatatgttatcttgaaatgagccctttctgctccatctggattgttgtgaaaattcatttactctacctggaaatatttgttgaggtctacgagtgctagtactattgaggggctggatgtagggagataagaccctgccccagagaggattagatggagtgtagacaaacaagggagaagcaggaaaaaaaaacaaaaacaaaaaaccttgcactcatttttcctttggttttaggcctcccataagaaggctgacctgtctccaggccagtgttgagcatatcaacaagcagaggaatttagctcttgaatattccccagggccatagataatctcagctgaaacagaccctaggttattggcctcaatatcaccctgtacctgagtttaactaattgctttgttgctaggttcagtgttttcaatgcctcatttttattttctgttgtttttggtcttaaatgacaatggcatatggacctaagttaaattgtggaatcatattttgttttcctttcattgagtcctttgcagtgtactatggatgggaaaacacactgacgttttagtaactctaatctattatccacttgctaggatgcaaacacaatgcatgtggcaaattactttatatgctgataaagcctgtgttttggaaaaatgttggaatgtttgtatccaaaacattgttttgaatcaagccatcttaaatatgcagattatgaataggaagtggtatcctgaatagcatcgtcaaaattccaggaagggtcaggctgcaaaatacaagacatggtgagtctataattaggcatcaacgctattttatctgattgagcatctccctgggcttggctctggcattaatcagagaacagctctccagcccaaaggagttcacttaagaagatgacccaggaggcaaatctagctctctcagaagccaagacagagcaagccctttacttattatgttgtttgcttcatggaataaggcatagaatttctgctaaatgaaagcaagatacagcatttctaataaaatagaaaagggaatatggtgcagtgctcttcttgcaaattgtactcactttcttttcaagtctaaggtttctctattttttcagaaaaatttctctcttgcttgaaggagtttccaaaactacacaaatgcaccaagtctcagccaagggcattaatagtatatagggtccaggaactggcaggctgtaatagttaacttcctctgttaatgcaatgagccactgagtagtctcttcccacaatgagtaagggtttacttctatcctgaaaaccaaataattcagtcaccataaagggaagagaccagacctccatatcttcgacgtggccaatgtgacttttaaattaatttatttttgtttaggcaaaataaaaatttggagaaaatttatattttatttgccaaaataaaaatttggagaaaaagctaaatccctaaaggagattagaaggggccctacaaacaacagtggaatttccatggggcatcagattaatctgtctcaattgtttcttttgaaatgtggtgttgaaatgagccctttctgatccctctggattgttaagagaattcattcactccatgcattattattaggatgaccatacagtctgacatgtttgtgacagttttgttttatgcttactacccccttgtaatcactagtagtgtctactttcattttcaagaacatcctggtttgataaattatggtcacctaacttacagtggtagtgcatatatttagcaatagtagatcaggtttgttctgtttaactcttctgctgagaaaagctgctcaaaattaaaaagaaaaaaagtcagtttggaaaaattggagagccatcagggcaatggggaattgcagaaccaagatctgggttggtggggtgagtaagaagtggtagaaaactcagagaggtgaactctgcttttgagttttatcttcttgagaaaaatttcagttcaaaaagtagaggctaaaagattaagaaacttagcagagctttcaacaagttcatgggcttgagggtgtggtaattgtatttaggtcctgtgaaaaggcagaagccctagtaaacaacctaggctttcattgagaaccctgagtctaggtgaatcagaaataaaacataggtagtgaagccaaaactcaaataatttcagattagtgcccctagcctagatgtctgcctgaagccagaataaaaattctctttggaggaagatgcttttcccagaaactcaggttatcactgtagtttttcatgtactatatctgtcagtcagtagaaataatagacacatcacatgagaagaccagatatgattaaaaaaaacaataaaaaataaacaaattggatatacctacaagagatccagataatagataatcaaatatggtccctaccataactgtgattaatatgtttcaaggattaaaagataagattgaaaactctgccagagaactgaaaattgtaaataagaccaaatggaccttctggaactgaaaaatacaattactgcagttaaaatctaaatgagtgaacttttttgggtgatggaaatgctgtaagattggattgtggtgatggttatggttgcataaatgaattaatgactaaaaccattgaatgtgtacttacaatgggtgaattttatgctgtgtaaattgtactttaaaaattaagctttaaaaaaaccaaatgaattggttcaatagagtagatgcaattgaggagagagttagtgaaccagaagataaagcagaagaaaatatcaacaataaagcattttgaggcttttagatggaaaataaatatcagattgtgaaagacatattaaatatggtggaaaggcctaatatatgtgtaactggaggttcagcaggagaggagagagaaagtgggacataaaaaataattggaaaaaaatagctgagatagttctaaaactaacaaatcacacaaagccacagaatccagaagccctagggcaccaagcaggataagtacaaagattcaacatagtaaaatttctgataacaaagctaacgagaacaacatagggacaacatggtaacatttataaaagaaaaagagaaaagctgaaaagcatcatggttggggagtgggtacctcttatctttaaaggaaaaataagactgacaactgacttttgaactggaacaatagatgtcagaaggaagtggaatgctatcttcaaattgctgaaagaaaacaactattaactataaattctatctaccagatttttcaaaaatgaagaagagttaaagatattaaaaacttatcatgaggctgagcatggcggctcatgcctgtaatcccagcatgttgggaggctgacgtgagaggatcacttgagcccaggagtttgagaccactctggacaacatagtgagaccttgtctccattaaaaaataaaaataaatgaataaataattttaaaaatcatgaacagatctatactaaaggaagtattcagtaaagagtatccttgggacagaaggaaaattatccccgatcaaggctcagaaatgtaaggagtgaagagcaatagaaataagaattcaatggttaaatataaataaatattgactttataaaataataattattatgttttgtggagtttaaaatatgtagggaataacatacatggtaaaagtagaacataaatccaaagaagttaatgaagttaaatcattctaagttccttgtagtgtacaggaagtgataacgaagttgtgttgtcattgataagttaaggatgcatgttttaaagtttagataatctttaaaagaatgatgacagaatgtataaataacaagctaagaaagagggaaaatagaataataatacttaagaaattcaaacaaagatgaaaaatagaaaaaggatcctagagtaggtgagacaaataaaaaatagtagaataatagatttatatcaaatatcagccattatattaaatataaatagactaaatagtcaaattaaaagtcaaaagattatcagattggatttttaaaactatgctttaaagagacatacctttcttataaacgtacagaagggcccgatacaaaagaatgtagcaagatataccatgcaaaagaaagattgtatagctaacccaaagaaagatcgcataactgtaaggcaaggaacactgttagagataagggagatatttcataataagaaagattcaattcacttatactgcactcacttgctctctctctgtctctctctctcacacacacacacaattataagacctacaaggagaaatacagatatctatatagttagaaattttaaaacacctctcagtaattggtacaatctagagacaaaataaataaggatatagaaaatttgaacaaagttaattaacaaacatcatctaattataaaacattgcactcaacaaatacagagtagatattcctttcaagtacacatagaatatttgccagtgttctctatttggtgagtcataaagcaactcttaacatattgatggaaatcatagagtataggatggaaatcatagagtatattttccaactacagtgacattaagctagaaatcaattacaaaaaatataaatgaaaaatccccatatgtttagaagttaagcaatcacaagtcaaagaataaatggcaatggaaagtagaaaatatttggaaattaatgacaatgaaaatatgacagcaaaaattgtggaatgcatgtaaagcaatgcttagagggatatttaaagcctatttatatttgcatatattagaaaagaagagaggtttaaaaataacctaagcattaatttccagaagttagaaaagaacaactaaattttttttacagtgttgaagaaaggagataataaagacaagataaaaggtaatgaaatggggggagaatcaacagagccaaaggactaataaaatcaatgaatcctggtgagactaatcaagaaaaaatagcaccaacaacaactatgaggaatgaaaaaagggtataactatctttaaaagatagtaagagaatattatgaaaaactttatggcaatatatttgacattttagaggaaatggacaaaaattttaaaatgccacttactgaaactgctgtaagaaaaataacaggctgagttgctctatgtctcctcatgaatatgtaattacaaagtttcccataaggaaaacttcagatccagatagttttactgttgaggtcaccaaatatttaaggaagaaataacacatattttccacaaactctccactagagaattgaaaaagaaggaatactcccagctggtttcaagaggccaggagaattttgatactaaaacctgactgaaatgttataagaaaggaacattccaggccagtttcactcatgaatataaattttaaaatcctaaacaaggccgggcacagtgtctcacgcctgtaatcccagcactttgggaggctgaggtgggaggatcacttgaggtcaggagttcgagaccagcctggccaatatggtgaaatgcccgtcaactaaaactacaaaaatgagctaggcttggtggcacgtgcctataatcctagctacttgggaggctgaggcaggagaatggcttgaaccggggaggcggaggttgcagtgagccgagattgtgccactgcactccagcctgggtgacagagtgagactctgtctcaatcaatcaatcaataaaatatctgtctcaataaataaataaaattctaaacaaaatattagtagtatgaatctagcaataaattactccatcatgatcaagttggttatcttctagaaatgcaaggttagtgtaatatatttgaaatcagtaagtgttatttagtatattagcagcataaagggaaaaaatcatgatcatctcaatagatgtagaaaatatatgtgatgtaattaacatttattctcgattaaaaaagatttctgcaaactaataaaaagggagttttcttactgtaagaagcatatgtacaaaaaatagcctacatcattaaaaagtaaaaaacatacttaatgcgtgaaatgttgaaagtttccctttgagagtaggaaaaacaaatctgccatctatcaccacttctattcattattgcacagcagatcttagctagtgtgatgagacatgaaagagaaatgaaggtattaggattagaaaggaataaataaaactattaattattgggagactaaattactgagtataaagaaaattcaaaataaatttcggttaagttgttggaactaaaatgaatttagcaggtttgttgcatatgaagtaaatatgaaaaaagtaaattgtatttctctttatcactaataatcagaacatgaatttacattagaataaaaataatcaaattatctaggaataaatctaacaagacccctatattgaaaaccatgaaacactattgagataaattaaagacctaaataaatggagggatatatgttgtttatgagatggaagacttacttcttttttttttttgagatggaatctcgctcaattgcccaggctggagtgcagtggcgtgatctcggctcactgcaagctccgcctcccgggttcacaccattctcctgcctcagcctcctgagtagctgggactacaggcgactgccaccgtgcccggctaatttttttttttttttgtatttttagtagagacggggtttcaccatgttagccaggatggtcttgatctcctgaccttgtgatcctcccgcctcggcctcccaaagtgctgggattacaggcgtgagccactgcgcctggccggaagacttactttttaaaagatgtcagttcatctcaaagtgatgtatagagtcagtgtaatcccaatcagaatcctgagggttttgtgaaaattgagaagccaattctaaaatttatgtggaaacacaaaatgccaagagtagaaaaggtacttttttttttgacacagagtctcactttgttgcctaggctggatctcgactcactgcagcctctgcctcccggattcaggtgattctcctgctccagcctcccaagtagctgggattacaggtgtgcgccaggacccaaaagaaccaattataaaggagaaggcagataaaattggactatactaaaatgagcttttgttcatcaaaagatatagagaatgaaaggcaacttaagagatatttacaacgtctataatttacaaaaggcttatatgaaggatatgcaaagaattcctacaaatcaattcaagaaaaacaaaatagccccgtagaaaaatggacaagagtcttaaacagggacttcaccaaagaggatattcaaatgttgaataaacatgtgaaaagttgttcaacttcataagtcttcagggaaatataaattagaaaccacgtgaaatgtgactccatgtccaccacaatgcctacagttgaaaattacttacagtaccaagagttggtgaggatttgtagaaatgagaattctcatacactggtggtgagagtgtaaattggtacaaccactttggaaaactaatcagcattacctaataaaagatgaacatatgcgtattctgtaagtcagtagttctatcctgatgtacaggcacaatggaaaagtgaatacatatgtacccaaaattatggatagaaatgttcatagcagcattattgataaaagctcaaaactggaatccacccagtgtccatcaagagtataatataatgtgcatacttgtgtgcacacacacaaatactttatggtatatgtgaaaagtgacataccgataaaaacaaactatagctacacaacctggatgagtctcattgacattaatgtgtgaaagaagtcctcaccatacacatctgaattccgtttatataaagctcaaaaaatagacgtgatgaaactatagctgcccagtgcagtggctcacacctttaatcccagcattttgggaggccaaggtgggcagatcacttgaacccaggagtttgagaccaacctgggcaacatggaaaccccatctctacaaaaaataaaataattagctgggagtgtggcctgcacctgtagtcccagctactagagaggctgaggttgagcctgtagtgagctgggttttgtgcactcctctgtgtgatatttcacagtgtaaacatttaaaaaattatatttaaaaaaccctctaagatcattttcttcacttttaatcaatttaaaattatgcatagacttattgtgatgagaatatagaccttaccccttcttttcccttgaattgacattctgtttatataatgtgaacactattcatcagtgagaccaatgatttttgtatttttttagtagagacggggttttgcctgttggccaggctggtctcgaactcctgactttaggtgatctacccgccttggccttccaaagcgctggggttacaggcatgagccaccacgcccttttagttttttttgctattaataaaccttatctctttttgatttatatatatttgttttctctctatatgattctctctctctaaacatacttctccttcctccttccttccctccctccctcctttctccctcttcctcccttccttctccctctctcctgccttccctccttccttcctccctccttccttctctgctttctttcctcctccctccctccctccttccctccttcctttctctctctctcctttctttccttcctcctccttccctcattccctccctccctccttgtttccttcctcctccctccctccctccctctttccctccttcctgcctccctgtcttcctcactccttccttcctacctgttcatcccatgccttccagcggactttcaatttgattttgttgttgctcaaacttggcaaataatgcacgccttccactttgattttcctgttctaatttggcctggttgctctataagcctgttttggcccagcttttgtgcagggacttatttttcacctgtctcctatattgttctcatttcctggatcccatgttctcttctcttttggtttgctacatttggtgttttgttagagcacattctctaattgtttactaagtgagcacaggaggtgaattttccaagaacttcatctctgaaagtatctctaatctatcccctctcttggtcagtcgtttggttaggtatataattataggttgaaaataagttttcctcagtatttcaaaggcaatactcaatgaacgtctagtttctattgttgttgagaagtccatctaccattttgatggttcatcttttctatgtgaacagattttttttcctctggaagcttttagaattttaattttatccccggtgtgagatttcatgatactacagccttgttgtgtctttataagtcattctgctgtacatttaaacagatctttcaactggaagacttatgctcctgttctagggaaggttcttgtggattttgtggttttgcttatttgcttgtttttgtattaatttgttttaaacccttctccccccaaaaaattatctctcaatacttagaaactctattagttgaacattggggtgatccttctgtttgcttatttatttttcttttcttaatcatctttttgtcttattgccttactttctggataatttccatcactttaatttcaaatcatctatggaattctttttccttcatatgttttatttccaagaccttttaagtttttcctaaatgtttcttgttcttttaacataagcaatgccttctcttctcttagaacattaattagagttttgggcattttcttctgtttcctgtgttatctctgtttcctttgagtttcttgtttttcttactggcttttcatttcacttttaatgtttttttctctctgtcaccccggctggagtacagtggtatgatcatagctcagtataaccccaaattcctgggctcaggtgaccctcttgcctcagtctccttggtagctagaactacgggcatgtgccaccactcctggttcattttaaaattttttgtagagatggtgtctccgtatgttgcccaggccggcgttgaactcctgggcttaagcgatcctcctgcttcaaccccccaaagttcttggattacaggtgggagctaccacacctttcctgtttgtttagatgtctgactttcacagtgtagatgttccttaaattcctggtgatgcctgaatttcgttttcatattgaaatgaatcttacaaggttcagaagagcttattggatactgtgtgcctgagtagcgctgctcatggactggggagcttccctgtggagtggtcggatgtttgagccagttcctcaaatatcagtatctctccggaggttttcctctggggccattccttctcagagaagaatctcctaatctcctgtgtaggggatgtaaacctgggtgctggcattctgggagccaggtgggcaagggtcacgggctcttaccattcagtgcacggagtttagcttttgccttctgcttttcagtctgatgtctcatctcttctcccttccaagctgtggctcccagggttgagaatatgaagatcaaacttttcagtgtggattctgtaggctggaaataaggcgatcccttttctgcctgtcgtaaaggtcacagccgacactcctataccaaaagacagattaacaagagtaagccatatcaaatttagttaatcatagccttatgtgacacaagagcctttggaatgaagacctaaagatacagagaaagctatccatttttatgcttaggtttgatgcataatggatagttgtgtagagcggtgattggacaaggagagaatgaccccagcaaggcctgaccgttcagattcttcctggcctctctgagtggcattctttcactccaggtagggggtagacctcccctggaatgagggtcttatgacctactatcagacaaggtaaatcagagaatttcttgcacagaaaggtggggatggaggggaaggttagagatgtatttctaggttttacggctgactttcggggagaggggttctggtttctatgtccttctttggggaagaggaattctagtttctatggcttgcctcgagggcaaatgagggggtgagagacaggagagcaggagaaagtcagagagggactttgcttctggggctacttctgaagcatccactttgttgtattgtttcctgagccccaactagtctaactaaattcccacacgtcatccccactttctccgtatctgatgcctctgattcctgagccttcttaggattcagtggggtgaatgcatttgattctgctccgttctcccctctgccggaatttttgagtgtcagctttcctccttctgcctgagttcatctgtcactcttccatataccctcagtcttccagaaattactccatctttctcatctgctgggtctcctctccctttctcattgtccctgtgggttaacgttaactctcccagggccaaaaggatgacttgcacgtcttcagtttgcttacagggcaaacatgaaggcttaagaatcattcattgattggtttgcccatctccataatcattgaaatactctgccctttttccatttttgagcttaaaaaaaaaatgttctctattgtgtgtcattggcaggtgggtagattcaaatggtaacatcgacttggtgccatatccaactcttagtaggttccttctcctttcggctgcttagatgcccaggaaacctggggcctgcccggcatcagtccctcccctgtgccaagcactgctgccctctttggccaagctgccttgtttccaaactgttcagaaaggaggagtcaggaggggaagttgggacagctctgaggtgcctgaaggggctgagtttctcttcctctcctaagcagaaacagggtgctcttaaaatagcctttggagctttgtgatgtgaatacaaccacacagcccttctcagaatttgcttattatggaaaataaaaatcactaggaataggcaccccccgcccccccgcccccaattcattctcatggctgattttaagaagctgcatcttgactgttgctaggtggtttcagggtagaaagcatccaacttccagtcctgggctgccttcacagcatttcagattcatgctgcatggtgcggccgcaactgttcgcctatagacctcggctgggtgtgctttttcttcttcttccccttatgcagtcgaagcagggaataggaaatgtttctgaggcctggcatgggctgtgggattctcaaattgtgaggactaccacgaccaggctcaaggaactggtggtgccttctgccatcttgagatttttcaaaatgagactgatttgacttttatcaatgatttgattttgtggaagttattaaaggttctgacaagtttattgtgtttttaagtgactcacacctgtaggtaaatctgaaatgcttttgtaagtctgggtagtggtctggagagaagggtgtgtcttttctagatattaggaaaacacatcatctcatacaagggcaagagtgttttggtctcatgatctgggagtgcacatggtaaacagctgtgctggttaattattatcagaaaaaaaaatgactgcagttcaaatatttaatttttttttggtagatgtttcccgaccttgacttggtttatagttaataataccatacagcaagtcactagatttgtggcatatgttttgcaactagttaatctttgagggcacactaagaagttgcatggtgagaagctagacattgtacaccctttaaaagatgtgtgtttgattaggtttcacaaaattccaggctagaagtatttcagtcatgggaactagatggcccagttgtctgggtattaaagtgtcccaaaatcattgtttttcagaggagcgttggctttgcccctgggtatctaacgccttgggtttccatctttgccaaatccttcttcatgaagacagcagccctacccctgctatgtcttaaatcacatatcttcatacttaactagctatataggagagctaccatccaggtactgaccaggagtttaaccacaaatatactgctacccaacacctttccagtatttggttgggcatggtgatatctgtggaggattgctggttgtctgacctgttcctgaatttaacctggccattagtgagctctctacgtaacatgatgttagcctagagcactccctgaattgtcctttatcttggtgctatcgggcggtgttgatggttgttaagttgctggatgctgaaacagaaaagctgacaaacacccattgctgaatttttactttacccaagtcacgattcctgggctttttttgtcctatattaggtgattcttgcattgctataaatacctgagaccgggtaatttataagaaaagaagtttaattggctcacggttctgtaggctgtacaggaagcatgatgctggcgtctgcttggtttctggggaggcttcaggaaatgtacagtcatggcagaaggcaaagggggagcaggcatgtcacatggcctgagcaggagcaagagagagagggaggaggtgccacacacttacaaatgaccaggtcttgcgagaagtcactattgtgaagattgcaccaagaggatggtgctaaacctttcatgagaaatccatccccatgatccagtcacctcccaccaggctccatctccaacactggggattacaatttgacatgagatttagaggggacacagatccaaactatatcagatgctaaaacaaaaaagcccccatatgcccattgctctatctgttaatttacccaaaattatgattcctgggctttttttttttttttttttttctgagacagagtcttactctttcacccaggctggagtgcagtggtgtggtctcagctcactgcaacctctgcctaccaggttcaagcagttttcctgcctcagcctcctgaaagctgggattacaggcacatgccaccacacctggctaatttttgtattttagtagagacgaggtttccccatatcgtccaggctggtctcaaactgctgacctcaagtgatctgcccgcctctgcctcccaaagtgcttggattacaggcatgagccactgtgcccggcctgatgcctgagcttttttccccggagataaatgttgcttctcccacacagtggtttaaattttttttcaatttcgttgcctttacatgaggcatacaccctctagatgaccccagtccttatcgttctctatcatctgacactggcttcgctcagtttctttgtctgcctggctcctgtgggcatttgaatttgcaaatcctgctttagacagtgtaattttatgtattaacttggctaggccacaatacccaggtatttggtcaaacaccagtctagatgttgctgtgaagggattttctagaagagattaacatttaaattggcagtcgttgaataaagcggattaccccccataatgtgggtgggcctcacctaatcagtcgaagaccccaagagaaaaagaccggggttcccccgaaaaagaggaaattttgccttcacaagaaaaaggaaattttgccttcacacggcctctggacttgaactgcaacatcagctcttccctgggtctccagcctgccaatgtaccctttggagtcaccagcccctgtaattgtgcaagccagttctttaaaagagatctctataaatgtctgtacatctgctggttctgtttctcttaagtacactgcctagtacatacagtgagctcttcatagagaccttcaaggacaacagttgatttgcttttatattatggatactgagtcatgtgattggaaatgtttccctttttgcattgataggaaaagcttacaatcaaatctgggtctttcagcaaatgaatcctgatgggtacacatcaccagtagtagaggcacactagtgaaatggtgggagggaataccagaatctgaggtttgtcagggagagcatttggcgagcctgtttagtttaaatctacctgcccgcatcccctgcactggggtaagccatcttaaatattttctaagatagaggcataagcaaacaaaaaaacagcgtaccttttcatcaatctacttcagataacatacactttttgagtcatgatcagggatagtagttggaattgagcagttgaatagcttatttctggagacagtatgacatcttcacgaacctcacactaatctgtggtaagcacaggagaccgcatcagcttctgatgctggttttgtgatcaggaacctaaaacctccacagagtccctgacaaggtttctactgtgagaagtgcttttgtagctttttctttatttttcctttttagcctcagcttttggcatcttgtctcttgtattaacctttctcttctcttttcttacatcctgctttcattttatttcacatttttggatattttcccagcagatttgaagcctgtccatgcattcatttattctatcattcattcagcaaatacttttgatccggtatgccaggccaggcattggtgctgggtaatttgagagggaagataccaagctgaatcggatagagattccacctcaagacctgtagtctatagaatataggaagattatgtgaggaagtagccccacatactacttcacatacatacgtagtgagatgggctacgatcccatctcactcaagctttcgcttgaatgttacttcccatgtaaacctaccctgactaccctatttaaattgtcacctgccccaaccctgcaatctctagcatccctaatctccttcatcctgccctaccttttctttttgccaaacgctcttcatctttcagcatactatgtaatttactatttgttgtgtctattatttttctttctttctttcttccttcctttctttttttttttttttctagtcaagtgaagcagtgggagtggagaaggaacaaataaatctattagtttttgtgatcagttagttgtaaataccactgtactcagaccggcctattatttctttattattatccatctccttctgctagaatgtcaactctgccagggcagggagcttttttagtctctgttttgctcatggatgtatcccaagggcctccagtaatgcctggcccatagtagatgctcagggaatatttgtttaatgaatgaatttgggtaaagtaaacctcaaagatctggggggaatgaatttctctagcatacatatgataaagcagacatgacttaaacacatttacttttcttattaaaaacaacaacaaataagtagaaatcaaggtagaaagttagaaatggcagaagaaaaagacatttctggcagcttggatgaggaaaccattactctcaaactgggctcaggaaaggattgagaatgaatgtagcatctcttctgggacttgaaggatcaatagaattcgaattggcaaaaatataggtgaagaaggcattaagttatttaaagcgaaggaaacagcatcagcaaaattatagaggaaagtgtgaggtgtgtgggtctaggggcttatacattgcgtttgattagactgaatggtacacaaagaggaatactggaaaaaataaggttgaaaagtgagattggccaataaaaaatggacaatttgaaaagagacacttgccgggcacggtggctcacgcctgtaatcccagcacttcgggaggctgaggcgggcggatcacctgaggtcaggagttcaagaccagcctggccaacacggtaaaaccccatccatctctacaaaaatacagaaattagccggacatgatggcaggtgcctgtaatcccagctactcaggaggctgaggtggaagaattgtttgaacccgggaggcagagtttgcagtgagccaaaattgtgcctttgctctccagcctgggcgacagagtgagactctgtcaaaaaagaaaaaagaaaagaaaagagaagagaagaaaagaagagaaaagacactttaccaaagagatatatggatgacaaataagtacctaaaaatatattcatattataaatctttagggaaatgaaattaaattcatattttgatactgcaccacctattataaaattaaaaagaccagttatactaaatgttgatgagaatgtaaagaaacggaaactctcatactctgctggtgggaatgtgaaattgggtaaccacagtcattgtacgttttgtgctgctataacagaatacctgacactaggttatttatttattatttatttatcaagatggagtttccctgggtcgcccaggctggcgtacagtggtgcgatatcggttcactgcaacctccgcctcccaggctcaaaagattctcctgcctcagcttcctgagtagctggggctataggcacacaccaccatgcctggctaatttttaaaatatttttagtaaagatggggtttcaccatgttggccaggctggtcttggccggcctctgttctttataaattacctagtgttagggccaggtgtggtggctcatacctgtaatcccagcactttgagaggccgaggcaggcagattccttgagtaaagagttcaagaccagcctggccaacatggtgaaaccccatctctactgaaaatacaaaaattagctgggtgtggtggtggcacatgcctgtagccccagctactcgggaggttgaggcaggagaattgcttgaacccgggaggcggaggttgcagtgagtcgagatcacaccactgcactccaacctgggtgacagagcaagactccatctaaaaaataaataaataggctgggtgcggtatctgacacctataatcccagcactttgggaggccgaggtgggcggatcacttgaggccaggagtttaagaccagcctggccaacatggtgaaaccctgcctctactaaaaatacaaaaattagccagatgtggtggcacacgcctgtaatcccagctactcaggaagctgagaaggagaattgcttaagcctaggaggcagaggttgtagtgagatgagatggtgccactgcactccaccctgggcaacagagtgagactccatttcaaaaaacaaaaataaaaacaggaagagagagagagagaacacacaaattcacagttctggcggctggaaagtcttaagatcaaaatgccagcattgggtctggtgagggccttcttgcagcatccttccatggcagaaggcggaagcgcaaaatgggatgaatgctgtgtccttgtacggcaaaagagcaggagagagagaacctactcctgaaagcccctctatagcggcattaatccatctatgagggcagagacctcatgaactgagcacctgcccagatgcctcacctctcaacaatgctgcattggggatgagtttctaataaatgaattttgaggggcaaaaacattcaggccatagcaatcactttgaaaacagttaagcaatttcttaaaaaggtaaacgtatatctaccatgtgatctactcattacagtcaatgagtctaagagaatgccagtctaagagaaatgaaagcgtacattcacacaaagacttgtatgtaatcttcatagcagctttatttacaataacaccaaactggaaatgccatcaacaggccaatgagaaatcaaatggtggtatatctatacaatggaacactattcagcaataaaaataaactattgatacacatgacattatggaagaatctcaaaataattgtattaagtaaaagaaaccctaccagaaaagagcatatatattgtatgattacatatgtatacagttatagaaaatgcagactcatctataaggacagaaagcatataagtgatttgagatggcaggggagatggctgggagaaggattaaaaggagcaagagggaacttttggagatgatgatcatggtgatggtttcacaggtgtatatatatgttaaaacctatcaaattgcattctttaaatgtgtgaataatatcccaataaagctgttttaaaaaggtgagtttgctactcgggaggctgaggcaggagaatggcatgaacccgggaggtggagcttgcagtgacctgagattgcgccactacactccagcctgggtgacagagcgagactccatctcaaaaaaaaaaaaaaaaaaaggtgagtttaaagtcaactcacctaggctcttcacgcttaggctaaggtatttatattcttcagttggctattcctctattcaaacactaatttaaaaaatatttattgcgtgctgattatgtgctgaacactatgcatggctattaatataaatagagaaccttggagaagggactgggaagtaagtgatgagtttcattttggacatgagtttggggtgtctgatgtgttacctggtagagatgaggagcgggcagctgaaaataccaagacatacttgggaagagaacaaggatggacataatgatttacatgcttcccacagacgggggactgttggagccagaagatttagtaagattattagaggagaacgtggggaacatgtggcatgacacttggtggacacattagtgtgtttattctcactgctgcagaagacctgaaaaaattttcttccttccttcccaataaaacagtgaaatgtttgtactctgaatctggtctcccttgcctcggagagttgttacaactttttgtcctggggctaaatgttgggtttccagatacctagaagtcaaccccaactcagacttttttaggaaactggataaaagtcaaggatgtgaggaaggcagatgctaggaattgagaatacaaaaatggctcagtgtgaatgatgggggattgtgcggggctgctaggcttctctgactctaggagagggaatccctgaagtagaagagacccatgtccactgtcctgtggtataagagaatgtgccaaactctgggatagcttagcatgtggatgctggaaggacttaacatcaaacaccatggccctgggagccacagtcaagcactcctgtggtcccacttggttttgagggaaaagagcaggtaccggggaatagtcggatgacacgtatcatacaagtgacccagggaactttaaaccacgtgcttttttcctattctatctttctcttttttttttttctttgagacagagttttctgcttgtcgcccaagctagactgcaatggcacgatcttggctcactgcaacctctgcctcctgggttcaagtgattctcctgcctcaacctcccaagtaggtgagattaccggcacacaccaccgtggccagcaaattttgaaatttgtagtagagacggggtttcactatgttggccaggctggtctcaaactcctgacctcaggtgatactcccccctcagcctcccaaaatgttgggattatggccgtgagccaccgcacccagccttttttgtttttgtttctgagacagggtctcactctgtcacccaagctggagtacattggcatgataatggctcactgtggcctcgaccttccaggctcaagtgatccttccaccccagcctcccaagtaactgggactacaggcacacaccaccacgattggctaattttttttttttgtagagatgaggtctaactgtgttgcccaggctggtcttgaacttcttggctcaagtgatcctcctaccttggcctcccaaagtgctgggattacaggcatgagccaacacacctggccatttccccctattctctaggtaccatgtaagcccccaagatgtccctctgaccccagaaggggaataggtccctaaaaacataattgaaattaaatttccattaagtgaggccttgggatccagatttaatttgatttagaagaaataaagtaatgtcatgtcccttgccctcaacttgcatcaattatggagcaaatgtattcccactagaaataaaaccaggtcaagatccttagggaacacatatttgagggagagctgcctcaattctggagggggatcaggtgttagtacaaagaattacacagatggaggttgggcagaggtgggggaccatctagaaatgaactatttccatcctttgcctaacattttccagtaggatgagactgtatccccttaaagggttttgagaaagtggagtccatatatggcactgttatgtggtccttaactcttgactgtatttatacaattacccagcttgactgacagcccttggtggtggtttccttcgagcacagaacaggttttggctaaaactactcagcatggtacctggaaaaccatcctctgagagtttacagaacaccttgtaatctggaaggaaattattcctcctaacatgtctgtaagaaactcattttgttcatccattttagagatgaggtaattgtggtggaagagccgaatacaagttcctgggcaacttatttctggagactcttaggaggaaaattactgctcttgactgatttcctagactctgctagaaataccaatctggtgtttagaaatatgggttatggagtcaaatggattcaggttcaaattctggctttgccttcagttacctctatataactttgcactgaaccctgggaacctcattttttttcttttcagaataggaataatctatctcataaagttagagaaaattgtagagatacatatttattcctttatgtatttattaagtgttattgggtatgtactctgtagcagtgagagagtcggggttccttctatgattcaattgaagacacaaggaaataacaaacagctaaacaagtaaatatacaagatactatggggtgtgagataatcatgcagggtaaaaaaaatgacaaagaatggtagttgaaccatttggtaagggtggccagatacgggttctctgcatggaaggggctagccttgtacatgccaaggtcctgaggtgggagtagcttgcatgtctgaggaacaggaagaaggacctgtgtggctggaggttggtgagttgtggaatggctgggagatgaaatggcaggatcccatcacctcagggcttatgggcaagagaaatgtggattttattgctcgtatattgggaaactactagaggattttatgtgaagaagtcactgaattggatttatattcttaaaagaatattttggctgggcacagtggctgatgcctgtaatcctagcactttgggagactgaggcaggaggatcacttgaggccaggagtttgaggccagcctgggcaacatagtgagaccccgtctctacaaaaaaaaacataaataaattagccaggcgtgatggcatgtgcttgtggtccgagctactcaggaggctgaggtgggaggatcccttgagcccaggagtttgaggctgcagtgagccatgatcatgccagtgtacttcagcctgggtgacagggtgagaccttgtctaaaaaaaaaaaaaaaaaatggctgggcatggtggctcatgcctgtaatcctagcactttgggaggccgagatgggaggatcacttgaggccaagagtttgagactggcctcagcaacatagtgagacctcgtctctagaaaaaaatttaaaaaattcaacaggtgtgttggcatgtgactatagtcccggatactcaggtggctgaggtgagagggtcacttaggcccagcaggttgaggctgcagtgagctgtgatagtgccactgcactcctgcctgggcgaaggagcaagaccctgtctcaaacaaaacaaaacaaaaaaatcattctggctactgtgtggaggatggaattagagagaccagttaagaggagtgacagtgtctaggagagaagaagggggctttggttagagtgaggaagtggaacggcaaaaaaagagcagttcaggattgtgtttggaagcagaggcaacagggcttgctgacggattagaaggggagggtgagagaaagggaggaatggaggattattttagaattttggaaggtggtatcatttcttgagattggaaagacttggagtgaacacatttggggtggggaagtggagaacaagagttctgtgtcggtcagcctaagtttgagatgcctgttgcacgtgtcagggagtgctgctggctgtacccatctggagctcagggggagagtcatggaatttgagttatcagcatgtacgcggtgtctgtagctagaaggttgggtaagatcatccagagagagggggtagaagagacagaagtgcctggacagagtcctgagcactaaaatgtcaagatcagatgaaaaaagattagctagcaaaaatcactgagaaggaactctcattgaagttgctgaaagagaagtgggcatctggtgttgcaaaaccacagggctggacacactgtagacattcaaagagagttagtttcttctttaatggaaaagtatcattcatccattttaggtctttcaaaggatattatattacctttcatcccagcataaattcaaattgccatggcattttttccctttcatatgtctttcaaggttgaaatatagagccctgaagagctgtgggttggtcacctctcttcgaaagcatgcatttgctaggttgcaaatccaccaagggaagatttctctttttccactggaagttcacatgatttaatttgcctgagtaacctgctgtcataggttttcatagagtcctgacatctaacagagtaattaatgctttaggcttttaggagctgtttcaggtttttattaatcaccgttgtgattgcacgtgtgaattatgaaggagttattttggtagttgaatttcctcctcaggaaaatttccatatttgttcatgatgaactgatagcctgaagaaaaaggagaaaatggagaattttccccgggtccgaagcaggcactccacattatccagggtaagaatgacttcctagagaacagaaggagtgtgaggtgtttgaagctggtggttaaccgttttctctttccctccctgaaatttaattagaaattccccgtgattgccccgggaatatatggattttgtgaactttgtaaagatgtgtggcatcatttcatcctgacatcatttgccatgaatttgcaggttttttattcctttatgattcctgccattggaggaatcactcctaggaccttcctgattcgtctactggtctttttggggttttccagaagacggaggtatctaggtaatcggaaggaaatagaaacctatccttataattttatttagggaggactacatggattttcaaaattatgtgattgtacttgagatcagtgtatgaaaaaggaatgcactgagcggagtctagtccttaggattctcttctgaagtgtgaaaaagaaaacacaatagctgttatcttggaaactccgcccctccaggcattcactcgcaccccaggcatttgcaggccctctgcatagactctgctgtggctacacgtgggtcttccgtgccattttccttggcatgtgagtaaatgtaggtttcccctgtgtttatgggaaattttactcccagccttttactgtgacaagagaagactggctgctttactcagcacagggcgcttttcaatgattagagcgattttctctgattctactatacttagggaagatttttgagactacaaatacaagacaaagtagttatgtatcagcatacggatggaggcagccactgtgctagtatccaattctttgactactgagtgaaaatagctgctcctgttctaattgccatttttactcttcctaagtggccagttgggagagacggaggagggagggaaggagctgggttgggcgggaggaggtccatttgcaaagtcaacagcggaagtgttcggggaacagaagacatctgatccgaattctatacagataagggaaggattggatacccagcagatgggccacccttctaattctgcagtagcttgccgtgacagacttctaatctgatggtattttcatcttaatttacttgcaacctgttttgttttgttttgggtttttttttttttgtaggtaacagcatttctgacaaaggtgatacatttgctaaagcttaacattcagattccttccttgtctgagtgttatataattatatatacatttgggctcaaaggtcccagtctaacaaattcccttcacaggagcaccatttgagggcccattctctcattaattttatttgacatttatgtcaacattacattcctagcctaaaaggagaaatcacatgagtacgcaggggcgtattttaaagtggagtatttagtttggcagtgaaaggcacccggcgaagtctgcgaaagcaacgttttctaaattagttaatataaagtggtctaaatgcactaaatttatattgttctacaatgtgctaaatgctagagcacgtggctgttttgatatttctaacattttccccctggggctcccagaattgcctaagatgggtgtctctggaaaataaacttgggagccatcagaggtgtcaggaacagctgaaaacaagtcacttacgatgtcagcgatggaatttgcttccgtgagaccttgtgcaaaaatcaaagacctgattcttctgcttagcctaacttcagagcgaggagtttatcggtggggcatagaggcatctggtccccagttctgctgaatgaagagtttcacaggcgctgcgtggaggccggagggcggttgccagccccagcccagcattgggagccaatcacatggccacgactttgcctagtgcttcccaaagtagacaaaagcgtgaactggggttatcaaacctaaataagaaacagttgttagagaccatcggtatcctctgatttgggagctaagttgaattttgattcaagagatgccacgagagagggaaagagcttcccctaagcagcctccaagggcccgagcgtggcagctccttctgcttccaaaatgctgacttgtacatacttggtggtttttgtgctctggagctgtgctttgtgtttggctataacaatgagttgcagactgggtttttgctttgcagagaattcaccagcattggagaggacctgcctttggtaaaagcagggagtgggcagtttgtccagcccccgtcgcttgagtttattatagtgtttatcccttctccctatcatccccaccccagccagggtttactgacccaaaacgacctcccaatttcctttctgccatctctatcatgaatctcaagggtcaagtgcttggtcaccagctgacctgtgagcctacccagatagcaaggtccttcaaggtcatcttagagtgatcttaactatgatcttctagagtcagtgtcgcttgggggtccccttcgtgggttggcagaaaggtgaggattttgtcagggaaaatagaggaggaaggatgattgcagtttatgaaggagaaactttgagtctgagttagctttcatcagagtcagtatagacaaccttgctctcaacacctcactttggcttagagcacttcgtgattttcttacctgatctcatctgcttcagcttcccgctggccttgtttgcataccgatcagctggtggggtagcagtagagtgttttagagttccagtacacccttcctttcctataaaggcacaacatacagaagaaatagaaatttacaattttttttttaaagctgtaaaggcaattctgattttcatagggaagagattttaagaattggaggagcctcggaggtctttgcatgtctagataagcttggaggttaagagccaggtctcctaacatttggcccagtcttcttttcttgttccagccactgcctgtaggacgatcagagaagcttcccattgagattccaacatagggatgtaaagtggtaggaaatccttctgctaagagctgataacagttatgtaccaacactatgggagggagtggccctttgagatggtggagtgaaatcctggggctgtgtcttggcagggggcagagctgggactggcaccaagctccctcaagcactcagttcagtggtcccctccctgtttcctgggtagaaggcgattgcaggcacccactggttctctctctgctctctccctgccagccaccaagcgtatccctgccaggccattatcaccacctcgccagagaagaccagaaaccttattctggaagttagaaccatggaacgaatatgtccttattagaccatgcctctgtttttaacttggttaaatgaactaccattctcttataaaacatccacttttctagaacccttgttgctgatgttggctgcccagaggtggcacttttcagccaggaagaggtgggggtctgctttggagtggagtgaattattgagtaggggctgaagggagagtggctcagaccaacaataattgcaaacagtggccatggagataattccctttgcctcctatctccttaaaaaagtgactcctctttgctactaaggaccttgctttctttttactttattttatttttggagatggggtcttgctgtgttgctcaggctggaatgcaatggcaccatcacggctcactgcagcctcgacctcccaggctcaagggatcctcctgccttagcctcctgagtagctgggaccacaggtgcccccacaccaagcctgctagtttttttattaaaatagagacagggtctccccatgttgctcaggctggtctcgaacttatgggcttccaaaaagatcatgcacccggccatgaccttgctttaatcctcttgtggcctttaggcacagcatgcacattctgatggggtccttaattgttgtccccagtacttgtatatgtgttatctggcatgttgcttggcctggggatgaaggggctcaggtattgtctatgtgcaaactttcttttccagtgcaatttagaaactgctgttggactcccatcccgtggatgggaggccattctcttccttaacgggatttggaaagcaaaaagcatgctggtcttctaagtgcagctttattggcatttggcttcctgcaatatatttgtaatatagtatgtatgctgtatctgagtaaatcagtaggtatgttttgaaattaaatatttgctaagggctaggctcttctcgtgttaaattattgataataaacttcacagacactgtatgagacttgatgatatatgatttttgagtgacctgccatttattagactttatctgcccatgaaatctatttccaattcagaccatatctgcttcgggattgcttgccagaaatctattcccaagattctccttatttcagtgaaatatctctggctcagcacctttcccacggcggctgatctaatcggggctggatcacttatcgcttctcatttcctttggcagcactgtcaaactagaagtgcatctcggggacactcagaagcactaggtgacgcacctccttctcccttttcctgtatggcagaaggtagggagaggtgaactccccaaaccacagccctgctctagggtctaagcagaaacaggaccacctttgtggttaggctaacagaagttgtgtccctgcctccctctctgccaggagctgtcatggaagtgccacatggaaccctgttcgatgaccccgagcaattagaactcatttgcatggcatggaaggccaagctggggccccgaggctttttcagctcccccttcttccctgacttctctgtagacaggtgcatacttctggctatggcaagggccagctggcaggaggactctaacttgtcatcacagaaataaaatttgtcacctctgtgttcccaacctctgttctttcatgtttaaccagcactctgcatctttgtaaacatgtcagagttctatttttatttcctaattaattcagaaaaggagcagaagacattgctaatgataggaaaggggaagatcacaaaggtaggatgaagggtggcttttatttttcagttgaatgaggcaattgaatgaatatgtggcatccagcaattagaaaaattacttagggccagccagtgcctgggcgattctcgggctgccctgaaactggtcagaatttattcctatgagcatgtctaaacttatcaacttcagtggccagcttttcttcttatactaatagacagtgagacttcattttcccaaacacaagggagaatacaaatttccacatatattaatcttttaattatttgaaatgtgttttagcactgcttctaaagttatattctctgagtacattaaacctaatttaacctttgacttgatttaaaatcatctttataaacatctggaactgtatgatctgtatactttagtgattccagaatcttaacaatctcaagggtgtagtcttttaattaaatgagcttttcctccattccattgttaccgaaaggctaaaataatagatatggagtaatggaaagagttctaaacttggaatcaaaactctacttctaatttaagtttaatcattaattcactgtgtgacctttagcaagtctctgaacatctctgagcatttatttcttcatctataaaaatgaagaattggaccataagactcctaaggttgttgacatttctaaaattctataattttatgatcaaggaccatgctactcagtaataccaggtatctgaagggcttttgaggtgtttcttaatgatatggctccaaactaccatcattgtgttggctttgaagctttcctatattttatgggtaggcaaactatagcctgaaggccaaatcgggcttaccatctgttttttgtaaataaagttttattggcacagagccacactcatttgtttaggtgttgtctatggctgcttttgagctacagtggtggagttgagtagttgcaacagaggtggtgtggtacatgatgtctaaaatacttactttctgatctttatataaaaagttcaccaacttttattcttttttcattctcagtctgtcacttttctttttttttttttgtgagacagagtctcactctcctgcccaggctggagtgtagtggcacaatctcggctcgctgcaacctccacctcccaggttcaagcaattctcctgcctcagcctcctgagtagctgggactacaggcgcctgctaccacgcttggctaatttttgtatttttagtagaggtgggatttcaccatgttggccaggctggtctcaaactcctgacctcaaatgatccacccacctcggcttcccaaagtgctgggattacaggcgtgagccaccatgccaggccagtctatcacctttcattgcaatcactctctctccctctaggaatttgttttaatttacttacctctacctgtctaggggttaagaagccagactgcacacctgattagaattaggttcaaagtaagagtctgtaggttttgaacaaaagtttgaggggacagtctttgagtgcagtgctgagtacagtgcatgggcttttagctacttagtgctcctttcttatttaaatgtctaggtcattctggatagttatagttaaaatttcaacaaagtttgaaatgtctagaaatggttacttttatttgctgacagtggttatggatttgttgtaaaatccacttcctacatggggcatcgctaccatggttagtctgaaggcaaaggtagacaactgaacttgaggtccaaagacctgggtttagatcaggggtgtccaatcttttggcttccctgagccacatttgaagaagaattgtcttgagctacacataaaatacactaacagtaatgatagctaatgagctaaaaaaaaaaaaccaaaattgcaaaaaactcataatgtttcaagagagtttacaaatgtgtgttgggctgcattcaaagccgtcctgagccgcatgccattggcaggccgtgggttggacaagcttggttttccatcctactcagctattccatggctttatggccttagcaatccaatcccttcattttcccgttttttcatctgtaaaatgggagagcttcttaatgcatcatgaggtttgctgcaagggacaccatgttttcggctccacccttcaactgccctccacactgcttgggtggagcagctgtgagactgatatgccaaattatagaacttgaaatgggccacaagcaatgatgtgcaagattactgtgccttaaaaattaccaagtgtaccggctggatgcggtggttcacgcctgtaatcccagcgctttgggaggctgaggcaggcggatcacgaggtcaggggattgagaccatcctggctaacatggtgaaaccttgtctctactaaaaatacaaaaaattagccgggcgtggtggcatgcacctgtagtcccagctactcggaggctggggcaggagaatcgcttgaacctgggaggcggagattgcagtgagccgagattgcgccactgcactccagcctgagcgacagagtgagactccgtctcaaaaaaaaaaaaaaacataccaagtgactccacgtgtttcctgtcttccctgtggccaggtgagtaagtaagccttgccggagctctgcactggactcagctcttgagaaagttaaattgagtttccttttaggcccttgttccttgtggatagctccctgggtggtaagaggagtcagggtgatggccaagagcaacacctgatggctccccatcaggtatgatgatggtgccctttggcaggcacggatctgaggccacagatgtatagatgttgtatagatgactcctctcactctggtctgtaagtcccttaaaggcagcaactagtttttcattttaactattattctccattgcctagaacaatgtctggcctcaacaaatatatgttggattaatttgtcatgatcaagattttctggtggcatgaagttttctttgaggttgattatctatgtcagtggtgtgtccaggtagacctccaaagtagccatacattttaagttggttcagtatacagtgctcagtgtgatcacacagccgcctcatggaggaagcagcatttcctttaggaggtggaaatagaaggcaggccacagttgcagctcagcagagctgggctgaaatcttactgggaggacttgttacagcccactgctcacccaaggtcactttccactacctacgtattaaatactactttccctgactcttagatgggcacccacccccaccctccatgcattttgcccttctgctgtcagtgggtagtctgggtaggataatggaaatggcacctttttttttatttgagacggagtctcgctctgtcccccaggctagagtgcagtggtgcgatcttggctcactgcaagctccacctcccaggttcacgccattctcctgcctcagcctccagagtagctgggactataggcacccgccaccacgcccggctaatatttttgtatttttagtagagatggggtttcaccgtgttagccgggttggtctcgatctcctgacctcgtgatccgcccgccttggcctcccaaagtgctgggattacaggtgtgagccaccgtgcccggccaatggcgccttttaaacataatcataactcaacttgaagtttatctaagaaagggccaaaccatccatgatccaaaccatgtgtaaatacatttaggagcttcctcctgtcacatagactttttttgggaaataaataagcattttatttattcattgtgaaaaatactgaatttctcatttgtgccaaacattatgctagttgttgggttatggaataagaagaccagagggggcccttgccagcaaggaatttctgtataattagcaagtaaacagacaagtggaacaattgcaaattgtgataagaagcaagaaaggacgcaaatgttaggggccagccctgaggagctgacatttacaaagagtcctaaaaatcccgaaggagttcactgtgcacatggtggaaagggcttccgtgctgagggcagagcctgtgcaaagaccctggggcttgtggaaggagcgactgtgagggagagtgtggcatggatgtgcggggaggtggtcaggggcagggaggaggttaggtttattctagctctcatgggaaaacatcggccagtttcaagcatgagagtggcatggtcaggtttctattcagagcatcccttctgctgtttcatgcaggatggttcataggtgggcagcagtgcagtcacggagaccaggtgagcgaagtccctggactaaagtgaagtacagaagtggtgaagatgtagagaactttctagtgcattagaatggaagcggggagggaaacaaagtcctcagatgctgacatttaggaggtgacaattactaagatgggagaaatttgggggggcagcgagaggataggttttaggggaggataggttttggggagaagtctcaagttctctttgaaatcaacgagatttggccgggcgcgatggctcatgcctgtaatcctagcactttgggaggccgaggcgggtggatcacgaggtcaggagatcaagaccatcctggctaacacggtgaaaccccgtctctactaaatgtacaaaaaattagccaggcgtagtggcgggcacctgtaatcccagctactctggaggctgaggtaggagaatggcgtgaacccgggaggcagagcttgcagtgacccgagatcgcgccactgcactccagcctgggagacagagcgagactctgtctaaaaaaaaaaaaaaaaaaatcaacgagatttgtttggtggcacaaaacacctttgaagctaataggtaactgtaaccttccttgtccttgccactcattaattgtatcatgtgccaataaataatcttcccttggtaccactttgtacctagtacagtcttcccttagtgccactttgtacctagtacagtcttcccttagtgccactttgtacctagtacagtcttcccttagtgccactttgtacctagtacagtcttcccttagtgccactttgtacctagtacagtcttcccttagtgccactttgtacctagtacagtcttcccttagtatcgctctgtaccttttacagtcttgccttaggactacttcatacctaggtttataccccatcctaccctcagaagtgagcacaattatctgcttgcagtagatgctcaagaaagaattgttgctgacttgtctgcaccaaacatttccagcttattcagagctcgactctaaagcaaggaaaaaggaactggttaaaggggaagagaggcagatgaagggttttgtggtggtgatgatgaaacaggtaattttctaaaaagagattttagctgaatgatgaggaaaaaatgaaagagtagttttagggaacgcacctggatgtctggtccttgtgccaccattattagccatatacttgtagccttgggtcagttggctagaggtcacagatacacacctgtcttttctttctctttccatttttcctccttttctcctccccactctcttattcccaccttagaggaaaaaaggcaagggaggaggaggaagaggggagaaggagggggtaggggaaggagggtaaggaagaggaggggggtgagagtaagaggaggtggaggaggaggaggaggaagggagtaggggatgaggaggtggagaagaaggaagatggagtgaaaggaggaggaggaggaggaggaggagggaatggtaaagccacaggcttcacccaggtgtcctaggggtaggagaatatgtagctgctatgacacacaaatgtgaatgagtctagaataatctcatttcccgaaaaccaacacaatgaacataattttcacttcccagttttccatgtcctggaagactgaagccagtgatggcagtaccacttattaacctaaagtgcatttccgtgatatgtcccatgtcctgagctagtaatttttgacaaagcacaataatgaagcaagcgtcttgtgattttaaaagctaagcacttgctgcatttttttttaaaaaaattatttcttccctgtaggaaagtaaagaaatccgtgataaaataataattaaatgctgacaatgctaaatttctacccagcgtgagctggcagcagttttataccaaaacattaggtcatttgaagaaaaaaaaaatctgattaaatacctctgtaggcttttctgattagccgttcttaaaagagtcagtgacagtaatgaaagggtgtcatttgacagccacaatttacttttgaaaaaaaggtaaaatagtacagtgtgtatgggtgaggtttttacaggaatttcttgttggtctttactcgtgggatttgttttactaattgtcagtttctagcagttccgaggagcccaccggccaggaattatgtgagatgaaaagtaagtgatattctggggcgagggtcacagggacagcttaactgccaggatttcttttctttcttttaccccttcgctacacagcaggttttatatttccggggcgaaatgaccttgacactagcaggttagagaaataaaatgtagttgcagagattctccttgcatcccttgtattaattttctgcgtttggcagctcccagcatctctttgtgttaagttgctgtggcatgagggctgcaggccagatctgacgtgaagatggaatgattatgtggcatatggcaaatgcaaccaccaccactaattactctttctttccactttctccttgacttctacttgtgggcatagggttctggagtttgaaagtggtttcctttttttcatctcccctttggtagatatgagaccaaatgcctattttggctatgatgtgatagaatcctagagctttaaagctaaaaatggccttaggcctcgtccagcccaaacacttcatgtcaaagatgaggacggcgggcccagagagcttcacctgggcagggattgcagaagagagcctggaactcgatcatgtctcccaggtcctgggtgagtctgtgttttttcttttctgtcctacctcttaaaagtggacatgaagccagtggatttgtttctctgggttgccataacaaaagtgccacaaactgggtgggaaagcaacagaaacttactccctcacaagttctggaagcaagaagtcaaaatcaaggtgttggcggggctgtgcagcctgaaggctccaggaggggatctgttccatgcccttctcttggcttctggtgttgctagcaattctgggcgttccttggcctggggtagcataaccccagtctctgcctccatcatcacggggtgttctccttgtgtctctctgttggtatctcttctcctttttttttttttttttttttttgagacgagctctccttctgtcatccaggctggagtgcaggggtgctatcttggctcactgcaacctccgcctcctgggttccagcaatcctcctgcctcagcctctcaagtagctgggattacaggagtgcaccatcacgcccagctaatattgtatttttagtagagacagggggtcttgtcatgatggccaggctggtctcgaactcctgaccttgggtgatccacccgtcaaggcctcctaaagtattgggattacaggcatgagccactgccatcttctttttttatgaggacattgtcatattggatttagggcccaccttattccgggatgacctcatcttaactaattgcagctgcaagatcctgtttccaaaataaggtcacattctgaggttccgagagttaagacttccaacagatctttttaggggaatacaattcagtgcataccaggtgaggtcgggtaaggtttttccatagagggtttttggagactttaaactgcggtgaatcattaccaccttcaactgtacattcagagcttgctctgtctttatgcttttcctgtcaagtgaggaacctgagtcccgtccatgtattattaacgatgatgatatgtagctttcacttttagcacggaaggagggcatgtgagtcaatctgaggattagccataaaaaacaaaagtgaagttagaaagaattcagagacgagatttgagttgcggacatttatttgtagagattctctgggttctaccaaaagcattaaagctcttcagtttggagggttaattctatttatttttgtatatattctataattataatttggattattctatattatttattgtatatttagtaatcacaatgatcctttctccttaactattattttttcactatcccctcacttaaaattcaccttctgggccaggcacggtggctcatgcctgtaatcctagcactttgggaggccgaggcgggtggattacttgaggtcaggagttcgaaaccagcctggccaacatggtgaaacctcatctctactaaaaaaatacaaacaaatttaactggatgtggtggcaggcgcctgtaatcccagctatttgggagactgaggcaggagaattgcatgaacctgggaggtggagtttgcagtgagccgagattgagccactgtgctccagcctgggggatagagtgaaactctgtctcaaaaaaaaccaaaaccttctggaaagctttaccatgttaatttctcccatcctatcatgctgggcaaaatctgcaatggcacaccatttcctgctgtcagtatttcctgcaattgccccattgaccttccctcaaacaaacagatctgttttctgatgcccaaatgtccctcacacctgccccttccatactttgctctgcttcctcttgctctctcaagtggcatcccctcccctttctgcccatctaaacacccctactcccccaaggctcgcatgcatcacccttctttgtggatgcagcctggacaacccaaacaggaagtgatctcctcctgagtgaaggtctatagaattctctgtctgtatcttgtttggctctcataggcctgccttttagtgccatctgtagaagtggattagcagccacaagacctgtcttccatcatggatctgccattgccattctgtatggctgtgggacacctgggatactgtctgcctcactgcggttctgagaatcagatgagatagaatatcatatttatttgcaacttatctatgagaagtactattcaaatatttgttatttaatgtgcctttatatactcacctgtaaaatgggacagtacttggtgaggattaatttaataaagcatgtaagacagtcctggcttatagaaagtcatcagtaatagttagctgtcatcgttgtgacatctgcattgtcaattctttgcagataggactgtaagcccctttaagacagagtttgtgttttggcatctcttcgatgtacaggatagaacctgatactagctgcttggtctatttgctgggtaaactgaaagtccccttcttgttactgtgtgcagtacttagactctcatttttctctcttttcccaagacattaaaattctcactgaccactctttaacctggaggttcttaaatgaatagaaataaactctctgacagcagtgttgattttggctctaaacctaaattagtttgataggtgaattgctgtggtaacgcagatgtcatcattcaaaagtggcacaaattcattttcttttgatacctcctcatgaggatgtaacctgggtatgttttgaaatggagtatcttctattagtttaattgaccatagttttgacagcatcaaggtttgtgtgatgtccttgtaataaccctttgaaggtctacatgaggccagaattgttctacacattgtgggggagtttctggtacagtgttctgttccaccatcctgtgtagagtagctatgtaaataatagtggataggctgggcacggtggctcacacccgtaatcccagcacttggggacactgaggcaggtggatcatttgaggtcaggagttcaagaccagcctggccaacatggtgaaaccccgtctctactgaaaatacaaaaattagctgggcatggtggtgcatgcctgtaatcccagctacttgggatgcgagacatgagaattgcttgaacctgggaggcggaggttgctgtgagtcaagatcgcgccactgtactccagcctgggcgacagagcaagactctgtctcaaaaaaacaaacaacaataacaaaaaagtagataaataagaagaaatggaaaaaccctgcagacgacaacttggaagtaaaattttagtatgttgcttaaaatactttgtacgatctgtgtacacacgtacccaaatttgccaactgtgtactgtttgatattagcaaaattgttgaattccttttgactttgggtattacttacctgtacattttttacaccaagtccaagtctacccatccctattttctctgtgggtataaagatagaaatccctttgggagctaatatatttcttttctcttcatatacaaatatgatgcctagaacggcatggacgctcaaaatctgttgacaattgattttcctagcacatatgatttgggtaattctgtcaagacttagtgatgtggcagcaaaattagtgatgtttatttaggagtagttttctggtaagaggttgaatggggaaatgttaaactcctacttcctagatacagctacagggagaggaggaagagtcatgttattttgatatgattgtaaattaacataacccccctggaactccttttcctacacacgcacttccttccttcaggatcacaccaacctaaaggtaaagccagagcaatagtaatgtttatagaccatctttctcataaatgccactgctcactattgtacatatgtctttttcaagtatttttggaagacctccctcctctgctaccatatttccctaatgtctgtgaaactaagtacccgtcaagcgtggtggctcacgcctgtaatcccagcactttgggaggccaaggcaggtggatcacctgaagtcaggagtttgagaccagcctgaccaacatggtgaaaccctgtctctactaaatacaaaaagttagctgggtgtggtggtgcatgcctgtaatcccagctacttgggaggctgaggcaagagaattgcttcaacctgggaggtggagttttcagtgagccgagattgcactcttgcactctagcctgggcaacaagagtgaaactccgtctctaaataaataaacaaacaaatgaacgaacaaaatactgcctttgaagatgtgcctaggccaccgtggggcctcacgcttttatcacggaggccacccgttggcgatgcccaccagtcatgcatcttcttctacttcctctccagggctgcatggatctccatcttctgctccaggtagaagccgttctgtattcccagtcatctcagctgaggcttcaccggaaggcatccaaactcccttacctgttcttgattgccagtgtcctttccaattggtccaggaatgagtgtggcaattgctacctttttaaataacctggagcacctctactggggctatatctagaggccacaaagcagagttaccaaagggagacctggtttccaatgccagcttgtttactgactggtagattccttgaggatgttagtgacctcctctgcaagccacgtggatgtgtataaagtgcttatgctagtaactggccctgtagtacacattttcttttacttttcttttgaatatcctcagagacaacaaagcctaaatctttggaaagcaggtaatagttgctgggttatgttaatgtttggtctataacgataggccatcataaagaaatgagactcagatttgtaaactggctgtggagtcaattctaaaattagtgataaggtatactactgttcataaagccagtctattccaggggtaggtgtttgctgtccagagcttctgcgtcaccactgagttctgtaggtaacttagggatggggtatggttccctatccttgtatctaggacagacagtccctttgagggggtggcctccatgttctctgcccatccctgtatccaggggctgtacatggccgcagcctggccagtcccttgcctgtgttcatgatatggtttttctctgtgtccccacccaaatgtcatgttgaactgtaatccccagtgttgggggagggacctggtggaggtgactggatcatgggggcaaatttccctcttgcagttctcatgatagtgagtgagttcccacaagatctggttatttaaagctgggtagcactccccccttctctctctcctctctccatgtgaagattttgcctgcttccccttcaccttcctgcatgattgtaagtttcctgaggcctccccagccatgcttcctgttcagcctgtcaaactgagtcagttaaacctcttttctttataaactacccagtctcaggtagttctttgtagtaatgtgagaatggactaacacagctcactactggttcatgcaaggaaggctagcctcacagaccctcactgtttttggaagacctcctcctcccctgaagtgtatctgagagctcgggtgactgcctctgtgtccccagctattgcttccctgtcccagatataaagagaataacttcactcactccctgacaccctccactcagtgttcagaggagctttgcttctgcatactgtttttacaaacaagttctttttttatttaaaattttattttatttgctacatttttttttaaagatggaatcttgctttgtcaccaggctggagtccagtggcgcaatctcggctcactgcaacctccgcctcctggattcaagcaactctcctgcctcagcctcccaagtagctgggactacaggtacccaccaccacgcccagctaatttttgtattttgagtagagatggggtttcaccatattgggcaggatggtctccatctcccgacctggtgatctgccctcctcagcttcccaaagtgctgggattacaggcgtgagccaccacgcccggccttatttgctacattgtttagagatggaatcttgctctgctgccaaggctggagtgcagtggtgatcaaagctcattgcagcacaacttcctgggttcaataaatcctcccagttcagcctcccaagtaactgaaactacaggcacatgccacaacatctggcacatttttgtattttttgcagagatggggttgggcgggggcggtctcactatattgcccaggctggtcttgaactcctaagctcaagtgatcctcccactttggcctcccaaagtaaagtgctgggattaccggtgtgagccaccgaatctgtcctgttcgcataagttctgctacatcatgttaaaaaaaaaacaaaaacagtcctatgactttgtttccaaacttttctttggcagcgctgtgcgttccagaaagggtgggcaagaatgcgagggggtaaatcagaagaagtttcatattaagaagcctaagtgtgcccaaatgtgagtgggtcacacgagatgcactaagcgtctcagtcagctaataacaatcagctcgtggcccacctggccctgctgtcgccccgaccttccagctgtgagcctacggcagctggggcaatggtgtacccaacctgctccttgctcacctctggcatggctgggtccgagctccagaacatggcatctctcctccctgcaccaccttccctgaggggtggggcctgcccaaggccttggactcatcctgacctgaggcattgttcaaggagtttgatcccagaatcctcatcacctagtccagtcttgaccttgagtctcagttctttctgttgattgtccagactggtaaccaggttcctaccttgtttttgagccttaaactgctgtcttgtttccctggctgagaaccctggaaacgagggtcctgtgcttagccattccccatccactcaggagagcctgcttcttaatacctgccccacaggtggggtcctgcttgccccagcagacggtctgcctgtcaccttcgatgtctgcaccattgcattcctggatgacccatttcgtggttcggtcatcatgtccaggctattctattttctgacttcatactacgttttgcctgcactaccacttgtatttttgctaccctaccttttgtgcttctggctaaaatagctaactagctagacaggagttgtctggagaagtacaaatgagtctttaaaacccatcctcagtgccccatcagtaagtacacattgtgaatttttacatctataaggttactctattttaaagtaattttaaaattttaaagtagttttgtctgtatttgcttctttgccttatgtattggcttagtacctaattctttttttgtttatttgtttgtttttgagacagaatcttgccctgtcgcctaggctggagtgcagtggcatgatcttggcttactgcaacctccgcttccctggttcaagtgattctcctgcctcagcctcccaagtagctgggattacaggcacgcaccaccatgcccagctaatttttgtatttttactagagatggggttttgccatgttggccaggctgctctcaaacttctggcctcaagtgatctacccgcctcagcctcctgaagtgctgggattacagttgtgagccaccgtgcccccctttggtacctcattcttgcataacatgagacccacctcttctctgtgtggtgtcagaaacctccttccgatgcttgcaacagaatctgtgccttcagcttctgccacaccccagcaagcaattctgctgaagccccaccaataagccttgtccacagctaaccaggcgaggtcaagccgtagtccaggatatgggccagctcctggggctggctggctgaaaccagtagtggtgctggtaggtgtctgcaagagctccattagattcccttggaatgatcccctgttcaagggtcgtgctgaactggcacatctcaccaccttatgtatgggacaggagctccatcagactacagcgcaatctctgaaacatcctgacatgttcatgaaacctaggatatactaaccccccaataagagtgggaattgggagaagactttttcttatctttctatggaaaggactagtcttgagaggaaatgaaccaattaatgtactaaccaaaggatgaaatcggcaccttttgctaaaggtgtgagttcaggtttatgaaaaactgctcatcatatgttctggccatactggccttgaggacagtcaagagctgggtgaccatcactgggttttggatctgagctccaatcccatttgttaatagcacaagagtactaaaccacagcttcgataactaaactactgccacactccccaagttctttcccaccccacaggttccggtgtctgtctataccccaggtgctcagaggcggctctgattgtgttttgcctctttctgtttttgcccccatcatccatacctttggcttccttgctctgtcactccacaatgcagagcagaatacagctcttcccatccctttcccaaatcagcagggcactttccattccacagcccttctctggtagaccagagaccagatttccagggataggccagagacggcttgggaatcaatatcttaggttgaatccacaggcattccttgtcagtagccaaaacgtggcaggcccacatgacttgttacctttctcttcctttgggtacattctttgccctcctgggaggctcctcccttaccccttcctaggagttggtgcattcatttatttattcattctctctcccacatcattcagtattagaaggcctgtccaagataccagatctccaggggtaggtatgcagatagtccctcctaattcccctccaccctcaataccctgcctacccagtgagaataggttaatacattgatgaggcacatagtgagtctgattcttgtcttttttttttttttttgagatggagtttcactcttgttgcccaggctagagtgcaatggcgtgattttggttcactgcaacctccgcctcctgggttcaagcgattctcctacctcagcctcccgagtaggtgggattacaggcatgtgccaccatgcccagctaatattgtatttttagtagagacggggtttctccatgttggtcaggctggtctcaaactcccgacctcaggtgatccccccgccccagcctcccaaagtgctgggattcttggcataagccatcacacccggcctctgatgcttgtctttaggctttggcccaaatgacaaaatgggagcaaataaagttttagcatcccttaaattttgcttgttacatgatgaaaactggccaggtaaatagaaagtaaaaattcatcattagagaaaaagagaatattttctttctaatcttttctacaatctaagaggcattttgatgtagtaccaacacttgcacacacacacaacacacacacccccacatacacacacacacacacacacacacacacacacacacacacacacacacacacacaccatgaactagaaggtaagctttatgaatgctagtcctggctacaaacttacaatggggtctttggtcaaatctcctaaccatctaaaccttggctcttttggctatgaaaaagaaataatattttatgcctccttacctggttattgtgattatcaaattaggatgaatgaatgggcttagaaaactagaaagcactgtccaaaagaccagtgtagatattatttcctagagattgcctttaataaagaacaggaagtactagaaaatcacctaagatatgaacatgcagttgacagaaaatatacatggctcttaagcatatgacaagatgcttatccttactgctaataagagatacaaactagcctcaagacattggttttacctgttcaattagtgaagttgataatactgttactttctatggagaagactactgttgagggaatggctgaggtgagaagcagagcctcctcctgtcgctgatggcagtataagttgatacatttcttcacgggaagcaaattgatcatattaattgcaactgaaaatgcatatctttggccaagcagttccatttcttgatatttatcctacagatgtacttgcacttgtacagtgtaaggcagctctagatatactcatagggaatgatctctgaggtatgttaagtgaaaaaagcagagtgcagaacagtgtacaaaaaaaccacattattttaacaaaagaaagaaatgctaatatttggctgagtgtggtggcttatgcctgtaatcccagcactttgggaggccaaggtgggtggatcacctgaggtcaggactttgagaccagcctgaccaacatggtgaaacccagtctctactaaaaatacaaaaaaatcagccaggcatggtgctgggtgcctgtaatcacagctactcgggaggctgaagcaggagaatcgcttgaacctgggaggctgaggtttcagtgagctgagatcacgccactgcactccagcctgggcaaaagaacaaaactccgtctcaaaaaaaaaaaaaaaaaaaaaaagaaatgctagtatttacatagattatatctgaaatgatgcagcagtagatttagataattattttaggtttttctctttcttttgtttttgcttttttagtagtatttgttgtttcttgtttgttcttttgctgttgagaagtagaattgagtggctggccacagaggtgagaaagttttcactgcatattcttgataattttttgaagtttatactatatccagatattaccattttaaaaaattgtaacagaacaaaagtaaatggaaaaccaaaagtgaacaacaacaaatataaccaaagccccaactctccttcttccaataagataaaagcgaaagaaagaggccgtgtgtggtggcttttgcctgtaatcccagcactttggaagacctaggcggaggattgcttgagctcaggagttcgagaccagcctgggcaacatatgagacctcatctctagaaaaaatcaaaacatagtaggccaggcgtggtggctcatgcctataatcccagcactttaggaggccgaggaaggcggatcacgaggtcaggagttcaagaccagcctggccaacttggtgaaaccctgtctctactaataatacaaaaattagccgggtatggtggcgggcacctgtaatcccagctactccagaggctgaggcaggagaatcgcttgaactcaggaggtggaggttgcagtgatatgagatcgtgtcactgcactccagcctgagcgacagagcgggactccgtctaataaaaaaacaaaacaaaaaaaacgaagaagaaagtcacgtttagtggaattagtatcttttttttctttctaccctctgtcttgcttgactttcgtatgccttcttgtttgttagggtaaagctattttccttttactatttaggctctggaaaactaacctgtgttgactccttacaactgcaaaaagtgattttattttcaccgttctgatgaaccaaaaagtcctgactgcgctttccccttgatctgccagtctttatttctgagatctgagtaatccttgagtagttgtgatcatcaaacctcacctagatattccctttccctgacttccggatgagcgatggagttggctggaaaggcttgtggggctgccgggggaattcatctccagggtaattacatagctgttcaaggggctgaggatcctaattggggtgtcagacatcttgagatgtgactcaagttctgccttcctgcttcatcaggaattaaaagttagtatttggtcatttttacctcctgagttttgctttctaaatctattttaccctttttttttttttcactttcatgttatttgagtaaagggttcctttaggctcatcttttaactcaattaacccacaagcactactttatagtctttccctaccagactgtcctcattatgtaattatggggaactgtgtggcttcttggctatgaggccaaatgtagccccccacaccagaaatgatttcttgacaattgtcttttttttttttttttttttttgggacagggtcttgttctgttgcccagcctagaatgcagtggcgacatcactgcttactgcattctcaactgcctggtctcaagtgatccttccacctcagcctccctagtagctgggaccacaggcacacgccaccatgcccagctaacttttgtattttttgtagagacgaggtttcgccattttgcacaggcttgccttgaactcctgagctcaagggatcctcctgccttgacctcccaaagtgtcttgacaattttctcatagaggcccaccataaacacctgccaaatggggtgtttgaaagagtcccttcatgttgactcaccatcactttttgctttttggagacggagtctcgctcttttacccaggctggagtgttgtggtgcgatcttggctcactgcaacctccacccactgcagcctccgcccagtgtgacctccgtctcctgggttcaagcgattctcctgtctcagcctccatagtagctgggattacaggcacatgccaccacgctcagctaacttttgtatttttagtagagacggggttttggcatgtttgccaggctggtctcaaactcccaacctcaggtgatctgcctgcctcggcctcccaaagtgttgggattacaggtgtgagccactgtgcccagcctccccaacacttttaattaggagaattcacacaaccatgtggagacaccctccaggcccctgcaaggagtttgttttattgtgtacatagacaatttagagtaaaaacctcatttaaaccaagggtcatgtttatgcttctattgcgaactaaaatcatttggttgtttgaatgggttcagcttatttacacattattcttatgtataagtcagagataatacacgtgacggtgacacatatgtgaactgcatgctcgtatttgctggtagagacttgagtttggctgatattttcacagaatttttctggccccacttcagtaaacaaatagttatatccttcacaaaacaactgaacacacaattcggagtgatttttcagatgctctttacaatgactggcccaagtcctgtcttaacatcatgtactatggaagcaaccgtgcgcttttctttgaagaagaaagataaatctcaaggcaacagatttccttctgttttccttcaagtgtttggctccaattcagtaattaattttccggagatcatcagaccatgataacagcagcatgtgatattcttaccttttcttaggtgactagtactaggttcctagaatctctgggttcccagcttttgggggtgttgcatgagaatttttgctgtggcgtgagattaaaacaaaaacagaccaaacagctctgggaagcagttctgatgtctgggatttagtcatgggtgaggccctaaaaatagagttacccctagatgagtatctagcagaaaggaaagaggaacggtaggggtgggggcaaccaggcctttgttccacaagcgtgtcatgagtacctgctacatactggacactgtgctggctggagacacagtgtgcagagatagagtggtccaccagatgtacaggacctgccgcgaggggactacacactcgtccagaagccctagaggactgtgtggggcagcagctggcacatggccctctcctttcctggcttctcatgggaaaagataccagcactgtgaactctgtatcttggagggagctgagtgctgtgaccttttttgtcggggctgtgagatgggttgtagtgatctagtggtgttgggaggaaggagaagtgttagttagtaagacaggttggaccagggacgggttgaagggatagtggatggatcagaacctattctgcttctaggattttggctttagtctcacaaaactgatctgattgtgcagaagacaggaaatcaaggaaattaaccccagaaagttagacccacagctcttgagccccatagcacagtcgggtgccccgtgtaaaggatgttgtcctccacctcaccatcctatcacttgctgcttactaagtcagctcttttgccttctgctgcagtgaaaacatttctacaattcttggtaagtaaatggagtcttaaagcttaaacctctatcccgggcaaggaaccaaaggatgtcattgtgcgtaacttcaaaggctgataagatgtttaagggctctgctctctgaaagagtttctttcttttaaggcgagccagaaacattcgtgtgtgcgtcccaccattattccaacaagaagtagaagactgtttcttccctgcgtgtctgcagaggctctagtttgcctgcccctacccccacagaaaagagtctctcgctctctccgtcttacaatgattgcattgtgttttggatgatggatgtccagcaagcatggtattaaaatcagtacctttacttctggggaagagtcaaaaaacagtggtcacagttataccatttctgtgtttgcatgaagcagtcgcccgaggactcaggagttcttgatttttgttttggattatgactgatgtggtatgagctggtgaaaaataagtgagctgctttctccccatctctgatcatccactgttggacatctcttggtgacaagtcacacaggtgtagtgcagagtgtgctgtttgtcaagggcatctgtctctctttttcagttttatccctgggcgatgcagagtctgttggtttctctctgtcaccggcagacaatttggcccagcagacaccctcagcctatgaaagaatgagtggaagatttttcagtagattgtccaggaaatggggaagggctggcagtgctactggaagtgtttgctgtgcactgtacattatttcacgcagaatgtcttccagctataacaagttttttatacattttgatttggaaaatgaagacctgccctgtcaagtctaggaggataaggcctcagaatggaaggggatggggtccacgtaaggattcatttaccccagagatgggtggcggaacatggatgttttgatggccaaagaccacagagcttcctttgtgtctcatagcatggtgtttggagctcatgggtgctcagtcagtgcctgccagctgcatgataaaggtgtaatttagagtactggtgtttgcttgtagttctcctgttcttcatctgaattcttggcctggaggatggaggcaaaactctctagtcctgcttgtgatgccgcatgcattaccatggctcacaggcatcgcactgaaggagcattagccggcctgccagaaagaaatgtaatgtgaatgaagacttgggaacctcacagtctgaaactcccatccttgcattccaggctgatgccctcaggcagactggagatagcttaatacaagcatatttgtaacactggctccatccagatcaaagggcagggagctcgcttgggttgcagcctccaagatgaaaactggaccctgaagtgagcctgtgcgacttggccatgccttgaatctgaaaagaaataccgattctgttatggatgtttgaaccatcagatggaaacgttgaagtctctttgccaataataaattggattcaattcctccctcaccccgcccccaccttggactagtataagatttggggtttgttcttaagtggtgcttctgttttgggggatattggggagtaggaagtgagctcacacaagccactaggtgctggagtgcctggggccagagagggctctgctcagaggatgcgtctttccggatgttttcgaatgtcgttgtaattgggattgttgaaggctaagaggagccttgctttcttttctcaaatagaccatggacaggcgttggtgtttttgttgcctgaattagcttttaacagattcttcaattccatggattagttaacatttcaaaagaaaatgttctttttttttttttttttacagataaggactttaaaaattaccatttgttatcactatagtttcataaaacaaaaggcctttcaaacaacacatgagtaagaatttaatttcagaataaagagcatttaaaaatataatacatttaacattataaaattcttttttttttttttagatggagtctcactctgtcgccaaggctggagtgcagtggcatgatctcagctcactacaacctccgcctcccaggttcaagcaattctcctgtctcagcctcccgagtagctgggattacaagcaccggccactacgcctggctaatttttgtattttcagtagagacagggtttcaccatattgatcaggctggtctcgaactcctgaccttaggtgatccacctgccttggcctccaaaagtgctgggattacaggcgtgagccaccgcgcccggcacattataaaaaactgaataccttgttctgatatttctcattttgaaaactttgtcactgaccagtattggctgtgagcaggtatttgaaaacaattgtgttaggctacctagatcttgtaatatataggcatatatacatacatacatacatatatataaattgaaaagaaaaatcatcattattatggtaataacttacatttacattaaggttctaattatagaatacttttacatacattatcccatacgattagttagtgtatgcctttgaaacataaattagtcttaatagcctaagctaaatggaattaagaatagaagtctagtgtttaagtaaattgttggtgtcctagagtcaaatatgaataatttttaaattatctaccgctttgatttttccgtctctgttaccctgctatattagcaagagtaaataaataagtaatgctgtgatatgtgcacatctttataaccgtatatgtagcctagccgcatacatgcatatattctgacaaacataaatatacatgtgaggaataattaggaaatgatataaaataccgtctgagaaaatcttggaaatatgtagggcagagattaagggtgggagggagagaaagcgcaggcaggagtaagcaagtgaaaggtaatttttactctaagtgaatggggtgtttcttgtcccaaagctgtgtttaaaaacacatagatattttttatttcaactcaagtgttctatcgtgaataattgaacagaggtgtgtccagtgttgaatgctgtctttgaacaagagaaagtattttccctttgccagttcccccttccacctcctactttctctcctagggttagagactggcttcctgagatttcctagaggagataactagcttcagaattatgggttgcaagcgtttctgtgaagcaaaatctcctggcaaattgctaaatcaccagctttatttcgaagaccctcaactaagctagaacttcagttaggcattatttaaataatcagttaattcaggcagtgatcattcaacaaacattcacaccagccttggtgctggtcagtggggatgcaatggagggtaagatagaaatagtatctacctgtggtagctcacagtccgttggggagatgggcaaactaggaggtaacaaataattggttacaaatgataatttctagataggaaacaaatgggatgctattatcaataaatctgaaagaagcaatgtggcatactcatcaggcaatgtgaaaattctagtggaaatcaacaattaacaattgcttgaggtcaggagttcgagacgagcctggccaacatggtgaaaccccatctctactaaaaatacaaaaaaccccacaaaaaacaaacaacaaacaaacaaacaaaaaaacaattagccacgcatggtggcacgtgcctgtagccccagctacttgggagactgaggcaggagaatcgcttgaacctgggaggcagaggttgcagtgagccaagattgtgccactgcactccagcctgggcaacagagcaaaactatgtctcaaaaataaataaataaataaataaataaataaataaataaataacctagtgtctggtattctgttatagaagcacaaaacatacagtgactgtggttatccaatttcacattcccatcagcaatctgattacaggcgtgagccaccttgcccagcctctgttctttataaattacctagtgtcagggctggtgtggtgactctcgcctgtaatcccagcactttgggaggctgcggcgggtggatcgcttaaggtcaggagttcgagaccagcctggccaacatggtgaaaccccgtctctactaaaaatacaaaaattagccaggtgtggtggcaggtgctttgtaattccagctatctgggaggctgaggcaggagaattgcctgaacctgggaggcggaggttgcagtgagccaggatcacgccactgcactccagactggctgacagagcgagactctgtgtgtatatatgaatgtttgcctatgtatatgtgtgtatgtgtatgcgtatgtgtatgcatatgtgtatataaaaatgtgtatgtatatacatatatgtgaaaagggcaaaggttatacaggaaatttggtttgcttttataatataaaaaattattttaagaaaagaagctattggggccgggtgcagtggctcacacctgtaatcccagcactttgggaggccgaggtgggtggatcacgaggtcaagagattgagaccatcctggccaacatggtgaaaccccgtctctactaaaaatacaaaaaattagccgggcgtggtggcaggcgcctgtagtcccagctacttgggaggctgaggcaggagaatcacttgaacccgggaggcggagcttgcagcgagccgagattgcgccaccacactccagcctggtgacagagcgagactccatctcaaaaaaaaaaaaaaaaaaaaaaaaaaagaaaaaggaaaaaagaaaagaagctattgggaaaaaatcatttcctcttaatttttccatggcttctccttactgaataattctctgtaaaacaaccatttactaggctacttacaggaagcaaaaagcactcccatacaaagggtaaagctgtttggctgacttaatattcataccataggttcttctttctacatcttggagctaacagtttgatcagatagcacagattatccagaaacctaaaaagttttaatttttcaggggttatgtttacatgccattgtgttctccagtgaaaaacaaaatcatctaaccttgattgagcatttaactctgtgaataagaacctaggactgcacgtggggcacatatacctagtaggagagaggaaagtaataggcaaagaatgactgtagagtagagaaggttccatggacaggcagagctataggtaacagggaaaggttagtttggggagcagtggctcagcaaaggatttctggggtggcgtttgtgaagggtggccagtgttggacttgagagtagctctgccccacagatcagttaccttcacaagctcctgaggatacccattaggcctctttttcatattaaaattaacaactttttgttacctgagggcatatgtattgttagggagcaataataatttatcagtttccatcaagttgcactttatcatcataatggtttcagaggaggctgcttttagctcttgcagtgcattttaatgtgttgcaagaaacatggaaactgactaacggtgtaatggatgtgtaatggactgggagctggggaggccacgaatgggacatgctatggctggaccatgaaagtgcttctctagaagtcatatgcattctccgtgttagaaggagccagtaggcacagtttggtttcacccgacactcttagacatgtgggcacgattgctcgtcttcttgttttggttgcatttaccctcagtctctcctctggtggcccccgtatcgacgaatgagatcccaggttcagggttgcaaagaagaggaaatgtcctgtccatgccagtatgtgcagttttttgaagaggctctcactgaaggtgacgattcattacaaatgctatcaagcatgtgtttctcaaagagaaagaaaagttagacatcaggtgtgaaggtatttatggcattcagagccctggcaggtaggcctgcttcattccagaaccctgggaaaaactgaccacttttagagtccagccagcttgttcagtatctctgggaggcatctttcagaaatgaacatagtaaatgccaaattaaccttttgtggaagtagtccccacttatccactgttctcttcatgctttgagttacctacagtcaactgcagcttgaaaatattaaatggaagattccaaaaatgaacagtgtatatttcagttgcaccttgctctaaggattgtgatgaaatctcgtgctgtcccgctctgtcttgcccggtgcatgaatcatccctttgtctagcatttctacactgtatatactacccatctgtaagtcacccagtagctgtctccgttagatggagaaaacataggtgtgtaaggtttggtactatctggggtttcagggatccactgggggtcttagaacttgttccccgtggagaaggagggactactgtagctgatgagaagaggccattttactttatgtcctgatagtaaatgtattccaaataaggcctggcccaaggtcttacctttctctgtcgccctacagcataaggttgggatctcagaacccttagtaagggtttgttgattattgactgatgtcctcagatgttagcaaaaggagattttgctaaataattgtggctaaattctagcccagagttttaagtttacaacgacctgtgatcacgctattacattccagcttgggagacagagcaagaccctgtcttaaaaaaaaaaaggcccagcacagtggctcacgcctgtaatcccagcactttgggaggccgaggtgggcggatcacgaggtcaggagatcgagaccatcctggctaacacagtgaaaccccgtctctactaaaaatacaaaaaattagctgggcgtggtagcaggcacctgtagtcccagctacttgggatgctgaggcaggagactccagcctgggcgacagagcaagactctgtctcaaaaaacaaaacaaaaaaaagcaatctcttaaaaaaaatgcagctaaaatagtaccagactgtatacccattaaaattaaaaatacaaaattaaaaagcagaataccaggcataaagatgcatttgacaccagaatccattacatcgaagctccatcttcataacattaatatttttccaaaatattttgagtacttcccccccacccccattggttttggatattctggtcttaaaaccaaatcggttgtatactagaatgcagaagagatttatcacccagtagaatgaacttcagtgaatcctagtgtttctgataagttagtctttagttgggtgttgggatattttctgtctctctctgatttctgaatttggaagtgagttacagtacatttttattcggttttaatccatcaaaatcaagttagttgtaagtgatggaagagcttactttgtgtagtccgggctgcctggagacatcagccacatgccaaaagcttgctggttgcccagcaaccttgccggaggaatagattttctgccactggctccctttttagtcgaggcggaatctattaacactactattctagcccagagaactggagctggagtttagctgaaaagaatggtcggggtttttttgtttttgtttttttaataacccagcaccgtgtttctggcttctaaaccctactgctaatttcattgacttctacataaagacttagagcttattaatattacttagcacagcagaagctaaagaggtcagtcttgtgcctccttggcccctaaggaagctcattgtttcatctctgtagaaactacctcacaggcaatgggtgtggaccgtgagcatccaagttgaagggggagcagagaagactgacctcatttgcccccatacttactccaagtcctcaccaggtgtacttgtcggctgtgccttccagaggcaaacttatttggtggttgaagctgctgtttcttcaagtatacgtgatccagctctgattgaaaagcacctgtgtatttcttcctcttacacttcagtcaaagagtgtcttttctccttttgtagctaaatacttcaccggcaggattgatggtttccttctaccaggggagtttgtgctgctggcagccccattgttttgcttctgctgttaatgtaatagctttgggttgtagtgcaggaagatgatgcctaagtccagcgtcaggtggctggagttctttgccactgctgaaatgcaattttaataatggactgtatcagccaaatgtgtttccttgcctctttgtaaaacaaaagaagatctcagcatattaacccatcgatggcaggaaaaaatcaaaatctccaagaatgccaattaatgaaatggcacttgcatctcaaattataaatctccttaatacacttcagaaattctctgggtagacaaggaaggggttgctccaagccatctcatcagccccactttttctaaggcacaaatgtagaaaagatgcagaaagtagtttgtggtttggtagagaaacgagctgttcgacaaaagcaatgacgaacttgactaacctcaggttgtgtttatttgttctgatcatgctgaactttgttaattgtgaaaagtctgtcagaggtgttcgaaccagagtgactccattttgagcaagggctaggaaaatgaggctgagatttgctgggctccattctcagaaagttaggcattcctagcctctagatgtttacggttaagggaacaaattaatagtgtttactaaacagactcagacttgggagtgtccaggtatcccgacatctggagaacaaaggcactcttaattttgctttaaagataataatatcgattcttgcaaaatatagtaattaagaaaattaatcctttatcgcaaacccttgtagcagagcacatctccccatatatacaagtattgtacttagggtggatgcgttcctcctcttactttcaggaacatcgtactctatctgtggagtagctgttctttcaccactttactttcttaataaacttgcttttactttgcacttcggactcgccctgaattctttcttacgcgagatccaagaaccctctcttggggtctggatcgggacccctttcctttaacaacttgggtctttgggcttatattttcctgagtaatcttagaatattgctgatgcaagggaccttttgtagttccatgtgcccagttttacaagtaaggaaaccagagaagtgaaaaagtttgctcaaggatgtacagctatgtccagagtggcagagcagggagcaaaatcccagccatagcactgttacgggaaaggggtcctgatccagaggccaagagggttcttgaatctcatgcaagaaagaattcagagcaagtccatagagtaaagcaaaagcaagtttataaagaaagtaaaggaataaaagaatggctattccatagacagagcagctgcgagggctgctggctgcccatttttatagttatttcttgatgatatgctaaacaagggggggattattcatgcctcccctttttagaccatatagggtaacttcctgacattgctgtggcatttataaactgttgtggtgctggtgggagtgtagcagtgaggaggaccagaggtccctgtggtggccatcttggttttggtgggttttggccagcttctttaccacaaagtgttttatcagcaaggtctttgtgacctgtatcttgtgctgacctcctgtctcatcctgtgacttagaatgccttcaccgtctgggaatgcagcccgagtagatctcagccttattttactcagctcctattcaagatggagttgatgtggttcaaacacctcttacagcaccacccacatgatgtgtttgaattgaaccaggaaggaaaagtgcttgtttctgtagctctggttccattcatatatccaacaaatatttgcgagagatctgtctggtgaggtcctgagcttccaatgacacaatgtacaaattgaaatcaaaatcggtaagaatcttagaattcttccaattctaacatactgtgactcagccagagatactctgactcagccacttagtttattcattcattcattcattcagttccttcatgttgcaaacacttattagacatttcctacttactactgcaaatctctgcacaacaaaagtatttttaagacccgatctgagtcacttatatcaaggaacattccatatagatttctcttagcagcagcagtctttggatgttttatcctaacaaaatttgatttttaaaggcatataactcgttcattttcctttttttttttttttttgagacatagtctcactgtgttacccaggctggagtgcagtgttgcaatctcggctcactacagcctccgcctcccagttcaagcgagtctcctgcctcagcctcccaagtagctgggaccacaggtgcgtgcgaccacgctcggctaaattttttttttgtatttttagtagagacgacgtttcactatgttggccagggtggtcttgaactcctgacctcgcgatccgcccgccttggcttcccagagtgctgggattacaggcgtgagtcaccgtgcccagcctcattttctttgtaactggttgctttaggtctccagccaactttatatgcgagattttaaaaaaatgctatcaaactctagtgtaaggatttgcttcagttttaggtctatgttaagcatgccttttagaggacagtggtaaacattggtttacttggctaggtaaagcatctgttttcaaggtcttgatctaaccacataccccacagtcacttgttcctggcctttgttgttatctctatttgctcagaaatgtccacaatcctaaagtctgctgtaaatttcacatggttattgcattaccttctactaccatgctgcaaacaccaatttgaaggagtggcgtgagaaaacaactaaaagtatttatcctgctgttctttgcattttctttgttctgttgcatcgtgatatctggctatcggatttcatagaaaagtagaaacagccgagggcactgtttttgtaatttcatattaaactcatttccttgaaaatctggcttgagatgagtgttcttcagacttctcttccattttggtatgtttcctttttcttttctcatgcagcctatgtctagtttttcaagcacattgaagttgaatatatttttgttttagtatcagaaggcacagctgccgtggactaaccctaacgagcctccctctgtcacccatcagtgtctcacgcagcagttcctgaccatcaaagtgtgctctgtgctaagtactctgctggatgatttggcttgaatttctcaataaatacacctacttaccctaagaggcagttaatattattcccatttgactgatatggaaactgaggctgagaaagtggaagcaatttttaagtcaagtcacacaatgtaagtggtgagcaggacccaaggttgtgtttatatgattttgaaattttgttatcgaccctacttatgagccctgctttatttctccattatagacatcccattttgtttttcttttaaactgagacaatggcaaaataaaaacaggggagtgttttatgtatcattttcactggaccggtattttctgtgtttttcagaacactagccagcaagctcctaaaaaacaaacattaaattaatttggtcaaaactgcacattatatccttttctaggagatactgttttattttatttcattttctcaaatttccatttgactacataacctttttatcttcaaatgcctttaaaagcacaaattgggaaaggtttcagttaaaagacaagtgaagaatttggtattatacaactaaatttttaaaaataaaaaaaagaaaagtggccaggcacgtggctcacgcctgtaatcccagcactttgggaggccgaggcaggtggatcatgaggtcaggagttcgagaccagcctggccaacgtggtaaaaccctatctctactaaaaatacaaaaattagccagacgtggtggcgggcgcctataatcccagctacttaggaggctgaggcaggagaatcgcttgaacccatggggcggaagttgcagtgagcggagatcgcaccactgcactccagccggggcgacagagtgagactccgtctcaaaaataaataaatagataaataaataaataataataataaaaggccaggtgcggtgactcatgcctgtaattccagctcttttgggaggctgaggcgggcggatcacctgaggtcgggagttcgaaaccagcctgaccaacatggagaaaccccgtctctactaaaaatacaaaattagccaggcgtggtggcgcatgcctgtaatcccagctacttgggaggctgaggcaggagaattgcttgaactcgggaggcagaggttgtggtgagccaagatcgtgccattgcattccagcctgggcaacaaaggcaaaactccatcttaaaaaagaaaaaaagagaaaagaaaaggaaaaaggaaaacagaatcttctgaagccccctagagatggcagcctcctgcttcattctgtcttcacttcaaaattctgtttttattctttacctggactcctccaagaccaggaatatcagtgccctgtttcttatctcctccccagaggccttcgttttttgatccaagtcctggctacattttgtgccatctgtgcgctctgggtacgttatgctccttgaggggaggaactgggttttaacatctttgtgaccttatagtggccacagtagctacttaggaaatgcatgaatgaactgcgttttgagcagaagaacaaatacattacgtggatctgtttttctgagttaactctagccaagtgattaaccccctctttgggtgacagtgagaaatttgagaagctgcagtaactcatttatatcactagggttccatttggaaaatgatacctcctgttgtctcatttaattagtaattgtgttttcagttccaattgaaagcctcagaagaaaggatagtaataaactgtggtgtatggtattattattgttatctaattatatttactattgtgacagttttcgattgaggtacttttgaagaaggaacttgtcaatgttatctcataggcttctctcttgttcctcctttacctctccatgtattctaaactccagtattaagtatgagcctcttttatagatatgtaaattgatgcacacagttttgttgtttgtttgttcttaacaacatggcctaaagttgtttggtaagttcattctggatctagagattgattcaccagtcttttcagagatgtcactcacacattggcaaaggcagtgggggaaccaagggaatgatgccccaacaagaggttggaagatgtgggagctgctttggctctgcaatttacttgttgcatggctttggacaggccatccttccatccattcatccatgcattttattcatccattgagcatttcatggaattcactagattggatagtccatccatccatccatccatccatccatccatccatccatccatccaacatttcatggaatcctctaaattggacagtccatcaatccatccattcattcattcatcaaacattccatagactcctctaggttggagagtccatccatgcatccatcagtcatccatggaattcattggatggaacagaccatccatccattcatccatccacttattcatccaccaagcatttcatggaatccaccgggaatcctccattctgtggagtcccaccaggctagatgttggtattacaaagatgaataggacattgtccccattctcaaggaacttcctgtttaggatgtggattcagacacataaaccaacaccctcagagaaatgctgtgggtgctttgttagaagcgtgtccaggtagaatggcatcccagaggagagaggagcagcattccttctggtgctctggagacgctttgtggcaaaactgacatggggttgagttgaggagagaaacagaagatataatcaaggggtcatgccgtgataaagaatttggattttatacttctttataatttcccggtgatgggggccactgatgattttaaacagagaacagcacaaccattgtttttggaagataaacctggaggatgaccttatttaatctttttttaaaaatctttttaaattttttttttatttttgagatagagacttgctctgtcgcccaggctggagtgcagaggcccgatctcggctcactgcaacctccgtctcccaggttcaagcgattctcctgcctcagcctcccaaatagctgggatttcaggcatgcaccacaatacaataatttttgtatttttagtagagacgggggtttcatcatgttggtcaggctggtcttgaactcctgacctcgtgatccgcccgcctcggcctcccaaagtgctgggattataggcgtgagccaccgcgcccgccgaccttatttaatctttataagcctcacttttcacatctagaagacagacacaaataatacctattcctcttgcttatgggtttctttgggttgcatttatctgtgaaatgctattaaaatagctagtgtgtactcactactttctaagcactttaatcctcacagcagcttcacaaaggtcattattgctattacttacattttagagatgcagatagttacagaggctgaaacctgacctagggatacacagctaggactagtggcatagccaggatttgaaaccaggcctaccagattttggagcccccatgtccatagccaccacacagtgctggcaaggcttttcatctgtgcttcattcctcacctaaaacatcttgccggtggctttattttgcctccagtgacctttgcagagtgttgatgtattggaaagactcaagatcagctcaaacacatgtgccgttatttacaactatttaatctttgtctttaataatatagtcttttatcattgaatagaaccaagtttatggagtagaatatacgactaattcttttgtactaactgggtgttacaaacgacttatgtttctatgggcatatacataaatctccctcccattgttaacagaaaatcaattgtgactctgacttcatccttttggggagttcttctgaagatccatattatgaagaggtaaaaagtgaaattgtagagaatataatgagatggattagagcaggggaaagatcttgaatggggtaggcttgttaagaagagttgccaaagaacagaatagacaaaggtaaggaagtaggtttggcaaactcagcaagctctgcttgttgaaaagacagtctggaaaatattctagaagttcacacacaggcagttgcaatccaaggacaacttaacagcacctctttagtaaaaagtttattcactgtattttctctgtactaggtcactgctgggtgaaaaaaaggctgcattatctgctaaccatgaatgggtgtcttttaagtattactgcttgaagattcaggaagctcaagaataataattcaaataaaatgctgttccatgtcttgacctgtgttcagtgtgccaagaaatagtactgaaaaatgccagggttacacattttgtggctggggaggaatgttttgatcaaccttcagctgctcataaaaaataaatactgccgtgttcttatatggactgtttcttgaagatcttttagagtagatttccagctgaaatttcaccttaacttaaaaaaaaaaaaaagaggaaagaaaaggaaagctgtgcgttatttaaaacattaggcatgtcatgccagagtaaaataatggaatcataaagagaaaatgctccattgagataaaacagctgtcctttatagtcactgcgtaagtgtaattcatctgctgtttgtaggttatgccttaatgggaaggaatattaagggaatgagaaaaaaaattcttcattaaatggaagagccttgcacaaaatatatcttcaattgaagcagctgttttagaagagcagattctgagatgtgggcagaaatatatccccggagcttctgctgcctgggatgcaggaagaatggcataaacaggatgagtggagcagtggatagaacgggcctcttggcatcagagggagacttggtagaggccaccgcctagcgcatccgttctcataccttgatgcacattggaatcacctgggaagtttgaacaagtctgatgcccaattccacatccagaaattctgactgaattggtttgggatgtggcctgggcatggacatttctacaggttccccaggggagtcttaatatacagcaaaatttgagcactggcctagaaggtgactaatttctttttcttcttgcagctagggcagtttgccgtagggacttaggttggaagattgcatgcaccggcagacgttggagcagagccctgggttaaggctggttagacagcttcctttctttaagggctaaaaggtaaaattccaatgtttcttcgaaaaatgagtcttgaaagtttttcctatcaaaaagaatacacagggccaggcatgctggctcatgcctataatcccagcactttgggaggctgaagtgggtggatcacctgaggtcagttccagaccagcttggccaacatggtgaaacccgtctctaccaaaaatataaaaactagctgggtgtggtggtgcgcacctgtaatctcagttacttgggaggctgaggtaggagaattgcttgaacccgggaggcagaggttgcagtgagccgagatagagccactgcactccagcctgggtgacagagtgagacgctgtctcaaaaaaaaaaaaaaaaaaaaaaagaatgtataattatattctatctgaattccatagtgggtggcgggggggaagcacatctctagtcaggcaaaattcccaggaaggggatgattaacaaggtgacacttaccaaggcttcttggggaatgaaaatcttgaccctgatttgctgctataaaaaacaaagccaaaaaccaatcaagcaaaaagcaaccaaagaaagaagaacgaaaacagtagagccacattcttggttataggtcagatcaccagaaccccacatctcaacttaagtgggagcttttctcgttgctctttaggatttccagggaagaccaggcagtatgctgtaacataaggaagaggaaacatggcttttagtcagtactttgctgataataagctttcaccttaaataactcactaacttttttttttttttttttttttttttttttgagacagagtctccctctgtcacccaggctggagtgcagtggtgcgatctccgctcactgcaagctccgcctcccgggttcacgccattctcctgcctcagcctcccgagtggccgggctacaggcccccgccaccatgcccggctaattttctgtatttttagtagagacgaggtttcaccctgttagccaggatggtctggatctcctgacttcgtgatccgcccgcctgggtctcccaaagtgctaggattacaggcgtgagccaccgcgcccagccagaatctgcatatctgacagtgcacctccaggtgaggatgatgctggcccctggattgcgcttttgagaggcagggcagttcatgagtgtcatcagctggcattcatgttttcttaggtcagccggaggagagtgaaagggaaagacgggatggaacaaggggcctcatgtgtggctttcctccatgcatgacatgaatgaagccaaagcacagtaattttttagctttgagtttatgtggccccaagcaacttggtgtaatcagtgcctatttacattctcaactgccctttttgtagatactaatttttatatactttttattctctacatgacctttgggggagcctgagtataacaatttagtttttctctatcaatttcttcccatttttgttgaattctggcatgtcagcctcctacctttctctatttgtgattcagtttaatgtatctctcaggtctttgttatctatatgtataggtatacctttgttacctacatgtatagctatacctttgttaccaaaatgtatagctatacaaatgtcttttatctggtgcctacaatagtggtttttgttttgtttttaaatctatgtaagtggcacgattattcaaaataatcatctggttgacctcattctcatttggtgatcagtggaaatgctggttaaacttggagtgaaatcaacttgccaatatcattctaaataggatcctctaattatattgtttgcccaactgatagatttttgttttgccacagtaaatcagtggctgtgcagtgtttttctgatcattttgtaatgttctcacacattatttaaggtttgtaaagtttaagaatagatgtagttttatgtgttcaaatttaaacagtttggagagggaagagggttttaaaaaatatggttgtgacatgtttattataaacatgagaaaatggagcttgtgattatgctggtggtatatatattgtaccttgtcaacaagaaagcttctatgtttgtgtatttaaggtggtattttctttctttaaaaacattagaactgatgatgtctcttggaagacttaaacacagtctggtttaaaatattcttccataactacgcttcttcctgaagtttccatggctttctctgggcattgcagaccttttgaaattgagctgtttttcagcagctgcagtcagttacttctcattctctaagctagtgcttcttggctatcagtgtgcatcagaatcacctggaaggcaattaacagccatctgggctctaccaccggactttctgattcaggaggtctggggaagggccacaacactggcatttctcccacgttcccaagtgatactggtgctgccagtccaggtatgatactttaagaaccgctggagtttaaggccaggtgtggtggctcatgcctgtagtcgtagctactcaggaggctgagggggagaatcgcttgaacctggaaggtggaggttgcggtgagctgagattgcgccactgcactccagcctgggtgccagggtgagactctgtctcaaaacaaaacaaaacaaaacaagaaccactggcgtttaagtctttgctaagtgttgtccagaaccagcagcgtagatattgtactttgctgatgcatcacctggaagtttggcagaaatgcagaaatgcaggctccattccaaacctgccaaatccaaacctatattttaacaaggtgccccatgtgatttgtttgcacattaaagtctgagacatcttgcttttaactccttgcaacatcatgaatgctccagtgatagcactgggattccacaagtgtcgaagcaagagagaaagagaaagtcctaaagaaatcagaactcctaggcacttattctttcagagaacattctggcaaactgaggtcagtctgaccttgtttgaacttgcttggatgagttaacttctatactgttcaaaagtaatttttaattagtttctgaattctagagacaatgatatatgtatttattataaaccactttcctataaagcatcatgaaattataaactgtttatcaaagtagcaaagggatgagcctgcagacctgagagatttgttcacagggcttctatgctgcacattcttttctgcctttctttacagccacgggactgcgtaaagaaacctgaaggtcatacatatacatttatacacatatatatatgtgtatatataatacatatatgtgtatatatattatgtgtgtgtgtatattatatatgtgtgtgtatatatatgtgtgtgtatatataatatatatgtgtatatataataaatgtgtatatattatatatgtgtagatattatatgtatatatattatatatgtgtagatatatatgtatatattatatatgtgtatatatgtatatataatatatatatttcattataaaaatataaaaaatagaggccgggcgcggtggctcacaccgtaatcccagcactttgggaggttgaggcaggtggatcactttacgtcaggagtttgagaccagcctggccaacatggtgaaaccccatctctactaaaaatacaaaaattagccgggcgtggtggtaggcgcctgtaatcccagctacttggaaagctaaagcaggagaatcccttgaacccaagagacggaggttgcagtgagccaagatcgtgccactgcactccagcctgggcaatagattgagactctgtctcaaaaaaataaaataaaataaaataaaatatatatacatatggagagagggtctcccttggtcgctgatatggtttggctgtgtccctacccaaatcttatcttgaattgtatttcccataattcttaggtgtaatgggagggacctggtgggaggtaattgaatcatgggagccagtctttcctgtgctgttctggtggtggtgaataagtctcatgagatctgatggttttataaaggggagttccccgatcatgctctcttgcctgctgccatgtaagacatgcctttgcttctcctttgccttccaccatgattgtcatgtcttcctagccaagtggaactgtgagtccattaaacctctttttctttataaattacgtggtctcaaggccaggtgcagtggctcacgcctgtaatcccaacactttgggagtctgaggcaggcggatcacgaggtcaggagttcaagaccagcctgaccaacatgatgaaaccctgtctctactaaaaatacaaaaattagccaggcgtggtggcacacacctgtaatcctagctactcaggaggctgaggcaggagaatcacttgaactgggagccagaggttgcagtgagccaagatcgcaccactgccctgcagcctgggcaacagagtgagaccctgtatcaaaaaaaaaaaaaaaaattacacagtctcagatatgtctttattagcagcatgagaactaactaatacagttacccaggctggagtgcagtggtgcactcatagctcgctgcaacttcacatactcctgggctcaggggatcctcccacctcagcctcccaagactcaaaactacaggtgtgtgccatcatgcccagttaaaggccttaattataatccagaagcattgtataatccagtggaaaggaaacaacaacaatatttctgcaatatctagaatattcagttaatcagaaccaaaaatgcccccttcctggataggagtctaatttttgtttgcttatttcaaatcatttagatgataaacatttgaaattcttaggcactgcttccttaaaggaggaaagtagtgtctaatactggcaaatatattttctgtcccagtttcccagaaattacaagttaaaaaagaaaagacgagtggggagagagaaacactataggaagacagtaaaagcatctagactttgcaattgtactgcctaaaatgtttttataacagtaaagttgtactggctaaaatgtttttatacttctgttgtgtgccaggggtcaggaatgccgtggagcaaacagggtgcatcctctgtggtatctgtttaatttaaacatttgttggggtaaaatattatgcattttaactagtaattaatattaaacatagacacacacacaaacacgaattgttttttgactaggaaggaaccacctatgtatgattttcagaagataggatgagacttaaagaaatttgggttttgggattgatgggtaatggattatagccctagatccctagagtttcattctgtagggatactttggtggaaaactttaggaagcatgtcttaacatatcaggtaatctttcaaaaataactttattgatatatgatatactacacatattcaaagtgtgtagtcttgatgtatgtgtacatccgtggcttcatcctaacaatcaaggtaatgaagatactcatcatccgcaaaagctgcttccttcccatttgtcatctctcctttcattcctccccaccctccaacaagtatgcaggcaacaactattttgtctctgtcactgtagattactttgcactgtctagaattttatataatagaatcatatagcatgtacttttttgaggggtgtgtgtgtgtgtccaggatctttcattcagcatacttattttaagattaatcagcccgagtgtggtggctcacacctgtaatcccagcacgttgggaggccaaggtgggcagatcatctgaggtcaggagttcaagaccagcctgaccaacatggagaaaccccgtctctactaaaaatacaaaattagccaggcatggtggcacatgcctgtagtcccagctactcgggaggctgaggcaggagaattgcttgaacccgggaggcggaggttgcggtgagccaagatcgtgccattgcactccagcctgggcaacaagagcaaaactctttctttttcaaaaaaaaaaaaaaaaaaaaaaaaaaaaaaaagattcatccatgttgagtatggatgaacacttctatcctctttattgctgtgtagtattccattgtatggatatatcacagtttgtttttccatttaccttttgaagaacatttgaattgtttccagtttagggctatcacaaaactgctgtgaacctttgtgtaccagtctctgtatggaggacatatgctttcatgtctatcagatatatacctaagattggaatggctaggtcatatagtagatatatgttcaactttttaagaaactgtcaaaatatttctcaaagtatttgtgctattttacatttctaccagcagggtatgagagttccagttgcttcacatctttgctaaaacttggtatgatccaggctttttaaattttagccattgttggtaatcccagcactttgggaggcctagacaggtggatcccctgaggtcaggagttcgagaccaacctggtcaacatggcaaaaccctgtctctactaaaaatacaaaaattagccagatgtggtggcgcacacctgcaataccagctacttgggagactgaggcaggagaattgcttgaacctgggaggcagaggttgcagagggctgagatcacaccactgcactccagcccgagcgacagagccagactctgtatcaaaaaaaaaaaaaaattagccattgtaataggaatgtaatggtaatatctcattgtagatttaattggcatttccttaatggctattgtggttgagcaacttttcatgttcttatttgccattaagatcttctttagtaaagttcctattcaggtcttttgcccattatattgttgggttggttatttactcattgagttttgagagtttttatggtattctagatataagttcttcatcaaatgtgtgatatgcaaatattttatcacaatctgttacttgtcttttcattctcttaaatgtctttcaaagagcagacattcttaattttgaagtcatatttatccaactttctcatttatggattgcacttttggcattatatctaacaggtatttgcctaatgcaagatcacaatgattttctcttatgttttcctttaacagttttatagtcttatgtttaattctgttgtccattttgaattcattttttatatggtacaagatatgtactgaagttctgttttttctttgcatatggatttcaaattgttttagaaacgtttgttgaaaaaactccgtttcttccccttcaccccctcatcctgtttctcctttcctccccttcctcctcctctcctcccttccccttcctcctcctctcctcccctccctatcctcctttcctgtcctcaataaaataaaaataaaatagaataaactccctttctctactaaattacttttttacttttgtttaaaactagttgaccaaatatatgtgagtgtatttctggactctattctgttccattggtccatttgtctgtcttgttgccaatagcacattgtcttgatcattatagtgttataagtcttaaagtcatgtactgtaagtcttctaatttttttcttgttgaaagttgtttttgccattctgggtcctttgtacttacatatgaattgtcagtcagcttggcacctgctagaaaaaaagcctgttgggatttttgttgggaatactttaaatctttagatcaatttgagggaaattaacatctaaacaatagtgaatcttccatgaacatagtatattgctccgcttatttaggtccttaatttctttcagtaatgttttgtactttttagcatacgggtcttgtatatcttttgtcagatttatctttcagcatttcaattatttatattattgtaaattatattgtttatttttgtttctgattgttgtttgccaagatatagaaatacagctgctttttgtatattgatgttgtatcttgcaatcttgctgaactcacttactagttctaggatcttttctgtagattctttgggattttctacaaagataatgacataatctttgaatacaattttccttctttctttccaacctgattaccttttatttctttttcttgtttgatggcatggttagaacctccaatacaatattaaatagaagtcatgggagcagaaaatcttgccttgtttttaatcttacaggggaagcattcagtcctgatataatagtagctgtggtgctttttgttgtagatgctctttatgaagttgaaaaagttccttctattcctagtttgataacaggttttaccaagaatagatgttggattttgtcaaatattttttctgtgtctattgagatgatcatttgacttttttttttctttttagttctaactattgtccattttattgattgatctttctaatgttaaatcaagcctgcatttctggaataaactccacttggccatgtattatcttttacctttattattggatttgatttgctaagctttttttgttaagaatttttatgtgtatattcatgagagatattggtttttagttttcttgtctatctttgtctggttttggtattgatgcgatcctggactcatagaataaagcagaaggcactctgtcctcttcaattttttggaagcatttgtgtagaattagtattatttttccttaaatgtttggtggaattcaccactgacactatctgggcctggagtctttttttttttttttttttagtgaaaacaagtttattggagatagtaagggaataaagaatggctactgcataggcagagcagcagctcgggctgctggactaaggatacttgtagatatttcttgattgtatgctaaataaggggtgaattatacatgggttttctgggaaaggggtggacagttcctggaactgagggttcctgtcctttctagaccatatagggtaacttcctgacattgccatgcatttgtaaatagtcatagtgctggtgggagtgtctcttagcatgctaattgcattataattagtgtataatgagcagtgaggatgaccagagatcactttggtggccatcttggttttgatgggttttggccagcttctttactgcaacctgttttattagcaaggtctttatgatctgtatcttgtgctgaccgcctgtctcaccctgtgagtaagaatgcctcaacctcctgggaatgcagcccagtaggtctcagccttattttacccagcccctattcaagatggacttgctctggtttgaacacctctgacatattcccctccccagccccgcgcttttataagagaacccttaatcctaagggttgtagaggaacaaagatgcatcttctgtaacttcttcaggctgactaggggtgatgatattcctgcctaactatgagggtctcttgtttttggggtagagaggagctcagtcaaagcgtcagtatggtgagggctattcataactccaatttctgacaaaaggtgatatctggaagattaataagtgttcaatttaagaaaacattctggtcctggagtcttttttatgtgaaggattttaatctacaaattcaatttctttaatagatgtaagcctacttttttaaaattggtttttgtttgtatcttttagggaatttgtcaactaaatttaaatattgaatttattggcataaagttgttgataatgtcctcctatacttttaatatctgtagactgtgatgacatcacctttctttcctgatatttgtcatctgttgtattctctccttttttcctaataatactgatgagagttttattgatcttcccaaggaaccagcttttgtttttatttgatttttttccctaattttgtttgttttatatttatttccattctattatttactttcttttgcctgctttggattttatttgcagttctttttctagtttctttctttttttttttttttttttttttttttttttttttgagatggagtcttgctgtcgccaggctggagtgcagtggtgcgatctcggctcactgcaggctctgccccccgggtttcacaccattctcctgcctcagcctcccgagtagctgggactacaggcgcccaccacctcgcttggctaattttttgtatttttagtagagagagggtttcaccttgttagccaggatggtctcgatctcctgacctcgtgatccacccgcctcggcctcccaaagtgctgggattacaggcgtgagccaccgtgcccagctctagtttcttaaggtagaagaacaaattatttggctaggcgtggtggctcacgcctgtaatctcagcactttgggaggccgaggtgggtggatcacgaggtcaggagttcgagaccagcctcaccaacatggtgaaaccccgtctgtactaaaaatacaaaaattagctgggcatggtggcgcacacctgtaatcccacctactcaggaggctgaggcaggacaattgcttgaacccgggaggtagaggttgcagtgagctgagattgcaccattgcactccagcctgggtgacagagcgagactctgtctcaaaaaaaaacataaagaaaggaagaaattcaatttatttaagacctttcttttcgaatacagatatttaaatttcctctatgtctgctttagcagtgttccacacattttagtatgttgtgttttcattttcatccagttagaagtactttctgatttttcttttgatttcttctttgatccatggattatttagagatgtgttatttagttttcaaatatttaagaattttccaaatatcattctgttgatttctaatttgattctgttgtgatcacagaccatagtttttatgactttaaccttttcacatttattgatacatgttttatggccagaatgagatctgtcttggtaaatgttctatgttcacctgaatatgtagtcttctgttgttcagtgtagtgtttttggtattagcccaatttggttgatagtattgttcaagtcttctatatccttactgattgtctgtttgttctatcaggtacctagagaaggttgctgaaatctcagtctataattatcgatttgtctgtttttcctcgatgttctattacttttctgcaggtattttgacattctgttattaggtgtctagacatttagggttgttatgttcttttgattaactgactcctctatcattatggaattatcccctttactatgtgaatattacttgatttaaaatctaccttgatattaatagggctattcgagatttcttttgatttatattagtgtgatatttcttcttcgatccttttgcttttaacgtagttgtggttttatatttaagtggttttcttataagtatatatagtttggtcttgtggggtttttttttaatcttatctgacagtctgtgtttttaattggggtatttagaccatttatatataacgtgattattgatttgattgggtttaaactgactaacttgttatttgttttatattggctcaattgctttttttttctgcctccttttggattgagtattctttttttttactttatctcctttgtttactttaatagctatatatctttgtgtattattttaatggttgctttacacttatatgcatcttcagcttagtactgtctacctttgaactatattatattaatttatagtataaaaatcttaaaagaagacactgcaatacctcctggcatttttgctattgttgttgacatatgttttacttctatacttcttataagccccaccattcatgttattgtttttgctttaaatagccgattttgttttaaagatatttaaaataataagaaagaaagttattttatattaacttgtattgttatttctggtgcttttcattcttttgtgtacacgcagagttccatctggtatcactgtctctctgcctgaaggacttcttctaacatttcttatagtgcaggtctgctgatgatgaattctttcagcttttttcatttattgaaatggaagcctttatttcattttgtgtctacagccctataccaccctgaatgtgcccaatctcatctgaaagcctttatttcattttgtttctcaaagctattttcactgggtataaaattcttatttgacagtttttttctttcagcattataaggttttttttttcctttcagagcaataaagatacagctctactgacttctgatttgtattgtttatgatgagaaatctaccattatctttgctgttagttttcttttctttcttttttctttttttttgagacagggtctcattctgtcatccaggctggagtgctgtggtgtgatcatggttctctaaagcaggctgccagactcaatggataccccacccctacccccagcctcctgagtagctggaattataggtgtgcaccaccatgcccagctaatttgtttttagagatgggtcttgatgtgttgttcaggctggtctcgaactcctgggctcaagtgatccgtacataatgtgttttctacccctcagtaaattcgctattttttttgttttgttttgatctttaattttttttggaagtttgacaatgatattataaggtatggttttctttgcatgtattttgcttggtgtttactgagtttcttaaacatgaaaatatatttctttaaatttggaaagtttgtggccattatttcttcatattgacttagtgtctcattctttctctctctgtcctcctttcctgtcctctcctcagactttaattcctatatatggatagataaatagtctcagaggtatctaaagttctgattttttccagtctttatttctctgttttacagattgggtaaacctttctttagaaccttcaaattcattgattctcttctattctttttattctatctgtctctctctctctctctctctctctctatctatcatctatgaagattcatcattctctctctctcttttgtttttttttagatggagcctgctctgttgccaggctggagtgcagtggtgcaatcttggctcactgcaacgtctgactccctggttcaggcgattctcctgcctcagcctccctagtagctgggattacaggcacgcaccaccacatccagctaatttttgtatttttagtagagacggggtttcaccacgttggccaggatggtctgtctcctgacctcatgatccacctgccttggcctcccaaagtgctgggattacaggtgtgagccaccgtgcccagcctcaccattctcttaaacccattcaggaaatttttaaatttcagacttctgtaattcagttctagatttcctagtcagttctggtttatgatgagcatattttacatcatgtgcatgattttttggtggtaaaatatcatgtgcattgttttaatgggtgtttaaaatctttgtctgttaattacaacctctgtgtcaccttgggatcagtctttctgattgctgttggcttttctccagtacaggctctattttcttatttctttatatgtctagttactttggatagtaacttggttgttgtgaatgatacattgtagagactctggattctgttattcttgaaaaatgttaatttgtttgaagcggttatctttaggaaactaattgcaactcctgtctttcttgcaatgagcagcaggtaaatatctttttagtgtctttagccttagcttgtctgtgtgattttccctacatatgtatagccagatttcagcagtttttacacaaaacttggggctttccactctcagactcccttttctgggatttcatctttctatttctaactttcatggttgtcccaaactcttgtcttttggttttcccaaccagtgagaccttgggtttctatccagattttaaatgtcccatgttgcattgactagtgaaaaatcttttttaaaaaacccgttgcttgagcctgggaggtcaaggctgcagtgcgagctgtgatcgcgccaacttgcactccagcctgggtgacagagcgagaccttgcctcaaaaaaaagaaagaaaaactcagtctggacaacatggcgaaacccctgtctctacaaaagttcaaaatgtcactggacgtcgaggtacacggcggtagtcccagttactcaggaggctaaggtgggaggatcgcttgagcctaggaggtggaggctgcagtgatccgcgctcgtgccgctgcactccagcctgggtgacagagcaagaccctgtctcaaaaaaaaaaaaaagaaaaaaagaaaaaaagaaaagaaaaacccagacatttcacctagtgctgttcctttctttcaaaggtagattcttttatagcttttgctgcttttgtattccacactaccttcaggcagtgttgtttgtttgcttatttgattgttttccagtctaaggttggtagcttttatctgcaagagaaactatgctgctatcaccagaaacatactgtccactcctttcctaacttttacagttttatccctggccctaggttcttgagtctccctttgcttcggtcctacagcctgaaggcattactgtcccccttccaccccagtcagtgctagtcctgactcctgtttttccttgaggaatggtgggcactcatctccctattcctattggtgtcattgtcatcttaggacaggcttttgtcccttcacatctgaccttctggctccagactctctcctccaaatcgtcgccaacagctttgcccaaacttcctaaaataccaccttcactgtttccaccacacgcagagagctccagtggctctccatgaactgtgaccaggctcttctgacgcgtacataatggtacatcagtagttctggaagccagcggccctcacactctttttcacaaccctttttttcatggttttccaacctccctgaaggtgagggaggcagtgtgaagagaaacctcttgcctcagccctcctccaagaattttctctcggcaggcatgtctcacaaacacctctggacggcagggaaatgaaaatgcggtttccttcagatacactgggattccccggcttgtagtctgtgctaccgcaggcatctgcagctggggcttagcccactcgtctgacctccgtttctccccacccctccagcttgaccatttcctccagcctggcctggtttccctttgagcaggcgcaccgtgttcatccatagctctatagatgagtgcttggaagaacttattctctttttttgtttgtttgaggcagagtctcgcactgttgcccaggctagagtgcagtggtgtgaactcggcccaccgcaacctccacctcccgggctcaagcgattctcctgcctcagcctcccaagtagctgggattacaggtgcccaccaccatgctgggctaatttttgaatttttagtagagatggggtttcaccatcttggccaggctggtcttgaactcctggcctcatgatccaatggcctcagcctcccaaaatgctgggattacaggcatgagccaccacagcagaacttattctttaagacctgattccaattcctgaattcttttcttgcatgaaatctcttctgatcaccagtggttgaaattcatctctccctatgtttaaacattttatttaaaatgttgagcttacatggtttcattgcaagtaatagagacccccttcaaacaaacttagtttttcttggcaaaggtggggagggaggagggagaacacagtataaggatacttggctgtctaacttgtttcccattctctaaatcccaattctgtatccccaagaaagttaatctgattggcctggcttgggataggtgtgtgcccctcctccaatcagtcttgccaggagagcgaggtcacaagattggaaacctggaaacctggtatgagaggttcaagggatttgggggctgatcagagaaaaagatatgaccgcaaagtagcagaagcacatagaagttttactgggcaatgctttgacaggtttgcatgtgggaaagcccttcatggcaggagactgtcgaaggtcagaaggggaggataagggaaccttcagggggagaggggcctacacatgcccaggtgatgtctgttgctcagcagcatgacagggagcttctgggtcagattgctttgaaggcagtagctgcttagggttgtttaaccacaaggctctgtcttgtcaatgaccagaagatgctgtttgtagttttgtggggtctgcaaagcagtcagctctaaatggctaaagatttgcttgttttggctcttttaaaataattggatgtgtacaaatttgagtttggtaccagcagagttttgctctaacacgtttcagccttcagtgaagaaataagcaacttacaggccaatacacacgggctgtctttgattcacttagataacacctagattcatcccattgatcttggtagcagggaggcgagttgaaagaaggatacagttcaaagaaagccaaggcctctgcaattgctcttctagtcctcctcaaaatcatctaagactaaagatgctggtatgtgatatgatttggatctatgtcccaacccaaatctcatgtcaaatgtaatccccagtgttggtggtggggcctggtgtgaggtgattggatcatggggctggatttccctcttggccctgctcttgttatagtgagtaagtgctcgtgagatctgatcgtttaaaagtgtgagcaccttccctccctttcttcctcttgcttctgccatgtacaatgagcctgcttcccctttgccttcggccatgattgaaagtttcctgaggccttctcagaagccatcgtgcttcctgtacagcctgtggaactgtgagccaattaaacctttttttttttttaagacagggtctctttctgtcgcccaggctggagtgtgatctcggctcactgcaacctccgcctcccaggttcaagtgattctcctgcctcagcctcctgagtacctgggattacaggcgtgtgccaccatgcccagctaatttttctatttttagtagagatggagtttcaccatgttgaccatctgtctggttggggtgcatgctaggtaggagaacctggccctcaggtggagcagagtctggaactgcagtcatttttcaggaaagccgtggtggtggccgaagaggcaactaaatgtgatcaatcctagagacacagcacaaacaggagatcacgtatttgagtcagttctggggagagtgtggaggagagaagccaagttttctggacagacaggtcaaggagagcagttcaggactgaggctaagaacagtgactattggccagagtatcttttccatggaatgtccgcttttaaaagctactggggctagatccaatggctcacacctgtcatcccaacactttggaaggccaaggtggacagattgcttgagcttgggagtttgagaccagcctgggcaacatggcaaaaccctgttactacaacaaataaaaaaaattagccaggcgtggtggtgcatgcctatagtctcagctactcgggaggctgaggtgagaggatagcttgagtccaggaacttgaggctgcagtgagccatgattgtgccactgcactccagcctgggtgacagagtgagaccctgtctcaaaaaaaaaaaaaaaaaaaactactggcagcctgaaacacggtgcctagcacggaactttgcatgtgctgagaagtcactaaatatcatgtgttttctggagtccttcatggcattttaatcacagaagtcagaacttatgttacagcagaaagacacattattgcatgtagaataccacgtgtgttcatttgtgaaatttcggtggtttacttacttctacaccttagatgagtggaagcctccatttccatctggcctgtgtaaggttataaaagattaaagcaaccgagaaagcagagaggagaaactttagccagatcccatttttttctaaagctcaaagtccctgaagcatttatcttcacagatagccatctctgcacatatagtatctgcgcacaaataaaatgcctttctggtgttggttgttgcctcacaaacaataatgctgtgtacgctgcctccccgagatgcacaacttgcggatgaaacaaactattattctttaaccatttgaatgtttaattgcttttttccctccacacctggtggcattttgaaaactctacagccatttcaagtggtgtgtagcttttgaccgaagccctggcagagatgaggagaacatctgctcctgggttccagaggcaaccacaccgtcacaatgatggtactttacatgctcctccggcaccaagggctgcagaaatggggttcatgctgcagctcagcacccttcgctttcatcatgtggcaatctgaaaaccaagcctttaacttttccatacacgttattttaatgactgtgcacatttgaatacatgcttgttttttttctttttgagacacagtctccctctgtcttccaggctggagtacagtggcacggtcccggctcactgcaacctccacctcctgggttcaagtgattctcctgcctcagcctcctgagtagctgggattacaggtgcctgctaccacgcccagctaatttttgtatttttagtagagatgaggtttcaccatgttggccatggttggccaggctggtcttgaactcctgacctcgggtgatccacccgcctcagcctcccaaagtgctgggattacaggtgtgagccactgtgcccggccacatttgaatacattctgactggttggtttctacctaaatggtcttaactgtattgcagtcacttctgaaaagtaaaacctaatacctttctaaatgacagtgtgtgctgtaagttgacaatggtggccttatcttagtggctgtcaatctttttcctccccttgcccaaagtggactgtagatccagaattggcccttcagaagaaaatggagcattcttggccgggcgtggtggctcatgcctgtaatcctagcactttgggaggccgaggtgggcaggtcacttgaggtcaggagtttgaaaccagcctggctaacatggtggaaccccatctctactaaaaatacaaaaaaaagtagctggacgtggtggcgggcgcttgtaatcccagctactctggaggctgaggcaggagaattgcttgaactcaggatgcggaggttgcaatgagccgagattgtgctgctgcactccagcctaggagacggcgagactccgtctcagaaaaaaaaaaaaaggaaatggagcattctcagctgtggttgttttagccatctcgatgctgtcgaaatgacacacagatggcgatcaatttaaactcctggacctctcctcttcttttcaggacagtgcgacagatagatacatgggaggcactgagtgaagggaagctggtagaatggcaagatgcacagatggagtgaggactataaaattcctcgaaagcacaggctgaatgtgtgatgaactaaaattaaatgtatttgtgctaggcagtgtgagtagtggaaatagtgccgtcctgacagtcggggcacaagctctgcacctaataatgtgcatgaccttgaccaacctctttggacctcagtttctacgtcagtaaagtctggttacggtagatgatgtctgtgtctaaggtctaaggctctagctctcagagtccacgataacgaactttcctgggcaatttcattgcacttaatcgaggtaacgttgctgttgtcttggcatgtgatttacacagaggttcaccttaggaaggaggtgtggatggccatcggtttgccatcacagacgctaaggtctcaagtctgattgatgctgaggccaagggcaaatgcatttacaacagccagttccctttgagacctgccgcccagaagcatgactggggcaagaagattgttccattgttctggccctgtgcagcaggagtggaaggcttggttccccagcccttaggacaacttctccccaccttccatcctccttctccctcaccactttcttctttttctggtatctcctttgctctggcttgtccccttattatcttgtctttcaagatgagcgtcatcacctggttctctggcagccctttagcattagccacttgcatcctggaagaaacaaagacagcgatgtctcttcctttctacttcatctgaaaatgctgtcaacttttctctaggtgtaggagagggcgtgtgtgcgtgcgtgcgtgtgtgcgtgcgtgtgtgtgtgtgtgtgtgtaagagagaaagagaaggaaagagagagagatttagaattggtgtaacagtggatagggttttgagattaaaaacaaactccgggagtttgaggctagtctgaccaacatggagaaaccccatctctattaaaaatacaaaaaaatcagccggatgtggtggtgcatgcctgtaatcccagctactcgggaggctgaggcaggagaatcacttgaacccaggaggcggaggttgtggtgagccgagatcgtgccattgcactccagcctgggcaacaagagtgaaattccgtctcaaaaaataaataaataaaaataaaaatacaaacaaactcaaaaaatggtagtattggaaacacaatgggctgggtgcagtggctcatctcatgtctgtaatcccagcactatgggaagttgaggcaggaggatggcttgaactcaggagttcgagaccagcctgggcaacatagtgagactttgtctctactaaaaacaaaacaaaacaaaacaaaaaaattggctgggcatggtagtgtacacctgtagtcccagctgctcaggaggctgagagctatgattgggccactgcactccagcctgggccacagagtgagaccctgtcatgaaaaataaaaaaaaagaaagagggaagaaaagaaacaggatgggactgtggaaatcacatttgggaagtggtttgggaaagctgtgactacctagtttctttctttctttttctttttttttttttttttttcctgagatggaatctcactctgttgccgaggttggagtgctggagtgcagtggcgcgatctcggctcactgcaacctctgacccccgagttcaagcaattctcctgcctcagcctcccaagtagctgggattacaggcacctgccactgcgtccggctaatgtttgtatttttagcagagacaggggtttcaccatcttggccaggctggtcttgaactcctgacctcgtgatccacccacctcggcctcccatagtgctgggattacaggcatgagccaccacacccagcctagtttctttcttatatttcactcatcactcttgacatgtgaaagtctgcccccacaccacctgacagtacttgcttcacagttccaatggggatcagaacattccaccccaaaatatgtctctttgacacattgattattttgagctgaaggcagttgagaaacagcagttgtgcggtagggctctctgtcctgcccctttttacctaaaagcaaggcataaattctccatgagaaagatggcctccccgtaccgggaagaggagaacattcttatcattggagttagggagcagatgctgagatgagtctgtacaaacaaaccttactagaataactcttatcttccgtgggtttccctcatatatttcctagtcactttcccacaattttctgcccctagcccaaaccctcttttcctttgtcttgtccaatctccacaatttacttctctttgttaaaatggtatatttaaccgcttccttgtggttttcacgtctttctataaagcccctctccctaccctatgccgtgtaaaaatgttaacatcaaataattattcgtatgcgttttctactgttaatcttttatcagttcaattcacaggtcccagccatagaacctagagaaaaagtctcttccccttcagttcccaagctgctggtcatactgcccctcactatggcttcatgtcctgctctggagggtcacagagaaggtcgtttgttgtagggaaagagctgagaacagcggtgtgccctctgagaaagcagcaaactatcctttttgcctctaagggtctgtacttatggtttggccacgtccccacccaaatctcatcttgaattgtagttcccttaatccccatgcatcatgagagggactaggtggaggtaagtgaatcaggggcagttttccccatcctgttcttgtgatagtgagtgctcatgagatctgatggttttataagaggcttcctcctttgctgggcacttattcttcttgttcctgccattatgtgaagaaggacgtgtttgcttcaccttcaaccatgattgtaagtttcctgaggcctccccagccctgcagaaccgtgagtcaattaaacttcttttctttataaattacccagtctcgggtatgtccttttagcagtgtgagaatggactaatacaatactcttcatatcaggactgcaaagaccactgagcacaggttaattcaggtgcagtcctgtagggggtaacctcaaggcttcagggcaagttggtcttggagtaaatgtgagttaaaatgtgagttataaaccaggcaggtcggctggatgcagtggctggagcccatgagaccagcctgggcaacacagtgaaaccctatctctacaaaaaaatttttaaagttagctgagtgtagtagtgcacgcctgtagtcctagctactcagggggcttaggtgggaggtttgcttgagcccagaggttgaggctgcagtgagccatgattataccattgcactgcagcctaagcagcagagagagactgtctcaaaaaagaaagaaagaaagaaagaaagaaggaaggaaggaaggaaagaaggaaggaaggaaggaaggaaggaaagaaaaagaaagaaaagaaagaaagaaagaaagaaaggaaagaaagaaagaaagaaagaaaagaaagaaagaaagaaagaaagacaccaagcaggtcttttgagatgctttaccgctgggatgattggaatatgagttggggaaccttctggacactcatgaacgcctgcattggtcaggcatgcacttttgtaatggaacaggagaagaagcctttgggaaaaggcagggggtgatgaatttggttactgttttcttttctttgagatggagtctcactctgtcacccaggctggagtgcagtggtgtgatctcagctcactgcaacttccgcctcccgggttcaagtgattctcatgcctcagccactaaagtagctgggatttacaggcgcacaccaccacgcttggctaatttttgtatttttagtagggccggtgtttcaccatgttggccagggtggtcttgaactcttgacctcaagtgatctgctggcctcggcctcccaaagtgccgggattacggtgtgagccaccgtgcctagtctgggtactcttttcagtctacagtctctgaactctgacaacttcctgtcgctctgagtgtgactgtgcttgtggttcctctgagagtcgaggtggagctacccaccccctctccacactggtctcatgtgtgatcggagctgtgtgctggggagatgcacagtcaggttagagggcagcttgggtcctggagctgcaatggacacacacccctctctgcttagctgtggctgccctcagtgcatatgcagggctggctccctggcagatctgactttctctggttctgtggctgtcataagatttattcagaatccctcttatgagttttggaactgaagctgttctcaaaccagtcgcagattctacttgttaagagaagcaatgtatacagaatatcggcagttaggaggcatgcgtgggttccagtcccagtctcactggcagtgagaccttgagcaagtcactcaacttccctgagcctcagggttttcatgtgcatcatggaggaattctccttcctgcctcctgcttttctctaatcttcccccatggtgagaggcctctcccaggaggaggtctgcctgctgatatctatccgcctctcatccatgtgggttctatggggaggaagggggaattccattaagctgactggtgaatgagagctgggaaacatggggaacatgcccttcttcatgggaaacatgcccttctccatgatgtccatacttgcatgacaggataaaactatctcctgcaatctgccacaatgggtcattttgaaatctcgaagaagtcatttattcagattaaaactatttatagcagatgtaagcaaacaattcattggtgtccttgagattgatggttggcactttacagttttcattaaaagttaaactctttcttcattcagcaaatatttcagtgcccattatgtgtcctgtactgggatacagcagtgaatgagacagaccagatccttgccctcttggggctggcatcctagtggggagatggacaatgctgggcgtggtggatcatgcctgtaatcccagcactttgggaggccgaggcgggcagatcacctgtggtcaggagttcaagaccaacctggccaacatggcgaaatcctgtttctacaaaaaatataaaaataagccaggcgtggtggtgggcacctgtaatcccacctacttgggaggctgagtcaggagaattgcttgaacccaggaggtggaggttgcagtgaactgagatcatgccactgcactccagcctgggcaatagaacaagactccatcttaaaacaaacaaacaaacaaacaacaacaaaaaaaactgtatataatttgcaaatagtggtaagtgctatggataaagatgaagcagggaacaaggtccaggagatgcaagcatgggtgctataactttgacccagagggcagggcagattccttcactgatggaggggagggaaaggcaggtcgatgctcagccagtgtggaggtactgatagggacctggtccactccaagactatcagggaggtcagggtgggtggaacagagtgagagggagggaagtaggagatgagctcagagcagtatcagtgggggtagagcggaggctgggggtagatagcaggtgatgtaaaactggtgggagggtgtccagggaggtgatatgacatccctccacagggccaatccatagcgattgttttattctttgccacatgcaaagcctgtcatgtggaaggcaggaaaggcctaaaatcataagggcacagtggtgctgttccagatcctgttcctcagtgcatggtcccagggccagcagcactggcatctcctgagtgcttgttaaaaatgcagaatctcagccctaccacacacctgctggatcgaaacctgcatctcacagggcctgcaggtgatccatggcccacgaacattggagaagcaatggtctggagtcatctgtgactttgggcatcagaagccctgggggctgctcaaaacatgtctacttcattgcctgctggcctcagttttcttgtagtttcacctgcaaggagatgagaatgatgctgacattctctgctctgcccaagctcttcggcttttctgagcgagtgccactttcaacaccgctttccccatccatcagaccaatctctctctggggtggtgtagactgggaaggtgcctctgggagctgatactctggctctgtggaatttctaggctgtctttcttcagtgtgctcagagaagatgttctttcctcatagtagagtattacaaagtctatattgtgacagggaacggtgctgccttctctgtgtgcacataatgccactcctccgttcagcagggcgtatgctttgagctgagccacaagcctggtgattcacctataggccaaattcccatcatttattgccaggtcccttatgcacccagtggttccagatgcggaaggctggttgccttcaagggtagatggaaatgcctgttttcatgacaagcacagatgttgtattgtattgactggtttatgctaggattgggcatcatatagtcggcccaccctcccaaaacaaaacacacagccctgtggcctgggtcccgagcctggagttttcaggtctaactatttggcttaactattgttaactcctgagggactctgggtgaatgactttccatgcgtgaacatcaagctgcttattgataaaacagttacaatcatttctacttcacaagttattgaggcttcattatctaaatgcttttgagagctgtccttaaatgtgtcatttccaggcttacgtcactacatactagtgtgccttttttttttctttttttaatgagtgtgaaattgtctccctccttctgttcatttagactgcagcattgatgagcaggtagtggcaaatgcctcttcatattactcacagattactgtgggttaagaaataaactgggcattgacctttccttgctgtttctgaattagtcacacacttctcattgtttgtgtatggcagcagcatgacctaaataaagttagggttgatctctttcagaatatattttggatttctccttacaataaagttaaggcaagttgatgtatggtttgcaatcaaatagaaagaccttttcagcaaagccctggctcaatggtggagtgattattgaacactggtttctagttgtggccaaattctcaaatttctcaagtgttacctggcctgctaaggactctaatagaaagcagtctccatttgtcactgccattttccattggtggggcaactcgatagctccgattgcctgcatcttaccttaccaccttggaattccagattagcccaatgcttactgttttcaggtctctgccattatgctgttaggtggctttctaagctaaactgattgactgcttaatcagctgctgtccatgctgtgtagagtggatgggttcagggacagtgtttctttttttttttttcttttttttttttattgatcattcttgggtgtttctcgcagagggggatttggcagggtcataggacaatagtggagggaaggtcagcagataaacaagtgaacaaaggtctctggttttcctaggcagaggaccctgcggccttgcgcagtgtttgtgtcgctgggtacttgagattagggagtggcgatgactcttaacgagcatgctgccttcaagcatctgtttaacaaaacacatcttgcaccacccttaatccattcaaccctgagtggacacagcacatgtttcagtgagcacagggttgtgggtaaggtcacagatcaacaggatcctaaggcagaataatttttcttagtacagaacaaaatgaaaagtctcccgtgtctacctctttctacacagacacggcaaccatccgatttctcaatcttttccccacctttcccgcctttctattccacaaaaccgcgattgttatcctggcccgttctcaatgagctgttgagtacacctcccagacagggtggtggccgggcagaggggctcctcacttcccagtaggggcggccgggcagaggcgcccctcacctcccggacggggtggctggccaggcggggggctgacccccccacctccctcccggacggggcggctggccgggtggggggctgacccccccaacctccctcccggtcggggcagctggccaggcagaggggctcctcacttcccagtaggggtggccgggcagaggcgcccctcacctcccggacggggcggctggccgggcggggggctgacccccccacctccctcccggacggggcggctggccgggcggggggctgacccccccacctccctcccggacggggcggctggccgagcagaggggctcctctcttcccagtagaggcggccgggcagaggcgcccctcaccgcccggacggggcagctggccgggcagaggggctcctcacttcccagtaggggcggccgggcagaggcgcccctcacctcccggacggggcggctggccgggcggggggctgacccccccacctcccttctggacggggcggctggccgggccgggggctgacccccacctccctcccggacggggtggctgccgggcggagacgctcctcacttctcagaaggggcggttgccaggcagagggtctcctcacttctcagacggggcggccgggcagagacgctcctcacatcccagacggggcggcagggcagaggcgctccccacatctcagatgatgggcggccgggcagagacgctcctcacttcctagatgggatggtggccgggaagaggcgctcctcactttccagactgggcagccaggcagagaggctcctcacatcccagacgatgggcggccaggcagagacgctcctcacttcccagacggggtggtggccgggcagaggctgcaatctcggcactttggggggccaaggcaggcagctgggaggtggaggttgtagcgagccgagatcacgccactgcactccagcctgggcaccattgagcactgagtgaacgcaactccgtctgccatcccggcacctcgggaggccgaggctggcggatcactcgcggttaggagctggagaccagcccggccaacacagcgaaaccccgtctccaccaaaaaaatacgaaaaccagtcaggcgtggcggtgcgcgcctgcaatcgcaggcactcggcaggctgaggcaggagaaacaggcagggaggttgcagtgagccgagatggcagcagcacagtccagcctcggctcggcatcagagggagaccgtggggagagggggagggggagggggagggagaaggagagggagagggagagggagaggggacagtgtttcattagctgtgtagcgttaggcaacctacagactaaagcaaagaactatacaacaacaataacaactaaaactgcctcagtcatgctgcatctctgatctagtttaggctgcagaggtaagatttgaccatcataactcagccaggcagaaaccacatggggaagtaattcacggagcatgcatctttttcaatcctttatcccaccgtatgctgtatttcgctgaccaggatggagatcattctcattctgcatctctgggatgcatgaagttctgttggggaagaaagtactcattacaagctcatgtctggtttagaagttcctgggtgagtggggaatggatccaagagctctgggcatcaggtctccagacaggactaactggggttggggaagtggtaacagctggtcctgtgggccgtggttgctgttagagggagttgcctttggtaatagtggtaagattgtgatgtgtcatcttacaagaagtctataccaagaagagtgtctttgcttaaccactgtgaagccactcctcagagattctcctagatttgtagctttgattagggttaaaatctggacttggttggtggggaagtggtagagacttaggtgcctggaatgggcagttctggacactttcctcctgcagggctgtggttctgggccttactgtggccttctctaatgcccctgggaagagcacagctctacacaaactggggcagattgaagaattagtccattgggaattattgccagtatggatccagaagaaaggctattgttttgttctcccagctcaccaacaaggaggtaaaagattgctcacttctctcacaagccttgccatccacttcccatttccaaatacatagaaatcaaaacattcagtgtttggacttaccccatggcaatgcagccgtcctgcaaacacatgggttggattcctgacacgtgcctgggaaagtgagctagcataatgctatggattttggtcttctgggggttggtgtcccctgaatgcacgtgagtggattagcaatgcacatgactacttggtttgtatattctctggctgagtgacccagttcctggcccaggaacaggatgagcaaagctagctgggtaccatcagggaaacctcccagctggggcatgggggcaccttccttcctagtccaggatgcaaacaagtgtcagagcaaggtgaggaggagagtctctgctgtctgtttggctctggtcatttcctttgtagctatgtagataaatagaagtaaggggcaaatccgatgggcttgatattagagcctgtttcatggcgtcgcatctgtctttggaagcagccattgtgtgtgatcctctgacttttcctccagttgctaaccatcttgaatattttagaaaccctcttatgtgttaatatgcccggtgagacaagcatcgtgatttctccttcaccagtgaccaaacagagctgcggggttgtcaagtgaatgtagtgaaaaatcacacacttgtaaccgagccaggctgtgccagaagcccagtccctgactcggtcctactgttgtctctcagatggggaagtggctctatctataaaacgtgtggttgctatgaattaccggtgttggtaaggagaattggaagcattctcatttctagattacctttcaaatattcaaattcatgcaccagtagcatatggctagaacttttattttttcactcagatgtcttccaatgtgcttcattgaatttgaaatccacaccaggtttgaattttgaaaatgccaactgtatactaactgaatgtgagaaatgaagaaaactttcataaatgtttttttaaaaataaatggtgatttatttttctgtgttcagataaaccagctgtatgggttttttttttcttcattttggttgatttgcattcttgataatatagaaggaacaatgtttccagtgtattcttagctaattttctgcaaaagagtttgcagtagcacgtgtcagacattaaaggaaaatgggtcatggagtctttgggccacctctgctggccgggagctttgggtggagggaggagcctttgtcgtcttcaaatggctgtgtctgctgtgtcctctcagcaaaattttgattcagaaatgatccgattcctttttcttcccgcttggggctgagtttagtttgtaggtgccattcaatgcttttgtttctcaccaggtaagagattttcaagcacttcagaactcataaaagagggcttttatctgcttggttttcctcagctgcagagaaaataagtctgaaagtttgtatcttgcatgacctctgtcagagacaccaacatagagtggaaagaacattggcctggaagtcagaaactgccccgtaacgggtggcccaggagccctttccctaaagccacctgcagctctaagagcttcacagtccttgggatgaccccctgtgagacacctactccttctttccccccgacacttattaaaatacaccatattccccatgaaatataatttatacactgtacatcttcaaatctaagtcaccatcagttgtaaactgtatcatgattttatgcaccgctaagaagaaaaaatgctgcctaatagatgcactcatttcagaggattcctatgtagaaaaatgtgcagtttataattggtgaaatatatgatgaggtcagctgcagctgggtagttgagataatgccaaatgttgtcaattttttataaaaatgatctatttctaacatggacagagctaaaatacccatgtacctgctacccaactttggcagagctcaacatttgcttcaaatattttttttaaaataaaataaaacattgaagacataattgaagaccccggtccttccctaatcctgcaccttgtctctccttcagggtcccatgggaactccatcttgagtttggtgcctgtcatttccatgcatgtttgtaaattttgactgtatgtctttatatccattaaacacatacatttagtgtttttattttttatttttattttttgaggtggagtcttgctttgtcgcccaggctggaatgtgggatctaggctcactgcaacctctgcctcccgggttcaagcgattcccctgcttaggcctcccgcgtagctgggattacaggctcatgccaccatgtctggctaattttttttaatttttaggagagttggggtttcgccatgttggtcaggctggtctcgaattcctgacctcaggtgatccaactgcctcggcctcccaaagtgctgggattacaggtgtgagccatcgcacctggccgtatttagtgtgtttgtttgtttgtttgtttttttgagatggagtttcactcttgttgcccgggctggagtgcaatggtgagatctgggctcactgccacctctgcctcccaggttcaagcgattctcctgcctcagtgtccccatatttagtgttttaaaaaccctgctagctttccaccagtgtccattccctgttcttcctttgaatagtagaacccctgagctttatgcagacagcttctgccagtgatggctcatgacttaacttctggctgatggatgcatgtggaatggatgagtacaccctctggatttttcctttaaaatgaaggagcaagcccttcatatcctttctcctcgttccctctgattaggacagggtcaaggtggttgtgagctacttatgactatgcagaggagggaaacacactagggaatactggagcaacaaggtagaaaaaccctcggtttctgccttcacagtgccagctcgtccactcccgacctgactgcccgccatcgtgagctgctgtgtgagaagtaaacaaaccaacaaacgtatttttatttaagccagtattatttgttctctactaaaacagccacacacaaaaagttcccactaatataaatggtttatattttgatcgtgcacatttctagtgacttcttgtattaaaaactttattttttcttaaggattagcataagatacatgtgtacagttgaacatttcctcagatttagaaaaaggaaaaaatacatcttaccacttcctcgatggctagatatctgtgtcccatcctccaggcgacacgatcccgtggagggcgcattaatctgagcccttcactgtcttccatgcagagatagagggagttcatgcatgctgaggacagttagctactcaatcctcaacaggagacatttaaagcaaacttcactgtgataatttcagaatgaaaaggagacgtttccattcataggagaatttccttcccgaatcctgcctgagcatctgtggaatcatcctcagagtgaggccttcctggtcaagttctctcctctgggaggctgtcccgtgactcccatgcctgcacgacaaactgcgggatggctgctccaggaacaaagccacctctcaccagccggcagggccaggtcagggtaccaggctggttacaatacctgctttctgcggagtggatgagtggcccagagggtaacaagaaccatctcccatttttccctgtccctttttccagccccgatgctgttggataggggcacacccccagcatggtcctgatctcacaggtcagcttggcttctggccttaaaggcaggtctgttctttggtttccctctcaaagggcgcttgaaacagagtggtaaaggtccctgacctctcctattgaataaggctgatgtcatcagtctctatcatgccagatgcccactgaccttgggtgaagcttctcccagtctctccttgcattaagagttgggttttcaggtgagtggtcctcagacttctgcaattgactcattgcctcagtgcaaagatcacaggagcctcttaggccatccgtgccgatggcttccaaacacacaacggtggctcatggaaggagtgggaaggagagcactgctctgggtgagagttggcaagctgagttctactgaagagtgcccgtaaatgaaattcatggtgtaaaaaacccaagctggctgagtgcggtggctcacgcctgtaaccccagcactttgggaggccgaggcaggtggatcacctgaggtcaggagttcgagaccagcctggccaacatggtgaaaccccatctctactaaaaatacaaaaaaaataagctgggcatggtggtgggtgcctgaaattccagctactcaagaggctgaggcaggagaatcacttgaacccgagatgcggaggttgcggtgagcaacctcaaaaaaacaaacaaacaaaaaacccaagccaaacaatacaaaatgactccccttccgtggaggctgcaaccccaactgggagagtcctgtacaatcataggacaagaaagaaaaagaggcacagggaacatgtgagaagcagtttgcacactttagtctgactagatgtcacagttcccttgatagtttttgcaagcaaaaaaatgaaaattacacgtaaacgagtctttaaaaccagttcctctcgatttaccttataaccagttcatcagaaatttacttccattttgagtgtcttttgcattccctgtcaatatctcaaaaattaatttaatttagaaactaaaattaagcataaagtaaagtttaaaaacaagctgggtaggcccttagaaggcttgatttacaaaccttataatgccaaagacacggcaaaaaaaaaaaaaatcaaaatcaaaagacattcccatgtaaaaacacccaaaaaggttttaaattataggcaaattgctcattaggcaactggctttaggctaattgacctagagtcaatgacttccaaaagtcggcacttcagtgctcagggacagtttctcaggcctgtattcatcttatttcagacaaaattctaatcaactctattatttggtttctcagcctctggcatattagatgcgaatcaaaacaggagggaactgtgggagccaggccactttgcacagtgagaagacccgctgataccctgacaggcagggtggggtgggaggaggccagagaatattaaaatgtaaatgcaaggattaggaaatcaccctagtgtggggccttttcctggacgggtgacctcttcctacactcctacactgctgtggcttctgagattgcctctctatcatcatgggcagaggttcataaagccaggcaagctgtgaaaaatatctgtaacaggctaaatcgtgagccacagactttgcgcaattcgttgttttcatatacaatccattttgaaaagcttttcatcgcaaagcgtccaatcattgacttgtgagttggagcatccttataaagcacccagttccccccaccctctgtgtgcagcccacccaccaagagccccccgccctctgtgtgcagcccaccaccaagagctctgtccataggatgcctctgtggctgcatgaacacccccagacctacctagaaacaattctgcgttctggaaacattcacctctaggaagtcctctttcacccaacagtagcgtgaccaaatccaggtagttctcaatatccagggtaattcgggaggaggtcaggaataacccaaattgtgatgaaattcactttcagttatctagtgcatataagtgtggctaagaagcagccagacagagggctgggcgcggtggctcacgcctgtaatcccagcacttttggaggcagaggcgggcggatcacaaggttaggggatcgagaccatcctggctaacagtgaaaccccatctctactaaaaatacaaaaaatttagctgggtgtggtggcacgtgcctgtagtcccagctactctggaggctgaggcaggagaattggttgaacccaggaggcagaggttgcagtgagccgagatcgagatcgtaccaccgtactccagcctgggctatagagcaagactccatctcaaaaaaaaaaaaaaaaaaaaaaaagagagagagagagagaagcagccagagagaataggagaatatacttgcaaatcgtatatttgataagggataaatatccagaatacctagagaactcctaaaagaacaacctaactcaaaaatgggcaaaggacttgagcagatatttctccaaggaagatatacaaatagccagtaggagtgttaaaaaaatgctcaatgtcactaatcattggggagaaatgcaaatcgaaattagtgagatactgcctcatacctattaggatggctaacatttcaaaaaaaaaccaaacaaacaaacaggaaataacaagtgtggtgaagatgtggagaaaatggaacccttggacaccgctgtaggaatgtaaagtggtacaactactgtggaaaatagtacggcagttccccccaaaaattaatataaaattaccatatgatccagcaagtccacttctggtatattcccaaaataactgaaagcagggtctcagagatatttatacatccaggtcgggcacggtggctcatgcctgtaatcccagcacttggggaggctgaggtaggcggatcacctgaggtcaggagttcgagaccagcctcaacatggagaaaccccgtctctactaaaaatacaaaattagccgggcatggtggtgcatgcctgtaatcctagctactggggaggctgaggcagaagaattgcttgaacctgggaggcagaggttgtagtgagccgagatcgcgccattgcactccagcctgggcaacaagagcaaaactccatctcaaaaaaaaaaaaaaaaaagatatttatacattcatgttcatagcagtatcattcacaattgctataacatggaagcaacgcaagtgtctgtcgacagatgaatggataaataaaatgtggtatatctgtacagtgaaatattacttagccttaaaatggaagaaaattggctgggcatggtggctcacgcctgtaatcccagcacttcgggagctgaggcaggtggatcacctgaggtcaggagctctagaccagcctggccgacatggcgaaaccccatctccactaaaaaatacaaaaattagctaggtgtggtggtgggcgcctgtaatcccagctactcgggagactgaggcaggagaatcacttgaacccgggaagcggaggttgcagtaagctgagattgcgtcattgcactccagcctgggagatagagcaagactccatctcaaaaaaaagaaagaagattctgacacatgctacaacatggatgaacctggaggacattacactgagtgaaataagccagtcacaaaaaggcaaatattccgtggttccacttttatgaggtagaagagtcaaaatcatagagacaaagtagaatgaaggctaccaagggctggggtcgggggaatggagaatggggagtgattgtgtgctaggtacagagttgtagagatggatggtggtgatggttgcatgtcattatgaatatatttaataccactgaactatacacttaaaagtggttaagatggtaaatgttatgtcatctgtattttaccacaataaaaacattgcggggtgtagggggatgacagccagcatctggaatggcttacttccttagggaggctaaatataataattactgctgctcccaatccccctttcacttccaaagcccaaggacccccccaggtatctttccactccagggccctctctgaggagtggtgtcaggacttgggctggcactcctgggaaggaaggtggcgcggggtgtagtgagcaggctgagatgatctgctctgggagcgcttgctgcactcagcctaaagccttgggagaagaaatgggtgggtgaggtcaaagaggaggatttgcctaacttccaccaccagccatagttaatccccaaaccaattaatctgatacttagtatctatccttttataactattgttaactctagtcaagtactctttttttgagacggagttttgctcttgttgcccaggctgtagtgtaatggtgccatctcagctcactgcaacctccgcctcccgggttcaagagattcgcctgcctcagcctcccgagtagctgggattacaggtgcctgccaccacacccagctaatttttgaatttttagtagagacgggattttaccacgttggccaagctgttctcgagctcctgacctcatgatccacccgcttcagcctcctaaagtgctgggattacaggcagccaactgcattgtgagcatgcttaggagcagcacggcccctatagagaacatcggatcaggtgacctaagcaaggtctgacacttaccttgtggcctaggaccagttgctgatttttggagcctcagtgtatcttctgtgaaatgagattggtgatacctaccaagttaattcgtggaactctcatgagagtcaaatgaaataacctatgtcaaaatgctttgtgatactagaggaatgtaagggcattgataatggcagagatttgaacttgaagcaaataagaggcagaaatgtaaagttaatggaagggactgcagttttcattgctgtggttctgcctctgaagtttatgagtactggttgtgattagttaaagggtaatccttacctgccctgctaatacttgaagactaggttttctactggaccctaacatctttttgagattgcttttaaaaagtgatgaatttctttaaccagtaaggtgtgtatatatccattttctgttctgctttattttaggaatgaatttattattattatcatagtaaatagccaagcatgattcaatttaggaaaataacaggaaaagtttgctcatcttttctaggctaattttgccataatccccacaaataaagtagtggtttctttaaaatatgccagttcagggtcacagagctgcacttttaaagcctacaagtgattatttagtgcgaaaattgtattcaagtgaaacacatcagcatgcaaatctaaaatgtggccattttcatctagattgaatattattaaccagcccaagggatatgatgtaattaagattttgaacagcttacttttgtctaccgtgatgaatattaccccaatatttaaagcggcttaccagttgaataatgagaaggtggcccagtgcaccaataaccatacattttggcttttaggtgcagtgaatgagtttgacttttcttcacaggtccaagcattgataaggacagagatatgaacttgaagcaaaaaagagaatgttcaaattccaggaaaatcacaattcctttctgaataatggcagatttccatgtcattgcctactcactcattttaataccttcttgcatgggtttaggaataaagaccaagtggggacagatgaatcccttgttaagggtttatgcttttgcctaattaaaactattgggtttatagcctgctaatgcagctctacttggaagggagaacaactcttagcttggatccacttcagaaagtttgcaaggcctccctctgcctttcagagaactgagaaggtacatttctgatagcatctttcttctggtgccattccaggataactgttcttaggggagacaagatgctcaccttttctgtccttcccacaccattttaaaagaaagacaaagttctttatttctcccaggagaagttcaggaaaggatccattgcagagctgcaccaccttaagcagacagcccagccggcaggctaggttggtaccacggctcatttcagccatccgtattttcaggtgtaccatatgtatttagtacatcatttgataatgctaaaaaaatattaaagcagtgtgagactaaaggagaaagaagatgaatgttagcattcccctggggttcatgggtgaaggaattaacacagcgtggcactctaccctagctgtgtttgtttccatggcaacagctacgtacatgtttcagactatctacagtgacacagttgcagaaatagtagcttgcaggtttctgatatcgcatcagtggacaggcggcatgcactatattaagtaagtgtaaaagaatttaaaatatagctctggattcagatgtgtattagctcaactgaacgatgtgtcgggggttgcggcattccccttctgcacgatggcaaaatctgggcaaagttgaaagttgcaagattccagtcaaacaattgtccttgcttgggtaaatatcctcaaatgaaaaaaaatgtgagttacaaaggtaagaaaatggccttggcagatgacatatcaaagaaggatattgttaatgaagctattttttttttttttggaggggggtagagatggataagaaatgaaagctttggttggaaatagctgagtcttaaagcaaatcgaatgtgcaacagaatctttttaacagctgctgagtttatggcaactaaggtctttgaatgtatcactgtagaaattgcttttatatcagaatgatcaggtgaggagcagagaggttgattaggtgtgcggttaaggggaaatcggggctccattgtcttttctgaaagcttatgtaaatatctcattctctccaagctgaccctggtttgtctttgacatttgctgctactttttagtaccatttgctggtatctgtgttgatctcatgctgccacattgtaaccttatatgacttcagtgttggttacagagcaaccaagtaaagatgatagactttgtaagtgtgtgactttgcaaccaaattgtgcagtaatttcggaggagtgttcaaatgagtatttatttgcctgctagacccctacttttgaatagcagcctaggtattaggttaatggatttcaatgtgcacgttatgattgtgggagctttcaagtatgttgtagtgcaatttacactgagtttttaatgtcaaaaaatttttttatttatgcccattattcgatttaagcctgcatttacctcatagttttattattcgtgtatcagtgaagagaatgtaaaatggcatggtaatttaagctaatctattcatttgaagaaggttagttttccgaccataggtggacttttagaaaaagcgatgcagacagctctttgggctgtatgagactatttttttatgtgcacagggaactatctacagtatgtactgcatattattctttatagtcattatttgatcagatgttaagagaatacctctgaggcgctcggagtttctgagcacccacgcatgtggagggccaggacaggttttggattataaaccagggacttgaaccctggaatgtaccacaccccagtgggtagatacaatgtgcctttctaaataagttgataaatgaaatgaatgttgaagctttccatatatgcccatgtgtagtctgagcaatccagagatgggaattgaaatttgtgtcttctatgggggttgttttttggttttattttattttgttgagacagggtctcactttgtcgcccaggccagagtgcagcggtgctatctcgccctactgcaacctctgcctcttgggctctagcgatccttctgcctcagtttcccaagtagccgggacaacaggcacataccaccatgcccaactaaaagacctcactatattttccaggctggtcttaaactcctgggctcaagccatcctctcgcctcagcctcccaaagtgctgagattataggtgcggaccttgggaaactttttaatggtggctcataccgaaggcagctccattctcagaggacgagctgctctgcccacttgtacccccaacttcagtggagttttaagacccatctttggggtgggtgggagggcagacctctgtccccatgccctggcttgcctggtgtgtgccccatgtatcctgggacttctctgtgtgaaagctgcatgatcccacgtgtgcttggcccccccaggctgaggggaccaaatagcattggtaggagagagtttacataacgttctgttattgtgtttgaaggaccttggaaaacttgggctcaataacctgggactctgacactggagaacaaaaaagtttcagtgaactacttggatgactagttcaacttttgttttttggggagtgctggagcaggcctttccaacagtcaggacgtttgtgtatgtttttcatcatacagaaatattttccagtgtagaaacaaaccaaaacaaaacacccgtctatgctattttaactcttttgtaagaatagaaaaacacatgaacctaaatgtaaagcgctaggctgaactcgtcattggaatgtgaaatcttggcagtacttagaggaaactcaatcgcttccattcaaagggccaggaaattgatttagaaaaaataaaataaatttgagggattcccaaatagtggcaaggtggaatgactaagagaagcatgaaggtacagacggatcttattcccagtcataaatggtggtaaaatggtccgaataaacctcccgaggcagagctcatctggagtctccattgcccagaacttctgaagattcccagagaccacaggatgaaaggttggcatccagggctttccactttgagtttctttccagcttctcgtctcactgtgttttcttttccttgggcatcctgtgcccctgtccatgggtcctgaattctgtgccctgaccatacttgaaagcacataggcatttgctctcaccgttacctctgtccagatgcctatagtcccatctttgctttgcaaggcccagcttaaattctgcttcctctgtaaaaccttacagatctccccctttcattgaaatgatttctccatcctccgcgttcacttaaccatttatttgtcaatgatcatagcacatattgcattgtattaaggttagcagtggccgggagcagtggctcacgcctgtaatcccagcactttgggaggctgaggcgggaagatcacctgaggtcgggagttcgagaccagcctgaccaatgtggaaaaaccccgtctctacttaaaaaaaaaaaaacaaaaaacaaaattagccaggtgtggtggcgcatgcctgtaatcccagctgaggcaggagaatcgcttgaacccgggaggcggaggctgtggtgagccgagatcgtgccattgcactccagcctgggccacaagggtgaaacgctatctcaaaaaaaaacaaaaatgattaggagtgtatctccttaactaatatgtaaatgtattaaagacaagggccatgacgtatgtacttttgtaggattcgccatacctagaataatactgtaatggaactgttgtatttaactgaattcttaaaaccttgtaaagatatacattgtggaccagttgtcaaatgcttctgttctttgagcaaaaggaatctgttggctgctgagattccgaaggctgtgtctgtcacagcaccaaaagcatctggacccattcagccactttcagatgcttccaaacttcctgctgtttgtcatcggctaaactcatggaacaaaccaggtgaatggctgatctttttcatattcatagactcactagattttagagccagaaggaacctcagggagctaaattcattttatagaggagagaattttaaacctgaactgccaagtgacttcttcaaagcgagagagttggttagcgccccaggtgtgtggacctagcttagccgacaatacctccacatgctcctgtctaccaggccttcttggcatggccttgggttccacttaaggcatcagggatcagctggtgctttctgcccatgtctgacatgctttctatatgtaaacaccgtcatccaacaacaatccgttcaccactctttgctaaacgctgatatcattgggatagaattaaaaacaaaagtggactgggagttgagctcaggggaaccaggagcaaagctaacaattcattagccgtcgctgaggacacggcagctgctgaattcaggcaagttcagacccttaaaaagagtggaaaaaagaaagcacatgcctcccagcgcctgggcaccgtatcactgggccagctgggcgcagcactgtggcaaaaaagatctcttcgttttcagaaatctgagcctccgaccttgcagacagggaggggaatgtggctgcaactttactgcatttggcattacgttttactcctgcctgcagttgtatcagacacagctcctgtgtggagtccatgaggatctgagaaaagaaccagccctccaagctgacataggagcaagctgtctcaagaaagatgtgcgtgcatgtgtgtgcatgcgcgcgcgtgtgtgtaaggcttgcatctgaggctgacaggctttttaagaggaactcttggtttctgtgtaaatgtgtgcctcttctgcccagagttagcctgttaagggaataaagcgcaattcaggttttggagttggaagcctgattaatctctctgccagttacatatggaaataaattagtaaatggtccatctgggactaaactactgcagagatgataaattattgccatcgtatatgtcggtgttgctgaagactgagttgtgctcaccaggagctgctaaaacataactagatgctctattgtggttagaggaatataaaaaaattttttaattacaagtaaaagatttaccttgaaatgctttttgggagaatggtttggttgatgccaagtttgttcctcagaactgctgtatctgcaaatatttaaaaggagaatctcaagggcatcagaaacatgttgcttttatattttcaaaggccagtaggataacaagtgttaattagtagccaaacgcctcgatgaggaggataattctatacctctatatagtatggcactttataattttcacagcaacttcatttctattttcttatttaaatttccaagaaggtggggtaggtcagtgcctctttttcttgatagatgaaaaactgaggttcagggggtttagtgccttgtccataatgactcagaaatttgagtggcaaagctggcatgggtaagcagagactgccaattctgaatccggcttcatttcaatcctagccttggtgtgacatgaaaaacattttcagtacccccttgttcacctaccaacatcgggaaataaaaccttctatttatgtccattttctagaagcaatgccataccaacttgatcatgagaagcattttttcctctaattggagatgtattaatttaactgttttggtgactaagtcatacccctctcaacttgagtgacagtgtttttttaaagctaaaaccagagatgtcctcaggggctgtcgaggcgtggtaacattttgcccctttgcagaatggcccgaggtgactgtgacttccagattcttgtacctactttaaaattttgtgtgtgtgttcttcctcctggacaaatcttctgctattaatcattgaagcagttgtggttcttccctctagaaaatgcactgccgaaagtacagaaaagtaaactggatgtagtttttttttttttttttgagatggggcaatggcaccatcatggctcactgtggccttgacctctaagttcagatgctcctccctcttcagcctcctaggtggctgggactacaggcgtgtaccaccacacctatttttttgttttgttttgtattttttgtagagatggggttttgccccgttgcccaggctggttttgaactcctgggctcaagcgatgtgcccacctcggcctcccaaagtgctgggattacaggcatgagtcaccatgcctggcccagacattaattaaacatcagccactggtgcctgctcggtggtctttaatgaaaaagaggagcccccagcctgaccaacatggcgaaaccctgtctgtactaaaagtacgaaaattagcccggtgtggtggtgggctcctgtgatcccagctactggggaggctgaggcaggagaatcgcttgaaccagggaggcagaggttgcagtgagctgagattgtgccactgcactctagtctgggcaatagagactctgtcttaaaaaaaaaaaaaaaagaagagcccctagctcttacctgtctgcacttggaagtaaccttgtctcactcagatcaccttcaaatttctcttgtatcagccagacctggttaccccgtgcccccgaatagccctcatgctttccaacctccgggccttcgctttggttgctgtctggtttttgttgttgttaaaattctgtcctaatctcaaggccattattattgtcttcatgatgccttcctttcgtggcaccccccactcctcaccccaaacagaaacaaatgtctcctttgtcttgacactctccagccgttataagaaataacacggtctgccagtatttgagttgcttgtgtatgtgtcttattgtccatagtggacaatatatttctcgagggccggttctttatcatctctgactcttcatccctccatgatgcgatccctaactctatgctttgtccttataggagcttaaacacaaagtagagtagggtgattttattttacaacagaatgtctttgtatgggtggataaattaatgatctaaggtatatcagaattacttggaggacttgttaaaacacagatttctgggccctacttctggataatgtattctgactcagtagatatcaggtaggggccaagaatttgcatttccaacaaactgtcagtcaatattgatgctgctattccaagacccacagtttgggaaccgccgatctaattaatatactcctaacattctcagactacagcgcgtaggctaatgccattcttttcattagagagttcgttgatttgttatccttgaggccccggttaaaaagatatcttcttcagagatgattatgcaatctgtctcatgtaccaactttcctattttgcaagattattggttaaccatggcctgataacttgcagcccatttagtgaggagtagagccagagacatttcattttacaacaataaaatagagtcgttgactttgcagcgtgtacacttggtctacccagtggatcaaggctggtccgtggggtggaatgctggccttgagcgcttgtgggtgctctgatgtttttcctttatgtagacaagtgtttgagtagcagctgtagtacataaaatgatctcacaaatgtctcaatggcagttgtagcaaaataaaataatctcacattgagatggcatgtattttcaaatttctggatcttcttatgccccatgagacagtttcaaaaacactccatcgtgaaagatccagtcttttaataacgatccaagaaataaagaggtactgttacaattggctttttcactgaagtgcgtcattttctagagtcaggccagagatgacatccattgtggttgcaagggctctctctgctgcttctgcttaattctgacttcctactgctcctctccagcagcctctagaagaccagcattctcgtgattatggaggcccctctgtcttttctgtgacgggagcaatgctgacctcggtttcctggacccattccgactcaggtaatcacactgccttccccagctcgccatgctttacgtagattgcattgaatacatgaaatgccaaagctatatttaaatgcaaatgccaaattgattatttctccatcaactggtatcctcccccgcctccccccaatcttcttaatgatcaatttatgcagctgatcagacttgacaatgtggtcaatccaatttaggcattaagatgattaaaaacattgaatcacatctttatttaaaattctggtgtgagtcgtagaaatacaaagccaccagaacattgctgggaattttcacatagaaattagcttctaaattatttttgttgccacaatctcatgttttactttaatcgtattaatctttctaatgttgtacttttagttgagttcaataagtattgagtatctgttgtgtgttcttgggacaggtggggatgaaaaagtagaaggctggctcctatcctcagggagcccacagtttaggcaaagttgactcactcataagaaaatggcagatggtgctgagcatagggccagggctatgagctagcggtagttccttggttcagggaatggagaagctttgaggattgggattgaaataattagggaagaattcatggaccagggagggcctcagttgggctttgtcactgtggatcatttggccaggcagaaggaagaggcgtggcattgagccttgaggggaagacaggaatgaacccaccatgagcccaggcagtgagggcctgactgcctcgatcagaaggtctagaggacccagatcttctgccccacccagaaccagactccccgtcaggggtcccttaaggatcctggagtggagcccattggggaaactccaccttcccgttgcagaggggctttggctggcactgtcctgctgggacagtggtttctgttgcccccaccctggcttggccactgctttgctgatcttttctgcttctctgggcctgtccacaccctgcctctgcctgtctacctgattatttactctactctcacacacctgccatcctcccctctgagctctgtctggcctttggggcttgtcagggccctgggatgagctctgtgaggtcagttcctggtgattcacaaggggcgattctgagaagtggagctgcaggggaggaagcataagttaagaacacgcatttataaagtaaggctgggagctcatccagagagttctgaaagccagaattcagggagggtctcaagggggagggctggggctgtagtcagggatgggagccaagtgccctgattaatttgggtatggtgcagtggatcctgtccacccctcactctcccccaggtctgccctttgttaagctggtggaagcagtggtggctttcactgccctgggtctttttttttttttttgagagagtcttgctctgtcacctaggctggagtgcagtggcgccatctctgctcactgtaacctccgcctcccaggttcaagctgttctcctgcctcagcctcctgagtagctggggctacagacgtccaccaccacgcccggctaatttttgtatttttagtagagatggtgtttcaccatattggccaggctggtctcgaactcctgacctcaagtgatcctcctgccttggcctcccaaggcacgttctccaaagtgctaggattacaggcatgagctaccacacctggcctgtcctgggtcttaaaggtgctactgagagttgtcagtggagaccccgctcactgcctgttgggtcctccctggccacacaccatctgccttcctgcacacaggtgtgcagaagcttgggccttctggaatcatagcctgggatcaccagccaccaggaagcggaagaactagaatagcagtatttgtgttctcctcccactgcagaaattgcctaatagattgttgccacccctcctaagcccaggccaggggttggtaaaccacagtcggcccaggggccaaatactgcctgccgcctgtctgtgcatcgccaatgtactaagaatggttttcacatttttcagtggttgggaaaaattaaaagaataaaattttgtgccttatgaaatgtatatggaatgcaaatttcagtgtccctaaataaaatgttattgaaacagagccatgtttgttcatttctggattatctatggcagttgtgcccttacaatggcagagttaaataagtgcaatggaaaccatgaaatatttaccctatggtcttttatgggaaaagcttaccaactcctggcctaggcagttgtgtgacgtaagtgtttgcgaaatttgatgtgtggagctttctccccattaagaaaataggttgaaaggatgagtaggattagaataggaaggagcagaaggggggattttctggagtgagaaagcgaattggtcacactctagttggatatttccattcatctctttaacttaaaataaaacctagatgcaacatgaggccatttcgtcttagggttgtctgtaagatgaagcatccagacttcttggattaacctaaatgttggaataaatcagcaccaaattaaaacaaaccttgcattttggaacttttttctttttacttggctctgggtgtgaacgattttattttaaaccaaataaatattttgttttaaatcaagtaagctttgaaggcttaccatgagtaagctatggcatttaatcttggcaatgctttttcccaatctggtagcattttatgatactgttgaatgaaaactatagtaaaagatgtgggttctaatcttactaaccggctgagccagggcaggcagtagtatatcagggtaaaaagtacacccaggccaggtgcagtggctcacgcctgtaatcccagcactttgggaggccgaggcaggcggatcacctgaggtcaggagttcaagaccagcctgaccaacatggtgaaaccccgtctctacaaaaatacaaaaattagctgggtgtgatggtgggtgcctgtaatcccagcaacttgggaggctgaggcaggagaatcacttgaacccgggaggcagaggttgcagtgagccgagatcgcgctattgcattccaacctgggtgacagagtgagactctgtcttaaaaaaagtacaccccacatctcaggggcttagtacaacaaaagcttatgtctcatttgcccagagttgggattgggccagtgtagctctcttgcatccagtattttgaggtcccaggcctctttcatcttgtgatatctacatctcaaaacatggcttcctggctgctgcaacatgtgaaggagagttgagaatgtacacccattcttttttcttttttgggacagagtcccactctgcctcccaggctagagtgcaatggtgcgatcttgggtctgtgcaacctccacctcctgggttcaagcgattctcctgcttcagtcccccgagtagctgggattacagaagcgcgccaccacacctggctaatttttgtatttttgtagagatggggtttcgccatgttggccaggctggtcttgaactcctggcctcaagtgatctatccaccttggtctcccaaagtgctgggattataggtgtgagccactgcactggctccattctttttttttttttcatacagggtcttgctctgttgccccagctagagtgcagtggtgtgatcatggctcactgtagccttgaactcctgggctcaagggatcctcccacctgagcctcctgagtagctgggattacagacacgtgccaccatgctaggctaatttctttattttttagtagagacagggtttcaccatgttggccaggctgctcttgaactcctggcctcaagtgatccacccgcctcagcctcccaaagtgctgggattataggtgtgagccaccatgcccagctccattcatttttttagacagggttttgctctgttgctccagctggagtgcagtggcgtgatcatggcttactgcagccttgaactcctgggctcaagggatcctcctgtctgagcttcctgagtagctggggctacaggcatgctgtagtcttgtttttaaaattttatgtagagtcagggtcttgctatgttgttcaggctggtctcaaacttctgggcttaagcaatcctccccctttggcctcccaaagtgctgggattacaggtgtgagccaatgcgcccggctgcacacacactcttcagtgcttaagactagaggtgacaggccattggtcaggactagtcacatgaccctgtctctctggcaggaggccgggaagtatggaggagctcatgggatactgtcccccactgctcagcaacactgagtcactaggggaaagtatatactttttttgtgcctttgtttgcttattattaagtggtaattaattcagtcctacattttaacacattttaagaaaagttcaaataaagtgtatgaaagaactttaaaaggagtaacaaattgtaaaatatgtaatatataattgtaagcaaaaaataaatttctttattgagtcttgaatggtatgggctaggtgcagggtcacacaagtcccagtatgcctaggactgtcctagcatacgccagtttaccccatataattaccatacagtcttccctttcacacccagaaatatcctggtttagaccgtaaatgatatgatcgccctagcttgactccactggtcatcctttaagattaatgttagctactgtttattgagactcttctaagagtcagacactcttctcagctttttgttgcgttgcttcatttaatccccaaaataagactgctaggtgtgtatgcataatctcttcattttcagatgaggcaacagagatgcagaaaggtttgaattattcagtcacacaggtagcaagtggttgatttggtgtgtcgatttgaacctgactattggaatctgtgttcttaagccctccatggggctgcctcactcctcgtttttgagtattgcacccttgacctcatggggccccacttccctgacagtggccctggaatctgttctcagaccacatactggtagaaagttccagccgtgagccaggagtccagccctttatgacaccaatgagaagacgagccgggaagtcactacgtcgttttccagagccagcaacagcaggcctcactgacgtgcgtgtctcctgacttcccgtccggtcccctgccaccactccctaccctgatgttgacaagtgcagcttgttttaaaactgggcgctgcattttacatggaaaagattttattttgaaatctagggtggagtaaaactccagccagtgaagacttgccatgtgctgtgcagagaatccaaacaggccccttcccaacccaaacagccaggagaaactgagtgcagggagtttatttacacatttgtttattaaaaaaaaaaaaaaaagcttaaccacaatcaaagaccagtttatgtgcagaatattatcaaataaaaagccatctacttaggagtctgtattgcaattcccctggttcctggccttcctaatcagtgttcaaaaccaaacccacaaaatcaaagggaacagcagctgaaaaatgaacgaaacatggcacagtcatctactgcatggcttgcttcaagaaaccccccataaaattatacatatggtttctaaacgtacaaagaaaactaaaggaattccattatgaaagaaaaattagatggaaatttctaatcctgtctcataaacaatataggaataactttaaaatattctgctttaagcatgcatttaatttgtgttctgggaaccaaataatgttgccaagataaaacattctaataatgatttatgtaaatttatttgtacaaagtaatggtgtagttgcctatagcaaattgcttggaatatgaaatgacatttatgaggtcttttttttttccctctgaatgaatacaatggagaaaatgagagactccggaaaggaaaaaagaaatccatgttcaaaatggagtctgatgctttgagacacagagccagctggccaggttatagggtgtaaaagtcaacacactgagttcagcatggtttcctgtgatgttctcaaaccatttttttttttttgagatagagttttgctcttcttgcccaggctggagtgaaatggcacggtctcggctcactgcaacctccgcctcccgagttgaagtgattctcctgcttcagcctcccgagtagctgggactacaggcgcctgccaccacgcctggctaatttttttgtatttttagtagagatggggtttcactgtgttagccaggatggtctcgatctgctgacctcatgatccgcccgcctcttaagaggctagaatcctgtattttactgatcataaagtgttcagacgcccaagctttttcacaatagtcagtgacaaataccttgttcttacagccccagtagggtgcttacaacatgggatacaaacaggccaaatgtagttaaaaattgggcaattaatctcagttccttgttacttaataccaaggaaaggtatgcttgagtcataaatggagcccaaatattaaaacacaagacggaaactttctgaaggactgactcatagacctattaagagttttcccattggctgcccagttagcacctttggtaatggctctaggtgctccccggaaacagttaattaaatggaaatcaccatatatgtatcagagagagcttttggatccatgctttggccttctaaatgcctagttgaattttccataacctgtcctattggaaaagtctgatgttaacatctcagtggtagaaggcatttaatgtttttcaaaaagtatttgtgctatcccacttggttgttacaatcatttctgtgaggtaggtaagagtttgtattctaaatacagagaaactaaggaccacagagatcacagagaaagacatctgcagaaagggagcacagcttcacaccagcgttcatcacaccgccaccaccgactacagctctgggattctggagagcttgctttatttaaaacaagttgagagttttggctcatcataagccattttggaattgcactaactatcctgagagaaatgggtttgtctaatccagaagaatgactttgcaacagggtcctttgttgcagtggtgccaaggcctgggggctgaagttagggctcccgagagagagggtataaaggctgaacaggctttaaaactgaatgaaaacaacacaggcttccaggaaagaggactggcctgggttttcagcagctccagttgaagtgtgtgtaccttaaaagctgtagcttgtggcagggtgggttttaatgaagtggcccaagatcttcaggctgaggcagtggatgccagggtgaggctgtcagccacagtttcagctcccagtccttcctctttcagctgcatgattgggatgggatttctgaggtgtgcattctgagaatataatgtaagctgtctgaacctccatttccccatctgtaaaataggggtagggatatttgccttgtagaggtgttgtggtaattttttttttttttttttttttttttttgagatggagtctcgctctctcacccaggctggagtgcaatggctagatcttggctcactgcaacctccgcctcctgggttgaagcgattctcgtgcctcagcctccagagtagctgggattacaggcgtgcaccaccacgcctagctaatttttgtattttcagtagagacagggtttcaccatgttggccaggctggtctcaaactcctgacctcaagtgatccgcctgcctcggcctccaaaagtgctgggattatacacgtgagccactgtgctcagtcggtgttgtggtaattaaataaaatcattctcttaaagtacttggcccagtactttattctgtggcagctcttaaaattactattatggttcttattacccaagaatgtatgatcctgactgataattggaagtaagattaaaatatgtattttatttaagtgagaattaatctaaaagatttccaaaccagttgtttttgtgtactgaaagataagatgaatttgagaattcattcattgtttattcaacaaacagcccttgtttgtattagtccattcttgcactgctataaagaaacacctgagactgggtaatttataagaaaagagattgaattggttcatggttctgcaggctgtacaggaagcatagtggcatctgcttctgaggaggcctcaggaagcttccaatcatggcagaaagcaaggtgggggcaggcacgtcacatggcgagaatgggagaaagaggtgaggggaggcgccacacactttcaaacaactagaccttatgtgaactcagagtgagaacacacttatcaccaaggggatgacccaagccacttatgagggttcctcccccatgacccagacacctccaccaggccacacctccaacattggcgattacatttcaacatgagatttgggtggggacaaatatccaaactatatcagcgttgaaggccttgtggaagctcttggtataacctgtgaggggtcatcaggccagatccagtctcctctcaagggataaaggactttggttattttttttttctcctgttgttctcatcaacattatcacgattgccataaaaaattgactcaatgcctatttacacatggcaaataggcatcgtgccggccactttaatatacatggtctttgtcttccaagaattcagaaattaagctggtctaaatccttatttgttgctgaaagctctgggtctggcccagagccttcaagttggttcccttcagcccagtcatcctggctggccgtggtgtattctcaagatgcaggcttggaaagtctttgccccttggctgctctgcccgaggaagaaggccttggcactctttgcagctgtgttcttggctgttgtgggtgaggccccaaggccgaaagtgggaatgcccttttagttagaattcatttccttcagaagcacataaactactttcttatcaagggttgaagtgactcctggggagaaagtgttgatttcttttttttaagatggctttataacaccctagaaaagatgtttcacagaaattctctgaaggaagataggaagataaggaagtgtaaaacattctcaagtgaaaggagaaatatggaatactcctcagatcggggatccagtctggtctatttcagtggtttctggaccctagggagcttctgtgtgggaggcagaggcaattccgaggtgccgtgcttgggcttagtctaagggggtgggggacacagacagtacacagatatgcacaagtaggtattcaaacgtgagtgttcccccagtctaaggcaaaatgagaaaaataagctcaagacagtgagttcaatatccttacttggcaaaacaaaaagttggccatgtacatacgcctgtccctaaaactattttttgaaattttattgctgggtgaaatccagatcccagagcctccttgcctggggttctcttgccccttctcctgggtgtcattcttgcctccttctctatttctccctcctggcgccttactaccattcactgcaggtctgaagacagtggcttatccttcttatgaaaaagaagattatcacgtgttagagatacaccagcaatgaagactttcttcctggtttaaggagtggggggatagcatttgaaaagataaacaggcatcggtcttcagcactctaggtcactcaggtttatctcctggtggaaatgtggcggacccaaccccctgcgaaggcagaggtgactcttaatcgctgtggaaaatacgacactgtgctgtttccctctagtgaatatgtttatgtggtttatgtgtccatgttgatttctctctcactctgatgtgtgcatatgaactcccaaaatggatatttgagcattaaccagagatcaagtcatttgagcccaaactcaactatgctcaaagctcatagctccctcagtggtggtgtcaacatagtacacgcgagagcattttggtttaattgggcagaatttggttcagaggagcagttgggggtccgagcaggggcatctgccgggagtctgaggaggaagggctgttttgaagttgggatctcttgaaggagaatggcattcagattggcccagtcaatatgatagatgtatcagctcacggtgaaggaggggagaggcttttggaaagggcattatctcaccccaaaagtgcagtcagatggcctctgaacaggtggacttttacctaacactaggactctagtacaaaaaggtgtgtgtttgtgacatgcaaacatccgagagcaagaagtttaaacccattcctcagtgtttattcctgctggaagttgatgagacttaattgcctttgcctacccctcccacggcacccccaccccaaataccacaggttatccttatctcacagcgatacatagtttcccaggtgaacaaggggcaggaaatagcagctaccgaaaggtccaaattactcatcagttcaggtttaatagattttccctgtgttgttggatcttgtgtattgacacactctctcctggatcagtcttggataaactggtgaagaatcgggtagtaccaagttctgtttgaagactatatgattcttcattatcccactggggccctataagttacataaggaaatgaatggcctgctggttgctcttttatggaatggcacaaggctgtttgtaggtagttaggtgcttgataactatttttgtttaacttttaaattgttattttttttctttgagatagggtctcactctgctggccaggctggagtgctgtggtgcgatcatagcccactgcagccttaaactccggggctcaagtgatttccccacttcagcctcccaagtagctggggctacaagcatgtgccaccatgcccagctaattttttaatttttgtagagatggcgtctccctaggttgtccaggctgatcttgaactcctgagctcaagcaatcctcccacctcagcctcccaatgtgctggaaatacaggcgtgagccactgctcctagcagtgatgacctactattctaactactacttcttactagagatggcctattattaccacagcatttgatttatttctttacatgaatgtaactgcaacattatacttggttacaatattgttttatatataggtctattcatggaatgcatatgtataagtaaatatctatgtctttatatatatgggtgtgtataaataatgtcatttgattctgggacactttataggatttgttgtttccttaagatatggaaacacctggccgggcgcggtggctcacgcctgtaatcccagcacttagggaggctggggcggatggatcacgaggtcaggagttcgagaccagcctggccaacatgatgaaactccatctctactaaaaatacaaaaattagccgggcgtggtggcaggtgcctgttatcccagctactcgggaggctgaggcaggaaaattgcctcaacccaggaggcggaggttgcagtgagctgagattgtgccactgcactccagcctgggtgatagagcaagacggcatctcaagaaaaaaaaataataataaataaataaaaagatatgtaaacatctaaattaccaccattagaactggttccacttttatatcattcagtctccacttctttcttggctcttctacccgagacatacaagtagcctctggttgtctgtgtgttcaactgaacaaaaatgtcaacaagctgctatttattttattagacagcttgagcagagatgtttggtctgattgccgcaaattgttagcttatcactgaactgtcctgacgattcttattattcaatttgcattgcttaagataataattattactccataaaagagcatgatgcttttatttgtacagttctttcattaataatttaattgactattataaccaagtggttctgccacacatacatcaaggtacttacagactggccctcggcaccttggaatatcagaatgtaggtgtaaattacaaggcttggggtgaggatgtggtggtgggcaggtcctttggctttgatagccaattggttggtcatgtctttttccccctgtttatttccaagcactttattgattcaccagcagtgactcactctgatctggttattttaacaatctaagaaattagatcatggtatagttattttggccactaaaatggctagattggttctgatttataagtgaaaaaagtaatgatggctaaaacagtaaatctgacctaagatgagtaaatcagtaggtttgtgtaaacagcatctgtgtctgtagggtctgttacgtagcaatgatgaagatgttatcggtcacagcttagcagactttcttagactgcattgcaactgtgtaagacatatgtgttttgatgtattttgctatggaaaaacttaatttgtggatttatttttttttttagcgtgggagaatactacaaattttgtcctaaattcatgttttgtgtattaaataaaatgacaaattgaaatatgcctttggagaaatgagataatgatgttgaacttggctctagtgggtgtcaacccatggtaatgttcaaagaacatctggagttttaaaactctggatttaccaggaaaataaaataattctcatttggccagcccatcctgacatctacaagagtgaatgtagctgttggtcaagagtgtcgtggaggccaactgtggtggcttgtgcctgtaatcccagcattttgggaggccaaggcaggaggatccattgagtccaggagcttgagactggcctgggcaacaaggaagaccctatctctacaaaaaaattaaccaggtatgatggtgtgcgcctgtggtcccagctacttgcgaggctgaggtgcgagcaccacacagaagtttggttgagcacagaagttcgaggctgcagtgagctgcaatcacgccactgcactccagcttgagcaaaaggaaaaaaaaaaaaaagcgttgtggagtaaatcttccatatcagaaattggaatttattaaaatgatcaccttctggccgggcacggtggctcacgcctgtaattccagcactttgggaggccgaggcgggaggatcacgaggtcaggagatcaagcccatcctggccaacatggtgaaaccccatctctactaaaaatacaaaaaattagccaggcgtggtgggaggcgcctgtagtcccagctacttgggaggctgaggcaggagaatggcgtgaactcgggagatggagcttacagtgagctgagatcgcgccactgcactccagcctgggtgacagagcgagactccatctcaaaaaaaataaaaaataaaaataaaaatgatcaccttctcctccattggtgggcaatgcaaatgcatttggagcaggttttactgtctgactttgcccctggaaatgtgtttgctgagttcaggaaaggaattggtgataaattaacctcacagaagggttatggaaattgtttgagagctcagctttataatttaccttttggaaagaagtctggcatctgataattaaaaattatgtctacatatataatgaccaactgagttcctagtactgtgtactttaaggatgcacaatctatctttttttttttttttttttttgagatggggtcttgctccgtcacccaggctggagtgcagtggcgcgatctcggctcactgcaagctccacctcctgggttcacaccattctcctgcctcagcctccctagtagctgggactgcaggcgtccgccaccacgcccagctaatttttttgtaattttagtagagatggggtttcaccatgttagccaaggtggtctcgatctcctgacctcgtgatctgcccgccttggcctcccaaagtgctgggattacaggcgtgagccaccgcgcccggcctgcacaatctatcttaatgcaattaaacacttgacaattaccaacttggaagaagaaggtcacttctgggcggctgagttgtgcacatgtgtcactcagagttggctgggttgtggggtaacagacaaaccccaaaactcagtggcataaaatagggaagtttcctttctttttttttttttttgagatgggttctcactctgtcgcccaggctggagtgcagtggcatgatctcagctcaccgcaacctccgcctgctgggttccagcgattctcctgcctcagcctccagagtagctgggattacaggcacccgccaccatgccagctaatttttgtatttttagtagagacagggctttgccatgttggccaggctggtctcgaactcttgacctcaggtgatcctcccaccttggcctcccaaagtgttgggattacaggcgtgagccaccacacctggccggaagtttcttttcttgcttactctacatttctgttgaagattgatgaggactctgttccaagtcatctttattcccattcctggatcgaagctgatgggtcattcctcatctccgtggccgagggaaaggtgcaaatgacgaaccaggtgctggttcctaaagttgtccagtagtgacacgtgtcacacattttattggccatagctggccacccctaacttcaggcaggcagggaaatgtaatacaactgtgtagttgaaggagagagagctgaagcatttataaatggccttgtgatgtttgtagtatgtgtcttcagtattgtagatagaactccagagacctagctcaactgaagcaagataattttttttaaagtcttttttttgagacaaggtcctgctctgtctcccaggctggagtgcagtggtgcagtcacggctcactgcaacctcagcctcctaggctcaagtgatcctcccactcctacaggtgtgtgccacctggctaattaaaaaatataaaaaaactgtagacataacaggtcttgttatgttatccaggctagtcttgagctcctgggctcaagcaatccatccaccttggcctcccaaagtgctgggactacaggcacgagccaccacagccggcccaggagaattctttacatccttctgaggaaaatggattactctcaggtagggtggcttcagctcttcagcactgtcctttctagggtctgaaccacagggtggctcaagggtctaggtaggtgcccataatctcttttgctcaaaaatataagccactcaagcaaacatactgtgcgcttgctatgcattgcatggcaacctgcagcctcccgcctcctggccaactagagggccactttcatgctcctcctagacagaaaactggaatggcctcagtgccttaacttccctcctacatgttcactgtggattgtcccagtgttttaagtcattctttttatttcatttcccctattgggatctgcatgtttctccttgcaaggaccaagcccagttggcttggacattggtctctacttattgctgagtggtagagaaggttcctccccctcatgaaggtcagggaagcttttgctttccttgacttggttctctctgttcatttaggttagctctactgggccgctccgaggcattggctgaaaatctccgtgcttgggacggagtgcctgtgtctgtgcctggcttgttggcataatgcgttccatgggggccttagttatgtttttcaaggccccaaaagaaattcatgtccacataagagatgtttactttgccagcaaattcagctatctggaatatagccaggagttgggtaggaataaaaaatatctcagagagaaaaacagttatctccaaatccatgcactaaattttaagtagattgctggttttgtgttctcattgcagccacatttcctaattaacttggttttctgatcctctttcatagatgagaaaactgaggcacaaagaggttaaataatttgccgaaagtctcaaagctatgagtggtagaacaggctcttatgattctagagtcagtagaataattggtgtttatggtggtggcagtgagataagaaaaagagtagaactgcatttaatgctttttttttttttagaaagtcagagagaaatatgtaataattgtaggttgattcccttcaaaatagccagttttgttttctaattctaatgtgtgatgagtatcagttggctgagaaattccactaagtaggactgagcttccagcgtctgccaaacaaatgaggatttgctgaacatctagtttagctggtgtataaatagacgcttatgaaatacttttttgcccaatcaagatgaaaccacgactcagtctgtgttatgatgatcagcttggttctggtgtgcttgggtgggaggtggacagcttcaggaatatctcaaaacaggggcaggccctgcctgcatgactgaagctggttgcctctttaaaaaaacgcacctgcgtggaagcccgtggcgaccaactcgctgacattcaccaggatcctctgtttgtgttgcacttcacagttttcaaagcacggacgtgtacatggaacgatcctgcgtgttaggtgccttttctctccttcggatgaagacagtgagacctagagggatttacccaaagacacagtgccagggagtagcagagcccatcacctagacctcactctctctcccccagagctagtccatcagctcctgctccgttcatccactggggcaaggcacccagagggcgatcaaagcagacccatttcctactccaaggagctttctttcccagttaaagaagtccaggtccacagaggaggtggagaaagaaaacgaaagcccagtcacaacatgaactctttgctccaagacagaacagagacttgagataacaggaataagagaaaaacacccttgaacctcaggcagtgtggagacaaggctttccttatctactagctgcaggcagcaaccttcagttggagaagcccctcaaccctgcttcctggactgaggacagggctgaaacttctgcctgccttgggattgctggtcaccctaacccaactgggtatgccttggagaggggaggaggcagggattggccgatggctgtcagacactcctcctggtgctgtgggtctgggcatcttagggtgatcccagacaggtgttctgacctcaggcttgtctgtgccactgactacctcagggtcacacttgaagccagttaggggacccctgggtctcagtttctctcatctgcaaattaaagagttctcaacctcactcataataaaagaggttcaaatcaacacaaggagtgccattttgtcacttgcttattagagagcagatatgatgcaaaatttgagaatatccagttctggagaggggctgggaaaaggcacgttcacttggcttttgtgtcagggtatatgggcagagcattttgggagggcatctggcgacgtctctcaaaatgtatgatgcacagacccagcaagttcaccctttggaatatgtctggtggattttctcactacagtattaacaactggtgaataaggatgtcttaatattgtttgtaacagcaacagccaaactggatacaacctcgatattcaccaccaggggactggttcaaagcccaaatgatacgtcctggcacactgggcagcatttaaataggaggatagggagggggtacgaagatacaacaggagtaaataatagcaatacatatttgagtgctgtctgcattctaagaagtttacgtgtgttaactcatctatccccatcattcagatcaaaaagctgaggcacagtcaagttatataatctgctcaagatcatactgtagttagaaattggcatgggagtgtggagtacaaaccaagtgtgtgtgtgtgtatgtgtgtgtgtgtgtgtgttttgagacacagccttcctctgtcacccaggatgttgtgcagtggcttgatctcggctcactgcagcctccacctccctggttcaagcaattcttctgtctcagcctcccaagtagctgggactacaggtgcctcccaccatgcctggctaatttttgtattttcagtagagacggggtttcaccacgttggccaggctggtcttgaactcttgacgtcaggtgatccgcccgccccagcctcccaaagtgctgagattacagaagtgagtcactgggcccagcctgtaaaccaagtattttggcttcagaactttgcttattgcctgaagtacaaaaagcaagtttcaggaaagtgggatcctatttataaaaaaaaaaataatcaaattatgtagatgcatgtatatatgtgcatgcatatatatgctcatattttaattattatttttggcaggatccacaagaaaaaagtaggaaggactgggggctcagggcaggaggaaaatgccaggagtgctagctcatgcctgtaatctcagcactttgggaggctgaggtgggaggatggattgaggccaggagtttgagaccctcctgaataacatagtgagacctaatctctaccccaaaaaaaaaaaaaaaaaaaaaaacaaagaaagaaaagaaaaggaagaagaagaattagctgggagcttggtgggcttggtggcacttacctatagtctcagctatttgggaagctaaggagggaggactgctggagcttgagcccaggagtttgagactgcagctgggcaacacagtgagaccccatatgtttaaaaaaaaaaaaagcaagagggaacaaaatgttttagctttaattttcttccttcctgtgctgttttgcctttttttttttaaagggcatgtttatcacttaaaaaaaatttacatttggctaatccgtttatgtcggggattaggtggaccatttaaattttcttttaatttttcggcatttaaaaaatatgtcatcagtaattgtattttaaagtgaaacagctggacataactctctccaagagccccttccagattagaaatttcccatgttcccagccccttttctacaacgtgtaatgaagccatgtttcctgcccacaaggatctcagagttacagcaggtggtggatggcgacacgcaccccgggaacaggcgaagctgtgggatcacaccagtctctgctggatgtgggcttgtcctgccgggccagccctcactttcttccctagcagagagctgtgtctgagtctgggtggagagccaccgtgagaagggggtgtgatgtgcagctgcctgtgcttgggagtcccgggcaggctccagcaggctccgtcctggattggatctgagttcatgattattaccatcgcccaacagtggtaggtcccagcaacgaaagctaacgctgcttttgtgtcaggcgctgtgatcacgtctttatgtgcagacactgtagctactgtttttcctccccattccatagatgaagattcagatgttctccctttcttctgccttactttttcagtaatgaaagcagtgtgcccccaccttgccgtaggcctgaggggatcagtgtggtgactggaacagtaattgaaatgagaaaaccctcgagagaaatgtaaaacccaaagggagtggtacaggtccttggccagctgccccaagtcccatgtaattctctgtgccgtgctagaggggtggctttagttagggaggccttgtagcctgtggtccctggtgagagtctgttcacacctcccttgcagcacttcctgtgttgtaactgctgctgcgggtggtgtgcttcactaggctgtgggctcctggtgggcaaggtcttgattcatctctcaaatccaaatgcctagaatgggccctgaattaggactccaagcacgtttccaacatggacagggttagtgctcttgggcaaaacagttatctgagcagtcaagaggccttagaaagcaactggcacgaaaaacatattccctgcatttgccgtcaattggaagaggatgcaaaagaggagaaataagtggagcttcattttagtttgtggcaaagtcatacttgtcagcaaaatggcggcccccgggaggtctggatgtattggttactcacatctcagtttgccttaagcggatcaacttgaatgccttagacgaccaagttgtaatttcggaaggcacagatactaatggaaaagagatgaaaaggaagaaaatgaagtggaagctgcagactagaggcattcagtcgttgctggaggctggaataccaggaagttcctggaggggcagccctgtgtttgctggctgactcctccctacccacctgctcagtgacgatcacactgtgacttatgtggggggcagctggtagatactttgtgtgtgcatgtgcataagtgaataaagctaatgagatggagatgggaatgaccctgatattctattcaaataatcagcctgtcttaaaggacactgttttatgtaaacctaaaaactggaaacaatgtttgaattaattttacaatacaatccagagtgatgtcctagcttactgcatctagaaagctcttgagttgagatttaaatggaaaattccaagtgtcttctccctcagtcaatgattaagaacaaatcttcatcaattggagaggatgtaacatagcctctcagtacctgaaatgataaatagctcaagttggaggtattagatcacacctcacattctttgcaactctgaaccctgtgagtttcagggagtctcttttgagtgcagacagtggtacaaaacataaccttgtgggacccccttgaaaagttcttctggattgtattagtccgttctcatgctgctaataaagacatactcaagctaggcgcggtggctcacgcctgtaatcccagcactttgggaggagggtggatcacgaggtcaagagattgagaccatcctacccaatgtgttgaaaacccgtctctactaaaaatacaaaaattagctgggagtggtggcgggtgcctgtagtcccagctacttgggaggctgaggcaggagaatcgcttgaacctgggaggcggaggttgcagtgagccaagatcgtgcgactgcactccagcctggcaacagagcaagactctgtcttcaaaacaaaacaaaacaaaaaaaacaaagacatgccagagactgggtgatttataaaggaaagaggtttaattgactcacagttctgcatggctggggaggcctcaggaaacttacaatcatggcagaaggggaagcaaacacatccttcttcacgtggcggctgcaaggagaagtcctgagcaaaaaggcccttataaaaccatcagatctctggagaactcactcactgtcacgagaaaagcagcatggaagtcaggtgcggtggctcacgcctgcagacccagcactttgggtggccaaggtgggcgtatcacgaggtcaggtgttcgagaccagcttggccaacatggtgaaactcaatctctaccaaaagtacaaaaattagccgggcgtggtggtgggcagctgtaatcccagctattcgagaggctgaggcaggagaatcgcttgagccccggaggtggaggttgcagtgagctgagatcgtgccattgtaccccagcttggcgacagagcaagactccgtctcaaaaacaaaacaaaacaaaacaaaaacagaaaagcagcatgggggtaactgcccccatgattcaattacctccaacttggtccctcccgtgacacatggggattatgagaactgcaattcaagatgagatttgggtggggacacagccaaaccatatcacagatattactgaaaagttaagcaaaaggatagagcccattttataaacaaagttaaggaagctttctcagcaaaggtttcttggaaaggggaaccactcggaagttttcctgctgttgctgaaaagatagcttgataccatggtcatgtgtctatgacaccaggattgcttttcaaggagctatagaggatgagtgctcttggccatgaatcaggggaaggctatctccaagtagagtaggcacttgagctgcctctaaactccaagttagcttagggactcccaggtctaggaaatggggcaggtctgggaaacagaaagaaggtagaggaatctcatggcccctcctatacgtgacgcttccttattcctttgtgccacatctctactcagatgagaaatctggaggagactgggatccactctgtctgcactaccttggcagggaacagtgggctaagagaccactaccaggccgggcgcggtggctcatgcctgtaatcccagcactttggggggtcgaggcatgtggatcacctgaggtcaggagttcaagaccagcctggccaacatggtgaaaccccacctctactaaaaattcaaaattcactgggtgtggtggcatgtgcctgtaatcccagctacctgggaggctaaggcaggagaatcacttgaacctgggaggcagaggttgcagtgagctgagattgcgtcactgcactccagtctgagtgacaagagcacaactccatctcaaaaaaaaaaaaaaaagagagagagaccactacccctgcatatctctgattccccagtctccacagccaaacttttgggggagccctagtaacttatggccctgaagcaatgatgtcatgtcccaggctccagtggctgaggctgtactgaagaggtctcaggagccagatgcttttgtggaatggaggcttttcaaaaatacactctctctgctctagaagaaccaaatgctgtggggataattggaacccagtgtacttggctaggaagacctgccatgggtaagaatggaatacttcaaaattgcttaacctgcatgcagtcttgtgaatctttacttttaaacttattgctgtggtttgaaagtgtcctccaaatttcatgtattggagacttaatccccaatgaggtaacattgaaagctgggtcctttaagagctgattggaccacgaggggtctgctgtcatgaatgcattaatgggtcaatgtgttctcatgggagtggatctggtggcttttttttttgagacagagccttgctctgtcgcccaggctggagtccgctcactgcaggctctgcctcccgggttcatgccattctcctgccacagcctcctgagtagctgggactacaggcgcctgccaccacgcccggctaattttttgtatttttagtagagacggggtttcaccgtgttagccagatcttctcaatctcctgacctcgtgatccgccctccttggcctcccaaagtgctgggattacagccactgcgcctggccggtctggtggctttttaagaagaggaagagagggctgggtgcgatggctcacacctgtaatcccagcactttgggaggccaagatgggtggatcatgagatcaggagatcgagaccatcctggctaacacggtgaaaccccgtctctactaaaaatgcaaaaaattagctgggcgtggtggcgggcgcctgtagtcccagctactcaggaggctgaagtgagagaatcgcttgaacccaggaggcagaggttgcagtgagccgagatcgtgccactgcactcaagccggggcgacagagcgagactccatctcaaaaaaaaaaaaaaagaagaagaggaagagagacctgagaaagcatgttagcatacccagccccctccattgccatgtgatgccctgtgctgccttggacctctgtagacagagtccccatcaggaagaaggccttcaccagatgtggcccattgaccttggactttccagtgtctaccacagtaagaaataaattccttttctttataaatgattcagtttcagggattctgttataagcaacagaaaatagagtaagatcctacactctaagtgtttcctattaacttgccagatatattctccaataatagtggcttaggtaggtgggaggcatgattaaaataaagaaattacactggaatgatatgctcctggtgaggtggcttttgacagtattagccagattcctcagtgtcccagtcctgtgtatttgaccttggaagactttaccaatatcaggagttctgctaaggaagaggaggagaaattgacttttatcctcatgattgggagagcccatcaaggttgcccttcctacaatagaggggtttaccccaaaggcagattcctgcttccaccttaaactcaactttctaatcaatgttaaatagtcttctggatttccttccagccagcaagtattcagagctcctaccatgtaattaggaaataatttattaatgcaaaagtcgatatttacaaatctgattttactagctggagtggaagctcacagaagaaggggcctgtcgtatgcactgccaagaccccctgtgcccagtcctgctcctgataggatatgggatccctaagaattggatgcctgggtgctatcaaggctttctttcattttggccctcaagttctggaatacccttttctccccttttctagtttgctccctgcttaaatcctacctatctttcaaggtctgtccagatcgttgcccctggatgctcctcctgactacaccagctctggggctgccattttccttctgcctcctactctagacatcatgttgtagatttcaagtaatttcctacaaatcatagttattgtgctacattttgaaaaggacttgctttttattattatgtttcaaattggaatggattcaaggataatattactctctgcattggtgttctgatatgctttctttgttagttcattagtgtatttattattcattcaagaaaatattctttgtgtgtcatgggctgggaaataccctgatatgatgcagtgttaagcaaactgcagggttccctcttctcctggtgcgtatattctggtggtgcatacattctggtaggtgaagacagacaacaggcagactgagagatttttttttttttttgagacagagcctcactctgtcgcctggcctggagtgcagtggtgtgatctcggctcaatgcaacctccacatcccaggttcaagcgattctcctgcctcagcctcccgagtagctaggactacaggcatgcaccactatgcctagctaattttttgtatttttagtagagatggggtttcaccatgttggttggccatgatggtcttgatttcttgacctcgtgatccgcctgcctcggcctcccaaagtgctgggattacaggtgtgagccactgcgcccagccccctcccccccccttttttttttaagatggagtttcgctcttgttgcccaggctggagtgcaatgacgtgatctcggctcactgcaacctcctcctcctgggttcaagcgattctcctgcctcaccctcctgagtagctgggattacaggcatgcgccaccatgcctgactaattttgtattttagtagaggtggggtttctccatgttggtcaggctggtctcgaactccaacctcaggtgatctgcccgcctcggcctcccaaagtgctgggattacagttgtgagtcaccgcgcccggcatttgtcttcatttattttaccaaagacatgcctctttgtggattccccaatgcctagccaaggtaggaacttgtagaataattgattgattgattgattgattgataactctacttaattaattttctccatgttccatcctttggatggataaaggcaatgcctactacgtgcagatctaaactgggagtgactcctggatgcaggctaacgttcctcctccccggcagagtgagaggaacaagaagcgggacaaatgaagcccgctcactgtgcactctgacggtgtttctctgctaagtgtctgtgtttgcatatcattggcatttgttatgccggaagaaactaggtgtgggatgttatttagatgtttccttgagttttctggagcggagagcgattcctgttggttactagatcccacacagatgaaacagcacccatgcgccagaaaaggaatgttcgcatttaattgaagcacttagtatttggctctgacctttggaggatgtcattttggggtagcagctctgttagacacagcctgccagccttccccggaacgctcaggaaaaaatggtgtaactaggatgtccttgtcttttacaacaaaatgcaagaaaaagaagctccttgctttccccacatcgagaagtagcttggctttctagagaaaagaaagtgaacggtgaactccagatagggtgctgaggaatcccaggagaattccagcagggaccagacttccaggggaacatcttggcattccttagcagctgtcgggcagagttcgtattgtcttcccctcttgctgtagggctgaccttggtaagctgttatcatcccacgcacatatgtacctcacagtcctctttgagttgttcatctggccttgggcacccattgtaggaatattgccctcggtggggggattctgtactatccaggcaattaccttcctagcaaagggttccgggtttatggatgtacctgagggcctgctttctaaatccagttatcactcacaaagacaggggaagccatgaaagttgtgggccaagggagtgaggaagggtatgcttccatctgcccccagcctcttctctggggctagcctctctgccttgctggatgaacaagaagtgagttccactagcaaaagcatttgctttccatagctgcctagacggggctgagtggtgtattctaatctcggctccagtccactgcaggctctagatcaagtcctataatctcgctggagctcattttccccacgtgtaaagtaaccactatggtaccagatcctaaacctccttctaatgctaatgtgctgtccctgttcctgaaaggctaatggtttgggtgcagatttaaattcactctgattaaaagggctcttttaatggcctagctcctcagtggattgtcaagaaataatgtgaccttttaggagtttccttccaaaggtttcccaagcccctactggtttgaagttgcatcagtgtcataatcttgtcattttatgtcatcataaggtcatttaaaatggccctgttttttttcccctttttttcttcttcttctttttttcctgattcaccaagcacaggtcttgtttctcgtttaaaggattcactctgcacgtttctctgtgaatgcccaactgctagtttgtgattcacagaccaaagtgttgagattcctgcaaactcagaacatattagcttagccttcttaaaagtggatggggtgagcagtagggaattactttttctagtctgtttggagagcttgcagatgaatttgtttccttttgtccttttccacttagcaaatatcgactttgactcttggctgtgagtggagctggactgagcgtggtgaatctttatttaagggctttatcttctctggggcaggactggccaaaacttgtggctggagtgtgattgactgggacctagagggggtcttgattgctctgtttgctgaggctcacatggaaccagcagagagggctccacacccccgacaaaatagcctgcagtgttgagagggcagctggatagctttttggtaatcatttgttttcaggcatgccaaggctgcacttgaaacccaagttgaaactcaaattattcacaagcataataaccaaactcccagttcacattgtatctccctgctgagatacagaaggaatggggtcattttcctgagaactgcattgtaaaatacttggtaagagggcatcatgaagaccgttggcgtccatggattacccgcatgctgagttttgagggagcacaatgtgctaatcccaggaaatgaagtcctttaacagagagtccaggacacacaaggaggggctgctcaagtggctgtctccaaaagtgcaccttgtgtgtttctaatacaaggataaggcaaggggagccgagcctgcaaggcccagagagccccgggcaaggcaaagggaaatgattcggatgacaagagacactgaaaactacagatatttcttatgggggaaaaagccttagagggcctgggtggagaagtgctgggagccactcttccctcttatctgatgtttgaccatgtcaccttccttcctccaaatctcctgatcactctgacatcaagagtaatgttcagcaggtgagacacagcactctccatgcccacttcctttttttttttttttttttttttgagatggagtttcgctcttatcgctcaggctggagtgcgatggcgcaatcttggctcactgcaacctccgctcactgcaacctccacctcccaggttcaagcaattctcctgcctcagcctcccaagtagctgggattacaggcatgtgccaccacgcccagctgattttttctatttttagtagagatggggtttctccatgttggtcaggctggtctcgaactcccgacctcaggtgatccaccctcctcagcctcccaaagtgctgggattacaggcatgagccaccgcgcccggctccatgctcacttcttgtttctcccaaacgattgtatgattaatgaaaatgggagaacaggggacagatagccttcatgtagaggattcctctgggtagggtttctgcagatgggctgatggatttccatgatttttcacaaagcaggagaaatacaatctccctttcttcccttcaagtaggtactattgttgtcccccattgtccagatgagaacctgaagtttaaagtggttaagtagcttgcccaaggtcatacggtaagagtggtggagccaggatttgtccctaagcattaggctccgggttccatgcttgcagccactatgcattcattggattttcctagtaaacaggtccaggtatcaggagcccaatcagaatcaaacctcaacagtttgggccagagctggaccagaatggcttgcacacctgcttgttctccttggctggtcttcgcgtctttctgcctcacacacctttacaggcactccgtgaaggtctctagaaagaatgcaccaactgacaatatcctgactaaagctgcttgcatggagagacaggagaaccattgtatttaaagaggctatcgccatgttgtttattaaccagtagctcccagagtcaagctgtagacttgaattgtgtgattttgtgtgacacttgtgattacaggtcatgcatgggctgcagtgtgagtctgaatcattaataacggtgatacaaatttacttcccatttgccgtgtataagtagttcatattcaatgtttcccatacatcattccagtcttcccccataccctggagaggtggttatttttattccccttcacagacaaaggacctgggctcagaaaggttaagtgacttgcccagggccacacagcctataattaacccatctctgactggcttctcagctcagtctcttcccactgcatctttcattcacttatttattattttattttatttgcgacagcgtttcactctgtcacccaggctggagtgcagtggtgcgatcttggctcactgcaacctctgcttcctgggttcaagcgattcttatgcctcagcctcccgagtaggtgggattacaggctcccgccaccaaacatctggctaatttttgtatttttagtagagatgggctttcgccatgttgcccaggctggtcttgaactcttggtctcaagcaatccagccaccttggcctcccaaagtgttgggattacaggcatgagccactgcacccggcctcatttatttattttagaaaaaatacttattgggcacctactatgtgccaggcattgttctcattgctggagatgccatggggtataatgagagacagagccaaggtctcccttttctggagtttacaccaggcaacagcagcctggtataaatgggcctgggatacccacataaattaggagagtaggggcacgttggccaaaccctaatatgaaagccttgaacctgcagggcccacgggctcttttgtggttagttttttttttttttttttttggagactgagtctcacactgttgcccgggctggagtgcaatggcgtgatctcggctcacggctacctccgcctcccaggttcaagcaattctcctgcctcagcctcctgagtagctgggattacaggcatccgccaccatgcctggctaattttttatatttttagtagacacgggtttcactatgttggtcaggctggtctcaaactcctgacctcgtgatctgcccgccttggcctcccaaagtgctgggattacaggcatgagccaccgcgcctggcctgtggttactttttaatctggcatataactgtagagattcggatcctttaaggaagcttaattatttatcagtatttattaacaggcaagtacaattacggtaggagatctagaatgggccatttcggagttaggcaatttgcagttttaaaactgacttgggagcaggttgcaaagggtgggctgtctccttgagattctgtccttcttgcctccttgctttccttccacacccactcagccctcaggtccggtcccgccctgctgtcagataagaagctgatactgcaaagagactgcctgctacgtggctgtggccggctcactcagctggttgttaatccagtgggcgccctcggcgttactccagtggctgctgcaggcatttagggtggaacttgcgtggaactgacctgttctttgaagcaagtttaacatctctgcccccacccattagatggtgataacatctgccccttcctttccctgttcctgtaccagcccccgaatgacagcattcatttctgcagctgagaacctaaaatgtatttgtatttgtcaaaaaccctttgacggttttcccttggctgactctaactccagatgatgctagcggagcttttctcaaattttccttttccctttgtttcccaacttcaggcccttgtctgtcctccaggatttccacaaatgccgatggcatatcggccgggcagggagagctcagggccttctataaggaacattggagatgattctcatcaggcctttaatctcactgatgaggaaactggaatgcgggaagaaagcctgcccgagcgaacattcctgagtcgctctcctgcattgtgtccattacactggccgcttctcaagcaaaaagtatctttagttgaggagttatctgaagagttgggattttgtgccatttatccaatggaattactggaattaaatacacagccaacagccactattctctggaacatataggaaccatatccccactccctctccttctccagggtgagataaggatgaccttgggttagggatgggtttgaagacaattaacaacatgaagatggagttcattttttccttctgattataagttattgtttaatgttaaaaagaacattaacattctaaccaatcaagaagtgcttatcatggagactttaaacctgctatgataagcacttctatcagcaactcagtttacctcgttcttttaaaagctgtagtttccattatgtgaatggaccaggatttagctaatgatccctcattcaccagaacaagtttattccggtttttctcttttacaagtgaggcaggagaatgtttatccagtttttctctgttacaaatgaatctgaaataatccttatacatgcatctttttacacaattgcatatgtctttgtcagctcaggctgctataacaaaatgccataaactaggtggcttaaacaataaacatttttttcttactgttctggaagctggcaggtccaatactaaagtgctggccattttgcttcctggcgaggactctctttgtttgcagacagccacagccaccctggtctctcttctttttttttgagacggagtctcactctgttgcccaggctggagtacagtggtgcaatctcggctcactgcaacctccgcctcctggattcaagcgattctcaaacctcagcattttgagtagctgggattacaggcatgtgccaccatgcccggctaatttttgtatttttagaagagacagggtttcgccatgttggccaggctggtctcaaactcctgacctcaggtgatcctcttgcctcgacctcccaaagtgctgaggttgtagtcatgagccaccacaccagtccttcttcttcttcttcttaagagggcattaatttcatcttggggaccccaccctcacgatctgatttataaacctaattatctcccagaagcccctcctccaaatcatctcacattggggattagggcttcaacatctgaattttgggggacacaaaacctcagtccatagcagtgtatttctgtgcaatgaatgctaacaagatgaattggtgggtgaaagctgatgtgcattttaaattataatccacattgccagatatcctctaaaaatgatggggcccaccaaaacaagagtgcctatttcttcacttcctcactacattgcatttttacccatcttttcaattttgtggtcaagtatttttgtttttaaattttatggatacacgatggtcgtacatatttatggggtacataggaaattttgaaataagctgcagcttttttttttttttttttttgagacggagtcttgctgtgtcgcccaggctggagtgcaatggcgtgatctcggctcattgcaagctttgcctgccgggttcacaccgttctcctgcttcagcctcccgagtagctgggactacaggcgcccgccaccacgcccggttaattttttttttgtatttttagtagagacagggtttcaccgtgttagccaggatggtctcaatctcctgacctcatgacctgcccgcctcggcctcccaaagtgctgggattacaggcttgagccaccgagcctggcctgcagctaagtatttttaaagagacagcattatcattgggttcattttaagttctttttttagttctttttttttgagacggagttttcctcttgtctcccaagctggagtgcaatggcgccgtctcggcttgctgcaacctctgcctcccaggttcaagtgattctcctgcctcagcctcatgagtatctgggattacaggtatgtgccacaatgccaggctaatttttctatttttaatagggacggagtttcaccacattggccaggctggtctggaactcctgacctcagatgatctgcccatctcggccttccaaagtgctgggattactggcgtgagctgccgtgcccggcctttaagttcattttttaagtgtttgttatctcttacaccaaagtacaaggagtttaagttgtggtggttatgttttagataggcactttgaaaggttttgatttctggtttatatgttcaggtttttggaaacctgaaactaaagtctcgtcccttcctaacattttccttcatttccttttgaggctgatttcttctctggacccctgtccttaggctgttgggtgggtgcatcagttttctcagggctgcatgaggggaaatagccaatttcctcccaaggcccatcttactatgggccagggctggggaaacttcttgaaggtggcctattttaagctgagctcccatcaaaacgggctttccccagcaggctttagagcacgcatttcctaacccagatggcctcgcagcctggacacctggccggggagaatgagcctgcacctcctgtgtccacattagtgcagctcctgtgatggtcgatgacggtctcagctgtgctcattccggccctccccagcgtgctggggagatggggatgggcttggcgagggaaccttcccacagcagctccactcaggcaccagtcaaaccaagggtggataccttatctttccttggaaggtttgttaggggatgccccttgattcagaaccaaattaggaagatggttcagggacctccttgttcttagagtctggtccttctgccccgtaggatacaccctgactacacacctttacatcctggggcacagggtccctgctttccccccagcctgttgtagggcatgaccctggtatcagtcattgacacactagtatgaacgtaagatactggtttttagaccctagggaatagagggtaaggatcgaacttcaggtagggacttttaggttgtggttccttcttactccctgaactcactcaagggatgtggtcctctcctgaggctacagtgaactcaggcggctgagatgttgagacagggtaggaggtagaggagcagtgccttcctctggggtcggtatgattccggaaacactgcagccccccgttaccagtgctggagtgacagcattcaaaaatgtacttggtatcttctaaaagcttttaaaatggaaaccatatagtatatatacacacaagacttcaacaattttcaaatggatagtgagcgaatacagtcgaagataaaaaaagtgaatctgaggtgttacgactggcaggcaggggtgatgaagattaaacttgcggggctgtcaccctccagctacagtaattctccagaatgaacacagagacacggtagcatccctgtcatcctgaccagttctcaagctgacatctgcaaggtgacaagttactgacacgtaacacgaagaactgaaattatatcaatctaaaggccagtctcaggaaagccttggtaaattttaacttggtccggaagctacatttccagaaatgttgaccgacgggccgtaggcaggtagccagcggtcatttttagagctagagccctggtttgaggaattagatttcctgacaatcaggcaggttattcagagcatcttgttaccaaactgtctttgccttacctttgtaaccagtcacattggatgtcccccaaggctggattgatggtagggggcccggctaccatacctccttgggtgtcatctgtgtccttacatcagtagcaaaatgagagacagctaaggtatgtctgatttggggtattcagtcaacattggcttttctttcttcctttcctgtcccttgccgattagcttgagatttctacttgcagaatcctctcacttctcgctgagagacatcttcggcttcacggtctgccccacagattgcagatggggaaactaaggcagttattctttaaaccaagggtaggaggatgttgcctctaggctatgcaatggataggtgtcccatggatacctaggaaggaattcaccctggggggcctttgtggcatgccacatgtcctagattagtttaacaggcaagtcttgaaagttatttccatgcaaggcacagggagcaaagggaggccgaggtgggcggatcaccagatcaggagatcgagaccatcctgactaacatggtgaaaccccgtctctactaaaaatacaaaaaattagccaggtgtggttgtgggcacctgtagtcccagctacccgggaggctgaggcaggaaaatcactggaaccctggaggcggatgttacagtgagccgagattgtgccactgcactccagcctgggcgacagggcgagactctgtctaaaaaaaaaaaaaaggaaagatgaagtcgagaatgttatttttttctgagctggaaggaactttaaagaagagctattcctgcccctcgttggcagatgaagacacttaagtccaggtgtccatcatggtgtttaacatgcctatattatctgctaagggggcattctacggaggcacattttatactaggtaactttactgaattgaatagtgtccccccaaaattcatgtctgcttggaacctcagaaatgggaccttatttggaaatagggtttttgcatgtataattagttaagacaaggtcaccatggattaggttgccctaaatccaatgattggtgtcttaatagaagaggagacagagattcaggtacaacaacattggggaaggctcatgtaagggtaggagctctaaggcagacttgcaagagcagagagtgtcaagagctgcagggtgactccactgcccagactggtccagtgtcattgcccctacagagtagaaaatggagcggatgggccattggctctgactccatgcaacaagtgggtcccaccagcactgtcagtggcttaggaacaaggtggcttgaccagtgcggcttgagtgacagagatgtcctcttgttcatcttctgctctgtcttctttctgaaccacccactcccactcctggcccccattgtctcttccccttaagtcatctgacctaagaccaactgggtttctttaaaagggcagtgttctggctctccccatgagctcccccttcctagaggctgcctgatggaaaactccccttcagttgaggagggagggaggggggcaaagctgtcagacctccgtggggagttggctgaattgtatgcatatggggttgtggatctggcaagctactcacccactgctccaaacgagattgcaaaatgtcctataagttggcctcctgccccccaaaaacgtggtaattccaaatgtcaccttggcattttcttctcaaataaattctgtcttgttcatatcacaagaaaactggaaacatggacttcagaacttctgtgtttatttctcagtcctctgattgacttgctgtgtgacatgttgaactattaaatttctttcatggataaatgtgaacatgggcttggagatttttatctgttgagtactggagactcggggtttgagacaaagaaaagaatttggacctctgtattgtgtaggtatgtgtatgtaaatataagaagaggatataaggcaaagggaagctcatattaattgattttgaagagccatatggacttttaagaaatcacagatggttcagaaggttaggagatagcctgctggcattgccaccagaaacttaggtatggggaaggtttggatagaagagctgtgttcaatcagtaagccaaaaagcagacctcaaaacaaaggaatacattgaatttagagggtactttgtctgtcagaacacatgaaagatttttgtgctttaattccttgtaaagttcctgtaacacacaagagagatgcagaaatcatcccactttgaagatggagaaatgaagacccagaaggtaaccttgacccaataattttgtgacagaggtgggatttgaatccaggatttcttttctttcttttttttttttgagacagtgttcttgctctgttgcccaggctggagtgcagtggtgcaatcacagctctcactacagccttgacttcccaggctcaattggtcctcccacctcagtctcctgagtagctgggactacaggcgccgcaccaccccatctggctagtttttgtattttttttttagagatggggtctcctgatgttgcccaggctggtcttgaactcctgggctcaagccaccctcctgccttgacctcccaaagtgctgagaatacaggtgttagccaccgcaccccacccaggatttcttatgtagagaatataagtaacttttcatcttttgccctgtcagacagggtcattgtgaaaaatcagtgatttcccagggcaatcaactctcagccctgtgggaggagagagggagaagcagtgggcaaaggggaggaggatcaagctggtgatcacgtttgtatcctgagtgccttgtgtacaggatggtgtggtgcagggagggtgcatgtgggtgttcgagcctcttccttgctgacatggtcctgctgacttcccagtgagcacccaccttatgcagatcctgggctgggaactttaagcttcaggatctatagagctccattttcttcccacaaatcacctccttgacctgtgtgtgtgggcgtggggcgggaagaaatgatatgaactctttgatcaatacattcatttggaatttatttagctgattttatatgaggaagaacccaactttttctaagaaacaaatatgaaaagtgtgttttgaggctaacagtatatctttaatgtgtacatgtaagaagaaaggcatcggcaggcacagtggctcacgcctgtaatcccagcactttgggaggccgaggcgggcggatcacgaggtcaggagttcgagaccagcctgaccaacatggtgaaaccccgtctctactaaaaatacaaaaattagctgggcgtgttggcaggtgcctctaatgctacttgggaggctgaggcaggagaatcgattgaacctgggaggcggaggttgcagtgagccgagatggtgccattgcactccagcttgggcaacagtgtgagctccgtctcaaaaaaaaaaaaaaaaaaaaaaggaagaaaggcatcaggaaaccactgcggatgatgactttcaactgcagatatttacagacaagtcaagcaaaacagacttggtagcagagagacccagatttggtgtgggtcactgtttatgtggaaagactgggtttttttgtgcggcccttgggagcctgccggtctcctaggcatggggtgtgtttcctagtagagtatatatttggatgctgggagttggtacttctcctcgtggcaatattaggtgccacacagtgtttttcaacagagaggatgtcagagggagggctggtgaaagttcagaaagacactttatactatgtggggttgctggatatcagagtgaactttgagtctagccctcagtttttcattaaaacacctgctgaaggatttcacagttccttcccgccgcccaccttcttaactcacatactcatctctgtggagaaaactaggcgttcactctcctgtatgactggtggaggaagtaaatgaagattgtctttacagagaccaatttggcatcaggtatccaaggcattacaacgggaatacccttggacccagcaattctgcttttaggaattcgttttttttttttttcctttttgtgacggagttttgctcttgttgtccaggctggagtgcaatggcgcgatctcggctcactgcaacctctgcctcccgggatcaagcgattcttctgcctcagcctccccagtagctgggactacaggtgcatgccaccacacccggctaattttgtatttttagtagagacggggtttctccatgttagtcaggctggtctcgaactcccgacctcaggtgatccacccgccttggcctcccaaagtgctggaattacaggcatgagccaccgtgcccggcccaggaattcgttttaaggaaatagagatctgtacaagatatattaatgaatctggctgttcatttggccttgttcataatagtggaaaactgcaaataacttaaatatccaaaaagtggcaagtggccaaaccatgggtcattcactcactctgcagtttattgaatgcctactatgtgccaggcacctggtaggtgtgaaaagtgtgtagtgacaaccaaggcagatatggtctcagcccacatggagctcacaattttgttgttgtagaaacaaatttcatacaatatgaagtagaaaaaagtggagtactaagtgtatttacagtgtgattccattgttgttaaataaatagaaaaactcttttctaagttgtccacagtggtcattatgatttttgtaatttcttaaaaaagtgacttttagggacaggtacagtggctcatgcctgtaatctcagcattttgggaggccaagacaggcgggtcacttgaggtcaggagtttgagaccagcctggccaacatggtgaaaccccgtctctaccaaaaacacaaaaattagccgagcgtggtggcgcatgcctgtaatcccagctactcgggaggctgaggcaggagaatcgcttgaacccaggaggtggaggttgcagtgagccgagattgggccttcgcactccagcatggggaacagagtgagactctgtctcaaaaaaaaaagaaaaaaaaaaaaaaaaaagacttttaggaaggagagaaaaagaaggaatcagacctgggttctagacccaactcttccttaaaattttttttttttttttttttttttgaggcagggtctcgctctgttacccaggctagagtgcggtggtataatcacagctcactgcaagctcaagtgatcctcccacctcagccttccaagtagctaggactacaggtgcatgtcctccacccccgccaccccccaccatgcctggctaatttttaaagttttctgtagtgatagcgtctcattatgttgcccaggctggtctcaaactcctgggctcaagggattccaccacctgggcctcccaaagtgctggggttataggtgtgagccaccatgctcagccatcttccttaaacttgtggtgagactttgaatgagtcagaggaccacgctgaatttcctccacacagtgtgggagagacctctgtggcctccagcccaggttttgagatctcaaactctggtctcttctgaggaccctgggggattttacggcagtgtgaaaaggcctggagttttccccaggaggcaggacagcagccaggctgccttgctgaagccctaatccctgggcacttttggtctccagggcccaggtcctccaggaatctggtgatgtattcaactggggaaatgaaaaagagttcctgtattagccatatgataattaaattaaggaagtgcctcttgcccagcaaataaaaacaaggcatgattggtgtacctggcctaacttgcttacccaaatctcactgcaccccaggcaaacaaaatgacagcagctccattgattgagccttacacaagtgcccaacactgtactttggggacattttcctagttaagggtcatgacactgcttgaaataggtagtcaccatccccattttacagatggggaactcaagttcagaagtcaggtatacccgaggatactagagtagcagaggctggaattcaaaccctagtctgcttgcaagcaactttttttttttttattttatttttgagattgggtcttgttctgcttgttctgtcgcctaggtagtctggagtgcagtggctcaatcatggcccacttcagcctcaacctcctgggctcaagcgatctcccatttcagccttctgagtagctgggatcacaggcatgtgctaccatgtccagctaatttttgtattttttttgtagagatggggtcttgctatgttgcccaggctggtcttgaactcctgggctcaacggatactgctgcctcggcctcccaaagtgccgggactataggcgtgagccactgcacctggccttgaagcaacattttaaatctctgctctgaactgcctcccagactaagaagcaagttccactgcagccataaaaacagatgtctaaagctagggaatgtgtgatgggtgttgtaatccatcaagtgacagaacatcgggaagctgcggaatatagagacttaggaagggcaaaatcttatttctgatgaaacctgatacagagaaagctactttagctgtttttctgtggggttgtaaatgataaaattgggttttgacagagagagatacagccgccttcatgctcactataataaccgtttctcctacttgtgattagaaatcaaaggccaactattacaccttataaacctatacctcttgaaagagtgataacttacactaaggcctgacctatgttgtttctttttttttttatgtgaaatattttacttgctgggctccattttgcttatttagcagtgattaacagatagtaaaacatatgagatactagggatacagaggaaaatataagttaaaataaagaattggtttcttccccaccgcccccgcccatcaaaagaatgttccagtatgacagctatttcctgtgtttcaatttcaattcctctatatttcagtttcttcagattcatgttatatagtatgatcagattaatcttctaaaataccactttcataatgccatctccacctctctctcccatcttctctggaacatttaatggctccccattgtctaggataaaatacaaacttatgggtttagatttcggatttcttcatagtctgcttccaagtatgctttttttttttttttttttttttgacagagtttcattcttgttgcccaggctggaatgcaatggcatgatcttggctcactgcaacctccacctcctgggttcaagcaattctcctgcctcagcctcctgagtagctgggattacaggcatgcaccaccatgcctagctaattttgtatttttagtagagacagagttgctccatgttggtcaggctggtcttgaactcccgacctcaggtgacccgcccaccttggcctcccaaagtgctgggattacaggcatgagccactgcgcccggccccaactttacctttgcaaccatctttcctgacagtcccatgagggactcctactcagatgaattggtccatttcttggttctctgaatctgctcttaggtttcctcactttgagcttttgttttactgtgcctgccagtaaagaacacggtagaatattctcccctcccctttcctttctctgaagttctgcccttcctcccaggcactatttgtatttttccttttttgaaaaaccaaaacattccttgaatatctcagcctgtggtgatgagctcagtttcccttatcacatattgtctttaactgaagtcccatgtcctggagggctacaaccagctcagtgccctgcctgtcccaggggctccataaacaccaatgaaaacaatatgcacagtacagctggctaaaaaggaacactttttgtgccagccataaaatatggctataccaagggaggacctctttcccttcagaaaacaaatagccagttttccctgttgcacgtttaaaatgcatattctgtggtattagctaattatttgtcatgcagttaccactcatgactagtcctgttttatgaatgaaatggaagcagagagatgaaaatactggcatgacctcaccagtattttacttgctgggctccattttgcttatttgcaatttgctgagccgttggcagaaacagcacttgaacccaagtttccttctgctattgttatcctctctcctttagagcaggtgttggcaaaccttttctgtaaagggccagagaataaatagttcaggcttgcaggctatatggtctctgttgcaactgtagtattctggcactgtagtgtgaaagcacctaagaccattcaccattttggtttgaacactgagcaggccctccagttgggtgtaggctaatgtgtaaattacatccatggctgggaaagactggctggttggagtaaatactggctggttggagtgaagactggctggttggggtaaaactgggaagttgtagatcttcaagcagtagacagccagtcatcccgtgggccatggacatgggctgtggtcacaagggagacatgttggggacacactgcatacaactcagggatccgttgtttcccagagcacatccatcagtctctcacttggcaaagatttctaaggcttactagctgctgggcagactgtgcctgtttagcttgctcagaagataggagtcattttggccagtggcagcgctgggtgcagttataggagacctcagcatgtgacattcactgccatgcactgtcttcagccgagagagcagacctgtttcccaagattgaacctgttaactaagttcagacacaggtgtagcaaatcagaaagcctgtgcattaatttacagtgacaactattactgcctgaaagtggcttgatgagcgtgggaaaagggaagggaaggttggatgatttgaatgttgagtgtcattggaaaagtcagccagtttcacccgggcgcggtggctcacggctgtaatcccagcactttgggaggctgaggtggatggatcatctgaggtcaggagttcgagaccagcctgaccaacatggagaaactccatctctactaaaaatacaaaattagccaagcgtggtggcgcatgcctgtaatcccagctacttgggaggctgaggcaggaaaatcgcttgaacctgggaggcggaggttgcggtgagccgagatcatgccattgcactccagcccgggcaacaagaggaaactccatctcaaaaaaaaaaaaaaaaaaaaagtcagccggtttcagccccctgtgtaactcagcattggtgctgagatcccaacctcaaggccagggttaatgctgccagtgtgctgggtggggcttggaagagctgtcacctgtgtggaatccatagggaccctccaggatcccaacttcctgcctacttccacccccctccctcctttcaagaggacgctttatttcatagatatgttaatgcattccacttggcaggtttggacctgagctctttctgtctctttcttggggactttgcatatccataccccaatctggtagcccttggtccaaccctgcggaaggatgatgccctttctgttccagctagtagggtgtctggggcagagcctagaccctaaaagtgattaagagcgcctgtaatgatcagcgaggctattttaacagtataagataaaggcaatgtgttccgttggttccctgtgttcctcttgccccggcttattactgccccaagaaggtaaatcacaaatcacctttcagtttcatcctttttaacgtaaggtgaatggtatgaaaaatttagcaggttcaggtctctgcagggaggatgggttacatagggttcaggtaattgggaggagggttttccaggagagactggtgttagtgaatggagtcgttggggagttcttcagtcacaaagcattatgcagatgcagttgttgttgttattctgaatcgaggcagggaggagggaaagggcccagcaggttgggacagtgcaaaggcctctgggggagttggcctgaaggctgagagataagactttggggaagggcagggttggggaggaagggaagccggagcctcggccactttctcatacttaattcaggggttccttttgtgcattcagacctgtgcccatcctctctcctaaagaggtcagcatccagcccctcttcatggcttggacacgtgaacccaccattgccatcatgtctgccttgctacagcctagttagcatcacctgaaaccataaataacatcaaagaaaagagcctattactaacccactgcagagtcccactgttgcccattgacaggttgacaggggttgaacgcactgctttgcagtgtacttttcatggcatctgtgtgaagagaccaccaaacaggctttgtgtgagcaacaaggctgtttatttcacctgggtgcaggtgggctgagtccgaaaagagtcagcgaagggagataagggtggggccgttttataggatttgggtaggtaaaggaaaattacagtcaaagggcgtttgttctctggcgggcaggagtcggggtcgcaaggtgctcagtgggggtgctttttgagccaggaaaaggactttcacaaggtaatgtcatcacttaaggcaagaaccggccatttacacttcttctgtggtggaatgtcatcagttaaggtggggcagggcatattcacttcttttgtgattcttcagttacttcaggccatctgggcctatacgtgcaagtcacaggggatgcgatggcttggcttgggctcagaggcctgacagtactgaaataggggtctctctgctccatgcgtttgagatattctggtatccccaaggcctataaaggttaccaggaggctgctgctgcagccagaggccaggaaagcacccctagatcagagaaggggtggtcttttccttttcttgccttagtaggggtaggcaggccaagaagcagcactggtgggagtagtgccaagtctgcctcttagctggataaccatggcaggtcattttaacctgcttgaggcccaggtaccccctaggtaatatggggataatagcaccgttacaggaaaggggtcccaatccagactccaagagtgggttcttggatctggcacaagaaataattcaaggcgagtccatagagtaaagtgaaagcaagtttattaagaaagtaaaggaggctggacgcggtgggtcacgcctgtaatcccagcactttgggaggccgaggcgggtggatcacgacgtcaggagattgagaccatcctggctaacacggtgaaaccccgtctctactaaaatacaaaaaattagccgggcgtggtggcgggcgcctgtaatcccagctactttggaggctgaggcaggagaatggcgtgaacctgggaggcagagcttgcaatgagcagagatcacaccactgcactctagcctgggcaacagagcaagactccgtctcaaaaaaaaaaaaaaaaggaataaaagaatggctactccatgggcagagcagccctgagtgctgctcattgctcatttttatggttatttcttgatgagatgctaaacaagatgtggattattcatttctcccctttttagaccatatagggtaacttcctgatgttgccatggcatttgtaaattgtcatggtgctggtgggagtgtagcagtgaggacgaccagaggtcactctcgtcaccatcttggttttggcaggttttggccggcttctttaatgcaaactgttttatcagcagagtttttatgacctgcatcttgtgctgacctctcatttcatcctgagacttagaatgccttaactatctgggaatgccgctcagtatgtctcagcctcattttacccagctcctattcatgatggagttgctctggattacgtgcctctgagagtacctacctcaaagagctattggcagagctagaggagctagtctgtgtaaagctatgagcccagcatatagaaggcacacacagggttggatgcaggctttgtgtggcctgaaagcctattcaatttggcaggggtgggtacctctttaagaaaagaatgtaaggccaggcgtggtggctcacgcttgtaatcccagcactttgggaggccgaggtgggcagaccacctgaggttgggagttcgaaaccagccgaccaacatggagaaactctgtcctactaaaaatacgaaattagctgggcgtggtggtgcatgcctgtaatcccagctactcaagctgaggcaggagaatccttagaacctgggaggcggaggttgcagtgggccgagattgcgccattgcactctagcctgggcaacaagagtgaaacatcgtctcaaaaaaaaaaagaaagaaaagaatgtaaaagtaccagatataagagtgagtatagatttcaaatgatgaaagaaaacacaaggaagtatatgtttaagaaactgacaaccttacatcacaaaatgcagaaaaataaaatatgattacttgttatctgtttgatatgttacattatttttcttcctacatattttaggctatatattctgatcatttcttcatatgacaatgattttggaatgccattatctctagagagaatagaagataattttcaattttcttattcctccagcctgaatggttgggatttgttcttcactattgatagctaagaaaaaaatttgtaagcttcacaactagttgttggtaacaccatgtaaacgtttaggactactctcaaatttgggaaaaccttaagtttctttcatatataaggcgtcagattttatggcatttaaatgttcttgtacaatgactcatcttatttactgaaggtgctcattcagcacattgctgggacccatcccagggcccaagaaggggccagtgggagtgaggagacttgagctttcagcttcagtgtttcatggtcagccctcttgtaagtcagttctcaataaacattaactaaattatatttgtatgatttttattgacactttaattttctaattttggaattattaaagaatgtgttcttatgcatgctaaatataatcttagttaaatctgtacagcagtcgttcattcattatcatttgttaaccatctactttgatcaaccaacttcaccttgattgttgggagccttctgtgacataaagcagataaaaccctagctcattgtctgtcatgtagtaaccactcaataaacttagccattatgactgttgcagataaagggttctagtcctgacccccaagagagggtccttggatcttgcacaagaaagaattcaggttgggttcctacagtaatgtgaaagcagctttattaggaaagcaaaggaataaaagaatggctattccatagacagagcagccctgatggctgctggttgcctatttttatggttatttcttgatgatatgctaaacaaggtgtggattattcatgcctccccttcttagatcatacatggtaacttcctgatgttgccatggcatttgtaaactctcatggcactggtgggagtatagcagtcaatgccttaactgtctgggaatgcagcccagtaggtctcagcctcattttacacagctcgtattcaagatggagttgccctggttcacacgcctctgacatgaccaccatcatctgtccatcagcacctgatcttggagtggcacttggggatgtaaggttgagatatttgtcccccttggaggtagaaatgggcccaggttcaggttaaggtcagagagctcagcgggtgtcatgttttgcctcaggttctagacagagttgttctccttcattaaccatggattccctacagttaatctccactcatgaattctccattcatcaacaatactctattaacatgaccacatttagacattaagccatactgtttttttttgttttgttttgttttttgagacagagttttgctctttgttgcccagactggagtgcagtggcgcgatcttggctcactgcaaccttccgtgttcaattgattctcctgtctcagcctcccatgttcaattgattctcctgtctcagcctcctgaatagctgggattacaggtgtctgccaccacgcctggctaatttttgtatttttagtagagacggggtttcaccatgttggccaggctggtctcgaattcctgacctcaggtgatccacctgcttcggcctcccaaaatgctgggattacaggtgtgagccaccgtgcctggcctaagccatacttttaagttcagtgataatgtataatttggtacttttctcccaaatctgtttattcctatcaaatctggcctctaaacttgtcaaactatggctttctttgttgtttaatgttaaaggctttactttgtgaacaggaagtcaagaaactggatccaccactaactctccatgggtatctgttggatgttttgattgtaagtgaccgaaaagccagctcaggctgtctaaacaacagggggatcttgttgatttgtgcactgagtcctaagctgcggctgcccattcgacgaaccccatgcctctggcgcagacgatggggtcagtcccgcccagaccacaagggtggaaacttgggggactctgggaaagggagagaagaaaaatagatactggagaggaaaccacaaatgtgcaccctaacatgtgaccctacgtcactttgttttctaggtcacagttgcttcattaaattaggggctggcatgacaccatgaccaaaagtcttcctaaggctaaccttgtagattttattttctttataaattaacttttttttttttttttaatgaataaacaaaccttttctggccagggctataaaaccaagaatgtaattagtaaataaatagctctgtttagattataatgataagtcagggcagtcagcattggtaactttcttcctacccatgagttgtagattttgatctacaggccgggcgcggtggcacactcctgtgatctcagcattttgggaggccgaggcaggaggatcgcttgagcccaggagttcgagaccagcctgggcaacatagcaagaccctatctctgaaaaaaaaaataataaagaaaaatgagtgatgaaggatgtgagggaggagccctaggaaatggagtacgtaaaacctgctgtgcctttagtcagtgttatcttctgaacagccaaggcaacttggttgttcattcagaggagatccaggaaggtctgggcagggcttgtttgcatgactgtagccattgggaggctttgctgtaaggctggtgtcacaggaaatctgtgagaggtttaatttggattcaaagggagctggtgttggcagaagccagagtcactctaaatggcagtggaatcagatccctgtggatagctgagggtttctcaagaatgaaaccacagacctcagctttctacttcatcccctttttacggagctgttggctggtctcgagatgagattctagtagtggcaccaggggagctttcaaggaagcatctggggtggtttgtgagggaacgaatgctttggctgtcgtaccacagtctatctgggagcgccatggacgtggagatgacgtgggtgtggaagatggcagtgagttaagggagtatgcttcttctctgtctctcatgtatacagcttgggtgaaggctctgagggcctgtgggggtattgggctgccattttttttttttttttttaagagacagggtcttgctgtgtcacccaggctggagtgcagtggcacaatcatagctcagtgaaggcttgacctcgcaggccctagtgatcctcctgcttcagcctcatgagtagcaggtgtgcaccgcccagctaattacaaaaattttttctgtagagatgaggtcttgcagtgttgcccaggctggcttctaactcctgggttcaagcaatcctcccctccgcagcctcccaaagtattgggattgtagtcataagccactgtgtctggccccaggctgccttagtaagagagttttaccctcttgtctaggatatatgggggaaagttaatctgattagcagtacagtgtattcaaattgtgcttggctaattgttgaacgtttatacagaattgactaaggttgatctgtacctgtaactataataattctctgtaatacagcttttggaaagtagttctggtgtgagggtcagtggtgtttctaaactggcagacaataactaccggagtgcaaagaacaagatacatagtttgaaaatggtttcttgtcaaatgtctgtgctttggaagcattaccttcaagagaatccatcagatttttgtccttgtggtagtaggacattcaaagaaggtttatttggtggtttgggagcaggcaatagggtgaggattggagaaaaaggagattattctgtgagttgaaaatgggtacctctacagctgcttgttcttcccaagggttcagatgggagatggagatggacttggagttccaggcctgtgctctggagtgatcatgagcttcttaaaaaacctttgtgttttaagattctgataaggccaggcacggtggctcacatctgtaatcccagcactttgagagtccgaggcaggtggatcacctgaggtcacaagttcaagaccagcttgaccagcacagtgaaacactgtctttactaaaaatacaaaaaaattagccgggtgtggtggcaggcacctgtaatcccagctactctggaggctgaggcaggagaatcacttgaatccgggaggtggaggttgcagtgagctgagtgagatcacaccattgcactgcagcctgggtaacaagagcaaaactccatcttaaaaaaaaaaaaaaaaaaaggcttgcgcagtgactcacgtctgtaatcccagcactttgggacagtgaggtggggctatcatctgaggtcaggagttcaagaccaggttgactcctggtgaaacctcgtctctactaaaaatacctaaaattagccgggcgtagtggcaggcacctgtaataccagctactctggaggctgagacaggagaattgcttgaatctgggaggcgaggttgcagtgagccaagatggggccattgcactccagcctgggcgacaagagtgaaactccatctcaaaaaaaaaaaaaaaaaaattctgataaaagcacagtactggtgtgtgaccattgccctggatatttcagtatttttagacgtttgtccatttaatgaatatgtctgtttcttttctttttttttttttggagacagagtttcgctctttcacccaggctggagtgaagtggcgtgatctcagctcactgcaacctccgccaccttgcctcctggattcaagcgattctactgcctcagcctcctgaatagctgggattacaggcgcctgccaccacgcctggctaattttttgtatttttagtagagacagagtttcatcgtgttggccaggctggtcacgaactcctgacctcgtgatctgcctgccttaacctcctgaagtgctcggattataggcgtgagccaccgcacccagcctaatttttgtattatgtatttatttgtttgtttgtttgtttgagatggagtctcgcttagtcgcccaggctggagtgcagtggcacgatctcggctaactgcaacctcagcctcctgagttcaagcgattcttctgcctcagtctaccgagtagctgggactacaagcccgcaccaccacgcccaactaatttttgtatttttagtagagatggggtttcaccagattggccaggttggtcttgaactcctgacgttgtgatctgcccaccttggcctcccaaagtgctgggattacaggtgtgagccaccgtgcccagcaatttttgtatttttagtagagacagggtttcgccatgttggccaggctggtctcaaactcctgacctcaggtgactcaccccgcctcggcctcccaaaggattacaggtgtgagccactgtgcccagccaaatgtgtctgtttctatgtgagcatttgtaggtaatggtgagggtagaaagggtgactatgattagtagcccttgaaaaatgctatgcaggccaggtgctcgttggctcacgcctgtaatcccaggagtttgggaggtcaaggcaggagaatcgcttgagcccaggagtttgagaccgacctgggcaatatagtgagacccctctgccccatctctaaataaagaaaaagaaaatgaagaatgctatgcaaaactcaaaccaaaccaatgccacaaaacaaaacaaaaactccctcccaaaaaccccaaaactgtgaagaagaagcctaagaggtagagatgaccagcagaaagttacattctgtgatcttggaaatgagatcttggagaatagcaatagacaggtgagagcagtggtcaaggcggtggggctgtgcaggccagagggacatgggggtctttaagtttgcatttcacttctggcaaatgagtgagcttcttgaagccttggtgtcctcatctgtaaatgaggatgacagcacctatcctgtaagggtggtggaaagatggaataaataatgcaggtaaagctcttggcacggtgcctggcctgcaggaagcttttgttgttatgcatgttttataatcctttggatcgcagtcattgggtacttggtgttcattgttttgactcctgttgttcaagcgccttgaatgtcctcaaggcaaaattgacatcacctttggtccttcctaggaaaattaggagcagggtggtgttagggccgtcactggacattccaggtctcccacccataaatggagaggtggagtctgcctgcaagacacattgctaggaaaagatgggacatttggcttagtttcaaaccaatatttcctttatacccctccacagagaggtgacagggatccagttagtggcgagttgtggagcagcagagactgcaatgcgatgttctttatgattttcctatttctttggttggaattgggtttttacatcacatattgtttgattataaaaaagcaacaacacagccgggcgtggtggctcacgcctgtaatcccagcactttgggaggccgaggcaggcggatcacctgaggtcaggagtttgagaccagcctgaccaacatggtgaaaccccgtctgtactaaaaatacaaaaattagctggacgtggtggcgggcgcctgtaatccaagctactcgggaggctgaggcaggagaattgcttgaacccaggaggtggaggttgcagtgagccaagattgtgccattgcactccagcctgggcaacaggagtgaaattctttctcaaaacaacaaccacagcactatgcttgtgttggggcagaggataatgaaaaatctctgtacctcccactcaagtttgctgtgaaccttaaactgctctaaaaaaataaaacgtatcgaaacaaaataaaaaaacaaaaacaaacagctgcaagaactcttgcacagagggtcaaaagaatggcttttgactagctacagaaacatggataaaaaacatgctggccaggcgcagtggcccatgcctgtaatcccagcactttgggaggccgaggcgggtggatcacctgaggtcaggagttcaagaccggcctggccaacatggtgaaaccctgtctctaccaaaaatacaaaaattagccgggtgtggtggtgggcgcctgtcatcccagttacttgggaggctaaggcaggagaatcacttgaacccggttcaagtgaagctgaagaagttgcagtgagctgaaatcacaacactgcactccatccagcctgggagagagagagagactctgtctcaaagaaacaagcaaacaaaaaaaaatgtgctaaacacgtagagaccaaccacattgctgtcagtaggtagtgaagcactttcctataaatatttcaggactcttctttctctacttaaaaaagaaagattgctttgcatttcagacaacggaaatgactggacaagcctttaggtcatgtgcaagaaactgagaaaaccattttccttaaatggaggtggagtttggcacagtctgaggttcaagttagagcctgggtcttaatttgcctgcaacgcatgatttatcatgcctttagcaagatccccggcccaagaccattcatttcacccctacaatctcaaggtgtgtgcagggcacaattcagctttaaacttttctgcttttacttttggttaggcagaacctccgtctggtggtatttgaatatgagtgttttctgtggcccttttcaaagtattcaaagtggtttaaaaatacataatgttcagagatctaagagctaacggaagtacttatttgggccttttaaaaataaaaaaatcaattaaacagatttgagactcttaactctcgcgatgtcttcaaaatagatactaagattaaagaaaaaagaaggcttgaaaatcataggactacttatccacccagtcataatgcttttagtagtgacagtagtagcaaatagcacagtttataaaaacagaagagctaaaattctttatttaatattaaacaggaaaccgaaagtagtctgcagcaatgtggtgggttttcagcaacctgctgctgtgtttatctgtgctgaaaaagcctaaatgaaacatttcttctttgattgccttaagattgtaagtttgaaggaaaatccttcaaactggaatcatgaccactggaagcaggttctgtatggtaaggttttgaagcaacctgtttccaccagaagcaaaggaaatttggaagcaaatcaaaaacctctcaaagagtggaaaaagctttgtacttttattttgcctttgtgcattgttgtcatttatccaacatgtgcatatgaatattctttctgaagacctgggcttcattttaaggtcagccttcaatttctagagaatataatttgctgctatttttagagcatcatgattgcttgtaataactaatggaaaaaaactcagagaaataaatgtgtaacagctgtgtctgcttaaacttgattaaaggcagtaaaaaaaagtaaacagaagaacgaatgtgacaatagacaagggggagacaagtatctctctcattgtgaaaacttttacaggcataacttgttccactttggaaggccagcgatgtctgtgtttaaagtttactttactgtttgtcttgagtgggatcagtgttgtagtgaataatttatagccagcatgaatgagctcattagtcaccttttcagactttaaatgagttttgtggttgtcattactcgagccttctgttcagccgcggagcaaaatgacagtttggcagttgttgctggggccgcctgttccccttcaggtctgtgttggcttttgtatttcgttgaatccttccctggctaacccttcgctggtccaggcagcaactctcccacttcacatgccttttgcaccccaagtttaaatgagaagtttttcaggcttcaaaaaaaaaaaaatcagttgtgtctgccagagagaatgggggaatgaggtggatgaaatgagctttttccagcaactcctgggtatgattccctttgtgcttggtttgatattcaagctactcaaaagcaaaaagcaagccagtgcgttgagaggcagcggagccaggctcccacatggtgccaggcgttttagaccgaggatgtcactggaatttggagggagaaggatgtttcagggtaggtttgaactgtttcaattctgagtatcagtgtgatgagggtaaagaaacttgctacagcaaataaatctgcgaggccagatttccacggacaaagaaaactgcattttttctacaaaggggttgacagcatgacttttcaaggtcgcagccaacacggaggtccaggatcactgggaatggtcattacctcttccccatctctgtgcctcccaactccaaatcattaagagaaagcgaactgttgcagctgcctcctcactgagcccttggagacatgcctgggaggctggtatgtggggaagacaagcctaggcatgccagtagcaggtgggatttctttggaacggatgtcatgaagttcatccctcccattgaacctggcctgggcagcctccggagagctctgccattcactccctgggactggcctccatccagaagtccaggacaccgtggcatgcccaccttggtcctcaggtagcctctgcaggcactcgtggggcgtggaggcctgcgcagggtgccttggccaggtgcttggacccctgcgctgaggtctctctgacgtctgctgcgagcaacaggcactcatggctgccgtcaccaacgtgggcagcaccccctccgggacccatattgttagacagctggcctggcgctgtgtgaggcatagaggaaacatgttcaggattcctctctggaagcaatgccaacttaaaaaggacgcctggttgtttgggggccaaatctttgaaaccagtcagaatcacgtctttgagtgcagagaagtgaggtgctgttgaacatacccacagaaagagctagcaattcacctgcttgcttcctttccagccccgacccttttaagattgagtactcacatgcagtcacgtctcacaatttctggacaccttttgcctgcacctcaacctcaatattaaaggcacaagatacactattttgggaaggagtgaggatttcaaaacagaaagggttggtgaacttgactagccaatgaaaagagacttcaggtttggctgttgtaataaatggaataaattgctaatctccaaaaaagaactttgtgctgcagggaaatatgttagtaatcatttaatctatattctgtttctcagagagttcatcaaattcagagctcttactttgttttaaaaagactctcgtagagagaagaatcaattgttttctttcacacccctctgaaaaagtaaaacgagagaagttatttcttggcgtggataagactttggcagacttagccaccgaaacccatgagactatggtacttggtgtactcactaaagagaggaaaacaataaaatctcttaaaaactttggaggaggaaaatgttgatgaggctacttttctctgactgatctgtagagttaatagatgccagcttgagagagggataaaaaggagactttttttttttcctgttaagtgatcaatattttttattaccactgtgccatgtgctatgagcagaagagaaaacagagtcccttgcccctcaaggcacttacactctgttggtgacgttcagtatctagttgatttatttttttattacaaagatacaccatactttgttgattatgacatagaagttgaactttgagtttttgcaagtagtgccttttcattcagttaaaaagtcctggccgggcacggtggctcactcctgtaatcccagcactttggaaggccgaggcaggtggatcacgaggtctaggagctggagaccagcctggccaagatggtgaaaccccatctctactaagaatacaaaaaaaaaaaaaaaaaatcagccgggcgcagtggtggaggcctgtaatcccacctacttgggatgctgaggcaggagaatcgcttgaacccaggaggcggaggttgcagtgagccaagatcgcaccactgcactctagtctgggcaacagagcaagactccatctcaaaaaaaaaaaaaaaaaaaaaagtccccttttccttcctcctcttgtgctttttttcttctttttctttttcttctcttttctttttttttttttgagacagaggctcactctgtcgaccaggctggagtgcagtggcacgatatcagctcactgcaacctccacctccctggttcgagcatttctcctgcctcagcctcccaagtaactgggagtacagaaacccaccactgcgcccggctaatttttgtatttttagtaacagagtttcaccatgttggccaggctggtctcgaactcctgacctcaagtgatccacccgcctcggtttctcaaagtgctgggattccaggcgtgagccaccgcgcccggccctcctcttctatttctcggtcacaattttgtctcccttgtaccccacgggtcctgtccttcatgtcctaggcccctgagaggttctctaagaagccaggtgttctgaagctttcccaaactcactgtgtgggttcaattcccagccccatcatttaccggctgtgtgttatgagcaagtggccaaacctctctgtgcctcagaatctcagttgataaaatggggataataatagtacctacttcacatgattaatgtgaggctgaaatgagtgaatattttcggagctttagaacactgtctggcatccagttaagtgctatttcggtgtttgttaaatgcagtcagtcctcatcattggtagtttttgtatttgcgaattcaccctcttgctaaaatttacctgtaatctcaaaatcagtactcctgcccgggcatggtggctcaggccttcccagcactttgggaggccgaggcgggtgggtcacctgaggtcaggagttctagaccagcctggccaacatggtgaagccctgtctctactaaaaatacaaaaaaattagctgggcgtgatggtgggcgcctgtaatcccagctactcaggaggctgaggcagggataatcacttgaacctgggaggcagagattgcaatgagctgaggtcatgccactgcgctccaccctgggtgacaagagcaagaccctgtctcaaaaaaaaaaaaaaaaaaaaaaaaaaaatcagtactcctggtgcttttgtggtcactcatggacacgtacaaatgagtcattcagtgtgcacgttcccagctgagggtgaacaaagtgatgttctgcccgcttgttttggctttccaagtgtcctttttgtggtctgtttagtaccacattttttgcatttttgttcattttgctgtttgaaacggagcccaagcactgctgaaatactatctagtgtttctaagtacaggaaggctgtggtatgccttatggataaaatgtgtattagataagcgtcattctggcacagttcgttgtgaatgaacaacaatatatattcaaaaagcttcttaaatggaaacacagataaaataaatatcaacaaaattatgatgtgataatatatcagtaaaattaagttttcattggttgatgaaagggttgtgagtggaggctcacaggaacctaaccccatatttcccctaggagcaatgattcaggatttgttaattcagtgtttgtgacactttatagaacacaactactatgaataaaaataatcagctataggctgggcgcggtggctcatgcctataatcccagcactttgggaggccaaggtgggtagaacacctgaggtcaggagttcgagaccagcgtggccaacatgctcaaccccgtgtctattaaaaaaaaaaattagccgggcatggtggcacaagcctgtaatcccagctactcaggtggctgaggcaggagaatcacttgaacccaggaggcagaggtcgcggtgagccgagattgagccattgcactccagcctgggcaacagagcaggactctgtctcaaaaacaaaacaaaacaggccaggcgcagtggctcatgcctgtaatcccagcactttgggaggccaaggtgggtggatcacgaggtcaggagttcaagaccagcctggccaacatggtgaaaccccgtctctactgaaaatacaaacaatagctgggtatgatggcatgtgcctgtaatcccagctacttgggaggctgaggtgggagaattgcttgaaccaggacccgggaggcagaggtagcagtgggccaagatcgtgccactgcattccagcctgggctgcagagtgacactctgtctcaaaaaaaaaaaaaaaaaaaagaaaagaaaacaaaacaaaacacaacaaaaaaaagtcagctgtacataaaatgagttcaagaactgagagaggtgatctcctcttgtatcagataagcatcacgaatatccctggggcaggagaagcattagtagctctggtcatgtggggtaactcagctgggcacagattttctatcagatctgaaaaataaaaataacttgtaaccacatttagtggcatgatcacggcttactgtagcttcaacctccagggctcaagtgaacctcctaccttagcctcctgagtagctgggactataggcacgtgccaccatgcctggctaatttttctattttttttttttttgtagagtcatagatctccctatgttgtcaggctggtcttgaacttctaggctcaagcaatccccagcctcgacctcccaaaatgttaagattataggtgtgagccaccgcacctgccttcccccacaaattcttaattcaagagtattttgaactcttgaatcttggaacctgcgtaagagtttgtagagaaagtttgatattcaaaacctataaaccaaaagacttcccacggccagacaatagacctcataacacaggatataatgtttgttgtacttagcaattctcctgtttgctcagagcaccaggcttttcagaaggggatcgttttgtccctcctgattgaaaagatcacagaatgctttaattttgtgaagcgctttgccaacatattcattttcccctaaactcttactttatgaaatctttgcaaattgtttcacacgtacagtctctgagaatgtgaaaatgattcagaaaagggaaagcctcacttaaaactactggaaaatgcaaatgaaagggaacaaagggaacatggccccactgtgccccacagaatgtaataatatgcctctggcctcttatttcagcaatttccaagtttttgtgattttaaacaacgtcccagcaaaatcctcctaaatacattgttgcttccttcagttaatttattcaatacatatttattgagtgtcttctgccaggcataaatgccaggtgtgcactgctgaatctaataggctggagtcctgctttcctggggtttattgcctcttcccagtagtcagtctggtggggaagttaactctcttataggatctcccaaggataaattcctagaagttggaaatttaggatcagtggctgtccgtgctcactgaaattttaatttgttttgcgactgtcctcttgaaaagttataccacttcccaccagtgccttcaaccaacattggcatggttagttcttttaagtctctgccattctgatagatgaaatgagatatcacaattgctttaatttgcatttctttgatttttacagttttgagcgtcttttcatggggatagtctcatttttgtttctctttttgtgaatttgccccttttcttattagagtgataatttttttctcattgagttgtaagatttataaatttaaaatattaaccctgttttcatctgcatgtccaatatttcatttgtttttaaattttatttatgacccctgattttacacacaattctaaattggtatgcagtctaatatgtcaagattttcattttgatttgttggcttaataaaaatagtgttcactaagtgccagagccctgttttatgttccttacaaagattaatttatttaatcttcacaacagtcctatgaagtgaaaactaggtagatagaaagaagttaagaaccttgactgaggttaacctgctagtaagtggtaagatcagagtatgaacctagtctgtgtctaaccactgcgcctccccactactggtcttggtattagactctgtgtgtgtgtttgcttatttgtggttgctttataaatgctcatagacctactcctccctgagggcaggtgccgtgtcttctgtttctcctggcctcttcccagtcccctccactctttactgggcatagaggagctagatgcttacttgttgacggaattaattgagtaaatctggattctagatcatcggctcacacttgtgtttatgctcaaagaggagttgacaggttctatatttccattttgcctccagcagccggcttgacaagctcaggtttggcgagggcacctgagctgatgaacttcaccctaccagttcagctgtactttcccttactacacaccctgcttccctcttaaagtaagcctggctgcattccctgctggagaaattctaataagccctttcccaggctccacccttcagaatctgtcaagtaaacagcaagaaggcacaaaaggaaaatcccaagagacggtgaccagaaagttcaaatgatgtttgaccaagactttacacacaccaagatgttaagggtcttccagccgaggggcgccgtctcttttccacagcgggaaagtgaggagtttttttactcttacaaacagcgttctcagaccttatctcaaagagactcttagtcaacccatgattaaggagttatctttgaacataatctccccctctcttctcatattcaatcatttgacaaatcctcttggttcttcctttgaagactgtcttgcgttcatttgttccagtctcactgactcttctgattcactgggtcttgaagtgggtccacagaccagcagcctcacctgggagcttgtgagagattcacatcctcaagcccagcccacacctccccaaccagaaactctgggggtgggccctgcagtttgtgttttaacaagcccttcaggtaattcctatgcatacacgagtttgagaaccactgctccagtggacgccccctcaacccccttataacattataaatgtaatgggccaggtgcggtggcttatgcctgtaatcccagcactttgggaggccgaagccggaagattgcttgagaccaggagtttgagaccagcctgggcaaaatagcgagaccccatctctacagaaaaattagcctggcatggtggcatgcgcctgtagtcctggctacttggaggctgaggaaggaggattgtttgagtctaggagttcgaggctgcagtgagttacgattgcaccactgtgctccagcctggatgacagagccagactctgtcaaataaattaatgtatatatgtatgtatatatgtaatgggtgtttattgtagaccatttgaaaaatagcggggcccagcacggtggctcgcgcctgtaatcccagcactttgggaggctgaggcgggcagatcacctgaggttggcagctcgagaccagcctgaccaacgtggagaaaccccgtctctactaaaaaaatacaaaaattagccgtgcgtggtggtgcatgcctgtaatcccacctactcgggaggctgaggcaggagaattgcttgaaccccagaggcagaggctgcagtgagccaagatggcgccactgcactccagcctggccaacaagagcaaaactccatctcaaaaaaaaaaaaaaatttccctgggtggaaacaccataaaccaattgcccacacggacaattgcacgatttcacatgaattctcagcaatatgtttggcctggtgcagtggctcatgcctgtagtcccagcactttgggaggctgaggcaggcggatcacctgaggtcaggagttcaagaccagcctgaccaacatggagaaaccccgtctctataaaaatacaaaattagccaggtgtggtggtgcatgcctataatcccagctactcgggaggctggggcaggagaatcacttgaacctgggaggtggaggttgcagtgagccgagattgtgccattgcactccagcctgggcaacaagagcaaaactcttgtctcaaaaaaaaaaaaaaaaaagaaagaaagaaaatatggacaagtatgaaagaagcacacaaaaaagaagtatcccataactctaacattcagaaggaaccactattttagccttttttccccaatttttttttttcttaaacagtcttcattctgttttgtatgaattactgcaatgatttctgagttgttctgctggtttttgatcttccagtttctctcttcctctcccgaaattcatcttggatccaccatccccatttatctttttttttttttttaattcgtatctctgataatacaacttctgggctcaaaaatattcagtgagccacctttgccctctgaccttaacacatataaattgctcaccctgctattcaaggagtttggtgatatgatgcttgcactcttacccactaatctgtgtgctctttagggacaaagaccgtctatctctggcagctaacacaatgccatgcacttggtaggcactcagcaaatatttgttcagtgaatgagttcctcttctactacaatcaagtcagatttggtaattctgtgccatcgatttctcttggaacagcagtttgtaagcaaaatcatccccttgtgctttctcaaaatacacatatccaggcaccatcctagaagactctagttggttaggtgtggcttctggatggttctgatgggcatccccaggtgagaagctcaggtcaagaacaccccttccccatttccacaggttaaacagcaacccacccttattagatatcccacttccaaagtcatctcccctcccttccccagatgtttcaccatgtcccttgtctcagctgttagcagtagggagtggtggggggccatgcgcgtaggggagtcatgtgactcaggctaggccaatcgcactatttccctgagaagttaaactatgtcatggaaggcttgaggcagttcaaaggtggtgggtgctaaaagtcagaaggcctcagggcttgctgctggcagccctgtgtggttatcattgagcagaggaagccaacctgcagggtagagagtggagtcacctatagagggaagcacgaaaggaatatggttctgtgcaggccagcggtgtgtgcctgcccagcctccccgtatttcctctcatatatcctttgtactggagtctctttgcaggatccctccccagaagactgtctttccaggcctgcctcggactcttcctattttgggcagtctctcaggtcttcccgactgcacctgctcacctactcagttgtactgcctcaaggggggcaaggtatatcgggttttatacttaactattccataaatagccatgctgctctaataaccaatacagtgtgtgtgtagggggattaaagttcttgaccagagaaacatttagcaaaagaatgcacaaaacatcaagggaggggcgctcttctccttggaggaggaactgaggtcccacgctgatgggggcagataagcctggaattgaggacttccagctcccagatacttatgtactctccagcccatgctcagatggggctgcagaatggtcccatcaagtcctctatcaggaaataagtgtttctcaaagtgatttctagggcacatatacaattcggctgttaaatgtgtttgtaaaacagtgtagacaagacattagacaatgcagcttgcttatttgtgacttctcaggacctaagacgcaagggtcctttctgaaagttcatggggaattgtgaatggggttgttcccaaacaaatttggcccctgcaccctaggtcaggaagcaagtcccagagctgaggttctatggaattagaaggtggaaaaggccacattaagccctcctttggctttcagcattttttcccccatttcagatagaccgacaggcagacatgtgtcccctgctgtccacatcaggcagggctggtccaccacttcctcttcagggtgacaccttctcacatctcttgctgcaactgtaatgggagagagaaattaagaaatatgtttgagaatgcaagaagcaaaaacacacatggaatgacatattccatgtacaatcacctttggctcacatcccctctttttgaactctgagaaagcaggaggggactggggccggtgaaaataaggtgccacctctacttaatataaagagatttctggctattgtgtgagtgtagctgggggacttgggggtggggttgggggctggggatggaagaggaagatgtaagggggcgacttcgtcctctctaggccagcaagggcttggacaaaggtctctggccttggttcctctggcggagaataagcaccctcaactgacgcgctgatggaggggcaggacctgcattagccggagctacaggaaagcagggtacacattgtctcatcctggctttgttaccacttctaaccctgagaatctctggcgtgagacttcaaagatcatctgacttgtctctgccaccttgtgccttttgcttagtgactttgggtaggtcgcatcaagtgctcagtaatcaaaggggtggggctggatgacctcaggctacccctgggcttccacctcctaattgtctccagatggggagatgccacacaacttggaagtagtaaggtctccggtgagtctgaaaggcacatctttgctgaagacttgtcacctgccctcttgaacctttgttagggggaatgactctcagattggggggggggggtctattttttgagacagaaaaaattttcagaagcctaactggtgtttcccttagtccctccttttggctaggtttaaaagtactgcatgctagaaagctttctccaggtctactcgctgtttttttctgtagttttcagaccgctcacgatgtcctgtccactggctcaggagggggtggcaggaagggtgccctgggcttctcctctgtagaggaaccaaccaatttggctacctgggagtaatgtgcaatcacatttttatttttgtcaccaccagggtgtcctgttggactctctcctctcatcctctcccaaggcggctggttggtgtggctttagcagtgggtgctattatttggaggtgcctagagacttagagtggtggctgcaccatttctctgggtggcttgcgaattgtcagtctggttcctgagagctcaaactgagatggaaatgagacctgttttctctctaggccggccggggcgttccgcacaacccacttgagaggccccaccggcgtggcctttaggacggtgcctcttgtcttgtaatggccaccggccctccctcgggagacacgcggccacctgggtgggacgctgcggtgcttacctccgggacacgaggtggtcgctgggagagggctcggaaggccctgggggtcctatcaggacgcagcactggggagacgtggaatctcctcttctcacccccacaagcctcgcccgcatcgtaattctttttatttttactttcgagccatgtaaggcatgcagatggggtaggagcgttcccgcgacacgttgccagcagcgcagcgccggcccgctcgtgtggccggagcccggggaggggacagggcacgcgccgcctgacccacctgccccaccgcccacggtcgcggccgccctgggtcgcgggacccgcgccggtcacccccgccccgcggggcccaagaggcgaggccgcgcggcccagccccggcctccgccctggctgagtgctggggcgcgcgaggggcgcgggcagggtccgccccggcgggtcagtgccccgcgccccaggccgctggcggccaggcccacgttttccctttctccggctccctccgccctccgctctgtccctccctccgccctcctccctccccgcgcttcccctcctcctgcctggtcatgtgtcgcctttttttgtttgcagtggaaacaatttctcgccgctcggcgcgccccggcccgacgcgccgcggcggaggcgagcgggaggcgggacggggcggggagagcggcggggccggcgggaggacgcgcggcgcgcccggcggacgccgcaggtcccatgccgcgccgcgacccccgcgcccctgccgcccgcgcccgcggccgccccccgccgcccgccgccccgggctcgccgcgccgcgcccgcgcgtccttagcggggccaccgagcgatgcccgccgggcgcccgcgaaagtttgtcggctcctgctgaagggcagcggcgcccccgcacccccgtgccccgctccggccaggtgagtttgcaccccgctcctgccggctcccgcgtgggctcggggggcacccggggcgggaggcgcgtccgagacggtcctggagactacctcgccgctctgggaagacgagggaccccgcaggtcctggggggagggtcgggtgtggaccccgggagcccccgagccgggaagttgccgggtccgaagagtttcctgccccgacgtgcgtgctgcttcccggtgcctcggtttccgaaaagacgcccgcaaggaacagagttggtattgtctgcggaggacggggtccccgccgttccgggccggggagggggttccgatcaagtggagaccccaagatgagaaacaggctcctaacaaagatcaccccccggccaaactgtgcagacttggcacaggcaacgaacgtctccggagacccccgaggcccgacccccctcatcccggccctgtttgaaaccctccttgggccctggataagttgggggacggcgggcttttattgatttgttttcgaggctcgccgcggtgcggccaataaaaggtttatgacatctgaccggcagtgaaggtatgcgagctcccaattgccctgtatatggggataagagcagtttcccccgttgcccggcaacgccgctgattgacgcggggtgcagccaatcgccactcccgcaggtccccttgaaatgtttttgacaagtacagtagacgagagtgaagcgcgtgcgtgcgcgcgcgcgcgtgctgggtgggcgggggtgacccggccccccaaactcgctactgctcggctctgggaagatttcttaactttttaaagttcgcatcgaacatctgttcagagctgggccagtaatgtctttgtcagttatttggagaccttctgtttactaggcgagaaactaagctttcttgccgcattttctccgttaaaaaataaagagggtaacaaaacacagcaagtcataaaaaaaacaaaagagggtgtgtgtgtgtgtgtgtgtgtgtgtgtgtgtgtgtagagaaaagttgtaaggaggtcaccagtgaataactatttgcgtatctggtggagcagccttgttggcagcagattaaaaatgtttgcttaactgcaactcacatgatccagattctttttttttccctctgaaacaggaggaaaaaaagatttggcgaaatctgtagttagagtataataatggaaaactcctcagctgtggtttctgggaactgtttttttttttttttttttttttttttggttattgttgttttgttttgtttttacatggaactgtagtgatcagcagctcttcaccctgttggtataaaatgcgggatttatagggatgcagtgagtggttggagagtacggggtcccagcacaaaacgcacacatgatccaagggtactgaactcccataaccctctcttcgtgacaatgccactttttctcctaaaaccatattgctggcagtgtttgtttaaaacaaaaggaaacatggagaatagcgtgttagttcctctgggaagctactgacaaataagcaaattaaaaagaaagagagcagcatgttgtcatagcaacagtgcaattaaattactttactgtcagccatgatataattttcctgtttggaagctcaggagacataaaactttcatttagagctaaagttgacttcagtggctgggtagttctgttttatactctactgtgggcatatgctggtcatcagaaaattttctgatgggatctgaggaaactttaagaaagacaagtggtgctataattcgttcataaagaagttaaaagcaggatcagaccagactctgttgtatccccaagccaaaagatgctagcttgttttttgtctgaaatgtgtcagggtaacctccttatttgacagaaagaaatattccctgtgagtgaacccaagacgtctggagcatcctgcctggtctgtactgcaatgcctcatgaagttttctctccttaagagttgggcatcttggccaggcgcggtggctcacgcctgtaatcccagcactttgggaggccgaggcgggtggatcacgagatcaagagattgagaccatcctggccaacatggtgaaaccccgtcttactaaaaatacaaaaattaaccagtcatggtggcacacgcctgtagtcccagctacttgggaggctgaggcaggagaatctcttgaacctgggaggcaggggttgcagtgagcggattttgcaccactgcactccagcctgggcaacagagtgagactctgtctcaaaaaaaaaaaaaaaaaaaaccggttgggcctctcaccacagctcccccttaggccttgcgtctagcaggttctaccttttggaagagggaaggtactataattcacaggcacccttggctggtaggttagtgcccaggattatgccttctagaattccctaatagagcttccacagctgaagtggcagttgttttagatgtggtgttaatgaacatttaagagacatagaagggtcatgtctttgcctttttaattttatttatttatttttttgagacagggtctccctctgttgcccaggctggagtgcagtgagcctcaacctcctgggctcaagtgatcctcccacctcagcctcccaagtagctgggactacaggcacacaccaccacacctagcgaatttttgtatttttttggtggagatggcgttttaccatgttggccaggctggtcttgaacttctgagctcaagggatcctcctgcctcagactcccaaagtggtgggattataagcatgagctaccatgcctggcctatgtctttgcttttaaatatgttcattcatccctcctccttcttctcctcctcctcctcctcctccatccctcctcctcctcccccttctcctccccctcccgcttcttcctccttcctccccttgccctgccctgccctgcccttccctgcccttcccttctcttgccctcccttcccctcctctcctctcccctcccttcccttccttttcccttctctttcccttcctttcttctttcccttcccttctttttttccttcttctttcccttcttccttcccttcccttctcccttcccttcccccttctcttccgttcccttcccccttctcttccgttcccttcccccttctcttccattcccttcccttcttccttaccttcttcaaaacttttgagacagcatctcactctgttgctcaggctggagtgcagtggtacagtcatggctcactgcagcctcagcttcttgggttcaagcagtcctcccactcagcctcccaagtagctgggactacaggcacatgccaccatgcccggctaatttttgtatttttcatagagatggggtttcgccatgttgcccaggctggtctcaaacccctgggctcaagtgatcctcctgcctcagcctcccaaagtggtgagattataggcgtgagccaccatgcccagcctgttcatttgttttctaggtagatgcttgattttcttactgttcgtttgtggggggaattaaaacctaacagttttaaaccaagcatattgttttagcgctacggagagtgggagacctttttggttatctttactgttctttctgtgttacgttgggtgctggagggttgaacatgctttgtgtctgtaggggtcattctgtttgtaaacgtaccacctcctcgttttcttttctcatcagatgttattttactccgtgttctaggtcattgataaaaatggggatggtggtgggtcggggtggagggatagaattctatggcatgttttgttgaattgaattgaatttgctgtcttgaaactggcagttgctctcctgacttttttcaccagctctaatttcagttaatggcttatcttacattcccatgtattctgtgtggtacctgaagttacttgcttttcttctgttctggaagaaaaaataattcacagtaaaatttaacgtactttaaaactggtctcctggtctcaagcaatcgtcccgcctcagcctcccaaagtgctgggattacaggcgtgagccaccgtgcctggccggtgttactggtcttattttatttaaggggcatcaggtcaccttgctatatgaatggcgggctgatttttctcatcagcctatctctctgtggtggaattgtgggattgtgttgcttagtgtgggagtcacaaggtggtgttcctgtgtagcaggggttccatagaggcggcagagggaggcaacaggatcagaggggtacagtctgcctttctgttttgggcctcgccagctcatcatttctttgtgatgtctttactaggagccttcacgtaaatgggtccagtcatgcctcccagtaagaagccagaaagctcaggaattagtgtctccagtggactgagtcagtgttacgggggcagcggtttctccaaggcccttcaggaagacgatgacctcgacttttctctgcctgacatccgattagaagagggggccatggaagatgaagagctgaccaacctgaactggctgcacgagagcaagaacttgctgaagagctttggggagtcggtcctcaggagtgtcagccccgtccaggacctggacgatgacacccccccatcccctgcccactctgacatgccctacgatgccaggcagaaccccaactgcaaacccccctactccttcagctgcctcatatttatggccatcgaggactctccaaccaagcgcctgccagtgaaggatatctacaactggatcttggaacattttccgtattttgcaaatgcacctactgggtggaaaaactcagtgagacacaatttatcattgaataagtgttttaagaaagtggacaaagagaggagtcaggtaagcctctgtgtctggaacccaaggttttctttttttttttttaatttaaaatttttctctattaaaaatgaatttctattcaccacattgaagtagcagttgtaagtgggttttagtctatttaattcatttagataattttaaagaatttcctttccctaagcctattagttatgtactgtttattagcatttgtactatttgagagtttcccactgatagggtttccataaagataaaacagtggtttacagaattgattagttctcagttaacatccctcagtgtggatgggtcactttggttttagggtcttaacaaaggtcagtattccaaggacagccattaaccgtgaagtatgtgtgtgtatatacactgccaccatgggctagagaaaaatggtgtttctttttttccctgaatatgaactaggagaagggaaatttctccagtgttctggcataagtggacagtgatgaacattgagaagagacttgagtatacttacgctcgcagactaaacagacatgagttgcccaggtgactgtcatgaaatctggtgtctgtataagtgacaactttgaaattcccggctcagagtgagggtcccattagagactgacttttaaaaagtttaatattgactttaaagcagaggtccccaatgtttttggcactagggacccattttgtggagagccaagggggatggttttggtatgaaactgttctacttcagatcatcagtcattagattctcataagaagcacgcaacctagatccgttgcatacacagttcacagtagggtttgtgctcctatgagaatctaatgccaccgctgatctgacaggaggtggagctcaggtggcaatgctgacctcctgctgtgcagccccgttcctaacagaccactgattggtacatggccccaggttggggacccctgctttaaagccatagtttgtacttcatggtcagtgaaaagaagacggttttaataatttgctttctttttctttcttttttcttttttcttttttttcctctttttttttgggaccagggtcttgctctgtcacccaggctggagtgcaatggtgtgatcactgcccactgcagctttgacctcctgggcttgagtgatcctcgcatctcagccttcgaacaagctgggagcacaggtgtgtgccactacaccctgctaatttttatactttttgtagagatggtgtctcaccatgctgcccaggctggtctcaaacttcagggctcaagtgattcagccacctcggcctcccaaagtgctgggattacaggcatgagccaccacgcctggcctatttttgttttaaggaacataataggtttcgtagaaattgggcagctgttaagaagtggaaaacaaaattgtgatctgactttgagccctgaaaagtaatgcagccgcggttaagataaattgccagagaaagttccttccactaagttttcatgtgactgtgttttcccgctttgtgtgttgtgttaataatgctgctgtgtgcagctggggtgctggttctccctctttttgaagttcaggttcgggcgcaggaccactgttgtgtgggatcagtggctgtgcggggctggggcctttaatttctttctctctggcaacatgtcaccatttcaagtagaatcttgagcctgagaatattctccttgtctttggcatgggagagtatgaatcaggaagtggccaaccgtattgctccttgctcaaattggacgtgtttgtgtgcaaatgctcttcactcggtttctgtttgagatggggggtggggacgcggggcttggggaggggtgttgcctgggaggaaagatgtgggcactaaggagagatttactttgatcactggtgcaaatgatgcctgggtcgagcgtgcagatctgaatattcataagtttctggttccctcctccccaggtccttatttttgtgtagctgtaaccatcaaagtatgcccctttaatcagggagaggaatttccatgaccatgaagctctttctccttccctccgtatctcaggttgggcatttggagagccacctctggacttggctttttttgagtgctttaagattattctttgagcttagaggacattcattgctcctctgtaaagaaccaggtctgtggtatttaaagcttctgtataggtgggtctttgtggcaagaaagggaaagtcttcaaaagcaattccagactgagaacgtggagaagaaagtgctgctcaggtcccccaaagcctcacagcagtgataaagcaacaaacagggcgtttagtttggtgtaaaacgagtctgcaagttcctgcatgcttgaatcttcgtgtttgacataatgccggtgcacatagaagtaatttagcaaatgcacactctgaaatgttagaaaagaccaacgccaaggcgtgcagcgagacttgggaacattattcatcagtcagccttgggagtgacaagtgggtgttggatgccctgtgttgaggcacactgggaggagctgttctcccgccatgcgaccccccccctcccccaccgctggattctgggagtcatgttttccagggatgaagattgtcaatccggatacattcaggtatcacctgttgaaagagaatggttttaaagacttgagattgttaatgttatgaaacattcagttctggcttcccagccatcctgacctgtgttgacatgtttctgatcaaatgccagtcagttttgtggttgggagtttgttcccagcatttgcgattctgtgagaacaaagcaagaggtgtgagtttttccacttttctcctctttcttgggttcccccaggccagctgctggctgctgtgagaggtgcaggctcccaggtatgctcaggtacacccaggtccttccagggcattgacctggcccagtcacttggggtatgctactatggcattctccctgatactctgcccagtgaaagctcctttagctctatgggtaaacttgttttttcctatgagattttatttggcgggagctcccacactgaagttgccttcaacacagtgactaaatgcacctgaaggttggtgagaaataccttaaattgaacgagaacattgaaaccttgcaagttgtatgcagtgaattagctattccacttttaattttcttctgaaagtgaagaatacggttaggcttgacgtagcagtgaaaatgtggaatcctgtgtgatccctgtccctgagggcttggaacacataccctgctggacaactgtttggctgggatgttggggagggaacatactagattacatcacctgtggcacttaaaaaacaattcccagccgggcacggtgactcacacctgtaatcccagcactttgggaggccaaggcgggaggattgcttgagtgcaggagtttgagaccagcctgggcaacatgtatgtctctacaaaaaatacaaaaataattggctgagcatgatggcatactcctgtagtcccagctactcaggaggctgagatggaaggatggtgtgagcccgggaggtggaggttgcagtgagccgagatacagcctaggtgacagagccagaccctgtctcaaaaaaaaaaaaaattcccgttttcttgggcccctttctggagattgtgattcattaggtgtgaggtgggttggggaaaactggtagttctgctaagcttcctaggtgtttccagcatggagccaggtttgagaatccctgaactaggtgccctcttgaggtctttccagttgctgagatttcatcaagagcatgttctcatgaatgagtcagtcagggcaaaagagacagcttggctttcgttttatctctgaaaggacttcagaagataagagttttatttttatttttgaatcacggaaattttcaaacatacacagaactagaatcgtataatgacttgatatacccccataacacacatcctgattcagtagttgacaaaggtttgtcacacttattttatttattcttttttgttgtcgctgtttctgaagttgtttttcggttttttgttttgagacagggtttcactctgttgaccaggctggagcgcagtggcataatcatggcttattgcagcctcagactctcatgctcaagccttagccttagcctccgaaggggggactacaagtacataccaccatgcctggctaattttttttttttgtatttttcatagaaacggggtttcgccatgttgccctggctggtcccaaattcctggcctcaagcaatcctcctgccccagcctcccacagtgctgtggattataggcatgagtcgctgcacccagccttgctgaagtagtttgaagcagatgacatttacaattcaaacatttcggtatacataagaataattgacggtttcttacataacaaccatgctcaagtcccccctaacaaaatgaacaattatttggtgttgcctaatgccaggtccatattcagatatccctgtttacaaaatgtttgtttgaattagggtccaaatgtggttcctgcagtgccttttgtgatgtttcctgtctgtgtcagtctgcagcactcctatgccctctttcctttttcattcccttccctgttaaaagagacccatggcttacactatagagtacttgcattctgtttacttccttgtgatttcgtgtaacttgcttctctctctccttctatttcctgtcaaatggaaggaagtacgaacgtctgggtcacattctggatatatcacttccagaagcctggtcatccccctcttggggaagctgagattgagccatgggttcacatgaggtcactgttccctactctataaaattcctcattagttttttttttttttttttcatttcgtctatggatgatctgtgcctaaatcaattaaggtagagttttaatgtctgggattaagttttacactccctaaatacaggtcttacttaggagtgtaagattagcatgtactaacctctctgagtacttgtaaatgagaagtagaatgcagttatttttttccagactggattataaggtatgtgtgtatttctatttctgtgccttttttttttaacctttcctcttgctacttgaacaaaaaacattgtcatcaaagggtttataaaggaaacactgtacaaaagtatgtttattatatccagagctgagtgctttaaatacaattttagcttataaatataggcatgcttgctttgtgctttccatatgcagtatctgatttcttcctcactaaaccctatgaagtaggccctattattttctttcttaaaatagatgatgagttaagctctgagtggttaagtaacttgctagaagttgcacagctagcaagtgcagaacttactaggaacctaattggaaggaacctaattccttccaactttttaaaaattattgatttaatttatttttgagacagggtctctgtcacacaggctggagtacactggcatgatcatagctcactgaaaccttgaactcctgggctcaagtgatcctcctgactcagcctcccaagtagctgagaatacaggtgcatgccaccacatccagctaatttcaagattttttttttttgtagggctgcgcactgtggctcatacctgtaattccagcactttgggaggccgaggcaagcagatgacttgagcccaggagtttgagaccagcctaggcaacatgatgaaactgcatctctgcaaaagataaaaaaattagctgggcattgtggcacgcacctgtagtcccggctactcaggaggctgagttgggaagatcgcctggtgacagagctagatcctgtctccagaaataatatatttttagtaaaggtggggtcttgctgtgtcgcccagtctggtcttgaactcctgtcctcaagtaatcctcccaattgtgagccaccatgcttggcccgattccctccaattctgaagggcatgtgcttacccctggtgcttgcctaggccttctcagtatagcagacattgtagatgatctctctgtgcttcctttaaatatcctgtgaatatgggttataggggattgaaataacccaaataaacccagaattaactctgggggcacaggatagagaaaggcaaatacagagtatatttttgtaccgttgagatggggctcaattgtcagcacatgtaaagttcttgcatctgcacagagcacacaactgtctgctcagcttccggtttccaggctccatcctgagccccctgcctcataggaccccttcagtggcatcagagccaagtgaggaagcttttctccctgcgtgtacactgttgatacaaattgtctctaatttgctgttctcttcacgtttgctctcggtagatgagattctttttcaaaggcagttttgaaaatgaggtcgcacccaggtgtggtggctcacgtctgtaatcccacactttaggaggccaagacgggggcatcatttgaggccaggagttcaagaccagcctggccatcatggtgaaaccctgtctctactaaaaatacaaaaagtagccgggtctggtggcgggcgcctgtaatctcagctacttgggaggctgaggcaggagaatcgcttgaacccgggaggcagaggttgcggtgagtgaagatcacgccactacactccagcctgagcgacagagtgagactctgtctcaaaaagaaaaacaacaacaaaaaaagaaactgaggttgcacctctatgtgtcagcaccccacgtgagcagttgcttctagttttctcttcttggtgttgtgaatgcagaatcaagagcatttcccctaaccgtgacaccagtcaacctacctgtctcattgatggaccttttaggaggaagagatgacttattattattatttttttggataaataatgctcattggaagacagtgtggtctggttcggatgtgtaaattcctaagaattagtgtaatgttgggtggggtggaacatgtaattttgtaatgtgtgtgagactcctctgtggtctctgggtgaagtgacaatcctcttcatcctcgacctggggctgccttgtccagcgtcggaaatggctctccctgaagacggcctccttctcaccggtgcctactgccaggcgggctgctttctgctgtctgtgctataggctatgtcacctcagaaggttgagagtttaccagggtctctgaggggccagaaataaaaatactcccttgtcacaggccctggaataggaagccattcataccagcatcctgtgatcccaagaaagcgcagctccctgacccatcctgccgattttttttttttttttttttttttttgagacagagtctcgctctgtcacccaggctggagtgcagtggtgcaatctcggctcactgcaacctccgccttcccaggttcaagcgattctcctgcctcatcctcctgaatagctgggattacaggtgcgtgccaccacacccagctaatttttgtatttttagtggagacagggtgtttgttggtcaggctggtctcgaactcctgaccttgtgatctgcccgcctcggcctcccaaagtgctgagattacagccgtgagccaccgtgcgcagccccatcctgctgatttgttccttccagactgttcgttccttcttcttccagtcagtaggtgtcttgggtgggggcacatttccgttgtcttgctctggcaaacctttcatttgtctgctcattcattcatttattcaacaaactttttaaagtacctactaagtgctaaaagaatacagaattgaatgtaccatggccactgcctgtaaggcactcatggtccagcgagccctcccctcagagtctccctctcactagtggaacttctctagcagaagctcttactccactgctgtatgccctttgtattctctgttttctgtctcacatcgttgcttttctggcccttcatggatacactacctttctactcctcacagtgacttggccaggaagatgccactaacctggataggggtctgtctgaggctgctgggaaagcttctgggcccgagggccctatcaatgtatctgtccagtatctccccctgtttcctattgagaaaatgttgcattctctttggtagggctttgtggcacctggataggtctaccagatacttcatcgatgtactgcctgtatatccaaccagcaagaaatggttttcagaaccttccccattgggctgggatttccctttgaaatcattttggctgcaggataattctctgcagtaaataacataggaagttggcactctgacctcctatttgaaagttatgagtttaggctgggcgtggtggctcacgcctgtaatcctagcactttgggaagccgaggtggggcggatcactttgagcccaggagttcgagaccagcctaggcaacatggtgaaaccctgtctctacaaaaaatacagagattaattgggcatggtggcatgtgcctgtagtcccagctactctcctgaggctggagaatcgcttgaacccgggaggtggaggctacggtgagccatgatcgcaccactgcattccagcctgggcgacagagtgagaccatgtctccaacaacaacaaaaaattaaaaaaaaaaaatgtgatttgattcttgctttttgtactcttagtagtttacattccagggaagcaggaaacataatgcaaaataaaaaagaataagttaccgtaagtactggaagtgtgccgatcagtgtgagattggtatcattcaaagttaggctggcttccctttcccaaagaggggcactgggtaagctaaaagatagtgatgggcgagttttgaatattccttatgttcacttgaataagctgttacaaagcattcttcgggtgtgggaatgagcattagacctccaaggatggattgatcagaaggaggcttgagtgtttattgtagaaaaccaattaacaatgatttaaacaagctaggggcgtatttctccattacatgaaagaagtcttgaggagctagacagagacgcacattccctcttctctgctgttcttagggcattgcgggtttccattctcagtcttctcatggtccaagatggcatcagctagcatgttcccattttaggaagcaagaaggggagtgcagggaaggacaggagggagtcttgctgacttctggttttaaggggctttcccagaaaccccaccctctgctttgatcttattggctagagcttggtcacatgacttctagctgcaaggaagcctgggaaatggactcttttgcctgatccattggaaccccaagttaaatgttgattctgttgccaagcaaacttggaactttctgtcacaaaggtctagatgtttaggaggcaaatgttactggaccccagggatgtgttggaacagcgtcagaggaaaggacggagagagatggtggctggaaggttatgtaaataagaatagggactgttggaggagctaggatgctaaatggaaaactttacattgcattggtaacttaagtaaagcagagatgctgacccattttttaaacattccaaataaccaaggttttgctttaagagattctggttaaattgcatttagtgtcatcaaaagcggtagcttgattgaggtgaagatgtagtctgtgccaaggatgataagaagaaaagcaaggaaatagatggttgaagatagagagtagtgtgaagtcgttcttttagtaataacttgatggattgctatgtaagattacagacagttccatgaacaggatgaagtctttgatttgtgtatgtgtgtgtgtgtgcttgtttgagtacctttccttgtgaactcagcaggagacagtaaatacaggcagagaggctatacgcttcccaggggaaaaagctctccaattacccttccttttcttcctttggtcttcacagggtgtgtgggatttccctctgggccccgtggggtcgagttcagtgtcttctttctatttattggagttctgtgaagtgcttcatagaaggctgtgactgtcctcctcgagggacaggaccgataagtgatttaactaatgtcattagacagaaaacacccacctagcagaacatgtgcacatgctttgtttttagaaggccaagtcatgtgagcgctgactctaatcgtggctatagtagagggggaagaaaagtcccgaatctccaagaatcaaggtacagggagcctggcacagaggtaaggcatagcatcacagtaggtactcctggaataccgcactgtgtgccgaattcctttgaggcttgtaaagttgagaactggtgtttgcagctatggttctgaggtcttgcagaatacctactgttgttgttgttgctgttgagtcacccaggctggagtgccaatggcgccatctcagctcactgcaacctccacctcctggcttcaagtgattcttctgcctcagcctcctgagtagctgggattacaggctcatgccaccatgcccagctaatttttctgtttttagtgaaaacggggtttcaccatgttggccaggctggtcttgaactcctgacctcaggtgatccgcccgcctcaacctcccaaagtgctgggattacaggcatgagccattatgtctggcccctagtttgcaaagtaaaaattggactctgtatttatgaaaataagtggcttcagtcattttagaagcattttcagcagtggttcattcgtgctacccttgtttgtggagtgccaggcactgttttgggtgctgaggatacagtggtgacctctggcgggtccctggctgctctcctagaccttccatagggtagcagtgagggtaggggaggaggaggaggcaagtggtaaatagtagttccttccatggacagggtaggtaatgtaccagattgtgttacatgcaatgaagatataaaacaggataatgtactaggggaggagggtgggatggtgggaggcttctcagaggatctgactaggccgtgccttgaatggcaagagggatgcagctatgcaaagatctgggcagagagaacagcaagtgcaaaggccctgaggtggcaatggctcaaaatgtccaaggaacagaaagaggggtcgcagttagtgtattagaaaggggagaatgttatgtctaaaggacaggaaggggatctacctctctggggcttgttccagtggtgcaagagagagatggtgggagtgatgctagcttgagccagggttgggggttgcagatgaacatgtgtgggcaaatttgggttgggaaattggatgggcgttagtgccaacattctcttttgaccatgttaaatttgagatggtttgcggacatctaagtggagctgtcaggaagtttcctatatgagtttcaagctctgtggagacattcgggtggaggtataaatctgaaacacagtgcataggtgttggaaaataaagagatttctggattacctctcaatcaaaaagagtgaaatcaaacctctatttcagttcttacaggaaattgtatttccattagtgtttgactaggaaattcattttggggtatattcagcatgggaaataagaacaaaagaggtttacatttagagggagaccctctcagaattatttcagcaataacttacctctagttgctggctgtagttttgcaggcagaagagaacaaacctttacttttgtaccaagagtgcaacttctaaatgtgcttggggcagccgcatctctgatatcaggagagaaatgtactccagtaaacatcttacttagcaaagccccctaacccatggcttctgcgagttctctgccatctggtccctggatggaaagaggaatttttcttgtatatgtgtctccatagcaacgagtttgcagttgatatggaaagtaagcagttgccttagcaacggagttactgatgtggcggcttccttgctttcagggaatggataagctgaccaaactagtttagatgcatcctgtagggcgctgtaatgtagagccgcacacacggcccctgccagtgtaaaattggtctagctttaaaagagatcgcagcccctcccccttccagaaggaagggcttacagctgtaataaatcagacaaaagtagtcgctgtcagttgaaatagattacaagagggatctcctggcagaatttatttagtttagctcaaaggagaatgttacagtcaagggtacatttggttgcaaggacaagagagtcactcgagttggcttaagtaaaagggtacttgtcccaaaaacataacagccagtcccatggagcgggagcagtgtcagagagcaacaaagcatatctcaggtccacggccattggaagtgcctcctctgttcctctgcggccacgtggacactcatctctgcctttctctgaggatctgttctagcctcctctttgcagcccagctccctctgtgtgctcttgattcctgccttctcacactgttggcttgccctgctgggatgttggtgccagtccctgtgatgtgatggttccagtgcccagtggcatcagcaccatcatctctgcgccttgtctttgtcatcatttttagatactaggacttgtccttttcctgggccaagcgttcagccctggtcagaacaggggcctgtgcgccggatcaagatagctgctcggaaaatcccttcatctggggttgggctggggcttgagtctgaaacatatctgcaacaacaaaaaaattcaggaaagcctttgatcatttgaagaccattttattgattgattggctgatttgagatgaagttttactcttgttgcccaggctggagtgcaatggcacgatcttggctcaccacaacctccgcctcctgggttcaagcgattctcctgcttagcctcccgagtagctgggattacaggcatgtgccaccatgcgtggctaattttgtatttttagtagagacagggtttctccatgttggtcaggctggtcttgaactcccgacctcaggtgatctggccgcttcagccttccaaagtgctgggattacaggtgttaagccaccgtgcccagcccagtactaatgaaaagaaaagtaatatggaactttggaatattttgtgctttctttttccctctgtcccctcagaatacctcttctaggtgatgaggattaacatgccagagaacatggggactatcttgaacctccgttttcttgtcatctccatggtgccttcatctttctttcattccaagtttataaattgggggctggcaattcccaaactagcaaagcttttctttggtgactacttctccctgtcagctgccctcaaagtgcccgtaatcacagggttgagcgattaccagaaattatgaactctagcccccgatccagacagaaataaatgtcagctgtccaatacaagttgtcctaatagtcaagatcaggaggtttggtaatagttcttgctgactgttatgcactagcccgcatcattgcgttattttcaaaataggggaaaatataattactttatcctggggactggggatgacaaaactctggtggaggatactcaacaaaataaaaagagaccaggaaggctacagagtggcttctgccagttgccaggggattgggcaatggccagaattatgtggttggggaagccaaaggagaaggggactcctaaggtttagcagtgccactggaagaatcctgaagacagcattttattagctggttccttcaggatagtcagactggggctggcgacagggagagaggaggtcccttgagtcatcagacgtggcttgtccagaggtagggacgcataagggggaagactgagtgtgaaagtgggaagtgacatttccataggacctgctgggtgctgtttggagtcatgtgaggcatttgtatccatggtcttacatctttttaacaactataagcaggtattatatgctctttgcagatggggaaactgaagctcagagaggttcagtggcttgctaaattgacacagccagatatttttagccaaggtctgacacttccttgctcctccttcactctaattggctaaaacaaagggtcacagtgggatagagagagaaataagtttgggaaggtaggctgagctagactggggggttttgagtgccagggagcccagactttccccctaaggtggtagggggtcctcagacgtttctgagcctagccacagcacagacaaaggagtcaagtgcttccttctgatgccctagaggttcttgcagagcctcggtctccacagcagggattctttttttttttttttttttaacttttattttaggtttgggggtacatgggcaggtttgttatatagataaactcatgtcacaggggtttgttgtacagattatttcaccacctaggtataagcctagtaaccaatagttttttcctgatcttctccctcctcccaccctccaccctccaataggccccagtgtgtgttgctccctactatgtgtccatgtgttctcatcatttagctcccacttataagtgagaacatgtggtatttggttttctgttcctgtgttagtttactgaggataatggcctccagctgcatccatgttcccgtaaaagacgtgatctcatttatgtttatggctgcatagtattccatggtgtatatgtcccacatctttatgcaatctgtcattaatgggacttaggttgattccatggctttgctattgtgcatagtgacagcagagattcttgctgcccagaaatttatggagaaaaaggccacagcagtcgctgattttccatagctttaactgacttggaccagatttgtgcactaacaaataaggaaaaaaaaaaaagtctactgcagcatatttctcattttaagtttttttttttttttttttgagatggagtttcactcctgttgcccaggctggagtgcagtggcacaatctcagctcactgcaacctccgccttctggtttcaagcgattctcctgtctcagcctcccaagtagctgggattacaggcatctgccaccacacccatctaatttttgtattcttagtagagacggggtttcaccatgttggccaggctggtcttgaactcctgacctcgtgatccacccgcctcgcctcccaaagtgctgggattacaggcatgagccaccgtgcccagccagcagtggcttcttgatgctccagtccagcatctgtacctggatttgactgatgtggtccccatcatactctgatagagttctttttgctgggatcctggaagatgatcttggtttatacatgaagaatctggggtccagtgaaagtgacttggtaaaacccacagatctgtgccgaaagccttggtcagctgccccttggcctgatgctcttttctctgcatcagtgcattgcttcacctcttcttcaaggactctgattaactggaagtggacataaactggtgttatttatgtgggatttgttttccttcctacatcttagtttgggtcactgaatatactcagtttttataagtgatttttcatttctgtttgtaacttctgaaaatgtgcttaagtctttgagagtatgctttaacctataaatttttgtttcattgattactcagaatgtccttgaattttagccttcgaatgagtctctggacactattttgcattacctgcctattagtatttagccattgatgaaatccacacagatccttcctggtgagcaaaggacctgatctgcttcttggtgctgatgttatgtggagagtttgcatatttcccagaagtagtgacaagtgtgactggaagactcttagaaaattttttacttaactgtctgtcttgataaactctatgttcattatctttggttctttgacttactttgaaactcccccccctccagccttagagatcagcttatattgggcaggcattttttcccagaaataataatattaatattaataaatagtaataaggtaattacactactcctgtgtggtatcctaaactttctcataacttgttcatccatccagctaatgttgattccatgcttgtaaacaggcttatgctaggcatcaggaaagccggatgatgaaggtatagtttctgtccaccaggaatttctagtctagtgggagagacagacacatgaagaaatagtcattgtacaccttggtgtatgtcaggcatatgagatgctgtgctgggcaggagagggtgtgagtgctgcttcattttacacaaattggtgagagagaaagcttggatgctgtactgagcattgaactaggtgttaggagatctgggttttattgctaatttggttgctaaccagctgtgtacctctctgaaccttagattcctccattcaattcagtaaaccttctcttgtgggcccactgtgttcattcagtatgtttaattaatcattcatctgtaagcagaattgtcccggacacgtgttcctgaactacttgccacaggggactcttttattctcctccttattctgtgcttttgttagacacatgagcatcagtcacaggctgtgaccagcatcagataaccagtgtccatagggtgtgttgagaatatttctgcccaaagcaaaggagctagatgtggcagcttacataacaatgttgcacatgaacgcgtgatttccaaaaggctttggggaagtgtcagaataaaatcctgtcctcataattctaactctgcagaagagcctttccatagcagaaaacccggatgggttgtgtgtgattttcaaagccctctcctatgctgttattacaattctaggagatcccttagttggggagtcactagctgtgcttccaatgatctgtatccctggggcctactaggttcctcgtcctttcctgtgtctcacagcagttggaatctagctcttctgaccatttccccaatgctaatgggaccccgggattagagaatagtaacttcaggtatcctattcctggaatcccaggtgtgttcatggctgtgagggcgctcagcgcatgcatgtatctggccagatgccctaggccaggcatgtccacgttgagcattgttgttgtttttctttctctctgtacacttctcttgatgatgtcattttctttatcaaaaagctttactaaactcctgctgtggtttgaatgtgtcccccaaacttcatgtattagaaagttgagactgggcgcagtggctcacacccgtaatcacagcactttgggaggttgaggtgggctgatcacctgaggtcaggagttcgagaccagcctggccaacatggcgaaaccccatctctactaaaaatacaaaaaaaattagctgggcgtggtggtgggcacctgtaatcgcagctaccagggaggctgaggcaggagaattgcttgaactcgggaggcagaggtttcagtgagttgcaccccagcctgggcaacaagagtgaaactccatctcaaaaaaaaaaaaaaaaaaaaaagaacgtcgatccccattgtggtggtgttgggagttagggtctaatagaaggtgtttgggtcatgggggcaccaccttcatggatcgataaatgccatgattgtgggagtgggttccttataaaaggatgagttttggccccctttctctctctcccactcccctctttgcccttccacttcccaccatgggataatggagcaagaaggccctcaccagatgccaacccttccatcttggacttcccagcttccagactgcgagaaaacaaatctgtgtctttataaattatccacaactcccaatgaagtcagggggctatgaaatgtacttgtgatcttcccttgtccccacccagtttcctgctctagacaagttgtacctctgggctctttctcctctacttttgcccctctgtaactgtcagtgtgtcatttctgcctcactctggacaagcctgccatctctgcaggtgtgatttattgccagatggttattttgttagcagtggttgagtcttatgaaatgtaatcccaactgatcttttttccctctgtgtgaagtgtgtggcgtgcacagtttgtgccatttgtataccctggtgctgaggtgtggtggtttatgggggagctccgtttctggccgccatgtggccatgggagattgacaacaacgctcaccctcagcacttcagagacagccatgaatgttttcagataatctgttcagaaatggcagcttattcccacagtcctgtggctggatgtcttgtggcactctgtgcgtttcctgtgtaagcaggtgttcaggggtgagttgtatccctcagaaagataatgttgaagttctcatctctggtaccacgaatgtgaccttatttggaaaagatgtaatcaagttaaaatgaggtcacactggatcagggtggtttgtaatccaatgtaactggcattcttataaaaagaagagaggaggccaggtggggtggctcatgcctgtaatcccagcattttgagaggctgaggtgggtggattgcctgaggtcaggagttcgagaccagcctggccaacatggtgaaaccccatctctactaaaaatacaaaaattaagccgggcacggtggctcatgcctgtaaccccagcactgtgggaggccgaagtgggcggatcacgaggtcaggagtttgagaccagtctggccaatatggtgaaaccccatttctactaaaaatacaaaaattagccgggcgtggtggtacgtgcctgtagtcccagctactcgggaggctgaggcagaagaatctcttgaaccttgggggcggaggttgcactgaactgatatcatgctgctgcactccagcctgggcgacagagcgagatgctgtctcaaaaaaaaaaaaaaaaattagctgggcgtggtggtctgtacctgtaatcccagctattcaggaggctgcggcaggagaattgcttgaacctgggggtcggaggttgcagtgagctgagattgcacctctgtactccagcccgggtgacagaatgagactccatctcaaaaaaaaaaaaaaaaaaaaagacgagacacagacacatgtgcaggggagagcaccgtgtgagtgtgagggcaggggttggagtgatggctctgcaagcctaggaacagcaaggattctgacatcaccagagagggtcgtagaacagattctgtctcccagcttctagaagggaccagccctgctgacacctggattttaggcttcaagcctcccgaacagtgaggaaatacatttctattgttggggccatccggcttgtggcacttggttacagcagccctgggaacagagcaacagaaagaagtagcagtgagttatgagtttctgcctacactgagagacttcaggaataaaacctaatggaaggtacttaggaatatgcagtgggattgtgtccttttacagaggagggaacgatccagagaggtgctcacagccacgcagtgggggctggtgatagatttggatccagaactcaggtctcctgggcttagaacttctctccctcctaatgctgcctatgggaacatatttgaaacctaactgggttcacattaaagaaatgccataaagttagggggcagatggtttgggtttttttcctctccattttttgatggggaatgaagggatcacagatcttgacaacaaaatggaaagagtttatagggttccaggttggattgcagtggtgccatctcagctcactgcaacttccacctcctgggttcaagcaattctcccgcctcagcctcctgagtagctgggaatatgggcacatgccgccatgcctggctaatttcttttacattttagtagagatggggtttggccatgttgcccaggttggtcttgaaatcctgagctcaagcagtccacccacctcggcctcccaaagtgccaggattacaggcatgagccaccgcgcccggccagggttccagttttattagctacatagcctgcaagcagagagcacggtggcaccaaccaaccaggctgtatttggggactgtcgcttatttttcatgcacttggtgctgaggcttgaattggtacaataagatgcaatacctgcccaacatttcttattcagggcctagttaaaccttgaactgggaagaagcagcctttgtttgggggagcgtgttcttctgcagcagatccttttggttgaaccatgaaataataagactcggtttgcacaactgtgaatgcccaagttggctgaattcttggtacagaggcagagggacgggatgcctgtctttggaaatatgaacgtactggctgctttgttcacgatgactcagtgtttgtatgaccttggttttactaaacatctgaaggcacttttgtcaggtgtcctccatttgcccaatgtaaccgtattttatttctgagacacagtcgtgccctttaacacagtctgtttttcgaggaggaggattcacttaccgcccttgaaaaccaaggtcagtctggggctggtgatgggcatttggactgttccttgggttcaaggtgattttctcttacaaagttttcaccctctgtaattggcctcggaagaccacacataaataaggaaagacagttttctgtatgccggtcctcttcacctctggactgtggtgggctggatctaccgttaaccttagcaactggagaaaggagtttctcgagacactgtctgcctaccctgtcttcgactcatctgttctgaggctttgggcttctctcagtgaccctctttcctaaataataagtacaggaactgtgggagaaactggactaagtgtaagtctgaacttggccttagagagggtcttagtcctgcaagctgcgggggcagctctcaccctcagaacttcaaccgaggcacctcttacagcatctgcaggggagggcaagggactctctggaagggtttctggagattttggtcatacgagtagattcaattactttggagcttccttgggccatttttattttctgtaatacctgctgttttattttgctaggctttcccccctagaataaaggcacattcaataataagaattttgtagtagccactactaaatgatactgctcgtcagtttgaagaaaaagctaattgtcagctctgtgttgagatttcctttttttttttttttttttaaaaagcagcttagagaaaatccctgaacatagtctcctgattgaaaaatacattagtggatttcactgctttatcattttcttaaagtaatagttttccttacttaaaaaattatatgtattaaattatattatttatacatataaaattatatagataatatttatatatatatatatagagagagagagagagagaaagagaacgagagagatctattgaaacatatggctgaaaacatgcccagtgcatattttttttttttttaaagggagtctcactctgtcattttagctggagtgcagtggcatgaccttggctcacagcagcctcaacgtcccaggctcaagcaatcctcccacctcagcctcccaaatagctaggactacaggcttgtgtcactatgcctggctaattattattattattatttttgtaaagatgaggtctcactgtgttgccccggctggtctcgaactcctgagtgcatgtgatctgcccacctcggcctcccaaagtgctgggatagcaggtgtgagccactgtgcctggccagaatttttttttttgtttataaaagtgaaaaacaaggatttattttatgacattttgtagttgtaaagagccttattgttccttgagtccagccctctgctgtgggccaaaggacaggagtcacctctgacccggtagggtcatttctgtgagatgactggtggatttgctaagatcgtatattgatgcccccaagctaccctttgtatggtgaatttggccacctacacatcaacaagtgactatttctagccatcccaccgtggcctgccagccagcagatcaatttcaccagtttttccgtctttgtctttatagcacggtttatttgtgcaatcatttgaattgtttatgtgctttgcccttgttttattaaaatgaaagtgacaaattaaaaaggttaataataggagttagaaagagcgtaattctcctaaacacatcaattgagaaagagggaaatcaattggcgtgaatctttggtcttgattgggcgcttgtgggatctaccgctgtgaagggaaaggatagaatgaaagggtgttcgtgaaatgctgtgaagtaattgtggatgcttgagtctgagacattaggtatatttagagattttataatctttcttttttttttgttttaagtactctaaaaaagggaatagttctttatacctaagagatgcacattgtaacatgtaagtttttttcactttcatacattttacttccaaattcgtttgcaggaaagaatcagagatgggaaaaaagaggaattgtccataaagacaaattcctcccaaacgggcctgtaagttcccctcaggctgcagctctccctgctggagtctgcctggatcagcatttccttttcacaagagcaagcacccagtcacccagtctccaaaatcagcccttgtagtatttcctgaatctctgagttctcttcccagagcctcagatggcccagttttctgtttctggatcacccgactttggttttctgggatcccttgctgaactctgcctggtgtcacagtgcggggcctgtgctctgctggtgctgttgagccactggtagcagcctcgtctcccacccctggtgtctgtgatccatccagtttcatcatgtcttccctgctcaagggcttttctcttggcctctctcatgcatcttcttcttgattttcctgcttctcatcaagctggcaccttatttatcagggtccagctttaatgacaccccttcagagaggtcttctctgagccctcctgctcgccttcctggcaacacttagctccaggtgcatttacacatttatctgtgacttgttcatcacgtgtctcctctaaatgtaagcttcacagtcagtctaacccagtgcttgggacagcgctgtgtgcagggggctccagaggttctgctgagtaagtcaatggcgcattcattctcctggcttcctaggcgctgaccctgataacttgataagggcagagccaagctcttgggccctgtggcccacacccagcagcatcccacaccctgcttgcagcggccccactcttccatccctgagttgcaggtgcagcgttcactgtctccaggctctgtcctggtagcctgggcactgtcattactgtatcctttgctcagatggcctcagtgattgctgccatccatggaagtgagttctcatctcctccctgactttccaggccccatggagtgtgtgttcgcccatttaggctatcttccctccaagacggaatcttgttctgttgcccaggctggagtgcaatgtcgcaatctcggctcactgcaacctccacctcctgggttcaagcgattctcctgcctcagcctcccaaggagctgggactacaggtgcacgccaccacgcctaggctaatttttgtatttttagtagagacagagtttcatcatgttggctaggctggtcttgaacttgtgacctcaggtgatccacccacctgggctgccccaagtgctgggattacaggcatgagccactgtgcccagccccatttagccaccttatttcatgttgcttctctgtagtgtgccgctgctagacgcaggtgggtgcctgccctgccctgcagaattcaccttgcatggtgcacatggttcatgctggctttacctgctcctcctccctcttctttctgtataccccagaccaactctgtcctaagggctccgtttaaagcccatttccttaatggaatctactcctgatcttattaatctctctctctctctggcccttggcagttatagtctgtctatgtagtttataataaactttataataaagtctgtcatctaatgaaataaggagcagagcagatgagtttcaggagggtggaagttggagtcagagagacctagggctgaatctttgttttacgacttgctagctgtgtgtccttcagcaaggtaattactgttaatgagctttacgttctcatctctgatatgagaggataatgcctttctcacatggctgtttaaagattaaataatgataatacaactcctggaatatagtacacactcagtaaatattatactgacggtcatttccttcatgttggtgctatagattgaattgtgtctcccccctaattggttggtttgtttattgattgattgattgattgattgagacagaattttgctctgtctcccaagctaaagtgcagtggcacgatctcggcttactgcaaccttcgccttctgggttcaagtgattcttgtgcctcagcctcccgagtagctgagactacaggtacaccaccacatctggctaattttttgtatttttagtagagatggggtttcaccatgttggccaggctggtcttgaactcctgatctcaagtgatccacctgcctcggcctcccaaagtgctgggattacaggcgtgagccaccatgcctggcaccccccaatttatatgttgaagcgcaaaccctcaatgtggagctaattaaggttgagaccatacggatggggtcctaatctgattggattggtggccttataagaggaggaagagagatcactctattcatgcacgcacaccaagggcaggccccatgagcacacagtgagaaggcagccgtcttctcacgaagagagtccttaccaggaactgaagctgctggcactttgaccttggacttcccagactccagaactgtgaaaaagtaacttctgttgtatgagccacgcagtctgtggtattttgttctggtagtctgagctgactaatagagtgtgctttggctctaattagatgatgatttgttgagctggcattgattgagcccttgttaggtgttgggcactatcttacttaacctgacctgtctaatctctcaattctcaaaaccactttagaagttggttaagttacttgctaagttcccctagcctagtagtgccaggattagaactatgacttcacgttgcagccctgtgaaatggcacctcctgcagttgtgcagggcaggcctctgcggctgtccgtggacgaccttgacagatgggagaccacatgtgtgtccctgactccagtgctcctgctttcactagagagcagatgacacactcctcgatgtcaggggagttgccttatatttcatttctggtggcacttagcaagtgctctgtgcacaggaagcaattaaaaaataatttttggttggttaattttccccaaacacttagctcctcctacatctggagaaagagtgaaattttcacccaccctcccgagctcccccgtgtgcatcctctgagctgtttgctgtcagcgaaggcatttgcgtgtcaaacctacccataaacttgctgagttgacaaaagcaaagagagatcaagttttcagttgttggagagtagaaccgttgtgagtctgaatctgcaattcttttattctctcagtgagtagaagtgagtctttgtgaggatggccttcagccagtatcttgacacctcagttacgtaagtagttctcatcttgttctcctcttttgcttttttctccctctcatgtacactcacagtaagaggcctgagagaacgttagccaactccttgttttttgagacagagtttcacttttgttgcccaggctggaatgcaatggcatgatcttggctcaccacagcctccgcgtcctgggttcaagcaattctcctgcctcagcctcccaggtagctgggattacaggcatgtgccaccatgcctggctaattttgtatttttagtagagacagggtttctccatgttggtcaggctggccttgaactcccgacctcaggtgatccatctgcctctgcctcccaaactgctgggattacaggcgtgaaccatggcacccagccctccttttttttttttttttttttttaaatgtttgcctcagcttttgttattcagagagaaattggtctcatctgcctcaggacacggatggctttacctataattaattaagccttttcctctctgaagttgatgggtttggacttttgaaaaagatgggccatgtggcatcttaacttaggctcaaggtgatagggttatagattttagacctcccggaccctctctatagatattggccaatattctttattagcatgtttatgtaggtattagccagtattctttattggcacatttataatttataccccacttccttttcatagggcttgccataagacatataggtcacaatcaggtcgctaaggtaaaaattgaaaatagacaaatgcagtagagagaggggaaagcaaatattccaaattcttgacctaatatatttgttgtgattgagtgcctgacagccaaggcaaaaatggaaactcggcagattccataattctccttccctggtaagatgccgacttaggggagagacataatctccaggtgcaagtttataaaaagatttcattgtaaggctgtttctccatgggatataaaaccatgtaatttacaacacgtacagcaaccttagctccagttcagagagccatcaaggctgttgttcctgccattagtcatgaccttatccttctctgcccctagctaaggcctgttcatcctgtagactttgacagccatcatcgcctccaagaagtctgccatgattctccctgctcaggctgggtcatgtccctcttctcagtggaaccataagacagggcttatttttatctctgcatctctgtattgctttatatatatatttttacaactagatgaggtattcctaggactcattcctggtattgtggtaggtgtggggctgatgtttgttgaagaaaggaagttttttttaatctagattacaaaaacagttttccaagtggatgaaaccatgttatatgaatgaaagtcattagttgttttttagtgtctgcccatagtaagtagcttgtctgtgactcagaattgtatgttcctggtacgtattagaagagctggttgtcagatgcagactcaggagacttgggttctggtcctgattcttccactaagtagaactatcacttcagcatttcacaggcttagtttcgtttctatatctgcaaagtgagcacagtgaagcaggctggtgggcgcagaggtgaggagttgatctcctctcccgcatgccacgcccagggcagccatccatcgctggccacagctgtcatcctcagctgcttctgtgagcaccattctcagaagccaccaccagtcccttggggctggcatcagagaagaagtctgtttaacatctgtggaaaaggttacctttgaggttctttcagctctaatgattgtagcatatcccctgatgttctctgttatcactgtagtgggctgaaatgtccccccccaccaaattcatgtccacctggagtcttatttagtgacctaattattttaaaatagcattttttttttagctgggcatggtggtgggcacctgtaattccagctactcgggaggccgaggcacaaaaattgcttgaacctgggaggcagagtttgcagtcagctgagatcgcaccattgcactccaccctgggcgacagagcaagactcttctcaaaaaaaaaaatgaatacataaaaataaaaatagggtttttgcagatgtaattggttaagatgaggtcagaatggatttgagtgggctctgaagtcattgactagcgtcccttacgaggagaggagaggagaggaaaggaaacagatacgtggggaagatgacacaggaagagactggaccaatgcaggggtgagccagggagtgccaagatcggccgggggccgccagaagccaggaggaggcaaggaaggatgttccccaggtcctgtcggctccttgatttcacacttctggtctgtgagagaatttctgttgatttaagccaccaagtttgtgttaatttgtgatggcagctctgggaaactattgaaagtaatggcaaaaactgcaattatttttgcaccaacctaatttggtgcaatacactcacctctgatttttgtcgtcattttgcctgctctatcaggctagtgtgtccctcttcatgtctgcctggagaagcctcatgcattggaagatgtcttttttgccgtgtcacatgtggtagaacctgacatttctctgcctgttcgtgaacatttagacattgataaaagctcattttcccaattaatagatgaaagcatatgaattactttatatttttgagggacatatgtttagttcagactccctgaggtcttattcaaattatcaaaaaacctggctaccgcagtgtaattcacagatggtactgactctagccaaaaaaggaaaaaaaaaaaaaaaaaaaaaaaaacaccacccaaaactgtgctccaaacacaaaactgcttgagtgttctgagcaatagagtatcgagggaatggtgttgggtggatccctgctggggagcctcctgctactgcttctcccgtcttggacccaggagggcacttcctccagctggggagtttcttcaccgtccctttcacgtacatgtcatcatcaaggagacctccaagcttttgtctgtgttttctgtgcctcaaacaccatcccctctttgccaagcggtttcatatgttatctaaagagctcaacactctgtaaagtggcaatgattgttccattttatggatgaggaaactgagggtcagagaggcaattaggtaaccgatcacaggtgacacagctaggaaggagcagaacagaatctgaactcagatccttcctattcccaaacccacgtgcttcctgccccacctgaaagggcatttgtgggtggggtagggacagtggcttgagccaatgcagatgagtatagatgcatttggagagaaaacttgtagaagtggagaacatgagggaacagagatgggatggcataagagaaggccagaaagataggaaggtgccatgttgggaagggcttgactttcaggcttggaagtgagggtgttttgtgtctctactggggaacatttgaaggcttggagcacggagaggcatggagtgtgggagtgggatttgaagtataatgaagtagagtgatgggtcagcggtccagccgggttataatgaaggatggaattaggttggcagcaaggtgtacacttggtgacaccagacctactgtcacagaggtagaacccacaggctctgatgatagctgtgggggtcatagggtaggcagacaaggaagggaagtaagaatctaggtttaagtctgcttagaggcgaggggaatagggaggagaatggatttggtctgacaagcagtggggcaaggtgatgaatgggttgtggtctggccatgatggactcaaggggccaaagggtcatctagagaggataatcaattgacaggcagatgtgtgggctgcagacacaccaggtcaagcttaggagtagttgagaggatcaagcaaagggcctggggcattgccgcccctccctccgtccctccctttccccttcccttcccctcccctcccctccttctctgttgcccaggctggagtatagtggcatgatcacagctcagtgcagccttgaactcctggactccagagatcctcccatctcagcctcctgagtagctgggaccacaggtgcgcaccatcacacctggctaatttttttaattttttcatagagatggggtcttctatgttgcacagtctgttctcaaactgctgggctcaggtgatgttcctacctctgcctccctaagtgttgggattacaggtgggagccagcacacttggcctgtaccttcacttaagcaaaccttttttttttttttttttttttgctttttgaggctttttttgggctgcaggtgcagggcctagccagacttggcagcacactttacatggccaggatgtcgggcaatgttagaattagttggagagggctcttatggttatgtcaccagatgttggaaaggctttagttataaaattaaaaacaaacctatcatctgtgtgattttgtaggcctcggggttcgaggtatcctgtgagtcacccaaggaatcctgggagtacatagtccacagtagacaattattattgctatttgtcaataatatctgaagatgactgttacctttgtggtgatttatcttagaaggaggcttttctcctgtgtttgctgagtttgatttgagtcttttttttttttttttttttttttgagacggagggagtctcactctgttgcccaggctggagtgcaatggcatgatcttggctcactgcaatctctgcttcctgggttcaggtgattctcgtgcctcagcctcctgagtagctgggattatgggcacacgccaccacacctggctactttttgtatttttagtggagatggggtttcatcatgttggtgaggctggttttgaaaccttgacctcaagtgatccatccgcctcagcctcccaaaatgctgggattataggcatgagccaccacgcctggcctgaccacacctggcctgatttgagtcttaacatgtagagctctgggcatctcaggactggttttgccccttgtccacaggggaagcatcttcagtagtgattctaaatgtgacttagaaaactgcccatggtctgtgaggctgacagtgtcattgcctccgctctttataggacggggttgtgggcaccctgatgcgtggcctcagcatgctgagtgagaagcaggtgattgctgatacgacttataaggggtgtggttccagtcgccttcatgctgggcgcacagacgggcacggtgtacgggctcactggactgcatggtcaacatggaggtctttctgagttgtgcaaaatgttcttctcaggaagcttgactgctgtttgatgttaacatgattgaggagtttaggcttgactaaagtcctttggtatccctgtgaaataggactttgtgttagtacattctcacactgcaaataaagacatacctgagactgggtaatttataaaggaaagaggtttaatggactcacaattctgcgtggcttgggtggcctcacaatcatggcagaagatgaatgaggagcaaaggcatgtcttacatggtggctggcaaagagagaacttgtgcaggggaactcccatttataaaactgtcagatcttgtgagacatattcactatcacagaacagtacgtgcccctatgattcaattacttccccccgggtccctcccccgacatgtgggaattatgggaactacaattccagatgagatttggatggggacgcagctaaatcatatcagactttaacaaggaacagaccttagtcatctgcaagtagtgaagtcagtggtatgggaaaaggtactgttattctgcgtttgaattgagcttggccaggcacagtggctcacgcctgtcaccctagcactttgggaggctgaggcaggtggatcacttgaggtcaggagtttgagaccagcctggccaatgtggtgaaactctgtccctactaaaaataaaaaaattagctagacatggtggtgggcacctataatcccagctactcgggaggctgaggcaggagaatcccttgaacctggtggtggggagggagggcggaggttgcagtgagctgagattgtgccacttcactccagcctgggcgaaagagcgaaactcatctcaataataataatgaaaaataaaaataaaacaaaacaaaataaaataaaatgaattgagcttatattttgggattccctttctgccaaagctgagtagttcttcatgctctggagcagtggttcttaactgaaggtgattttgctccccagggcacacttgccaaggtctggagttggttgtgagattgtcgggggagcggtctactgcatccagtaggtagaggccattgatgctgctcagtgtcctacaatacacaggacagctcccacacagcaaagaattacccggccgcaaataccaatagggctgagattgagaaaccacggtctagaatccagcaaaatctttcgatcttcaccactgtcgactggggagggctcagcacaactcatgaagccatgggtttcagcacagccagggaaggtccccgagtgaaggtcagatggggagaggcctgcatggctggcaccgaggagacacagccagaccagtagctgcatgctcttgggcaagctcttcccgtctgagtttagtttccttaaatgccaagtgaagaaagccagccagggtatcacgaaaaccctttctagaactcatattccaagattctggccctgaccctctattctcataacctgggcatgattcaagaaatgtgtgagccaggcacagtggctcatgcatgtaatcccacccctttgggaggccaaggcaggtggatcacttgaggtccagggattgagaccagcctgcccaacatggtgaaaccctgtctctactaaaaatacaaaaattagctggacgtggtggtgtgtgcctgtaatcccaggtactcgggaggctaaggcaggagaatcacttgaacctgggaggcagaggttgcagtgagctgaggttgcaccactcactccagcttgggctgcagagcgtgagactctgtctcaaaaaaaaaaaaaaaaagtgcaaaaagagattcaatgtgacctcattttccctgcctttctcctttcttcctagtttttatttgcattttttttgttccaaaagggagaaaatgcacacagttaaagaaatatttaaattgtcccctcttatcatgataagcctgagaatgtttcttttatgtcaaggagaaatgactttaatatatatttgaaacgtttctgctcagcgatgaaaaatccaatgtcagatcacttacagcaggcagacttgggcgttttaagcatctctcccaggatatcatccaggcagcaagggctgtccccagacctgtctggctctgagagaaggagtcctgtgggtgcacgagagagagcctgtgattccagcatgtctgggtattccccagctgatggtgcagacatgacatcatcctgagtagctatcttagctcccaccccctacatgcacactcacgtactatcctgggagctcttgattttctgtatcaatgaatggataatatgcacaaggtagcaaaagctgttcttccttttggattaggggaaccatctttctccttttgctggaaatcttccctatcatgatgttactgtgctagtgcagacataacaaagtaccacagcctggttggcttaataaaaggaatttattttctcacagttctggatgttggaagtccaagatcaaggtgtcagcagggttggtttcttgcaggcctctcttcttggcttgcagacggccgccttccccacatgtcttccacatggtcttctctgtgtatgtctgtgtccaaacctcttcttagaaggacaccagtcatagtggattaggggtcaccctaatgacttcattttcccaattacttgtttaagaccctgtgttaaaatagagccacattctgaggtactcggggccagggcttcaacacgtgaactggtttcaacatacgagttgtgcagttcattttgtaacacctgtggagatgggtagagggcaggttctctctgcaataaggttttacagatggtcatttatcttctgcttctttcttttcccttcttattttttactgtgagaaaattcaaacatgcagaaaagttgcaagaatagcaatgagtaattgttaacatgttgttgtatttgcctcctctttatgtgtagattatatgaactgatgaaaacaaagttttaggcatcatggcacctcacctgtaaacttttcagcatgaagctcagaacaaagacatccttttctataaccccacgctattgtcacacctaagaaagtttcaaataattcagttcgatgtctgtcatctagtccatattcagatttctccagttgtccactaagacctttatttatttatttatttatttatttattttttaccagcatccagtgaagatgtgggcactgctgttggtttttatatctctttaatctctttagtctggaatgatcttcccattttcctctccccctctgatgacaccgactttttttcttttttctgagacagtcaaggccagttgttttgtggaatgcccacatcctgaatttgatggattatttccttgtggtgtctttcaccttgccttgtgtcccatggaagtcagatccaaatgcttatgtaggctcaagcttttttttttttttttttttttttttttttttttgagacagagtcttgatcttttgctcaggccggagtgcaatggtgcagtctcggctcactgcaatctctgcctcccgggttcaagaatcaagcaagtctcctgcctcagcctcctgagtagctgggattacaggcgcctgccaccatacccacctaatttttgtatttttagtagagacggggtttcaccatgttggccaggctggtgttgaactcctgacctcaggtgatctacccgcttcagcctcccaaagtgctaggattataggtgtgagccactgcacccggcagctcaagcttatttaaacaattgccaggcaatgctgggtgcttcttaaaccattatgtctcaccaggttgtccactgttagtgacgctaagtctgatcagcggccaagggtggtcatgctgatctctccattggaaggtgtgtttttggcaatgagcacatagcctacggagagatacttgggcactgtgtgcataaccattgatgattcttgcctgaattattttaccgaaagttgcaaaatggtgatttttctaattctatcattagttgatattcctgaaaaggaactataatgaccaatttttacaaaaaagagttggtgtaataatcgcctctaatggtggcaaataaatatctgtctgtgactatcactatggactcatgggtttttatttagtcagttgttttataatcaattataataattgttttgatgctcaaattatcctaaatttggccattgaggccctttaagctgcttcttttgtcctttgaacatactccttttagtctttaagtactttcttgcacaaaaaaaagttctggactcatcttacacttttcatatccagacatgagatcatccatttctccaaaaagccctgattcctttcagtggagaatggtatttaaaaactgaaactggaggccaggtgtggtggctcacgcctgtaatcccagcactttgggaggctgaggcaggtggatcatttgaggtcaggagtttgagaccagcctggccaacatggtgaaatcctgtctctactaaaaatacaaaaaaattagccaggcatggtggcaggcacctgtaatctcagctacttgggaggctgaggcaggagaattgcttgaatctggggggctgggggcagagggaggttgcagtgagtcaagattgcgccattgcatcccagcctgggcaacgagagcaaaactctgtctcaaaaaaaataaaataaaataagataaaccgaaactggacactgggtgtattcattatagctggggtattattattttcatgaatttatattgctattgccaattcacatttaatgttactgagttttttcttagcaatctttgattttgtatttatatctctttgcttggttcttaatactattaatgttgtgaacacatttatttgctttattctataatgtgcataaaatagtttcaaaattatactgtcttgctattagtaatacatgtctggctgaaacaatatttctttgtagttcactttcatctgtagtatatggatgtacatctactaggatacataatcagtattgaattaaaatgtggtatgaaagagttttttttctggtgaggttatgttgcaaacttgcttttttagttaggttattttgtgtacttcttaaaaaaatttaaatttgtggtttgcttttttaaaaaaaacttcattgaggcataatttacatataataacaacatatacttgacgatgaacagagggattagtgaaaaataatatacccattgaaagtattttgactaatatgtacatacctctgtaaccaccattactgtcaggatatagaacagtttcatcatgaaaagttttccttcagttcctttgtagtcaagtcaatctcctacccctccaccaaaaccctcaggcagccacagaagtggtgtgaccactttctgtccctgtagattagtttttttctagaatttcgtattaatgcaatcataacatagtactttttttttttttttttctgagacggagtctcactctgtcactcaggctggagtgcaatggtgtgatctcagctccctgcaatctccacctcctgtattcaagcgattcccctgcctcagcctcctgagtagctgggattacaggcgtgcgccaccacacctggctaattttttttttttgtatttatagtagacatggggtttcaccatgttggtcaggctggtctcgaactcttaaccttgtgatctgcgtgcctcagcctcccaaagtgctgggattacaggcatgagccaccacgcccggcaagaatagtatacttttatgtctaacttcttttactctgcataatgtttttgagaatcatacatgttgtgtgtatcagtaaggagttcattcctttttattgttgagtagtattccattttatgaacataccataatttgtctgtctagtggccctctgatgggttttgtattatttctagtttttggatgttatgaataaagctgctctaaacattcttttacaagtctttatgtggatatgtgagctcgtttctcttgaagaaatacccaggagtgggattggtgggtcatacaagtatgtgtataactttataagaaattgtccaactgtttttcaaagtggttgtactagttcacattcttttctctttttctttttcttttcctttccttccttctttttttttttttttttttttttttttgagacaaggtctcactctgttgccctggctggagtgcagtggcacagtcatggctcactgcagcctcgacattctgggctcaggtgatcctcccacctcagcctcctaaatagctgggaccacaggcgcacaccatcatgccgttaatttttgtattttttctagagatgaggtttcctcgtgttgcccagactgatcttgaactcctgggttcaagcaatcctcctgcatcggcctcccaaaatgctggcattacaggcatgagccaccacccctggccctagtttacattcttactatttgtgaatgtttgcttgcttgcttcacaatctgaacagcactttgtattgtcagtgttctcatttttgccattccagtggtatgtagttgtatcttattttaatttgtattacttacctttgacttaatttttagtttgaatagtaaaacttttactagttccaaagacaaaaatctcttaaaaagtatatgtagtgacctatcaaacttttactttcctcaatcctactattaaaggtgtggtttagatgactggagaatttattaagcacctactgtgtgccaggcactgtgttaggccctgggtcatgagcaaacacagagacagcccctaacttcatagagctaacgtattagttagagggcatagacattagtcacaacctcacaaataaatgtaaaatggtcactgctttgtgctgtatgggaaagctacagaaaagagttaaggctgctgttacctggatctcatcattggtctccccccacccccaccccaaaaagactttctgcttacgtgctccctctcttaatacttgttgcaaaatacttcctctgaaatgctataactccaggacctgtagcaacaggccaaaaccctgggaaggtaaccagcaccccactatagaactcaggtcttggaaagctgtgatagctttcacttgatcatttggccttagatgaagaagtcttacagacttgttccttatagaaccctgattgaaacacgctttcagtgtctttaaaaatatattggtaacacatggtttacatttaattgttttttttcttttttttgagacagggtcccgctctgttgcccaggtcagagtgcagtggtgcagtcatggctcactgtagcctcgaattcttgggctcgagtgatcatcccacttcagtctcctgagtagctgggaccacaggcctgcgtcacgacacccagctagtttttaaatttttggtagagatgggattttcctatgttgctcaggctggtctcgaactcctgggctcaagcgatccttccgccttggcctaagcgctggaattacaggtgtgagccactgcaccagcctacatttaacttgttgaaagccattttaaattttatttttaacattgtgatattgacctggatttgaatagttccctcagcgattaaagagtatcagtgcatattgttattagtgtggtgttttttgttttatatcttgtgggtttgctggagatttttttttttttaccccatgagacagcgcatagtttttaaatttgaaactttggttcctgttttaatttcctgtgggttaccctgacctagtaaataacaacagtggtcttcaggatgaggttgactgttaagtcttaaactcttggaaagtttggttgtatggtgctcttgttacaataaatgaattcctgttataataaatgtagttaatatcaactctatatagtggctcaggtaagattttgtttcagtcagctgttgtcaaattggaagcctcactgacactgttgtcctatttgcaatttttatgtgcgtttagactgactctgaaacataatagtaaccattgatgatgcacttacaaggaattctacagagaatatttttagtaataccatacttttctaatactgtaatcgagttttcatgtttcaaagcttactgtgctttttaggaagatgaattctgttttttcaagttttgcaggatagtaaattattatggtagtttcggtggcatatttttttttcctgcctgattgctatcctttatgacttggggaaattgcaggggaattattatgtacatactgtggcatgtagattccaagaatgaaattctgggataatcaattccgttttttattttgtcagtcacggtcctggcagaagacagatggcacactcagaaagaagaaactgtggggagaggatgagttctcagtggtaggcagggatgcgagaaactagcaaagccgggggtgcactcccccaggatgaggatggcaggctacccccagggaacttccatccccccgggacctgaacgggtgaaggagaagagcagataatagatgccagaggagaaagtagctgggctaatgggtgtctggtgggggtcatggtctttgatagcagggtgcagctcactcactgcagcccagcacagagggagtcagggggttaactttcttatcctcactctcctcctcccctctctgcttgctctggtgcctccctttggtggagcttggtggaagtccatgagcaggggagcctgtagatgcatccataaatgtcagtctcctggggctaggagcaggcaggaggaggctaaagaggtgctctgcggggcaggtggaatatatccagcacacgtacataatatagactggggagaggaccaacagctgttgcagcagttcccatgtgccttgaatatctagtagatttgtgtgcttaatgccgggcacacaagatgaatgaggcttctggtggccaagtgggtcatgatgggaggttttcttggattgttggttggtttaatatctaaggatctttctttaattaaaaagcctaaacagaaccccagactcttctcggttgtattctgatagtctttattttcaagcacttgatagttactttcccatcattggaagagggtacaaaatcagaagagatccctcccaaagttaagagcccccaccttcctccccgggccactttcgggcaggaagaggacagagctggcctttctgatcagtgagcctcttcgcagcctctctgaccctggtgactcttgggtgctactgttcagattgactcaggcttcagtgatcagagtgaacccttaaaaaaaataaaatcaaaactttgtaagaaagctgcttaccattcaagaataagcaagccgtgagttgtccctaggactgccacatagggaaagacagtggtgctgaaatagacgcacggttttgttgttgtgttggggaaccgctgcactgctggaaaactcaaagtactttcctttctgttgccttaaaaggttgataacagtgccttctgtgtacttacaagtttcattatgtacttaaagggggtaaccaccagaaatgaagttacgtcctcactggggtagatggaccctacgggccatgcagaccctatccggagttgagtgtaatttacggctctgtgtgttttgccaaacaaatccagtgtagataattccagaagaatgacactgggctctagctttctctcattcattttggaacatgcgcatcaaaccaaagttctttctctgcttattccctttaaacatttctaaagtagcacacactttgaagaacctgcttcttgccaagtgaattcagaaaccttggcttccgcttgctggggagactgtcagcatgggcacagatgtgcatgagtttcccactctttgggattctgtgtgttttggtacagccctttgtgcagccgtgggaaccctctgaaccatcccaacctatttgaaaatatttctagagggctgaattttgtcatgggggcaaccccaaagacccaggtttgaagcctggctctgcctcttgctgcctcttgctggttgtgatcttgggaaagcctgtgtcctttcagagaccatttttgtagctataaatggctttaataatctcaaattccttcactgagttatttagggccacctgagatatttgatcactctttgaaatgtggtgtacaaacagatgattttttttctgcatatgtggtcacatgccagcagcacaaatacaaagttgtaataaagacaatagtgactttgactttcattcttagctgaaatgaataattaaagaaaacatgtgtgtgcacacacagtattagaaagcatttttgtgacactgctgttcaaggatgtacattttagtgcagttggataatccaaaattatttgtgatttgacttggaagtgatacagtttttgttgcagctatgcagtggtgtttatcaattccagaatcaagctgcctgcatttcaccttagacaaattcgttaacttgtctgaactttactttctgatacggtttgactctgtgtccccacccaaatctcatgttgaatcgtagctcccataattcccacgtgttgtggggagggacctagggggaggtaattgaatcataaggacaggtctttcctgtgttgttctcatgatagtgaacaagtcttatgagatctgatgggtttgtaaaggggagtttccctacacaagctctctcattctctcttgttctctgccatgtaagacatgccttttgccttccaccatgattgtgaggcctccccagccatgtggaattgtgagtccattaaacctctttttttaaaaaaaaaaaattacccagtcttgggtatgtccttgtcagcagcatgagaatggactaataacctttccttatctgtaggatcataacatatactatctctcttctagatttgttggtagaattaagtgaaataaataatgtacgtaaaatgttttggctggtgcttggcacatggtcggttgtaagttaatatgaatagttactactgccagtgctgctgttgctgctactatcactgctactaaagatgtttgtgtgtactctaagttccaagctggactgacacttaggccaggtgactcagcagtataatgagtgagttaaaaatttcttatgtataaagtctccacagataatcaaaagctggctgtttttggaaatcctaatcaataattgaagcacggtctgagagtgtggttgggaagtatccatgtgtgttcctggataacgcatcaagcttctctgcctctcccctcccccaggaagattggtagagtggctctaggagtctttcctgaggcccagctcaggactcatgacatggtggccagagggcacttcggcattgtcagatgaaacgcactgtgtaaagtgtttgttcagccagggatcttttcccctatgcctcctaatcaagtaactcttaacccctggcggagtttctctcccatagccctctcgttggctatcacgtcagttattaattaactggatgagctttgggttgactctcaggaggactgttctgtgccccaggttgcagtgagttctcagctgagctgagaaggctttagaaacaggtatgctatcccagctgcccctgtgaccctgtgtaaatcttctaggtcactgtagtagctgaggtgaataccttagtgactggggttcaggtttgtcttttgtttgcgtttgaaacagggtctcactctgtcacccaagccggagtgcagtggcacaatcatggctcactgcagccttgacctccctgggctcaggtgatcctcccatctcagcctcctgagtagctgggactacaggcgtgtaccaccaggcctggctaattttttcgcattttttctagagattgggtttcactatgttgcccaggctggtcttgaactcctgggctcaagtgatctttcctccttggcctcccaaagtgctgggattataggtatgagccactgtgcctggccagggattcggtgttcttttttttttttttgagacagagtttcactctttttatccaggctggagtgcaatggggtgatcttggttcactgcaacctccgcctcctgggttcaagcgattcttctgcctcagcctcccaagtagctgggattgtaggcatgtgccaccatgcctggctaattttgtatttttttagtagagacggggtttcaccatgttggtcaggctggtctcgaactcctgacctcaagtgattcacccgcctcggcctcccaaagtgttgggattacaggtgtgagccactgtgcccggcctgggattcgttttgatagcagaactcagcagtttctgaggtagacacacacctgccgaggtcagcagctcctaccttttgatctcacaggaacataattggtgaggagcatgggatgctgggattgaggaagatacgatgcttgggttgagtcatttaccttttaaattctctaccataggcctctgggagacgaggggagggtttctggggcaggaggccggcttgctgagccctggctctctggacagccactgggacagatagctcaggcatcagtgccttttccacgtggttgctgccactgttcccaggggccaggtcagttggtctttctgggtagattctgtttgtttaattttttcctccatccccctacccgtgaatcacagtgtgaatttatcccctgcgtccaacccccgttctgtctccctgaccctgtgttcccgctggagcactggtctggcagcctcttacctgcagttttccctggcacccctgtcctctccctggcaacctcgggcatatcctctggttcccgggtgctttgtccatatcttacccagcgctgacaagaacgctggaggaatcgataacactgacaatgttatttggtccctgcagcttctcacatgtgggtcggagatggtttcggatttatctttggagccgggtgccgccacatcagggtgcagtcggtgttagacaccctttgttgaaagggatctgcttcatggttggagtgagtgcttgttctagaattgagaggcactgtagaggcagtgtctccttaaaagtggatgtgttggttggccggatgctgtggctaaaagccaggctcacaacccaggaactcccaggaaagttccctgttgaaaattagggaagatgggtgactggtgatctcgtggccaatggccactccgcaagaacaaacaccaaacaacccagtgtctgtgtttcactgagagagaagggctcatgattatttattaaaataaaaaaatcataactgaagctctctggcttagtacacacaccctgtcactgttacctggccaggtactttgaacaacttccagttatggaaatatggtgatcaaattatgtgccaatttgataagatcacattggaacatttaaaaatagatgagtaactacggacaaccagaagataaagtggcagtaggtgggccagttgtaatccaaccaagggcatccatgtgtcaggcccacgttacctttattgccgtccataaaacctgactcgtttgttactgtgtgcagcatggaaatcaccttaaagaaagtggaggtactggaaggagtgcgcgcccagttgcagcctgaagtcagagctggctgtcagctgccccctccacttcattcaatatgcttagaaattcttttactaggccttgagctttaaaaatgaatatttatgtatttaaacacattatttatgtaaatgcaatgagtggtgaattttatttcccctcatccctactagcactgtcagcttgcctttcaaacttttttttaaaaaaggcacgaagagggcaatttaatgtatgtcttttactttaccatttatcctctttgtaatttgcttatgcaatttcgactttaagattgtgggtgtgatacaaacaactgttagaaaaaaagaggaacatgcccacgttccagacaagtttaccacatcattgtacattcctgtttcctatcaggagacaaaacttttcaaatgtgcatgtttttttctataataaagtttttttttttttctttttttgagacggagtctcgctctgtcgcccaggctggagtgcagtggtgcaatctcggctcactgcaaactccgcctcccgggttcatgccattctcctgcctcagcctcccgagtagctgggactacaggcatccgccaccacaccaggctaatttttttgtatttttcagtagagacggggtttcaccatgttagccaggatggtctcaatctcctgacctcgtgatccacccgcctcggcctcccaaagtgctgggattacagtcgtgagccactgggctcggcctataataaagttattacagaataactttatgttagttattctagttactttatgtttctctgtaataattatttaactttcatgttaaattttaaaatctctccatgtgtactttgtgtgtacgtgagagtttatggcttcatgccacataatatattgagttcatttgagtaatagtttgactctttgaagtggcatagcatggcagctattagaagtatataaaacgatccgctttttagcttcctgtgtgttttgcatgtgtttgaagtttttttaaatgcttctgtgcctctaccctttttagtcagcctatgtcatgcgatgaggtttcagatggagaagaagagttaaacccttatttgctaaaggccctcccaagacagagtggtaaaactaatttgggaggatcctaagatttagttggataaaaccgatttagctagatagtgattttaaagatgccacctctttggccttctgacttggagtatgaggggtgtgtttctgtttccttttctttattagaacttagcagtgtagagtttgacagtatttcaaagtcaatataatttggatgttttcatgatcattttatgattgatcgttgttagcgtgctagctcttgactgcttttggcacttgggaaacaatagtgtagagagtacaaaaaaataactattttcaacccaaacaaatactgagtagatctgtcagcctcgggaggtgacacactgcagatgtgtgcttcctgtagcctcccccctgtgaaaatgacattgacgtgtggtggggagaaggaggaagaagcagggctctctcaaaatagtgagtaacggaacagagattcctgcaaagcggaagctcggggaaattctgcgtttcttttgtaattcccgcccccacacaactctgtcacagcaggcttttcctagagattaatttggttttaggcaaatcatgggattattttggttttatttaggtgttgatgcaagcagattattgatttttcctgcgtccattcaaacacgcataagcacacacacataccgtccagcttctctactacagaagaagcatttacaagagtccttacaattctacccatgggcctaaaagaattccttctccacctgttccacatgcgttcccttgcagatggaggggcgttctgaggtatatgaggtggatttctgaaagacctgtggggcattaaaatcatcacagagctcaggtgtctgaatatcacataagtgacacactaatagtgatttccgtctttatagcttttagaacacatctgtaaaataatagcaagacaggtgcaagagtggaagccttttcatatctgatatttagaggacatgtcggtgagtttgaaatattctgtggctgggattatcagggactctgtatccagctcctgatgccaagaacctggtgctgtctgcagggcgccagagcctctcctccctgcctgttggtgctgatcccaggaactagggctacactgaggctcatggggccaggatcttgagaaagaaatgataacttctcttttccatctttccttctgaaaaaaaacaaaaacaaaaacaaaaacaaaacaaaaaaacaaacaaaaagaaactattagagagcaaggttggacataaaactgaaactttctctcagttattacagcaatctttttttttttcttttttaatctaaactgctggagtaattgtcgatcttgttatgggaatagacaataaggtatctagaaaaaaattctttgtaatcagttttgttctttttgcctctcttcttccctcttttatgtacttggctggttttctttttaaatttttgaagtgtaaacatttccccaatgtcgttagactgtaaatgatagaattttagaaaatgaagggccttcaggaatcagtcacttgctaaacattttgatatggaagaatatatatatatattatatatatatatatatatatatatatatatatatattttacagacagggtcttgctcagttacccaggctggagtacagtggctcgatcatagctcactgcagccttgacctcctaggctcaagcagtcctcccatctcagcctcccaaaagtcctgtgaccaggcatgagccactgcacctggccttccttccttacatattttgaagcagaggctgtaagttcatggtgaataacttggctctgttctgtttgttcttctgctagtaccacctaacttctactgtgacgtcccttgacagagaggagaattaagtggattaactgcctttcccatgctgagtatggtgttaggtatattgtatacgtcatcatcccatttaagcccaaaatgacttttggagaagatggtatttttgccaatatacagatgaagagattgtgaagctaagaggacaagtggtttgtccccagtaacacagcaagttagcagtgtagacaagaaccataccacttgatccccttgttgggagctacatgtggggattctttccagaatgttctctgggaaagtcctggcattgcctgtggcccctcatgggcacatagtcatgggttagtttgtagtatttgtctctcatgatcttgaaagagacacatgaccctgggaacttggaccccatgcaggggtttggtgggaaggccagaggaggtatggtgacaagaacccagcctctaagaggctggggatgtgggggtgttactgtggggatagcccaggtgggagctggaggggcttcctgagcaggggtgtgaggccccaggaggagctggtgcacatgtgtgtgcacgcctgcagttttaaccccttcctcccccagggctcatctcttttgtcctctgttgtctggcagcccattggccagcttgtgtaatcctttgtaatcacttcttgtttgtgttcctctagaggttccccaccttaaggaaacggaccctgcctttgtgtcacagggccctgcccaactcctgtgctgttagctctttacaagcggtgttcagggacctgcttcaaaatcaggcccaacgatccacctttcattaggcccacggaagtttgaatgggtttgtgacccactgaagtctgcattctggcctggtggtggtggtggtggaggtggtggtggagatggtggtggtggtggtggtggtggtggtggtggtggtggtggtggagatggtggtggaggtggtggtggagatggtggtggtggtggtggtggtggtggtggtggtggagatggtggtggaggtggtggtggagatggtggtggtggtggtggagatggtggtggaggtggtggtggtcgtagagatggtggtggtggtggtggtcgtagagatggtggtggtggtggtggtggtggtggtggtggtggtggtggtggtggtggtggtggtggtggtggtggtggtggtggtggtggtggtggtggtggtggtggtggtggtggtggtggtggtggtggtggtggtggtggtggtggtggtggtggtggtggtggtggtggtggtggtggtggtggtggtggtggtggtggtggtggtggtggtggaggtggtggtggtggtggtggtggtggtggtggtggtggtggaggtggtggtggtggtggtggtggtggtggtggtggtggaggtggtggtggaggtggtgctggaggtggtagtggtggaggtggtggtggaggtggtgctgcaggtggtggtggtggaggtagtgctggaggtggtagtggtggaggtggtggtggaggtggtggtggaggtggtggtggtggaggtggtggtgctggaggtggtggtggtggaggtggtggtggaggtggtggtggaggtggtggtggtggaggtagtgctgcaggtggtagtggtggaggtggtggtggaggtggtggtggtggtggtgctggaggtggtggtggtggaggtggtggtggaggtagtgctggaggtggtggtggtggaggtggtgctggaggtggtagtggtggaggtggtggtggtggtggtgctggaggtggtggtggtggaggtggtgctggaggtagtgctggaggtggtggtggtggaggtggtggtggaggtggtggtggaggtggtggtggaggtggtgctggaggtggtagtggtggaggtggtgctggaggtggtggtggtggaggtggtggtggtggaggtggtgctggaggtggtggtggtggaggtggtggtggtggaggtggtggtggaggtggtggtggaggtggtggtggaggtggtgctggaggtggtagtggtggaggtggtggtggaggtggtgctggaggtggtggtggtggaggtggtggtggaggtggtagtggtggaggtggtggtggaggtggtgctggaggtggtggtggtggaggtagtgctggaggtggtggtagctgaggatgagttttgtggaaacatgggggaacctgcggctgtgagggtatcagctcttgccccagccttccttccttccctccttccctccttccctccctctctccctttcttcttctctctctctctctcctcacctccttccgtcactccctctgtgtccctttttttccttctctctctcaccgtttttccctcccttcctctttccttcccctctttctccttccctccctctccctctcatcctttccctcctcccttcctccctctctttttacctctctccctgtcttcctgcctccctccctccctttccctttctccctccctccctccctccctttctctttctccctctttctttccttctctttcttcccctctctctctccatccctctctcttcctctctcatccctccctctttccctctctccttcctcctttaggggcagctgggccctgaggagttgagccagagccaggtccagaggaggaggcagttttggcgggaggggagggcattttgtgcagtgggggcagaaacgcaaggccagtgtgcaggggccccggggaattaactgggcactcatagtgaaataaacctaggccgtttccaggagaagccttcaagcctgccagatcctgggagaccgtggcatatgctggacagaatgacagcttgatgaggagtaccaactctaggccacctctctataaagttacaagtatcttttggtgatgaggaagtggaccatatccgctccagttcccaccatgagctcaaggatccgtgagagaacagtggcctcagaggcccagctgccccagccagggagacccttctcttatccacctctgcccactccagctttattctctaagtcaggctgttgccctgtcctgctcccttgcagtatcggggtcagggcctctcctccttaaggaaggaggtggcaggtggtaagccctttggggcaggacctctctaggaagccctggactgccataccggccggagcatctctcagtgtgcacgaagacatgactcaaagcaagtagctttctcaaagtcccatgtccttcttggcactactccagtggctggctctttgctttgttctatttcgatccttccatttccacctctatcttagtgcatctgagacaaaacgcttcttttggaccaaggaaattaacatcagactatggaaaacaaatagtcatgtgcaatttttttagatgaaatctgcatgatttcacaatttgacaagtacctattccatcaggcaggcactgaatggtttggagctcagtgtcaaggaaagctggctatttaatattttgttgccatcataataacaagagctgattttttttttttttaattttattttgagatggagtctcgctctgttgcccaggctggagtgcagtggcgtgatctcggctcactgcaacctccacctcctgggttcaagcgattctcctgcctcagcctcccaagtagctgggattataggcacctgtcaccatgcccagctaattttttgtatttttagcagagacaggtttcaccatgttgaccaggctggtctcaaactcctcaggtgatcctctgccttccaaagtgctgggattataggtgtgaaccactgcacctggcccgagagctgatatttattgaactgttaccatgtgccaagcaagcacaatattatctcctttaatcctcacaacaatcttgtgaagcaggtattattaattcactcccattttatggatgaaaaatttgaagctcagagcagttatgtattttgcccaagtccacacagctgagaaattgaaacaagactcagactcgggtctgtctgactccaatgtccatgtcagccaagtaagggctcccctttgaaagcacaataatgtgtttctcactgaccccacacatgggtggtactggcctagaacagaaagctggctgtgttgaaactgtgaaggagttggagacatgaggacccatgtattctaattaatctgtaatcacacgttcccaaagcatagaatgatgggcctttgggatgatttcatctcagcacctaatttatagatgaggaaactaagacccggggtggggagtgagctgcatgtatgccatgattactcaaggcagtgatggtaggtgcagcccaaccaggtatgtgttcttattacggatggggtaacttactctagtccgtgtctgtatcccccaatgggggtcttccttttcgaccttggagcacttgacttaggccatcatccacaccccacccatcccacaggacccagcccaaatcccttaaccctgaaaactccttctctggtttttaagtttcctaaaactgggagttgtgagtctcagtcctgggtaccagtattggagctgtagggcagtgggcagtgaactatggataatgtttttgcaaataaggtcttactgaagcccagccacgtttatctgtttacattgatggttgcttttgtgctatgatggcagagttgggttgttgcaacagagaccatgtgacctacagagactatagaatgtactttgagaagccgttggacctggccatgcattagaggacctggtaacagaaagagaagttgtttaagaaaagtttactaacccctattacagaggaaccagttgatgttaaacctctaaagccagacaatctcaggcctaccatgacatttatgagcttctgctagaaaggttggggtcaatgagggtatagcagaggggagagaggtggcttatgcagtccattcctccagatacagtcgcgcgttgcataatagcgagaataagttttgagaaatacgtcgttaggcaattgcatcatcatgagaacatcacaaagtatatgtacacaaacccagttagtatatgtttatatacatattttttcatatggaaaatcaaatgatcccacaccattactgaatatcaattacttctcctacttgatctgcattgccagtgtcaactgctgtttatcaggtttctagctctctctctctctcttttttttttttgagatggagtttcactcttgtttcccaggctggagtgcagtggcacgatctcggctcaccgcaaccttcgcctcccaggttgaagcgattctcttgcctcaggctcccaagtagctgggattacaggtgcatgccaccgtgcccggctaattttttgtatttttagttgagatggtgtctcaccatgttggccaggctggtcttgaactcctgacctcagatgatccacccgcttcagcctcctgaagtgttgggattacaggcgtgagccaccacgccctgctctatctcctttttttaagaaagagacagggtcttgctctgttgcccaggttggggtgcagtggcacaatcatagctcactgtaacctcaactcctgggctcaagcagcagtctagctaatttttatttgtattttttgtagacatggggtctcactgtattgcccaggctggtctcagactcccggactcatgctgtccttctgccttggcctcctaaagtgctgggattacaggtgtgagccgctaactggcctcagagtacattcgggagctgtcctcctttctccgtctcattgctgcccacctgaaccaacacccatggtcatcttggtcctggaccgtcatatcagttctctgcaggtgctcttgccacttccagcccatttatttctcacacagcagcaacttcctttcttctaactcatggcttattctgtttccttcctagcaggtattacagtctgtcataatcttgcttatttatttctttacttactgtgttttttcccatctataatccaagcttcaggaggtcggtctcctttttgtattgttttgtattcacaagtggacccttcatggtgcctggcatgtagtaggcaccacaggaatgaatgaatgaatgcatgagcgtatgaatgaaggaatgaatgaaggtgggtagtgttagaagcaccctccaaaatggtgtgtcagaaacatcaaaagctattgtttcaagatcaccaacacacacccagctccccactccatttcgttttcagtttttgtcttgttttaatatctcatcagctttacagggttacaattgtcttaaatatttctgaagtgtaaatatcatctgcataataaggttgttataaaatgtaaactttctgtgttgttttaatttaatttaatttaattattattattatatatttttttgagatcgagtctcgctctgccgcccaggctggagtgcaatggcacgattttggctcactgcaacctccgcctccagggttcaagtgattctcccgcctcagcctcccaagtagctgggattacaggcaccctccatcatgcctggctaatttttgtatttttgtagagatggggttttatcatgttggccaggctggtcttgaactcctgacctcaggtgatctgtccacctcggcctcccaaagtgctgggattacaggtgtgagccaccatgcctggcctgtcttaattttaaagtctaaaaatcatacttttttttttttggtccttttttcttttttctttttttttcttttcatacctgaatgttctgcacaaactgaaattgttacaggctatccctccctggccagggcagaacaggcctgggcagaggtggtgcctgctccactttgacatggggcctgcctccttatccccgttctttaggcactgccccagagccacgtgtaagtcccccactgttgctaatagggggctttcttcctcacaagtggtgagaagggggaaaaaacacaaccagacactactgtcctagatcagtggataccaaactttgttgacccggcttcccagtaagaagtgtatgttacttggtgatcagtaaacatgtatatacacaactatgcaaatacaaatttcactatatgttactgcagatatatggtagtccattctatttggttctagtttgttacattctgttccattaaaacagtgctgcttatgatccattccgttcatttcatgacccatgaatgtatctggcccacggtttgaataacaatgtttaaagtataggctgggcgtagtggctcatgcctgtatttccagcactttgggaggccaaggcagacggatcacctgaggtcaggagttcgagaccagcctggccaatatggcgaaaccccgtctctactaaaaatacaaaaaaaaaagaaaatagtcgggcatagtggcgggcacctgtaatcccagcctctcgggagactgaggcgggagaatcgcttgaacccgggaggcggaggttgcagtgagctgagattgcgccactgcattccagcctgggcacgacagagtgagactccatttccacaaaaagaaaaaaaaaaattactttttttttttttttttacatttttgctaaccatttcttcctacaatatgggctcttgtttgcttttctttttgtgcattgattttttatttttaatagagagttgatttttattcccccaggtggtttttaattttaaaagaaacttgggctcatccataattttttttactcatttttccatgtaatttttctcagttttttttctgggggtgttagtgtatatatacacacaaaaatgtgagtgtgaatacacacgcatactttcctataaatgaatattcttcgcttattattttgaattccccgacacttaatggtgtgtggccctcacagttatttatttatttatttatttattttttgagacggagtctcactctgtcacccaggctggagtgcaatggcacgatctcagctcactgcaacctctgcctcctgggttcaagagattatcctgcttcagcctcttaagtagctgggattacaggcacccaccacaaaacccagctaattatggtatttttagtagagatggggtttcaccatgttagtcaggctggtttcgaactcctgacctcaggtgatccacccacctcggcctcccaaagtgctgggattacaggcatgagccaccgcacctggcctatttcttttcttttttttttttttttttaataaaaagcactccacggccgggcgcagtggctcacgcctgtaatcccagcactttggggaggccaaggtgggcggatcacttcaggttaggagtttgagaccagcctggccaacatggagaaaccctgtctctcctaaaagtacagaaattagccgggcgtggtggcgggtgcctgtaatcccagctactcaggaggctgaggcaggagaggcttgaacctgggaggcggagattgcaatgagccaagattgtgccactgcgctccagcctgggcaacaagagcgagactctgtctaaaaaaaaacaaacaaaaaaaaccaaacaaaaaaagcattccatattcttgtcttcagatgagatgcagatatttttctaagaaagctccaactctcaaacttactacacaactataatcaagttatagccttctctctcctattaggaacattaaatgtaatttttcctggcctaagaaacttgagcattctatcctttgcatatttccatttttaaagttttcaagtaaaccattttactactccaaactgttacatgaaacccaagaaaatgcttgaaaatgcaggagttcaagaccagcctggccaacatggtgaaaccccatctctttccttaaaaaaaaaaagttagccaggcatggtgatgcacgcctgtaataccaactacttggtaggctgaggcacgagaatcacttgaacctgggagggtgaggttgcagtgagccgatatcacatcactgcactccatcctgggtgacagaatgagactgtctcaaaaaaaaaattttttttgggagatggccacaatgaactgaccaagtatggaattaaacctcagcttgatgttgacagtgcagagacctgggcaaaagactttcagcagccaggtagtcatgagtcagtgatagtagcttccctagcaagggagaagtcccagtagtgagtgtggggtgtggggttcatagaaagcagatgcagggagtgatgaaaatagagggggagctgagaatgtcaaaaagctcttcccagtgaatttgttgagccaggaccaccactgcattcaaatagatgatcattttatcttcactcgtcccatctgtttgctggaggcccttcccaccgctgctgttggagatgaaaatcaatcagatatggttcaatgaaagacattgtaagccagtttcattgtctttcttgtgtccaaaaggagattttcatgatgctgtctgccatttattgagtacctgtaggtagggccgctactgaaggtgttttatattatgccatctctgagcctcccagctatctctaagtgggtcactgttttaccagtgaggaagcaagacttcccatggcgctgtgatttgtgcagggccactcaggaaacgtctgtgtggctccagatcacctgttcttactattcttcagcctgcctctctgcatctggatcaattaccttgtgaatgtcctgcacagtcctgggggtttattctgcttagcttttgtttttatttttatgtatttatttgttttgagatggcgtttcactgttcttgccccagctggagtgcaaatggtgcgatctccgctcgctgcagcttctggctcctgggttcaatctgcttagcttttaaatggtagcatacattaatatgggtatacaagggtacagtaaacaaacacttaggttaggattaggagaaaccacgttcttggcttacggttatttccctgagaaggccaaccggttgtccttcatttctttgtcatattatttttgtagcgttaagattaaatggtcccaccctgaaagccaccatgatgagaacaaaagccattgggtttccagaattgagacaatatcattgcagaaatgtttgggtcacatgtcagccatggccctcagtgtagctattgctggtttggagccttgggtgcaagggatcagaaaggcaggtcccactggcccagggctccaccgggagcctttgatggaatcaggccagacccctactgttgacaggatttggtggtttgttttatgttttccaaatttggtagttacctgtctcctgtctttccccccaaacctctccactccttagcttttggctttcttctgcacagctcttttccaaaggaagggatgaagcttccagggcagattattgagtggcccgcctgatttacttgcaaagtctcactgctccccctgaactattctgggtttgagaatgtgtgcgtgaaaggaaaaaacacgtaggaatgttgaattttccaaagttgaaatctttcaggtctttaaacatccggttggttaaactgagaacattgatgtttaagcatagagtgtccagccagactctgacctgtgtctggggtcaggcctgcacgtgggggtgggtgactagagtggtcagaggttccagcccctggctgtggttttgagcaattctcctattctcattgcaccagaaagagttaattccagttgcacggcttgctgatgttgttgataataaagtattttaatgggctctgtgaataatgtttgtaaggaaactactcgggtgaactgatgatgaaacacagatttttttaaacttttaaaaagattttaggagtaacttgtttttacagctccttcagtgggattttcttggattgtccccttcccccatgttagttaaacagcttcttgtttgctttctaaatgttggaggacaacatcaatcttactgttggctgaaagcaggaggtgggcacgggtttatgtaatttaacttcttttctctgcaaatcagtaaatatttacaaatgaccttatcaaacagtttgggtacattcggtcacttgaaagtgtgcggccagaggaacgattgcccgtcggcctgctgccagttccggggggcctcaaaggaaggacttacatttttaaaaataggctgtccatagaccaaacgcttcacaggaagtgggcctcacaggaagcctccctctctccacagaacggttttagaaaatttgcattttaaagtttgacttctaaagattcaactcttaatggctggagtcgattgctgggaactgaggaatccaaaaaataaatagtggattctgagttgggctttaccattgctgcctgagttcttttgttgcttagggaaggtaattacagaattctattccaagagtaaatgtcattcttttgtgagtaagctggaaagaaacaaggggattacttttctgtttttataaaatgatcccgatgtcatatggttttaaaacataactaaatttctggagcagagatggacttttgggggtgtctcggccctcttttttttttccccaaactttagaaatctgacacagttaaattcatttttagaagagaatgcacgtgttcttcaatgttgacgctgaaaaacaatgagattctcattttattggtagtttgggtatgaaaattgtaatattgttgtatcaccataacctggtaataatatgttcattttgcctatcaaacataatacaagtaagattgaagtgcattttatggagttctactgtcagtataatatttaaggctggcaaacagtcaacaaatgagaagcttttaaaaataaagaagtgataatagctatacatctacttattgcaaagtacttaataattctctattaatgcctttgtattttaattttctttgcagagtattgggaaagggtcgttgtggtgcatagacccagagtatagacaaaatctaattcaggctttgaaaaagacaccttatcacccacacccacacgtgttcaatacacctcccacctgtcctcaggcatatcaaaggtaagcaattcagacttcttttttttggtctactgaaatggcattattttggcagagacctgcgcggaaattaatttaataggccgtacgagattttaaaaataactgcaggtaaatgagaaagaaattaagtattattaggaggcatatccactgttgtatttcctacaaaccttaccgctgctgcagcgtcagaggaatgtgcttccagaaggcttcatggtgggtgaaatcatgtcttcctgggtagaaacatttacaaagaaaagtcgacagctttcacatctcggtgtgtgtcatgttttgttgggataaaagtacaggaacgagtcaagcaggcaactccatcatcccctcatctggccggtctctgcagacattcagtggaggctcactcagttgtccccactgttgtctttcgcagtctccatgtagacggtgctcccaggtgaccattttgttgtggttacttggtctttgcttcttcaaggagaacagtagaaacaatagagacattttatcctcctcacatgcccatttgtttgagacagtaaggtcatgggtaccatttttacaaatatatcattggaagggagggtaagtagcctgtcacttttttaaaaagtgtcttaatgttagattccaaaagagagccaaataatcagaaccaaatttttaagatcaatttttatgaatacatagtacttgaatttgaagtgcattcctcagttctacaaaaaaatatttaaaaatgtatagaaatgtttctatcgtaaccacctagttaagaggaattatccttggactgcaagttgaggttaattagggatggcatgatgtcatagacttcaggaattttacagtccacttctttgcagattcttttcctagtctgctgtttgttctgcaggagggagcacaaagtgatcttctgaaatagcattaatgaagttcttctgcatctcagttgagaagcattccatcacaggccctagacaatcagtcttcagcaagagacagggaggaacagctgggctctctgagaagactgctgtatgtctgcctttgctaggcgattagcgtgatggtacccatagcaactggagcgtctccatagtaacgcgtagccgagacaggtgcagttgcatcacaaggctgtttgttgcctggcaaaaggacaggccattagtacttagatatacactgttgccttagaaacaaataaccttacatagcaactacagttgatttgaaaggtttggtgtgtgggggggaaggttgtagcagcttttgtctgtgttcataaaaatcagtggaagcatactttattcgaaatgacaacttgaggtcatatagctgtaggagagaaagtgggattttccaaagcagcccagccaacatagtagacatgtccagaaggacagagccatatgcttggttttctccttgtggccatagccactccccaaatggaagagaaccaggattggagtggagaattgccgatgtacaaggttggtgaaggaggacgtgacactaattattgaaatatttcccagattctcatgtttctttgtcattctacccccaccccccgactctccaagctgcatggaatacccttctctgggttttccactctgcacctcagaagtatttcatctccctttgcttctaggaagttaagaacatgagtgttactcactgggtcatgtcattggttcctttagaccagtattttgttgccaaatgtgaccccgagggaaacacagtaattatttaataattcgaaggattatagaggagctctgggggttggaacaggaatgcatattcaggcgagaggcattctgagctggccttagcttaatgacttcatttgatttttaatatagacataaaaatgcagatgaaccagagcttttgtaatgaaaatcatttccgaaggaatatttcagaccccactccgtcacctccagcctttatccccagttgactgaggggggaaaaaaaaccagtttctgcttctgcccatgcggtgcttagatttcacctccacagaggtcactggcggtggagggagatgacagatgagattctagtctgcctcttccatgccttaagtccatgagaacaagtcactttctctttcctggggactgtcatcccttcatctgaaagctgagagtttgcttcaggatcctctagtgtgtgaaattgcactgaagccactgaacactgggtaattgtacaatatttctgtgtcttaacagtgatgtggcatttggttcaattctaagccatcaggccacttgttgacatgacctagagaagatggaagtgaaacaccgagtcattaaacagggaccccaaaatgccgaattgacgtgatctggctgggtccactgtgatgcggggaatcacccgtcagccccttgctggatcgctgtgaggggtacctgggaagtgcttggctttcatggggctggtacttagcatcctgaagaagatggtgattatactagatgggcggttattgctaggacttgcaggtgtgcttggcaaatgtcactctgaactgagctgcaggtggctggaaatgctgcgggaaaagcgagacatttgagagcactgcccagaccttgctcacatccaaataccatgctaaatattgagatgtgtagacccgtgcctctgttttccttttttgcttttttttgagacggagtcttgctctctctccaggctggagtgcagcggtgcaatcttggctcactgcaacctccgcctcctgggttcaagggattcttctgcctcagccgcctgagagtagctgggactacaggcaggcgccaccacacccagctaatttttgtatttttcgtagagatggggttttaccttgttggccaggctggtctcaatctcttgaactcatgatccgcccgcctcggcctcccaaagtgctgggattacaggcgtgagccaccgcgcccggcccatgcctctgttttctaaagtgcccttttgaatgtatgttaggatgttcttccacacctgctttgttgataccaaatttgtgaattgtttttaatcgaagtgcagagctcagcgtggagtacttcaaaccaagtgacttaaacaacagaaacttactgtctcaaggttctggaggctggaagtccgagaccaatgtgtcggcagggttggttccttctgtgggctgtgagggagggtctgttccacccctctctcctagcttctggtggtttactggcattttgctggaatgcttttggccttccttggcctgtcgaaacatcactctgatttctgccttcaccttcacttggcattcgttttctccatgtggtgtctatgtccaaattttcccttcttgtaaggacacactggtcgtattggcttagaggcccatctttctcccgtaataattcatcctatttaactaattacattttcaatggccctgttcccaaataaggtcatgttcagatgtactgggggctagatcttcaatgtaggaattttggggaggcataaatcaccccatagcaacccttttcttaagggagacattttgctgatgaatatatggagaagcagaaagtaaggaaatatttaaagaacaaaatggtggggtggggggcaggggtgtcaaagggattcgcctgaagttgctcctagtagccaaagctgggacggtgatgagcagcaaaataaataacatagtgttggattataactggaaatataaaataaatacctatgagtccagactgatagaaataaatgattgaataaataaacaaacaaataaatgagagaagagacacaattcccattcagagggttccaaatgcttgatgtagctctttctccactgaaagaggtgggacggaactctccactcctggaatggctgcacttaatgacctacttctaaagatgagagcatggaaaaggttggaaaagggagtttggagtggacaaacctggtgaacagtatgccacaggtgatgaaagtaccatcctcagtgatgtgatgttgataccgggtacctctcgtaggacatcataaatttggcacttcagctttgtggtctttctccccaaactcataacccctgtctagtcatgggaaaaacatcaaacaatgattttgtccttcagcagggacattctacaaaaataacttgatcctcactcctcaaagccccaaggtcatcagaaacagggaaagtcttagaatctattacagaccagaggagactaagaagacatgatgagcaaatgtgtcctatgatgtcctggatgggatcctggaacagaaaaaggacattaggggaaaatgtgcaaaatatgaattaactgtgcagtttagttaatagtaatagtagtatgctgcatgtttatagcagcacaatttgctgctgcaaagatatggaaccaacctaaatgcccatcaacctatgagtagataaggaaaatgtggtatatatacaccatggaatactactcagccataaaaaggaacaaaataatgtcttttgcagcaatttaaatgcagctggaggccattattcttttcttttattttttgagacagggtctcactctgtcgccaggctggagtgcagtgccgcgatctcggctcactgcgatctctgccgctcaggttcaagtgattctcctgcttcagcctcccgagtagctgggattacaggcacctaccatgaagccctgctaatttttgtggtttttagtagagacggggtttcaccatcttggccaggctggtcttgaactcctgaccttgtgatccaccacctcggtctccctaagtgggattacaggcgtgagccactgtgcccggcctggaggccgttattctaagtgaagtaactcaggaatggaaaaccaatggaaaacgtatgttctcacttataagtgggtgctaaactgtgaggaaggaaaggcatgagaatgatataatggactttggggactcggaggggagtagggggaaggttgggagggggattaaggataaaagactatctatggggtgacaagtgcactaaaatctccgaaatcaccactaaagaatttatccatgtaacccaaaaccatctgtaccccaaaaactattgaaataaaaaaatagtagtataccagtgttgtgacaagtgccttattagtaatatatggtgttaacatcagggaaaactaagtgaggggtatgcaggagctttctgtgctatctttgtaacttctctttccttttttttttttttaaagcagtctccaaaatgcagactcattgatcaattttagatatcccgattgtttttggtagaatgaaaagtaaaatcactgcagcactgagagttgcctgacctactttagtgaagagctgattgtgaagggctcttgcttttgcctcattctctggaagatctgctgagccacacgaggggtctctttgtagtttggatactacagttcttggaacgttagttttgtgaaatggcactccactgtgctttgtagagtacccgtggctgagctcgggctactcatgcacaccgagccacgccagcttgcttggggaatctacacctttgccaaggagactctggcgtggggccttcggaatctagatctggaaagtggaaggaggggtggtgtgtttgggttgcttgcccgtacctcttcggaaaagtccactgagctgttctaatctttatgttgcctgtgcccctccttcctagatacgtcatttctcattaaagaatatgcgtattttaatgtttccagtagacattgccaaattgccttctgattttacactcggttctagtccacattcccaccaactttttaggaaatttctatttttctaacctttctcaatgtctgacagttaaatgaaaagacagttcctcaatgggtgaccttgactttgtgattttggtacttatagtgggggtatttaaacttcgtaacactacattaacaccctataaacagcagctctccccataataatgtttatgacaacagattgtttttagagagtgacatatatatgggtcttatgtaataccttctctgctataggcaccaatccaaagtcagtttccagaaaaacattttaatcctctctcaccatggttggagaacaggttttgcatttaatcaaacagtatggtttatggagagtttcctggatgattggttttcagagccagcgttgttttgtgtttccttggtaattccaaagaaatcccagcatcctacgtacctttggcctccatgatggattgaccatgattgggtgttagatggtcagaaactgagtgagatggtttttttttttttttctttaatgagctttccctttttttgctttaaaattttcaatgtaaaaataatgacatcatagtctatatttcatgtaaagtattgtggcttaacatgtacaaagttagaaaaatccacaagactcatttgctgatctaggtctaaagatttattttttggatgactataaaatttgcagagttagaacatttcaagaaagtttctcggctcgatgcggtggctcacgcctgtaatcccagcactttgggaggccaaggtgggtggatcacttgaggtcaggagttcaagaccagcctggccaacgtggtgaaaccccatctctaccaaaaaatacaaaaattagctgggtgtggtggcaggcacctgcaatcagctactcgggaggctaaggcaggagaattgcttgaacctgggaggtggaggttgcagtgagccgagattgcaccattgcactccaccctgggcaacagagtgagactgtctcaaaacaaacaaaccaaccaaaataaagtttcttttactctcatcttttttttttttttggaataaattccagacatttaagcttctccttttagctgtttctgtttgcttcctcagaggaatttaacgagccgcaaaaaagaaaaaaaaaaaaaaccacacacattaatggcctctccaaagattttggcctttctgatattgaggttcttaatgaaaatggcagattttagtgctgactcagcaagttctattatcctgcctgctgccctattgatgtcctttttttttttttaatttaaatgtcttcatagagtaatactgctaagggtatagaaattgtacagagtggtcactgtatattcaaattaacaaagttatcagtcattgttcaccaggtaaataatctttggctgtcatagtgaggctgggaatagtagataggggaattgcattgggaggaggtggggaaggtactgaggtgtttagggaactcatccttttagacaattagaagattagaaaatccttaaaatgttaatcttgttaacataacggtgttaattcctccactcagaatgctgaatttgcacacagcaaggaatagcttattcattgcttggataggatccaataattttttaatttataagacatctttcattctagttattcagagtgttgtgcgtttaatagttggcagaagcactgcaaagccacaatgaaatcagttttaacttacattgaaggactttaattgttagattgtggtgtcattgcaagtgttaattcagtcaagcataaagaaagattgcaaggatttcgattagttgcttcattattacaaatatatttacttgaaagcaacatatttgatggaaacccgaaatagttttttaaatgcccctcatattcaatacacttatttggataagtttaatttaaaagcgtgaggcattatgcattttgaaagattatgtttaaacagcactttttgctgggagtaatttttgaaagaatattaaatttaaaaaaatcaatatgaagcttcatggtgctaaacaggtaggagagtgtggtaaattaatgcagtaaagtagatgtgggattgaataccggggctttcaaagtggtagcacttccaaatatacattatattttgttaaaaaattggaggggatgaagaataggaaaggcttaaattgtaagggcacactctttaaaaaacacagtgctcattgacagtgggagctttaaaaatccattagttggctataattttattttcatatcaaatcatgttgtcttttgacttccattatatttcctgagttggtctcatagaataattttgttctcagcattttgccttcggtatgctgttcattatacgtttaattctgagtcaatcctgtgttgttttatttaaatggaaaacagtccctgttatctttgagcactttgtatcaggggtagctcatgaatattatgcccagtcatccaatttcattctgttttcacactcactttgaaagttgaatgtttaagtagctgggctgattatatctattttactcaggtactgagtcaaactcgtgactgagagaaccactccgagttacctttttatcttctgacctcctggggtgccctcagtccctggtttgtattttaatagccaaagcgttagaagttctttaagtctactacagataaatttccattgacctaactcctgagatgatggataccaaagaaactctgtgtttccaatacctcatgagaagaaagttgcagtgttgatgggcctagtaggtgcctggagtctttgcagatttgcttggtgagtatttacttctcgggatagccagccaaggattcctgagcacagcgacgccttaggcatcgttagagggggaagtgtctgcaaagtggggctcacctgcattctgcatatttgtcaaacccctcgccttcccagaggaggagaaattgatcctcatgttagaaataggaaaactgtcaaaagtgcatgaaatcaaccgtgtacaacgtgaaacaacaggcggcactttgtcttgtagaagcttaaaaatagcacatttttcatcaataatagaaaataaaaacctgttagcacatctaagatggtctcatagaatatttttgatctcagcattttgtcttctccaagttctggtcacactaaatacttgcaaattttctagattaacaaaggagggagattaagaagtagaggtgcagtataattagatgggaagtggaacccatcattcataaaagatttgaagaacatagaatgggggattgataaggaaagcgatcaggttggcaggggcatccatgtgttactgttgaagaacagggaatgtgtaacccgggaagagcaccttcagaaggttagcatgccagccatcctcaccatcagagaggacagatttggacttgatggatcgaagttatagaaagaaggatttggggtcaagacagaacagcatctgacagtgtgccaggcacataacagaagctgggtaaatgctagagttgttgggtgggtggacagatgaaggggatgaaggtagaatgagctacccccagggatgccagtcgaggctagacaaccagctgccagggtcgtcccaagatttaactcttactggagaactgcagggttatcgcttccagctcttgagatgttgtttctgagtttcttgggctgccatgacagtcgaggcatatccctctgcaacatggtgtttgtagtttataaggtggaaatgaaacttgagggaatagatgcatagctttgttagccagcaatgagaggtcaggctcttctcttgaaattaagtgcagatttcaagaccgtgatgggactaattcagttactcttcgttctgtgtcatccagctttttgattcatgccctacaattacctcccttgttttagtgacacttctttgcatttccttccgtgtgaataaaatgatcacggcagtgttttgccaagcagaagatcatttccaaaagctgtccatcaaatcatcccaacctcccccctattgtttatccactgaattgatgagaataacacccaccctttgcataaatctccatggaagagccaaactggtgtccttgttttgtggaagcacatgttcttggccagagtctctgatcacattcataaccttttgtttttcttacataaggttcgtgttgcattatttgtcaaagcatctctgagactctgccatggatgtgagaggtacggaaagagcgtgggaagcatcagagattccacattaattcctaacttttgctgatttttaaatcatctggagaaaacctccataaaccattgagacacattaaaaaaaatccttatcttctcaaattgagttgcttaatcaccatagtccaagttgagacatgtttcctgtgtgtttacttttaaatggaaagttttggtcaaagtctgtttatgagctgcttattccaacatatgtctctctaacacacatcagtttcccccttccctcagaacacacgccccaaccagtttgggcagaagaaaaatgaatgggaaaaacacattcagaggggaaaaaacattaccaaattttagtagctttttttacctccttcccctgcaccccccttccttcttctctttcctctctctttctctttgcagctgtgggtcttctgaatgaaagctttttgtttgtttgttttaactgtaaggagagcagagtttcttatcttaggattcttctgaactggaaattgccccccacccccaaaccctcctattcttttctactgatgagaaacacatcaagagatttccctgcatttcaagcttcccagcagagtcccgcgtgggaggtgggggttctggcctggctttggtgcattcaccagcccccaggcctccagcccaggcttagcttcacctgcatttgcaggggagtggccccgaattggtgctgcagatgggcacagcggctctgtcaccctcaggaggaggaggccagtccgaggaaacagtgaggaagcagagaaatgaaaaagatcccacagtctgaagctctcaaagcgtgactctggcttccccgcctgcccgatcctgcccgcagtagagcaggagtcagaaactctgtcctgggcctgtctcccatgagctttagtgccccagagaggtccttctgcctccccagcattggaaggagcaggatccgagagaaccacacgcttgccctggtgcagacggggactggagggtctccatgcttcctcccagctcctgcaggttggccaatgtcgcagcaggctcagagcagatcttagttaggtctagaaagaggctcaggttagagcctccctgggccactcactagctgtgtgaccttggacatgttacctgaagcctctggtccctgagcctctgttttgttactcattgtggcataagaatacttgtcttaggctgggcgtggtggctcacacctgtaatctcagcactttgggaggccgaggcgggcagatcacctgaggtcaggggtttgagaccagcctggccaacgtggcaaaacctcgtctctcctaaaaagaacaaaaattagctgggtatggtggcaggcacctgtaatcccagcaactcacccaggaggcagaggttgcagtgagccgagatcgcaccgttgcactccagcctgggtaacaagagtgaaactctgtctcaaaaacaaaccaacaaaaagaatacttgtcttaaacgagtgctttagggattaaattaagtaaaatgatgtaccaaatgcctagcccttgtgcctggcccagggaaagtcattgaatttgatttctccttcctcaccattgccactgtcttttaataattgtgcagtcttgtttctgcaaatgctgcataccaaatattttttttctttgagacagagttttgccctttcacccaggctggagtgaagtggtatgatcttggctcactgcagcctcctccatgcctccctgcccacccccaggttcaagtgattcttctccctcagcctccgagtagctgggattacaggcacccatcaccacacctgactaatttctgtatttttagtagagacgaggtttcaccatgttggccaggctggtcttgcactcctgacctcagatgatctacccacttcggcctcccaaagtgctgggattacaggcgtgagccaccgcgcccagccggctgcataccagtttggcccttatatatatggttttgtattgtgaggaatctttttatactttatgttctgtgctttcccctagatttaagatctgtgaaaaccaggactgtttgcaagttctcctggtgctataaacttcacatgtaggtgttattcaaaatatattatttatcaatgatttctcttagaatgcatagcatagattataagagtagtgaaaaatattttcctttagttgctctgggatgccagaaatcattggctaccctcctcccctttacagtcacaagtccagatgtttggagggggagggagaagctggactctatgaaagacaatttagcaattttgcagtgttggtgtttctgaccttccatctacttccccatctgtctgccaaggtccgagtgtccctctgggtatgcacgaggccagactgtttggacctggtcattcttcaagcctaagacaggctgccctgggatagaaaggttataaattccaggctgttgactccaaggcaccaaatattgtcacaggaggaaacttttttgcagctgctgtagaaaatgtaaacgtggctgggcacggtggctcacgcctgtaaccccagcactttgggaggctgaggcaggcagatcacctgaggtcaggagttcaagaccagcctggccaacatggtgaaaccccatccctactaaaaatacaaaaattagctgggcttggtgacacgtgcctgtaattccagctactcaggaggctgaggcaggagaattgcttgaacctaggaggcagaggttgcagtgagctgagattgtgccactgcactctagcctggtgacagagcaagactccgtctcaaaaaaaaaaaaaaagaaaagaaaagagaatgcaaatgtgctgacggtggtgcaggccaggaattgctccagctttgtcttgttcattattcctttgaaaagaagcctccctctgctcctctgtacatttctgcggaactggcacttgaaaggtaaggcgccggagctctccctgccccagtcataatgggaaaagttttcaccccaggccagcccaaacactcaattgtgttctttctctaccagatacataatccgtgtttaaatctcttggcagtcactcattagtttttttcccctacattcttttcttctttgatgagaacaaagcccggctcctcccagctcccaatcttgcttttctctcccaggaaatctccctgtcgcactttgatcccataggaagaaagtcacccaaatgctatccttctctacctgctaaaagaggaagatcgcaattctttgtactaccaaatctgtgtgcagaactcacaaatctgtggtgccagaggtcctgatttttctggaggcattctggcggcataccatggcctgactacctaaggacccctctcttgggcacctccccctccctgatttttaatggattgttcttgagaaaggaaggattggacatacggtgactccaatggaattttattcttattaaagccctttgaagttccctctttctaacaccaccctttcttaccctcaccccttagatgtggcatgttccatcatcagagttgttgaagttaaagttataggaaaaccaacctgaatttctctaatacaactctttgatgtagagtaaaacaaaaatctatttccatccgatattctaggcttctaagaaatgaactatgaaagtaagctgtttagcactataggactgtaaagaattttaaatttattttattccatctgctttggactccaaaccattctggattttgattgagaggcagaaaaccaagcatttattgggcacctactgtgtgtcagacttggtatacagacagcatgtgagaggctatcacgtgcctataaagagcaggtcacacagcttgcagatggctgagctgggacctgagccggcctcatctgactgttctgaccccatagcctgagttcttctcaaggtaatttgccaccttgtggtcactgtcttctgcagaaacattcttcgatgagctttggaaaggaagaatgacatatcacttgttaaaaaggaatttagggtttgtagcatagtgagagtaagagagatgggaggtgagagttcctgccattggaaactggcaatggtgaggaaacaatgacaattagagggagagccatggaaattgatgggggaggcgtggggaggaagcagagaggattctgtgtggatggatgaatggatggatggatggatggatggatggatggatggatggaggcaccgttaggagaatggggaaggggtgactaaggattatgaatgtgtgtgtgtgtgtgtgtgtgtgtgtgtgtgtgtaaggatcacttctgttttagacaaaatcgaaaagcgaatgtagggtggggagaatcacacaatattttagggattatttatacgtttgtttaataagaaaaaaagagagtcaaacctcaccatattataaagctttcttgcccatgaattcttcttagagcaaatgagggtttcctcttgttttgttcctcttaaactctcagtcattttgggaataaatgtctatacttcagctatctttctaatcatttcttatatgtatttgtttttgatatgtctgtagggagaactgacaaggactctcaccatcttttgaatttagtttttttaaaaaaaattattgttgttagagcaacatattttgttaacattctttaaaaatgaaaatctctctaaccaccgtcctgaatctctaatattgtacacagtaaatatttgtgaaataaaaatgaatagatataattagcatccttttatttgatattgaagtcataaaatggattaaagacacagggttaattttattttgttaaggaacaagcagtgaagattcttccaaaaatgcctggctgatttctggttgacccaagtgtataaaaattaagctctaaataattatcaaaatagtgtctgtaaatagcatatttgctgaggcaagacttagatcgtaggaatgatgagcactgttggtcattttggctgtgccaagttcaatagaccacttgtggccaaacgctacatgtgaggatgttttcagtaatctaagcaggtgtaggaatgacactcagtttgagagactcaactgaaagtaatgtgctggaccactgagttgttttacaattagtcttggaaaacttgggggtttttggtccttctgtgcccccagctttattgaaatataattgatgaataaaaattgtggatatttaaggcgtacagtgtgatgttgtgatacacacattgtaaaatgattaccacagtttaacatatctattacctcatatagttaccatttgtgtgtgtgtgtgtgtgtgtgtgtgtgtgtgtgtgtgtgatatgaaaatagttaagttctactctttttcaggtctgtaatcccagcacttggggaggctgaggcgggcagatcatggggtcaggagttcaagaccagcctggccaagatggtgaaaccccatctctactaaaaatacaaaaattagctgggtgtggtggtgcacgcctgtaatcccagctactggggcggctgaggcagggaattgcttgaacctgcgaggcggaggttgcagtgagctgagatcgcaccattgcactccagcctgggtgacggagcaagattctgtctcaaaacaaggagcaagattctgtctcaaaacaaaacaaacaaagaacaaaacaaaacaaaacaaatctactcttttattagcaaatttaaagtataaaatacagtattattaactgtagtctctgtgctgtaaattaggtctctagggcttttattttattttattttattttatgtttgatgaagtcttgttctctcacccaggctggagtgcagtggcatgatcttggctcactgcaatctccacctcccaggttcaagccattctcctgctccagcctctcgaatagctgagactacaggtgtgcaccaccacacttggctaatttttgtatttttagtagagacagggttttgccatgttggccaggctggtctcaaactcctgacctcaggtgatccacctgcctcatcctcccaaagtgctgggattacaggcgtgagccaccacatccagccaacttactcattttataactgcaagtttttaccctttgaccaacatcatctcgtttcccccagcccgcctcactccccaaccccaacccctggtaaccacccttctattctctgtttctgtgagtttgcctttttaaaattccatatataagtgagatcatgtgctatttgtgtttctgtgtctggcttgtttcatgtagcatgatgtcctctaggtccatccatgctgtcaaaaatggcaggatttccttcttttctaaggtcaagtaatattcctttgtgtgtgtgtgtgtgtgtgtgtataccacatttatatacatatatatatatatatatatatatatatatatatatatatatacacaccacattttcttcattaatttatctgtcagtggacactttggttgtttccatattttggctattgtgaataatgctgcaatgaaattgagagtgccatgcagatatagtatctctttgaaatagtgactttatttcctttggatatatacccagaagtggaattgctggatcttatggtggttctgtttttttttttttttttttttttttttaatagtctctctgtgttcacccaggctggagtgcagttggcgccatctcggctcactgcaacctctgtcaagcgattctcatgcctcagcctcccagttagctgggattacaggcaggcgccaccatgcctggctaattgttttgtatttttagtagagatgtggtttcaccatgttggccaggctggtctcgagcttctgacctcaggtgatctgcaagtgctgggattacaggcatgagccaccacacccagctgttctgtttttaatactctaaggaacctccatactgttcttcgtaataggtgctgagccttttttttttttcttttgagacggagtctcgctctctcacccaggctggagtgcagtggcgcgatcttggctcactgcaacctctgccctctgagttcaagtgattctcctgcctcagcctcccgagtagctgggattacaggtgcctgctaatttttttttgtatttttattagagacggggtttcaccatcttggccaggctggtcttgaactcctgacctcgtgatccacctgcctcggcttcccaagtgctgggattacaggcgtgagccaccgagcccggcctggtgctgaaccaaattacatttccaccaacaaggtattagagtttccttttctccatgtcctcaccagtacagacagtctttctgatagtagccattcttacagatgtgaggtggtatctcattgtggctttatttgcatttccctgatgattagtgatgttgagcaccttttcatatacctgctggatatttgtgtgtcttctttagaaaaatgtttattcaggttctttacccatttttaaactgggttatttgtgggatttgtttagttttttgttttgttttgttttgctgttgagttgtatgagtgcctttctattgtggatattaactctttattggttatgtgctttgcaagtattttctctgtcctgtaggttgcctttttcattttgtagactatttcctttgctgtacaaaaaactttttagtttgatgtagtcccacttatgtttgcttttgtgcctgtacttttggtgtcgtatccaaaaaatcatcgccaagaccaatgccatggagttttccccctttgttttcttctagtttaacagtttcaagtcttaacattgaattaaagttttaatccatcttgagtggatttttgtctggaaaatttcgttttaacaaagtctttagaccagcattaagggacaaggagtgaagcatcagaatcacaagagggactttaagaaaattatatagggtgttgatggtgggagaggccatggagaccggggatgggggtaagggtatatgggaactgactgtactttttgctcacttttgttgtgagcttaaaatttctcttaaaagatgaagtctgttattaaaatatatgtatataattttcctgaccctggagagctggatatggtatttaaaatcattgacttagtgagtcatagttaactgtgcagggtgtctgcccctctctgcgctgttcaacagaaaatacatgttgagaattagtgtcttaatcatagaatattgcagcagaaaagaacctaaaatcacccagtttagagtccttaggtgggacaccacatgaacagcttcctggggttgttaggactttagttttgagtatacatgaagttgcccgtggtcaataagtttgggaaacgcagctcattataacttctttgtagtaagccaaaattaagatatttcctacattttatcaaacagacattaaaaaaatcacagcacactgatcaacatattccaaggaacaccaatttgggaacaagtaatctaaaataaagattaccactccgtaatgggttatgaaatcaatgtaggggttacaactatctttttgttttacaaaaaataatacagtagaataagaaataccagagtgcgttgcacagaggaggctattattttgtgaaacctttgtttcagttatgtatggtatatttgtgtgaactcagtcagaatgaagcctatttgttactataaatggtggccaaaaatacgctggagaagactggtctgattcagttcctcaattttacaactgaaaacacagaggagacccatgtggtcctaagatcacacggggagttagtaacagattgagtctgagtctgttcttcatcctcagtccccttcaccactgcttttgctaaatccatagaccatcctgtttaaaaagcaacactcagggaaacaacgcaaacgtccatcagcaggtggtggatgaacaaaacgtgtcttgtacagacaatggaatattactcagccttggaaaagaatgaaattctgacacaggccacaacatagatgaactttgaacattatgcagagtgaaaaaagccagatacaaaaggacaaatatcatatgattccacttatatgaagttttcctagaatagacaaataacatagagacagaaagtggattagtggttaccagggcctgggggaaggtgggaatggggagttagtatttaatgtgtacagagtttgggatgatgaagaagttctggaaataaatagtagggatggttgcacaacagtgtgaatacaccaaatgccactgaactgtatgtacacctaaaaaattgtttaagtggcaaatttcatattttgtgtattttatcacacattccaaaatgaatctaggcgcaaaagaagaagaggaaacagaacaacgtagcatttcttgtagacagacctcatttcacattccagcagccgtttattccttcagcctaccccttggtgggcccaggtcctgaggattctgaggcaaacaggacaggctccctggccttaggaatccatggaaccgactgtggccaagtgtggccttgattctggaatccctggcaggtgatgactgctggcatttccacaggtgatgcattttacagcagcgagtgatgcttagccaatgacctttcatgtgctaatagctctgatttttccaattgcagcatttggataaacccacaatttgcttttggaatgccaaggaaaaacatcgtttatggtttttcttttggtctcacccctttcatcagttggtctttagccttaacccataaacaaatagccttttctctctttactcttccctctttctttgcaagacctccaggctccctgcaaatggcaattcaagcgacatgctcctacccacaagttacagtgattcacgctggctccattctgtactcttgcttcacatgtttggatatgagagtcagaagactcggggtgagccagaaatgaggtcaggggcagctgggtagcagaagcgggatgtctgtttctttcttgtagctgacttaagatttttgatactcccagtgcagggcaatttctgcccgtacaagctgtggcagataggagtctaccgctggctctatttgagggcattggagatttcttactacctggcaggcacccctgtgcttctagcccctccactgttattgacaaacaggtttgtgcttccagccaccctgtcagaatctctgcagccctcaagtcagcagcagcattaaaggaaacctggaggatgtctctctaactccaccagtgaaaatagttaactgggcttactgggagctaagaaaatagtttatttttatgttacattgaactttaccacaaatggcgggggagcagggatggctggcacacatcatgataatgatcttgaaaccgttagcatagtctgtgagttttaggtccacccagggtttttccgccttggtactattgacatttggggccagataattcttttttttttttttttttttttttttttttttgagactgagtctcgctctgtcgcccaggctggagtgcagtggcacgatctcggctcactgcaagctccgcctcccgggttcacagcattctcctgcctcatcctccctagtagctgggacaggtgcccgccaccacacccggctaatttgttttgtatttttagtagagacagggtttcaccatgttaggcaggatggtctcgaactcctgaccttgtgatccgcccgcctcggcctcccaaagtgctgggattacaggcttgagccaccgcgtccggcaggggccagagaattgtttattgtgagaggctgtcctgtgccttgtaggatgtctggaaacatccttggcctctacccaccaggtaccagtagcacccccacccaccaccaagttgtggtgatggaaaacgtctgcagatattgccagatgttccctggggagcaaaaccaaccccagttgaggaccactggcacaccccaaatcccttctgctatgttccgagttttaaatgttgaggactttttccatggatattctggaaataataatgaaaaagagcttggggttttggtttgattcctgctttattagtattaaagggtgtgtaagcatcacagcctgggaaaaattaacacctactatctatgtcagaatgaatctgttacccatgtactaggcttggttccgtgaggggtgctatatcttgggcaacatgatttctggtgtggtccagctgccgaagaattgcacagtggtgagggtcggtggcctctcttatatcatctactttgctgtatttcccagatggcaggccgaggccttgcatggttataagctgagcacaggagcaggtaagctgagatggaggaggcctgcatccgtggcctctgagtactacttgtcctcttttccttctgtgccagtcccatggctgaatgacataggcagcttatttcattgcacgtcttatatctttctcttccacatctaaatggaggatggtacctgctctttatcttgttatcacctgtcaagctctacccttgtcgtggtgtcagttatttgagatcatggaattatctgtgatgtaattacctgttctggagccccagatggattcctaagggccatcctccaaaaagccaagcctccgtttccctttgaggctgtgctagtgggaatgtgtctttgcccattcatctagtgctgctggtgggaatgtctcttctcctattcatccagtgctgctggtgggaatgtctcttctcctattcatccagtgctgctggtgggaatgtctcttcccccattcatccagggctgctgttgggaatgtctctttaaccattcacccagggctgctgttgggaatgtctcttcacccattcaaccagggctgctgttgggaatgtctctttacccattcacccagggctgctgttgggaatgtctcttcacccattcatccagggctgctggtgggaatgtctcttcccccattcatccagggctgctgttgggaatgtctctttgcccattcatccagggctgctggtgggaatgtctcttcgcccattcatctagggctgctggaactcctgtgtgccatgctttgtgcgggttacttgggatccttgatgactgagccaggtttcctgtcatcagagcgtacacctccagttagaaagatggacttgtaaacaaatctaatgtaacatgagacttgctttcggtcatctgtacaaaagtgctgtagtttaacgatcctggctgttttgaagctcttcccaagtattgaagtactgaaacacagtggtgacattttggaaggcattagcctgtggtctgggagaatgctatttgggagtctgaaaacctgggtttttagtgttgacactggccctgattagctgtgtgctaattcctgtaaacctgagtcacttcatcttaatggacttccctccctaggtttataaaatgaggtggttgggctagatcatctctaacgttccttctgattctggtagcctctgcttattataatgtttaaagactggaaacttcgagattagccagcctttgtgaggaggatttattgtaagtttttaaagtggcttccctgctcatttgtgcctttggggagacttgggcaactctggtatggtcagaagcctagcaacactttgaggccccatctgaggggtaaactagtagtctgaaagactaaacagatgtcttgccctgaagttccagaagaaagataccatctgtaaatagcctcatcaactttcatagggcttttggcgggtagaggtgccttttaccattatccttctgtccacttgtggatttgtataaatccattaggttaaaattatccattccttttgctcttgaagctgtaggtcagtttcctgcccagtttaaaccttgtcgcatacttgtcacttttaaattctgtaagcaccatcctcagcattccagggctggtaaccccaaagatggcagcagccaagctcctagcaaggggcacccagtcagggataagatctgtagtcgttaagcacatcatataataatggtagataaatatttggagcattcttctctccttagtgtacttcttcatatttcagttgctttgtatataaatctcaccttttctaaggaaacattatatgatctctcactgcatgtcataataagtttcccggaccacctagatgatacttggcaattatggcctcatgttgtggtcctatgtgtacatgtgctttttctctttcagaattggactcatctcttggagccaatgattgcatctaatcaccagcaaagaccccacagctgggttgggtggtgcgtgtgtgagcatgtgtgtgtgtgcatattacgtacccgggaaatgttggcgggatagatggatcacaatgtcaggcacgggaagcactcaataaatagttgttgaattgtaccgagttgtagtggctaaatatttcatggttctctattcttcctactttatgccacttaccatgggctagaaaataagatgaagctgtgtttgcattgaatagtggtaagtggttgctggttgtctgaagagtcatagagcttttagtggttttacagctctgattctttttttttgacagcaatgtttactatttctggccattatgtacactaatataaaaatttaattagactctttcttttcaattaattattacagccctgtttgtttgctctctcgacagagcctgctttatgggaacaggagagatcaattttctatcacaaaattcattacttttgactaaagtccagtgcgcctgtgagtgtgtgcaccactcttgatgacttcccgggcagccagaggattgtggattctgccgagtattaaagtagccttggtgaagggatgcttttgattcaagaagagtttgatttgatcattgtccttctcaaagcagcacatgaagcaaaattaaaattctgtacagttcctggggttgaaaatatacttgtgtcttattcattcctcatgtttaatattttcttaagcatccagagagttggaattgggtatagatagaatatgtaaaggcttctgccttaggaaagctattttctttgacagcacctataaaagaaggtgtgtgctctgggagggcagggacatggtaggtttgttctttacttagctccagagcccacacagtgcctggcgcttggtagctgttgagtaaacgtttgttgaatgagaacgcatgagatacaatagttttgctttacatcattgataaaagtgttctttcatcaccggtaaaagtgttttctggattaaaagttctctgtgcctctgtctctaataattccccatgattaatgtcttagatggagctgttttcagtgttgggagacgccagacctgtgttgagagtgcagccatgctatcttacttgacaggacaggggctaggcttggtccccaagaggcacaggtaatgcccagctcagttcattgagcccccaggggcagagcatcatcttgggactcacacacatcttgtgcagttctatacctgccacttcactagctctgtgatgtcagggcctgcagtgtcacctcttctgttctctgttcactgatctgtaaaactgggccagtagtgtctaccacccacaatgggtagtgtctattcaatgagatcaccacaagtcatgtcctctgtacagagatagttcaataaatgtatctgtttacaactcctttcccttcctgtgatgtttccctttaacaaagagggtggttctccaccctccatttagaactgtttcacctcttactcttgcatgagatagggaagaagaagaaagggccccagtagcctcagtctctgggtctctgacatgatacagtgcagagttagaggttagacctgtgtggtgataatggtggtggtgatggtggtggtggcggtggtggtagtggtggtggtggtggtggtggtggtggtggtggtggtggtggtggtcgtggtggtggtgttggtgttggtggtgttggtgttggtgttggtgatggtggtggtggtggtggtcgtggtggtggtagtgatggtggtggtggtggtgcatgtgtgttggcatgggcatgggagcaggagcccgaagaatagcatagctcagcagaactttctgcagtggtggaagtactctgtgtctatgctgtccgctgtgtagtcactagccacatgtggcttgttgagcacctgagatgcacccagtgtgcccatggaattgcatttttagtttcctttagtcttcatgtaactaatcccatgtggcaagaggctaccatgttggacagcgccaccctagagccttgctatggcctaaggatgtgcaacgtgtgcgtttcctgggagcctgggagaaatgcagaatctcagacgtcaccccagacctgctggatctgaacctgctttttaatacaatctccaggtggtttaagaaacactgggccagccttgaaacctctcagtgtctttccagagacttccaggcagttgtgctggtcaaggatggaaggttcttgctgtcttctttgccttctcagctgttctcacaacctgctgtggttttcaggggacccatgtgtgtgggtccctgtggttaagagatcaaagaaaaaagttctgtagctgtcatcttaggatgaaacgctgttttgtgtattcctcctcataaacctccttaatctctgtattcctatattctctccccaaagggtagctctgctgttattttctcatgtatcctactgccgctttgttttccctgctagtaaagatgtgggtacatacacacacacacacacacacacacacacacacacacacacgcacacacttagctgtttcaaaccaaatcagtatgtttaggctgtggttctcttaatgcttcccagcactctggctagtgatcaatatttcaaaagcctaagtagcattttctctttaagtgaaaatgtccccccacctccctgaatgtattaataatttctattccgtaatggtgctaatttaacccatcaaaaacaatagttacagaaaactttgcagatttctttgatgcccattggagaaatcactttagctaatgggcgtgttgcttggctattactgatattcggcaaagctgggaattggactatatgtttaattattttggtggatacttttcattcttgaatggctcacagacatcacatggtggtggcttagatgttgtctatatgatgtctgttgcaggttgcaacttaagctgtatctgaggagttgcccagggcaccacaaggaaactgaagcacaaaggcaccacgctagaggtccctgcctctaatgagtctctaaaacacatccaaggttacagtgctagtaaatgacagagccaaaacttggacccagcagcatggttccagtatctacacttcaccaccacccccaattgcctttgctctctgtcaggaactggccccctctgctacccactgtgcctgctcctttagatcgatgttgtcactgccatgggtcctctccgttttttgtttgtttgtttgtttgtttgtttgttttgcgatggagtctcattctgttgcccaggctggagtgcagtggtgtgatcttggctcactgcaacctctgcctcctgggttcaagcaattctcctgcctcagcctcctgagtagctgggattacaggcgtgtgccaccacgcccagctaatttttgtatttttagtagagacggggtttcaccatgttggtcaggctggtctcaaactcctgacctcgtgatccacccaccttggcctcccaaagtgctgggattacaggcgtgaaccactgtgcccagccgggtcctcttcttctttgggacctctccttctttgggtctttgctcaggtgtcaccttctcaaagacacctaccctaaccaccccttcaaaatactcgtgccccactgtcattctttctttctttctttctttctttttttttttttttttgagatggagtctcgctctgtcgcccatgctggagtacagtggcgtgatcttagctcactgcaacctctgcctcctgggttcaaacgattctcctacctcagcctcccgagtagctgggactgcagttgcctgccaccacgcctggctaattttttgtatttttagtagagatggagtgtcatggtgttagccaggatggtcttgatctcctgaccttgtgatctgcccaacttggcctcccaaagtgctgggattacaggcatgagccactgcgcccggctcccactgtcattctttattgccattgcctttaagttttctccttagcttttattaccacttgcacattatgtatttgttttatgtaaattccttgagagcggggactttcttttgctctctgctgtatccttaggctttggaacagtccccagcccatagtagcacgaggctggtagttttgaatggatggatggatggatgaccttctaactggatagctgccattgactcccacttggcctccttcttgcctcttcctggtgtgcctctgctgtacctggctagtactcagcgagtattcagcatggtgattcctccgaaacatctgtttgccctgacagttccttgcagagaagcacctcatatgactcttgactgccccaccggtccccttctcagccttactgaatgtccttcattttttgactatgccaccatgttgctccctcttttctctgttcttccctctgcagccccctccagacaagaacactatgtccttgtgtggcccaagcatattgtctgtcctggcatttacactttaaaggcatctcttctcagtagactccaagttgtgtgagggcaggagcccgtatcctctcttgttccccttcatgcccccaactttaccttagcacctggcttcataaccatctactgatagatgaatgaagccatttaattgtatgggtagaaccacacaaaatatgttggaagcaagtctcacttctctggaattaaatgtttctttggcactacgagatcttactgttcaagctgtgagatttaaagggaaaatgcttcctgctaattattaacagttgccctgtaagagcagagccattatggggtcccgaaccctggcatgctgcccctcccagcagtgagcaacggcagcaagccgggaggaactttaaggcaactgtggccctggcacccacggacctcagattacccaaagagggttgcagtatcagggccagtggagtagggagtgggtaaaaggatttgaaatgagattataggacctaaaagattcttgcttttgttcaggaaataatttaccggttttctttaaggcagtgagacaatccagttgagggtctggagtggtagatcattgccgtgggcctcttcagatacttaaaaataagttgatctgtagttgtgtttgttgggcttcttgtttgtttttttatttaaaaaaaaaaaaggaaagaagaaagacaggaatggaaagaaaaagaaactcagttgtcaagtactctaaacaaacaaaattgaatgcaagatctattaagagaatacaaagacaacctcttttgaaagaacgtctttggccagtgtgtcttcaagccaaagtctagaaagtgaatgggaagtgtgatcagaatacaacttcttaatttttattttattttatttttttgagacagaatctcactctgtcacccatgctggagtgcagtggctcaatctcggctcactgcaaactctgccgcccaggttcaagcaattgtcctgcctcagcctcccgaagtagctgggattacaagcgcctaccatcgctcctggctagtttttgtatttttaatagagacgggttttcaccattttagccaggatggtctccatctcccaacctcgtgatccacccgtctcagcctcccaaagtgctgggattacccagcccttaatttttttttattttttaatatattttttgagacagatttgcccaggctggagggcagtaacgcaatctctgctcactgcaacctccacctcccaggttcaagcgattcttgtgtctcagcctcccgagtaggtgggattacaggtgcacaccaccatgcccagctaattttcttgtgttttttagtagagaggggttttcgccatattgcccaggttggtattgaactactggcctcaagtgatctgcccacctcggcctcccaaagtgctgggattacaggcttgagccaccatgcctggccaattttttaaaatttcaaaccccaagaagaaggttcctttccccttgaccccaactccccgcatataaacagttcataaaaactcctcagagtcagctgggtgagaatcgcgcagccatgctgtctgccgtttgtgttgggttttatagccagcataacagttctcttaatactttaaggcttttttcacttttgatgcttcctgggaggtatattttgtttggcatttagcccaggtgcctctgaaccctaaatctcagttagcttctccttcctcatgctatcagccttcctgctttatctgaagtttgtattgatgtgaagtggctttttgtctttatcagagcaggacttctcattcccctgagtgtgatgaggagacccatgaggggtttgtctcactgctgataatacttgagtctgattcttgcaagatggttggggattagctatctcaccgaggtatgcaagaggataccaggttatgtgaaaacttaaaggatatcaggtttatttagcctctagcaagggaccagtgtgtgggtgattctgcggaaaatatttgagagattttcataccatggaatcctgagttaacacaaagtttgggaaacaggggtaccctggttacaaaccttttgtttgaacttctattattaaaaatacattccaaatcaatgggtctgttttctgccaatagatagaatacgctgaatgaatacttgatgtgttggaggacactgaattttgcccttcagtgttcactgtgtaattatgttgatgtaaaatacgtgcccacccttgggaggctgcaagagatgatgattttgaataaattccatatatgagcctctgactttcccctttttcttaaaaatgaagtactgtaacctctatcttccccttcccggctgcccgcaaatgttttttatttgaagttgggggctagttaggtttcagttaattaaagttttaattgtgtttgattctgcagcagatctgatgtttacctgtcttagtaatgaaatgcaaagcgtcatccttgagcttccgctcttactggatggcaagggaagtaccagcaacctcgagacctattagccctggttggtgatttgtaatatgttgtttatttttgatgttatattcaaatatgagaaaagtattgactcaagtttaatcatctgaacattactcaaggattactatcttgtataaaatctgagcacttggatgttgcgtgtaagacatcccatgtataaaatggagctacatcatttcctccagtgcagaagattgaacatagcaagtctgagggttctctccttagaaagttctgcttgcaaggttagcccttggttggtgtctgcaaatttggatttcaggagggttctcagcactcccagacctagaagtggggctcctggtgcctgcatcgtttgtggaaacactgtggttggtggaagaagtctgacattttggtgtgctctaggcatagggtgtctacctgaagagtccccagtaaaaatcttgggcactgaggctctgaggctcttcccttgcaaacagcacttcatgtgtgctggcaggatgtgtagctggggaagcaagtgcattctgtgtgactttcctgggtgggggcttgcatctgggttcctctggacttcacccccatgcaccttttccctctgctatttgtgcttcatatccttttgctgaaataaatcatagccatgagcatgactgtacgctgtgtcctgtgagtcctcctagtgactcactgggggtggtcttggtgacccctcacataccttccaaagctgttctgcctcttgaattttcctgcctcctcaggtctttctcttcaccccagtacaacccagtatccaaagtcagcaactcagaattgtctttgattcttcccttgactcaggtaccaacatcctattgattttgtctcagaagtgtcctcttgggcccaggcccctggtggcctttcctgttggcccagtctgggccctcagcacctcatcttcacactccctgcaatagcttctctgtctggtgtttctgcctccgttctccattccagcccgtctttgatgtaaccattgtttagtccaaaacctaggttgagttgacattgcccatgaaatagaatacagatgcatcgggtcggcggcttcatctggccacggtgcaggaaggcagggagaacccggatttgagtggtcagctccaccagtcactgctgcgcacaaccaggctatatcacctgtctgtgcattagtgtccttgtctgtatctgaggataaaaacactgcctttctcatagggttgatgcaaggattaaatgagtgaacatttaaaatccttagaacacagcctgacacataaaaggtgcttgataacggttagccaagattatgttttataattatttcttggcattctcccctctgggctgtgagctgcttcctgtattgtgcctggctgtagctttttaataaccaattgctgaatcaatgaatgagagaaagaaaaaggggccgggtgtgttggctcacacctgtaatcccagtactgtgggaggctgagatgggtggatcacctgaggtcgggagtttgagaccagcctggtcaacatggtgaaactccatctctactaaaaatacaaaaattagctgggcatggtggtgggcacctgtaatcccagctacttgggtggctgaagcaagagaatcacttgaatctggcaggtggaggttgcagtgagctgagatcacgccattgcactccagcctgggcaacatgagtgaaactccgcctcaaaaaaaaaaaaagagaagaagaagaagaaagaaaagaaaaagggagggaaggagggaagattaaaacatagttactactctaaagaaacttactggctagttgggggatataagatgccctaatatagcagtccccaacctttttggcaccagggagtggtttcatggaagacagtttttcagtggtaggggacatagttttgggatgaaactgttccaccttggatcaggcattagttagattcccataaggagcgcgcatcctagatccctcacatgtgcagttcacagtagggtttgcactcctatgagaatctaatgctgcagctgatgggacaggagggaggcgaagtcaggcagtaatgcctgctcgcctgccgctcacctcctgctgtgcagccggttcctaacaggccccgaactggtaccataagaggttcagggaaaggagggatttctatggggggggaaaggaggtaggttcaattgttgcaatcaaaggtgccaaactcctatttgtcaccatttcagatcccacagagaaagaggagtgtcaggatccggtgtgcttctaagagacagtcgtataagtgaagtcttcctgcgggaccctacactttacccctgctgaaatttgcctttccctcaggtgacattttgagctgcttaacaggaaacaggcactttcagaagtacaatgactgtctaatgatttctgagtgattccctccagggtgtctagatttcttcctggctctcagaggtagaaggaactctcagaggacatttacctgtcagctccagcactaacacccagaactcttgccttctaaaacatcgcaggaagtggggtggctgttcctgaagctggcatcactgagctggtaggaagagttaccttgagtgagctgctgttgaatgtaaaacagctgtgccatgtgcagatgatttcatcctatgagcttcctcactcactgtcagaggccaggctttataaagtattgtcaattgcttttactgttttacttattttttgtttttttgcattaggtacccactaaagtcacctgtcaaactacatcttgaagccaattgcagtcttgaaatcctgctttgtggtgcaggttctactgcatagaatgttatatgagttagctcctgctgctgatcaaacacctcaaattaatggcttaaaagaatcatcattggtggccgggtgtggtggctcactcctgtaatcccagcactttgggaggccaaggctggcagatcacctgaggtcaggagttcaaaaccagcttggccaacatggcgaaaccccgtctctactaaaaatacaaaaagtagccaggcgtggtgataggcccctgtaatctagctactcgggaggctgaggcaggagaatcacttgaacctgggaggtggaggttgcagtgagccaagatcgcaccattgcactccagcctgggtgacagagcaagactccatctcaaaaaaaaaaaaaattcatcataggctgggcgcagtggctcatgcctgtaatcccagcactttgggaggctgaggtgagaggatcacttgagcccaggagttcgagaccagtctgggcaacataatgagactccatctctatattaaaaaaaaaaaaaaaagtagttggacatggtgacacgtgtctgtagtcctaactattcaggagactgaggtaggaggattgcttgagcctgggaggtcgaggctgcagtgagccatgatctagccttggtgacagagtgagactcaaaaaagaagaagaagaagaatcattgtttgctcagcagttctgtatgttggctcagcttgaatggctcatctctattccttgtggtgttagctgggctcccttgtatatttggacctcagctgggatgtctgggacagctggggcctgtctctgtggggtctcacatccttcaggaagcgattccaagctttttcacttgatggcagaagggttcccagcaacaagagaaagcaagccccaatacacaatacgcaacagtttctccttgtgtcatatttgctaatgtcctattggctgtagcaagtcaagaggccaagccagattccttttggcggggaccacaggagggtgtgggtacaggaaagcatgattgtcatgggccattgctgcagtagtttataacaaggagtttatctaggatcttgggagaagggaaagcagcatcattctttagagagttgcctgggatagatgcagccagtggttagagagctccactcaccatctgcatgggcccctttagccccacttccctctgtgaccagcagctacacataagcttaagccatctggctcacagattgatgggcactcagtcccacaggagccaccaggagaatatggctggatcagcacaaatctgatgttaatgctagaaaaggaactcagagctggtatgcaatatagcccacgcagatctttcggcagagtgacatctaaaattccctgcagttttctcagcctgccctgagtctgagctgcatattcattctgttcgacagcaattctggggtctgcctgttctttgttcctctaaccgtgctgtggacaacattctgaggacagcaaagccatggaggagagttcggggaagggggagaatcaaagacatgcctacgagactggacacccagattcgttagttgggtttgctgcccttgcctttgatctcctgtgcaagtggaagggtgagctgatggactattgacgcctggcttcatcctcgttgtaacgatcttattttcactgtatatcctttcagggttatgccgacgttaaagattttatttagcaattatttgtgctatctcatcaagatattgctgtgtgatgctgcaccaagagacaataattcaggaaatgattttaagatcagaaaggtgtttggatttagagtctagaatgagtaggagaaggaataaaaaggatcgatggtctttgtgccctagaatgatgctgggccctgggcatcaaagacacatttatcacccccttctctttgtttgtctgagccaggtgatatggagggggctgatctggtatcaaagaacatctatcaagtgcatttaggaaaataattcaaggagatgactaggctttctgagacatgattactggggaggtgacctttattgcaagccgtgaagagtaattaaatttgagcaagaaagaaatttccattcttttaggctgagtttatgagagtgtctcagattaagcaaattcaactgtcttggtcactgaaaatctcttactctgttgggatttttgaaggttctcggttagctaacatcaacatcattgagaaagatggcttcagtgactgtgtctgtatgtttgtgcatacacgtgtggcctagtagggaaacacaagcagagctccacaccaccctgtccatctcatgtctgtcttttcccagtttgagatccacaaactgagctcatcttggccaccatggtgtccctaagactttgtgtgttgcacgacacttattaagcacttaagaagtctttgttgaatgaatgaatcaagaaaatctggaagaggaattttctaaaagtatctttagttgacagtttttctggaattaacctagacattttaatggtcacagaacaatgactgatgatgtcatttaagttcttttggttgagctgagataagaaatgaagctgacaaaacaagtgaccagagttaaatttatacactattaaaaacaagtaaacactcactgccaaagacccacactcctgaatgacttagattaccagcctagtgtagtaaaatatttatcgttttgtagtgtattagtattttcccagaattaaaatagcttattgtattttctaattattaagtcaatatatactcatgtagaatggtcaaacaataaaacagtttaaagaactgaataaaagtatccctacttctgtgttgttacattttaagaaaaatttttaaaattttctttttaattcttaattgtggtaaaatacccataatgtaaaatgtacttttaatcacttttaagtatagttcagtagggttaagtatattcacactgttgtgcaaccaatctctagaactttctgcaaaactgatactctccaactccccctttccccctctctccagctctgggcaaccaccattctactttctgtttctacgaatttgactactctgggtacctcatatatatggaataatatagtgtttgtccttttgtgactggcttctttcacttagcgcagtgtccccaagattcatccatgttgtagcatgtatcagtacttttgcccctttcaaggctgagtaatactctcttgtatgtatgtataataccacattttgtttatccattcgccatcgagggacatttgggttgctactgtgaatactgctgctgctgtggacattggtattggaatatcttttcacatgtgactttacccacacaaactttacttgtgcctgagctcatactgcatgtgctgcgtcatacagtagtatacatggacttcgtctcttgtcaattctttttttttttttttaagacagcatcttgctctgttgcccaggctggatgcagtgccatgatctcggctcactgcaaccttctcctcccaggttcaagcgattcccctgcttcagcctcccgaatagctgggattacgggcatgcgccaccacgcccagctaattttcgtattttaggagagaaggggtttcaccatgttggccaggctggtcttgaactcctaacctcaagtgatcccctgcctctcaaagtgctgggattacaggtgtgagccgctgcgcccggcagtcttgtcagttcatatggatacacagtactctttttttactatgtgtgcaatgtccccttgtatggattcatctgtttgtggctggacattttggttgttttccatttctttatgttatgcctcagtaaacatgcagagacttagacctttgcacccttgcctggtaataaaaatcctaacagttgggtcttaggctggattctctagaagcagaatctgagacagggacttggttgtgagtgatttgctgagggactgttctagagttgtcctctttgggacaaagcgacagggcttttgtactatcagtcatttatcttgtaatcccaggcctcttgagaccttcagcgaaaaggatttctgtagaaggtggtggttgtgagcttacagggcagtcggtagtgggggcagcctctaacacagaggatatgggttgaggtatcactgcgagtgctcataacctctgtggtcctgtctttaggcctggtgctatgctaagtacataaatgcagttctaacagtccaatgttgtaggggctagtagtatatatctactctacaagtaactttcccagggtctaccagctagcaaggtgtggtgggattgtaagacacactcaggtctgtccagtattaaagcccgagtccttttattggtgggctgtagaatgtaaagtttaattcctagaagctgaatttatggaccaaggagatagacatatttatcccagtttctttccctaccccttctccaagttatatcaacttagatgtcctgtgatattatatttgactgttctcctgtcatccctgggtcttgtcagttttttaagtatctgctaatccaattgatagagatttttttttggcttgattttccttacttttacaattgctgaggctgacacccttgcccgtgtggattggccagctgtattcttctcttaaggcccagtttttagtccgagggccttggcttctttttttttttttttttgagaccgagtcttgctctgtcacccaggctggagtacagtagtgcaatctcggctcactgcaatctctgtctcacaggttcatgtgactctcattcctcagcctcccgagtagctgggattacaggtgcccgccaccacacccagctactttttgtatttttagtagagatggggtttcaccatgttggccaggctggtctcaaactcctgacctcaaatgatccgcctgcctcggcctccccaagtgctggcattacaggtgtgagccactgtgcccggctggccttcactcatttttgatggttctttgcatccgggtttgaattgtcctaatctcccccatggatttgaatgctgcatttatagtacactcgttttgcaccagtgctttgttctatttctagatttcacagaggtaggtgtgtagttgtttttgtttgtttgtttgtttgttttttgagacggagtctcgctctgtcacccaggctggagtgcagtggcgtgatctcaactcactgcaacctctgcctcccaggttcaagcgattctcctgtctcagcctcctgagtagctgggactacaggcaagtgccaccatgcccggctaattttttgtatttttaatagagacggggtttcatccggttagccaggatggtcttgacctcctgatcttgtgatccgcccaccttggcctcccaaagtgctgggattacaggcatgagccactgcacccggccacaggtatctagttttatgctagtatcccatccttttgattgccatacaccttttttttttttttttttttttgaggccgagtctcgccttgtcgcccaggctggagtgcaatggcgtgatcttggctcactgcaacctccgcctcccaagttcaagtgattctcctgcctcagcctcccgagtagctgggattacatgcacatgccaccatgcctgactaattttttgtatttttagtagagacagggtttcaccatgttggccaggctggtctcgaactcctgacctggcctcccaaagtgctgggattacaggtatgagccaccgcaccggcccgatacaccttattttttaaaagatacaaggtatttttaaagatcttttttttaaaagatataagattttttttaaaagatgtcaggttttttttttttttttagacggagtttcgcgattgttgcccaggctggaatgcaatggcgcgatcttggctcaccacaacctctgcctcccgggttcaagtgattcttctgcctcagcctcctgagtagctgagattacaggtgtgctctgccacgcccggctaattttgtatttttagtagagatggggtttctccatattggtcaggcttgtctcaaactcctgacctcaggtgatctgcctgcctcggcctcccaaagtgctgggattacaggtgtgagccacagtgcctggccaaaagatataaggatttttcatgtcaactagatgctaactaaagggttgccgagtgtagaatgctgataggccgtccagccccaaataagactaggtaataaggctcttttatagtagttagtgtggtatatatggtgcccaaatgctagcaggtacttttcttaagcagaatccctgtttctcttttcatccttgtctgtaataattccatttgcatgatggacccttttgttaaaggcagtggaagaggtaaccttgagcttcgtctccatttgaattcattatcagtggattcattagtagttgtctttgcgactgagagaaagatgactcaaagtggctttcgtgccaatgaaaatcgggcagctttatccaactggaaagtccaggagtaggtctaactttggacaaagacatgaagctgtgacttcctggctgcaggtcagccgagccgctctctccatccttcagaatctcttctctgtgttggcttggttcttaggcactctgtcgcctcgtggaggcaggatggctgcccgaccccctgtgagtccctgcaggttcaagtccagtgaaaaaagagaagatctcctcccacaaaattcagacctgactgccattgacctaaagccatatccccctccctaagctattcattgtagcagaggatggtgtacattttttgacttgtggctggtattatgcccactctgcactagggtgctggcacccaggggaatttagagagccgttgctggagggaatgggtgctcgctggccaggagcattggtcactgtccccacccccgcatgggtaggatggcacttagcgacgttctattttcacacagagaagagttcatactgtcaggcttagatacagacctgtttttagagatctgggcttgcccagtcttggtgacttaaggcagcggaaactcctctttcaggtaggtctgtgactgcagactgagagccccaggcagccaacgccatcggtcactcttggcagagcttaattgggttttcattactaagtgagattctttttactgagtgaggtgaggctcaagcctgccatttcagcattaaaccagaaaatggttccgtcgcacccctgtgggaatctgctgtagaggccgggccttggctggctgtggaagggttaaaacgcacacccagagggcagagagcagactccagagacccccctgggctaaagtgcatctccccctcagcctctgccttggttttgctgttgctccaatggttagttatacccagttaacgaagtgttcagattcctttttctttgcttaaagcacagacttttctgtgaaatctgcttcccccattttcttgtttataaatttttaattctaataccagaggccacccgtgtcatggaaacagcggtgacctggtttccaggtgcccctctgcgcctgcccagtgagtgactgtgggtgagtcctggaacacacctcccctaaccccaatctcgtgttccgatgggtaaagagaagtggtggcacgtggcaactcctggaggcttggaaatggggtcctagaatattaatccaaagtggctgcagggtgcgccaagtccagccatcacacttaacggaggagaggccctggagagattgaatggcctgtaagctgtgatgttgaagggagaccctcaaacctggtgtatcgtagtttggatttctgaatataaagagcatttaaactactacaaggaaaaataaaaaaacaaacaaagagacagttttatagtcatcaaggaaatcccatacacaggccccagaccaccgtgcggccaggcctcaagggaactagtgcctggaacaggagacccctcaggctgcaagagctgtccccaggggcttcagatacctgttcctctgtcctcctctgcctgggttccattagcctctgcaggaaccaggctcccctgctgtgcttacctgtccttcgctgcctccttccatttgttcacagtgtgttacatctgctcaggccacagctgctttctggcctcctagcagcttctcctttctctacctcctccttaaagaatctactcatttaattctagtcttggggactctgaatgactcagcttctctttttgagccaggccaactaggccataggttacttgaactcctatgttttgtgtccagttctggggccagattctgcttcttcccgtagtatgtggccacggatgtgggttcaggcgttataaggacagtgtgggccaggagctcccaaagacccgcaacttcaccaggtatcttcattcacagaatgacacctttccccaggtacagcctgaagacagtgggattattttcagagtagactggagacccatagtggccacagcaagtgcgtgcatctgcacagaacggtgcgggacatctcgaacaaattccagaagattcgagctcattttaggagagctaattccatcctgcaggattagggacagaaatatacaattttttcatttgtcttctttttgtttgtctgtttgttcatttgttttgaaacagggtctcactctggcacccagggtggagtgcagtggtacagtctctgctcactgaagcctcacctcccaggttcaaatgattctcgtgcctcagcctcccgagtagctgggattataggcgggtgccaccacgcctggctaaactgtgtatttttggtagagacagggtttcaccatgttgcccaggctggtcttgaactcctgacctcagatgatccgcccacctcggcctcccaaagtgctgggattacaggtgtgagccactgctcccggcctaatttttcattttgatgttattttcatgctcttcttccaaaaatgcaaatactgacaaaacttgaagatctttgttcttttctttatgtcggtgcagagtgtacaaaagttacctatatcgggcacacattgaaatttgcattagcagagactgctataggatttacttatgagtgattctgaaaggttaagaatggcactttttctaagctttggttgaggttgggattgggaaggatggttcctctcaccatggttatgcaaaaactatgggttgtaataggatgcaaacacgtgtctcccaagaataagcagaggtgcaggctgccaacgagctttaagaaatactgtggctcggtaaatggagaaccgaagggagagagggtagcaaaagcaaagagacctttggtgtttccgactttcacgagagcctgtccaaattttcatctgcatcagcacttttctagcaaagttcaccggccatccagcattatctggtgggcggccttatttacacacatatatataattgattccatattcctctcagacctacaaacagtacccatgtttgtttttaataaccagaattatttcagcttaaaaaaaggtgtagatttacatagacagtctgatgagtgcctcagattgttccattagtaacacagaggagaaacaatcttaagaaaaacattttgaatttgtgtgtggaggtggagagaggattgggttagtgaaatcagaaagcttccaagtaatgattattacatttaataataattagattagcgttccacagggactgttttctggaaattttggtaggacagtcactgagtaacacacacactcagagcaacctaggtttcaggccattgggtgggacatggcctatttgctttgttttggtcgcgtttaaagttaatccaaaatcaatttctttttcaagattaaaatgtcactactctgtcttccacttcaggcttctgcaaactttttctatgaagggtcatgtagtaactgtttagcacaaaatagacgtacacataaacaagtgagtgtgttgtgtcccaataaaatgttatttatggcattgaagtttgaatttcatataattttcacttgtcaagaaataatattcttcttttgattcttttttccctgaccattaccaaatgtcaaagccatacttagcttccagctagtacagtttggttcataatttgccaacccccgtcctagttctgactttgtagtcagaattttgtcttttggggagaaaactccactttgcatatgaaggagaaccaaaatgggccgggcgcggtggctcacgcctgtaatcccagcactttggaaggctgaggcgggcggatcacgagttcaggagattgagaccatgctggctaacacagtgaaaccccgtctctactaaaaatacaaaaaaattagccgggcgtggtggtgggcgcctgtagtcccagctactcagaggctgaggcaggagaatagcgtgaacccaggaggcggagcttgcagtgaaccgagatggtgccactgtactccagcctgggcaacagagcaagactccgtctctccgtctcaaaaaaaaaaaagagaaccaaagtgtgtgtgtgtgtgtgtgtgcatgcgtctgtgtgtctgtgagtgtgtgtgtgtgtgttgagcttttctgtttcttcagctcccctcttggggatgaagcagggtctctagacattagaactccggttgttggagcctgccaccagcagtttagtgctgatggcaaggaggctcgcctcagggactgaaaaactcttctccacacagagaattctaaatgactcttgaaatagagggaattgagaatgcagacaaaggcagaaacttgagaggaaagctgctgagcattatatgcacatagctctgtaagggttgtgaaaatggtggtggtgttctcataatttctttgcaaatatatatgtattttaaaaggcttaggtctctcagctgcttcttttcatccttattcttagagaagtaggcaaaagacatgcttccacaaattataaacacctggttttgtttagtatcctattgagggaaattaggaaagttgcagaaacattcagttttcctaaattgttttacaaaacctgtgacaatgcactgcagacatatgcattgtatttagttagatccgtttaataagaatcattcttatcagggcacctcccaaatccttcataaatataaggcttttaaatatttgtctccttttataattagtctagatttagcagtgggtcttcctgatttgggaggaagcatgcttcatggttgcctggcaacagctaatcgtggtattaggggccaacaaaacagttggcagaaactgtaaattcttttgtcttgttaacaaaaaatgatagttaaagatacagcagtatgttaagtctgttctgttgttcaaacatataacttacgtgataaattcctatgctaatataacctcagtgtgctgctcaaatttatagcttgtttagagaacctgctcacttcgtacttgggtcacatgtcatctgctcatggtactgaaactcatcgggtaggacagtgatgtcatagaggcgtccttttctcaagggctcttaagatgaatctgaggtttttgttgaacgatgggttctgaaacatatgtgaagctccagcataaacgtctgaagtcaggattctggttcttaagcaggagccgcgagttcaccatcgatgacctcagttcccatctcctagtggccctcagtgggtacagacaccagcacccggcctgtgtgatccgtcctggtgctggccaggccttcctctcgtcccctccagatcagccgggctcagcgtaagttttctaggacaacttcgtaaaatgaattctcatttcataagcaaatatagtgtgagtcatgctttggccacatagaattaagaaggaagaaaaaacactatttatttggttggtactttttttttttttttttttaagaaactacactgtattccagatttgtccgcagatcactgtcagcttcctctcctctgggtatatgtttttaaaggacgttgtctattatgggtcagggtcccccgctccaccaggcacttcggtgtgtattttctcacttaactcccagctctgtgcagaaggtctgggagacaccagtgcttaagccaagttttatgggggccagacgaggagcagccgggttgaatgcccaggttttctctggtttccaagcccatactctgctttatccttagttttgggcccagttttcagaacacatccagaatcatccatttgcccagcaaaccaacataaggtatcaaatgaatggccaagatgttgaatgtatttcatcctttgtttccttgatttctaaaaaaacagcccttagatatttttaacagaatttttaaaaagcaccccctgttgtctaagttctcttttctatatgatctttgccgcctctcctgcccccacctccaccatagtcagaaatctcacatctcaacaaacatctctctcctgtcttcaccgcggttctgctcacagccactttccccttcaaactggacattttggattttccctgctaaccttaccgccccttcccgccccttcccgggctccagctcagcaggaagaaatgtcgtcagcagaggctgcaaacccaagcctgtcccttttcagtggtatttttactacgagctgaactacttcagcatcatgtaaacacgctggagtgtgttcacagctgcctctcttttaaagttgaaccagctcagaactaaaaggggaactgctttcaggttctgttcaagtttgcatgtgacagcatcaaagctatttttagcagagtgatcaccggcaagaagctggaaacggctgccttcaactatcaacagtggaaagaaaggatcatttatggactgctgcagctcttgagtccatttatatgggagacacaggggtgtgtaaatctcttcttcaaagttacaaggcgtcttgtcccccatcacctttgcagagacagggcagtgttaatttagtgcttggttgcctgggctccaagttaaagtagatacactgataatagtgaattataggactgtcctcaatgtctgttctgagaagaaggcgatgtatagatgctcagaaacatccattaaacttttgaagtgtttgtattgtttcttcagttttccttttcttttctgtagatcaccaaactcaagagacagcaggaaacgggaggtagttatgtaagcatcatggcaatgaagagagcatgagtcacttactagccatgcgaccctcattaagtgacttttcctttctgaattaagtgttcttagctgcaaaatgaggatcataataccagccctatatactttatagggctagttttttttttgttttttttttttagcagatgtttattgaacacctactccatgccagctcctggggacatgagctgaatcagatcgtcagtgtcttcagagagctcacagtctagctccataaataactaacttataataccctgtgtttcatggaaaggagacagcataagacagataggatctgctctcagcatggagggaggcaggaagaagacaggaggagcagtattttcaagacagcataaaagtttgcaaagaaaacaagggagtgagggacattccaagcaggggcaactgagtagcaatgacagaggtcaaaggcgctctggtgtctccaagggaccatgagcaacttggtattgtcagagcgaaaaaaactaaaagacaaggggtggcaggagaagctggagcaagtggagccaattgtttagtgctaaagaacctggaagtggcacaggtcacagggagccaggagtcattttgagcacacgattgactggattatacacaaattaaagtggagtcattgctagcaaaagtccctgaatctgtgtatatgaagtggtagcagtttagtgcaggcaaagaatgccctacacataaagtgtcctccctggaaaggctaagctgtagcacagtactaaaacttggtggcctgtgactcctttgaacaatgcctttgaagagggcggaggtgggcagcctttgaagagggtggaggtggacagagaagggcagatgaaagggagagaagtagcataccttctcagacccgattggtactgggctctgcaagtggctttggaggataagtcacatccttcaggagctttcaggccaggtagcattgaagaggaaggcacgagccttggcagcggtgtgtggcctgtgtgtgctcaggggacttgcaaaggtgagcccaatgacccagcaccaagaagcacagcccatgtgtgtgagtcagtttcctccaaaggtttcaggaggctaaggtttttcgggttatgtttaaagcttcaattgtgtggtcctctttattcgccataggaattcaaagaagagggaagcacagaacaaaacaaagtaaaacaaagcaaaaccctcacaatcatacgtaactgtttacacccagaaagaaaggtgctgagaaggcatggtgtgctaccacattttgtaaagcttgatggacacaccctcatagttacataactatggccaagaagtgacattactcttttgaaactatgttctcttcgaatttaatgctatcatggaagttcagcaacattatttgcctcagttcacttccaggagaggaatagatgtttctatagtttttctcgaagcatcgaatgggtattaggtactaggtgtgtaagaatcagtttcttcggctccagcccatgtgatggtggaagaaaaccaacgcacttggccttcccaaccatttcgttttgggttttcctgagctacactatgtggggagggactgagagagggacacgtgggacagtttgcgaacagcagagagtcacaagcaaggaaaaggttggtacaggtggtgagggaggtggccagaggtcaccgggaaaggagtgagtagacagggtacctttgaggtcgggccgggcctttctgctcagttggaagtatcaggacaaagacatggttaaggcgctgatgcccatcacagtactttgttgccttgggagacagaagagattactttttggaattttttttttattttgagacagagtctcactctgtagcccaggctggagtgcagtggcatgatctcggcccactgcaacctctgcctcccgggttcaagcagttctcctacctcagcctcccaagcagctgggattacaggagcctgccactgcacccaggtaatttttgtatatttagtagagacgggctttcaccatgatggccagtctggtcttgaactcctgacctcgtgatccatctgcctcggcctcccaaagtgctgggattacaggcgtgagccaccgagccccaccacatttttttttaagatggggtatcactctgtcacgcagtctggagcgcagtggcatgatcatggctcatggcagccacaagttcctgggttcaagtgatcctcccatttcagcctcctgagtagctgggactgcaggtgcgtgccaccacacctggctaattttttttttttttcttttgtagagatgggatctccctatgttacccaagctggtctcaaactcctgggctcaagcagtcttcctgcctcagtctcccaaaatggtaggattataggcatgtcttacattttggaaatttaaaatcactttgtcactttgaagccaaccataaatagatgtaataaaccataggaaaaatgttttataaaaaataaacatctgaggctgggtgcagtggctcatgcctgtaatcctagcactttgtgaggccaagccaggcagatcacttgaggtcaagagtttgaaaccagcctggccaacatggtgaaaccccgtctctactaaaaaaaaaagcaaaaaaattagccgggcatggggacaggcacctataatcccagctacgtggaaggctgaggcaagagaatcgcttgaaccttggaggcggaggttgcagtgagccgagattgtgccactgcactccagcctgagcaacagagcgagactccatctcaaataaataaataaacaaatgaacaaacaaacatctgcactattacatacaactgtagcaattgagtgcccagattaggtcttcctgatacagcatttagatcgaggtgtcccttctatgtcatcagctttccaaaatcagtgtttatgtctctcatcttcgtggtggactatgggatgggactagctgtcaaagggaggaaatgaataatcaagggaaatcacaatttctccacaaataggttattttcttgtctgtgactggttttcagcatcataggaagtaccgggagccagactgtcaaaaacttggattaaaacatatacatttcttggctgggcacagtggctcacgcctgtaaacccatcactctgggaggccgaggcaggtggatcacctgaggtcaggagttcgagaccaacctggccaacatagtgaaaccctgtctctatacaaatagaaaaattatctgggcatgatggcgggtgcctgtaatcccaactacttgggaggctgaggcaggagaatcacttgaacctgggaggtagaggttgcaatgagccaagatcatgccattgcactccagcctggatgacagagcgaggctccatctcaaaaaaaaaaaaaaaaaaaagtacatttcttgatctcgcttgaaatcctgaaagataaataggtcatagtgacttttgcctttattattgaggtacttctgctgaatgttgtatcagttcatggagtaatgagggaattgtgttactcacattatataatgggcagtgtgtagttgttggtcaccacctcaaaatgatgctgctgtgctgggacagaagatgcaagtgtggccagccttcttgcttccttgcgattcagttcaagttgaaatgatatttttactcaccatgtgtttgctcttgatggaggggattttagataagcttttgccactgtctttggatcaagcaccctggccatactaacattgtctagtcctcagctggttccacctgttgcactggtgccatttgtaccattgtcaagacctccgtgaaactgttgccaaaggaaggagggagtggctgggcttcctcagtctcagagtccctccagtccagacttggccacctggtccctctctggggtcagcacggccaaagtgggaggtgtagaaggtatccccgggccaccttctatcatctccatctctgaggcaagctgctccttgagggacttggcttccgtatttggggatcagtgaggctgagatggagagattccatgggatagagcaaagcctccaggtttcagctcctcaggagtgcaccaaagagaagatattgaagggctgctgaattagtctgttctcatgctgctgataaagacatccaagactggataatttgtaaaggaaagaggtttaatggactcacagttctacatggctggtgaggcctcacaatcacgtcttacatggtggcaggcaagacagcttgagcaggggaactcccatttataaaaccattggattttgtgagacttattcactaccttgagaatagtatgggggaaaccgcccccatgattcaaatctctccacctggccccacccttgacacttggggattattacagttcaaggtgagatttgggtagggacacagccaaaccatatcagctactttctaggctgtgataatagcagcacttattgagcacatactgggtgtgagcacccagaaggtggatgtcacctttggaggatctatagtttttccagggaagcagctggagaactggcaggacagttggcattgaagtcccacagcagcacttttagggctcagagaagattcagatgagggtcaaggaatgggcatgggcctcatagaagagactgtcagtgtattctacccaacaagaggaacattgtccagaagattctagtgtctggttttattcttggtgtagtaaccaagacatccaaaggcagctgcaggggttcctctgtacatctcagaatccttgagctaatttgccatccatgtccctgcctcttggaggacaggatggttattttgtcacagcgtcctcatagcaatgtaaaaacatgtttattcagtgaatggatgagtgagagaaaagagagtgaggaaaccagcccttatttctagatcctggcagtggagcagcagaggtgtcacctgccttatgtactgtctggccagccattaggaaatgtctgtttgtctgtctgtcgtctatctgttatttatttattaaattgtggtaaaagacacatgaaataaaatgtactatccagccttttttttttttttttttttaaatagacggagtctccctctatcacccaggctggagtgcagtggcgccatccaggcatttttaaagtttacagttcagtggcattaaagatgctcagctgttgtacagccagcactgccatcatcatttttttcatcttccaagactgaaaccctgtactcattaaacaaccactccccccgttcccctccacctagttcctggcaaccaccattctttttctatctatgagtttaatgactctagataccttataaaagtggagtcatacagtgtttgtcttttttgtgactggcttattgcatttaccataatgccctcaaggttcatgttataacgtatgtgagggtttccttccttttaaaggctgaatattattctcttgttttgtctatccatgcatccatcgagggacagttaggttgcttctacctcttggctattgtgaataatgtttctcttttcttcttgttgttttgtttttttagagacatgttctctgtctgtcacccaggccagagtgcagtagcatgattatagctcactgtaactttgaactcctgggctcaagccgtcctcctgcctcaggttcccaagtagctgggactacaggtgtgtgccaccacacccggtgacttaaaaaaaaattttttttttgtagaatcagggtcttgctatgtagccctggctggtctcgaactcctagcctcaagcaattctcctgccttggcctcccaaaatgctgggattataggcgtgagccatcgcacccagatgtgaataatgtttctatgagcatgggtgtacgagtatctcttcaaatccctgctttcagttgttttgggtatatatccagaatcggaactgttagatttgatggcattcctatgtttaatttttttttttttttttgaaagggagtcttgctctgttgcccaggctggagtgcagtggcgcaatctcggctcactgcaagctccgcctcccagtttcacgccattctctcgcctcagcctcctgagtagctgggactacaggcgcccgccaccacgcccggctaattttttttgtatttttagtagagggtttcaccgtgttagccaggatggtctcgatctcctgaccttgtgatccgcccgcctcggcttcccaaagtgttgggattacaggcctgagccaccgcgcccggcccctatgtttaatttttttaggaaccgccatactgttttttcagagtgcctgcaccattttaaggggatgtcttttgcgccgcctccgtggcattagtttgggtaatgtcttatatagttacttagcttttccctttacttgcctttcctcttgttagttttacaaatgctattctccttccgtatgattccacttatgtttgaaaagtattgcttaatatctggcactttggacaggtttgggataacaaaggccatggatagattgatccacactagcacagcaggcccaaattctgaagctgtttctcctctcctccagccccttcagaaatgttgagtttcggctggatgcggtggctcacatctgtaatcccagcactttgggaggccgaggcgggtggatgacctgaggtcaggagttcgagaccagtctgaccaatatggcaaaaccccgcctctactaaagaatacaaaaattagccaggcatggtggcaggcacctgtaatcccagctactcaggaggctgaggcaggagaatcgcttgagcccaggaggtggaggttgcagggagctgaaatcgtgccattgcgctccagcctagacgacagagcgagactcggttgagaaatgttgagtttatccctggggcccctgggcagatgtcctctggggaagtcccaagttgctgcttcagagatgaagctagaaccaaactggccctactagactgggagctcttggcccagctgctctgcctcccttaactccaccattctaattgtgattagtaggctcatttgcatctaaaaggagtagttttcttatcaacaccattgagtggagaaccagtgtgctccatttatatagagtggcccatttaaatcagggcccattaagcagtaaaagtaaatgtgggtgttttacaaatgcaaatatatcatgcaaataatgtactttatactgaatgatgccttggttttcatatgtaaaattagaaactgtgtagcacaaagataatgataaacacctttgcatctgttcatgagatgtatcataagctgtatgcatgtaaaatcgtagccgtggttttaagcagagttttttcagtatatactcaaaacatgcatcccatattataaaaaatatgcatgtatttatctagttatttatctgttcctaaggaatcaagaaatcacagaaaagaggaatccaaattacctaatctattacttactatgaatgagatttataattttctttcaatttttaaatatttttgagtttttatttgagatgatgatagtgaagaagatgtgttactataggctagtttctttgtgagagatttaattatgtttataagagatgttttaaaaatcctggccgggcatggtggctcactcctgtaatcccagtattttgggaggctgaggcaggagctcttgagcctaggagttcaagagcagcctgggaaacatagcaagacccagtctctacaaaaaaaaaaaaaaaaaatgcaaaaattagccaggcatggtggcatgtacctgtagtcccagctactcaggaggctgaggtgggagtattgcttgagcctgcaagtttgaggctgcagtgagctgcgattgtgccactgcactccagcctgggtgacagagtgacagagtgagaccctgcctcaaaaaaaaggaaaaaaaaaatccttagtgtttgagataattctgtgtaggaggtgcaggtagcattcccgctgtttttcagaatcacttagaataatgacaaccatcttccgtgtgctgtgaacctggccaggttctaagagaggagtcactgttagcctctgctcacgtgacgtctgccaaggtaaggtgagacacacatacctgtgggttaaaggtataaggcgttagaatgggaagacactgcagagtgcaattaattcccagatgagctgcacagaaggtatttgccagaaggattcagaggagggagaggttgtagggtgagagtgaccagataaggtgtcctgggtacctgggattcgagttgaacattaaaggatgaataggctgtaacaggtgaagagaacatgggtctagggcatttcatgcagcggagggagagattgggctgggatgggcccaaaaagcctcctgggtgcaggtgttctggagacctgtgccaggcggcatattgaaagcaggaaggacatgctgggaaggaacaggagggcttctgaggggtaccagcaccgattggctctcaccctgccctgtaagcatttgttacaggaaaggggtcccgatcctgactccaagaggaggctcttggatctcaaacaagaaagaattcagggcgattccatagagtaaagtgaaagcaacttgattaataaagtaaaggaacaaaatgatggctacttcatatatagagcagtccggagggctgctggctgcccatttttatggttatttcttgatgatatgctaaacaaggggtggattattcatgcctcccctttttagaccatatagggtaacttcctgatgttggcatggcatttgtaaactgtcatggtgctgtgggagtgtagcagtgaggaccaccagaggtcactctcattgccatcttggttcggtgggtttcagctggctttaatgcaatctgttttatccgcaaggtctttgtgacctgcatcttgtgccgacctcctgtctcatcctgtgacttagaatgccttcaccatctgggtaggcagcccagtaggtctcagcctcattttacccagcccctattcatgatggagttgctgtggttcagacgcctctggcacattcacacttctgtagccaccaaactcttcgaatgaagacgcacatggagagtcggtgtatgagacacatgaaaaatgagaggctttgttgacattgggcagctctggtgataccattcccccacccctgatagcactctgggcacctctccacgttggcaagccctggggactgtgcctgaagatattgtgctttgagaatgctgctgaggtgtcaggcagggcggcctgctgtggggagagaggctggagacagggaggcctattaggattcaggagaggacatcttaacttgagctgaccccaggcctgggagtagaaacagaaaggaaaggaaagtgcaggagcccttgggaagaacgggtgggccccaatggggactggaggcagggacgtagctgaggaaggtgtcagagcctccagaattttgaactagagcatttgccaggtgattaccaaaggctgggtccgttgttttcttctgttttgttctttgcggaatgctgaattaaaggataaactttacttccctcaacagacatttgtggcagccaggttccaagcacagcagtaggtattagggattcaggaaaagacagccacaggtgtcttggtatagcctggagagactgcatgtggaagggaaatagccactgtctggggtgaattgtgcttctctccccctacccccaaccgccgctccattcatatgttgatgtcctaactcccagttcctcagaatgtgcccttacttccaatgtgcccatatttccaataaggtccttgcaggatgtcattagttaagatgaggtcacactggagtggggtgcaccctcgactcaacatgacgttgtccttagaaaaggtgggaatttgaagccagctgtacacacgggggaatgctgtgtaaagatgaaggcagggcaatgctcttgcaagccagagaacaccagcaaacaccagcagctgcgagggaggccaggaacagattctcccccacagcctgctgaaggaaccagccctgtgaccccttgatcttggacttctgccctccaggactgtgagaggaggaatttctgttgcttaaaccccccagtctgtggcacttggttatggcagccccagcaaacgaatagacactgataaaccctgggcagcatggagagcgtgccctgggaactggcaagcaaggcagaggggggaagctgccttctggtttgagcggatgtgggagctaggggcagctgaaagctgctctgtgcagagcccgctggagataccctccagcatctggaaacagaatcagctggcagtggggaagtggcaaacccaacctttccacaaactctcctaggaaaagagcatgagaagaaaagaggagagggctagaactctaggaatgctctgatggtggggccgagcatggacagagagctagccgactgtccggcaagaagagtgggaggagccgaacccaggccaggagggtgttttgtagctaaaggtggaaaggatttttaagagtattgtcaaaagtaacaggaagtttgtgtaacccagaaagaggcttctcatgtgagtgcatgtgggaggtcgtgcggtggagaggggagagaggctggagtgacatcaagggcagtgaccgctcgtcttagtctgtttgtgctgctgtcacaaactgggtaatttacaaacaatagatctctcgctatgctggaggctgggaagtccaagatcaaggctgtggtaggttcattgtctggtgagggctgcttgcaaaatggggccttgaacgctgtaccctccagaggagaggagcactgtgtcttcacatggcagaaggcagaaaaggggggtggctccctcctttaagcccctttatatggtcatctaatcccgttcatgaggaaggagccctcctggcctaatcaccttttaaaggccctacctcttaacactatcaccttggcaacacctgaattttggagggacacatgcaaaccatagcacctggggaactgggggacccaggtgacccctggcaggaagaggttgtggtggtgacatgggggagtggaagctgcgctgtcggtgccagctcttgggatttgtgagtgcaggaaagaataatgggagccaaaaggaggacttggacaccagtttatgtgtggcgatggctaagataagaaatcatcagtcctgggaagggggaggtaagtggagacaaggggtagtggagggaggaaagattccagaggaaaagaagggtaatagagatgttactttggcaagtaagaagatgcacgcgcaggcagaaataatggagccagcgaacggaggtggaaggaagggcatgtccttcgtttagaaaagaggaggtgacggtgcctgccgaaagatggagcgggaggtttgggacttgatgagtggagagattggggccagtgttcctgggttctcatttgggagcagttttattccccagtggacacacagcaataactggaaacatttttggttgtcacagctgatgaggtgggtgtcactggtgtctagtgggaggccaggaagactgctgagcatcttaccatccacagtgtagcatcccaggacaagaattatccaatccagaatgtcagtaatgctgaggttaagaaatccggccgtaggtcaatcgcagttcgcaaacacgttcaaggaatgaagtcccaactgaatggcaggctttggggaatgtgatgaaacttcagtatatttaaaacaacacaataagggccacaggaagagagcatgagtggccggccacagatttgcattgccaaagacaggaccccagggcagcaaagcagaatggcagacatgcagggactgctggaaagactggagtgggctgtcagctgcctggagtcgctgtctgcagagtcccacaggccccctggggatggcggggtaagcaagagtgtctgtggaggtgtggcaccctccgtggaagcctttgataagctgatgaacagcatggtggccaagtttttaaagaacagtagcatccttgctggtgacatggagacttatgcagaaagggtgttacagggctttccttctgatggcatctcatgaccaacaaccccgagagaatgcgtggctgcatttctgaaacccaaatcagaaaagattcagaagtccaaaccttcaaagagagaaaccgagggagtaacatgtttagtcatctctcggatgtcagcaaaagcctccctgcccttggctgcataactgtgccccccaacttgggtacttacgtcaacgagatgtgtgatgctgccaccttttacactaacagggtcttaaagggctacaaacatgatttacaccgtgtggattgggtgaggtcatatgtgaacatttggagtgagtttcaagcatgcgtcaaggagcaccacaccacgggcctcacgtggagcagaacaggtccgcagcacccacatcagcgctttctgttctctcctgagggcctgacctttctccacatcctcctcacctcctccagggcccctccactttttgagaatgaagacacaaaagaaaagtcctctccttcatgctcagctttatttgcccggtttaaccagggagaagcctaaccctgcagaaccagggctctggcacatcactgatgaccagaaggcctatataagaatcccagcctgcaggctcacggagggcaaagtacgtctccccacagaagctacactccaagtcccacatctcccaaacctcatccttcccagcaacatgcacccgtgttcaagttggaaggaagtaaatggagagcagagtaccaagaagacaggaatgaccttgtgatttcagagactgagctgaaacaagcggcttacattttcaattgtgaaaaatcagctctcccgatgaaagggaaagtaaactccattccagtggaaaactgtaagaagtttggtctggtctttgacagtttggtgggcattggggaaatgaccaactccaagtacattcaaatccaggtaatggggagagtaccagcaatttccactaataagacagaaggttgccacacatacctaactcggggaagatgcattagactgtgagattgtgagcatcatatcatccaaaatgaatatacttattcgtcagggtggtaatgacagagaatttcctgtccctgagcagttcaagacagcatgggatggatccaagttggtcagtgaaccccctcacctgagtccctccatcaaacaaataaaaaagtagcagtaaagaactggaagttgcagaagcaccttccactttagttttggcctccgacaattctgtgctatagacacagcatcgtttctggcacgactttgtgggcattttgaagtacttaacatttcttcatgatttgcctgtgtgtgtgcgattttagttccacgtggtgacttgtgaacattatggatttaaagggaaaaaaaagaagtctgttcccctcatatcacaaacatagtaactgataggtaaaaatactgcatgattcaattttccacgtatgttcaattgcttgttgaaaaataaactaagatgtacatttttatcttttagacaatttcaatatgatgtagtagtaatgtgccctgagaaatgtacagtttttttcttatcgtgagcacatgttcacctttggcagtgtggatatgctgtcagcaggagtacgtatttccacccacgcttttaaaagatgtaagaacatttcatattaaggaccaaattcaggttctttgtccttgaaagacctatattctttatagttactaaaaaccaaaagtataaatttgaattattcatcttatatgtatttctaccgtgtcatttgaaaacttacttttctgcataagagatttttgtgtcaacagattgatgggaggaaacagtgcttttgctatgtagtacctcgcagtgttgcccaaaaatcaagctcagtgtctgttttccaattttgaacatgttaaatgtcagatgtcttctaaatggtgtctttaatgttttattatagtctaattttttcttttctgcctgccagacttgctaaccagtcgcaaaaatgaacatgagaaaagccatggatgtattacttctcctaaagcctaaggaattatttgttagtttggctttctgctctgattttgtagtcttgctaatacatgctttttctttttcttttctttttttttttttttttgagacagaatttcactctgtcacccaggctggagtacagtggcatgatctcgtcccactgcaacctctgcctcctgggttcaagcgattcttgtgcctaagcctcctgagtagctagggttataggcgcccaccaccatgcccaacaaatttttgtatttttagtacagacaggatttcgccatgttggtcaggctggtctcgaactcctggcctcaagggatccgcccacttgcgcctcccaactgggattacaggtgtgagccaccacacccggccccatgtttttttcaatgttaagagaaattatgatagtcctttgtatcttttcagtacgtagtgttgaaaaatctgcaacttcttggatgacatttaatgaattatagtataatgcttacggacccagtgcaagcatatatatatatatatatatatatatatatatatatatatatatagagagagagagagagagagagagagagagagagagagagagagagagagagagaaagagagtgcctattacagcctttggagtatgtcgtttccatttttaaaatatcttctatatctgtgtagtatttggattattaatgctcacataccaaggttttgctataaaagttttgttcgtataatgttgatagtaaacatcatttttcaactgtaaacttattctgaaataaagtaaaatgataattgtttaaaagtaaaataaaatagctcgatagatatggtgccagagcagctgccacctgtcagattctcatgggtcctggtggtattgggcatacaagaactatgtgcaggctgatacctttgaaatcagttgagtctccagtgtcaacatttggctaagtttacagagcaattccatttcttatcttgattggtgcattgccctctgagtaatcttgccacacactcagttatagtgttggtgggcctggttggttgtggtctgatcacttcagtcatgcctcctcagcaattgtcatcctctgaaatgggccactcttggtaggtttctacctggtctctttctgtctcttgatcgcgtgcccattttggatctttgcaggattctgcatggagctatatatatatattttttttttgagacagggtcttgctctgttgcccaggctggagtgcagtggtgtgatcaaggctcactgcagctttggagctcctgggctcaagcgatccacccacctcagcctcctgagtagctgagaccacaggcacatgccaccacactgggctgattttgtttattttttgtagaataaaaaaatgttttatttttaacgtttcccaggctggtctcaaactcctgggctcaagtgatcttcctgcctagacctcccaaagtgctgaggttacaggggtgagccaacagttactttttttttttttttttttttttagcattctttagagtaagtgacatctgtgaagttgcttcttggatatttagtaagtgttgctactttagactgagaaatatttgcaattagaacatctccaagaatccttaaagaaaaaaggaaaagtgcagttacctcatctgtcacaggaatggaaaaacgggccaagttgggagagttaaggatgtctaggaggaagtgctggtgcccacctgacaatggccacaatgttgctgtgtggccttgagtgtgtcagttaactctgaactggggtttgcttgcaatcaagactaccactggggctgggcgtggctcacacctgtaatcccagcactctgggaggccaaggcaggaggatcacttgaggtcaggagttcgagacaagcctggccaatggcgaaactgtgtctctactaaaattacaaaaagtagccaggcatggtggtgcatgcctgtaatcacagctactcgggaggctaaggcaggagaattgcttgaacccgggaggcagaggttgaagtgagcccagatcacaccactgcactccagtctgaacgacagagcaagactctgtctcaaaaacaaaaacaactaaaagaaaaaccacctttgggatttttgcagtctagaaagcaatttttttcccccatcatctcattttattctcacacattgcccccggcttgcaggcatggaattgagactttgacaagttaaaagactttcagtctgtgttttaaacaaaatttctgagtccaaatcccgcggtctctccacttcaccctggattggaccctgtggccacagagatcccttttaattgccgggacactcaagcttctttggaaggttagaaaagtgtcaagagtgtccccgagaatctgaactttcatctgtgttcttagtgatgcttctcaaacggtgagtggtattttgtgaagcttcccacacacgtctctgtccagcctgctctggttgccgtgttccaaatgccagcgagtgacatccttcactcagagagcccctgttacattgtggcgtaggtcacatttggttttctattatttcctggtgattaatccccagttataaggcaaaacaatggaatttcaaggattttttgtggtgggtgattctccctttgttacaactgcgttgactgttttattcctggggaaattgcagtctggtggtagatgtcacccatccgaagggattgccatcacagtccatctccagcgctaagagtatgataggactctgtgctcggttgcttaagagtagtgggtaagctctggcctccatgagtgctaaatcagggtgggctggtcttgctacacccactttttccccccaccccatccccgttggtttgggctttctgctttgtcgtgtgctgtggaccattctggcagaaagctgaccatgggggacattcagatattcttcctttcttcccgccccaagcactttaggctttcattcatttcttcagagtccttcttatcatctcaatctctctgttctttcttcttcctccccctcccttcttccctccctactcctctccctcctcccctccctactcctctcttgttttatacattaacaaaaattatttatgttgaagtgggcagatcacttgagcccaggtgtttgggatcagcctgagcaacatagtgagaccctgtcctacaaacaacaacaaaaaaaacttagccaggcatagtggtgtgtgcctgtagtcccagctactctgagggctgaggcaggaggattgcttgagtccaggagctggaggctgcggtgagctgagattgtgccacgacactccagcctgtgtgacagagcaagaccctgttgtcaaaaaaaaaaaaaaaaaaaatttttggtaaaatacatataatttaccatcttaactattttgtaagtatgcagttctgtagtgttaagtgcatttacattgttgtacaaccaacctccggaactcttttcgtcttgtaaaactgaacctctgtaccgattaaactccctactcctccttccatgagcctctagcaaccgtcattccattttctgtctctgtgaatttgtctactctagatacctcttctatgtggaatcagacagtatctgttttatttattctggcttatttcacttagcttgctttcaaggttcatccatgttgtagcatcttcttctctctctctttttttttttttgttttgagacggagtcttgctctgtcactcaggctggagtgcagtggcgtgatctcggctcactgcaacctccgcctcctgggttcaaacaattctcctaccttagcctcctgagtagctgggattacaggcatgcgccaccatgcctggctaatttttgtatttttagtggagacggggtttcaccctgttggtcaggctggtctcgaactcctgaccttgtgatctgcccaccttggcctcccaaagtgctgggattacaggcgtgagccacgatgcctggcccacttctctcttttgtaggtcctagttcacatttggcaggtgagatcttagaaaacagtccttttcttaatttatttctcattgagatccacagaaagttcagctggtgaatacaggtgtgtgtcttggcggaaccttccagggtcttggtttataatccaggtggttctcacaatggttaaggttcctgggtatagagaacacatgatggatcacgtcatcttgctaagagccaccctcaggctgtccgacctgttgactcaggatatccccttgggagctggaggtagtgcagctcagagtgtgggatccgggaattactgagggctgagtctctggcagccgccgggtatgctgttcaggatggtatcactcacctcttgggatttgcaggctcagcgctgctcttaacgatcagctggatcaatgttctcaaatgccaggtcgcactccaccttgctggccggcaaggtcctcttaacctgttggtctgctttctttgttacaaagttggtctggcttatactgctgaaggtcatgggatttttgctagcatattattgaaatgagacatttgtggcactggcgttgtattgtttctgctaataggagcccgcgtgtctttcacatatggttagtctgattgctttttctagcctgggactttgccttggagagagtcctagcaaaataccattcacagccttcttccacagggaaggatgactaagagtttagtgctggaagagcagaagaggaaagctggaagatcagaaatgaaattggagctgttgatgcgtgtgtctctatggtacagtgggcaagccctagtccttcttgggttgatcactaacttgtcatgcagtgtcttgggcaagtcctttcacctctcaggacctctgtctgtctccctatagaacggggaaggtggccgggcatggtacctcacaccaccagtgctttgggaggatgaggcaaggggatcactggaggctaggagtttgagaccagcctcagcaacagagcaagacttcgtctcaatttaaaaaaattaaaaaaaaaaatggatgggtcaggcatggtggctcacccctgcaatcccagcactttgggaggccaaggcgagtggatcgcttgaggtcaggagttcgagaccaacctggccactgaaatcagttggtgaaaccctgtctctcctaaaaatacaaaaattagccgggcttgctggcaggtgcctgtaatcccagctacccaggaggctgaggcaggagaattgcttgaacctggcaggtggaggttgcagtgagctgagatagcaccactgcactccagcctgggctacagagcgagactctgtcaaaaaaccccccaaaaaacaggaaggtgatttctgccctgctcaccctgcagaattagaggattccatggaaaagggttgattactatgctcagtaaatggtaacttgatcctagggtcatgtaatgcaaacaccattttaaggtgattaaaacccactcagggttaacaaggggcccccatggtcatttctcatggcagtgatatttacatggctgggtatggagcgcaccccattcttccccttcacccgccactcccaccctccccgcttttgagctgcctgaggatgggtggtttgcaactcctcccacaaagacttctgtcactggtttcatctctgaattactgtggttaatagacacttctaagtaatttcatgtactatgtgtggttttaaccaactttaagctttaaaggccaatcatccagggacatctccagatggaggggggaaaaaatcaagcttgttgccttcccaacctgcagccactggaggcataaccatgagtctgtctataggcattgctggtctcattagatagagtcagaggagtttggagccaggtaagtatgacagcaggttcttagaggtcataaaatagggttttaaattttcccctcaagtctttctcaacaccaagcacaattctcagcaggagtttaataaatcctcggatcttctaacagttagaagatgtcattttgaggaaccctccaaaagaagcgtgtagatatgggccagggagcttgaaaactttgcagttagcatggcaggagctgacttaccctgagctggaaagagaccacttgtgaattcatcaattacaacaggggccaggaaagagaaggtggtggccagtccaagtctctctccactactagagtacagataagttccacagcaccacagattgaccatagaacagtggtgatcagtgatttaagtacattaaaaggatgttgtaagaatctttaggtatgttgtaagaatctttatcatacagagaattttccttatctaaaccactggatttatccgaccttcattccccatagtgctccatccctgatgtctactcagttttcagccaaatcaaggtcaggataaagaagaggtttggatggaagtaagctggatattcaggctcctgcagtaatactcaattattgaattctctagaaacaccaactctgctataatgaagtcctcagttttaaaatatctttataaatcaggtgattctgtattggcaacagccagcttgctgttccctgctttgttataaaaattagatggtaaaatcctgagagcttgctgggattgttaaaagataatcttaagtattttaatgcacattattcttcatgcaactttgagccttaagtgccccgaaacagtaagatcagaatccaatcgaagagcaatcagctggtgtcatcatcctgagactccagtccggtctgctgttaccctgtgaagctcctggccactctgtggtcacaactacctggctgagaatcagggctgtgggaaataccatggctgagatgcgtgatgctcatttaattttagtatagtggatccaaaacaaaataaaacaaaaggttcattaacatcaaggtttatagtatgtattttctagcacatttgacatgattttgatgtgggatagcatttttgtgctgtagctcatttcttcttccctcctactcctcctcaatcatgtaatgtgtccctatacctgccatactatttgtacctctggtaatgaaattccagtgggcagaatgtgtcattggcatttctgcttgctaacagtattgctgtcctagataactagagaccctggtttaatggtgaagcattcaccgtatagcccttcagattcttctgtgtgtgtgcgtgtgtgtttctgccaaacttacaaatgcattactcgaacctatttttctcatattgaaggtgattgataatgcattaaccaatataatttgtcatgtactattttgatgagagtaatttatactgcctcttgggctggatgtagtaacatttttgactaagtactttctaacattaatctaaaccaatccttgatttagaatataacctactttccactctaaggacattttactaaggctggcttggttataaagttttctactggctgtcttaaaacagtgaaaatgctcatctataaatgcggtaagtgtctttgtgatatattgatctctcctattttcttgcctctcctgttaccacactgtgggtggtaacatatctgcaaaatgttttatagggtatggagtgcaacattttaagccaaaaaattgaaaacaggatacgaaacgagaagagggggaaggaggaaatcgattaaggtcatctccatatattaaggatttagtggtagaaatgccaagaatgacaagtttgcatttgtagcaggcaggtggcaccaggaagtgttggaaaacccgcttggtctcagaaaacatgattaggacttctttgccacatacattcatgaaattatgaataggttagcaaatatccttaagttatacgctatgccgttaaaccatgtgaatttgccattttgtgtatctgtcggtcattccagtgcccaggtgtgagcagggtcaagatgataagcagaatactcacacagataggttctgcactgtgaaatatgaagcctgtttacaataaagcagacctcatggttttcgaggatgcattttcaaagggtgtcagtaatgcatacttggggaaatgttttgagggaagtgtgggaaggggttgcaggtgtgtgagtgcagatgaacttggccttatgctagtttcttttctctttcagcacatcaggtccacccatctggccgggcagtaccttcttcaagagaaatggagcccttctccaaggtaggtccctagtaacaccccttcctctccctccccctcacccacccgcctttcatcactcctttgtgcttggtgtcaaataggacagttctgtcccgtttaggagtggccgctttctggagaagtgtgactgttgtgggtggggactatttgtccagttctctttatttgttcctactcaagcttctcggtcgctgtgaatcatgagtctgaaaccaggcctctaaggactgcttctttggcccgccgtcactgttcatattctggaagtgttcggcttgctttggtgatgttggaattacatggtaattagaatgcgacagaaacataaactaggctgataaaagcaaacccctttacatgtttcaaaaacttgagctgaaaaaggagggtttggttattctggcacttgtatcatcatggaggtgcatgcatttcttactgttgcccaacatctacatgtacctggaaggttggccgtggtttgttctgaggttcggagtccagtcaccctacattggtccccacaagtgtcacctacaggggacacccttgctgttgtccagctcaactcagctgccttgtcctagtccctaggcggtgtgctcatggaattccaatgacctttcacctctacttttgccattaagttccttttgaaatggccaaagttaaggaggaataaatgatttaaaaaatagcaaagaggttcatttttaatccttttagaaattactttggggttatcgctattttggatatctgttctgtaaataaaatggaattgagtggttcccggggccttcgagctttctatccctcctacttctgttgattggctaggagtcagacaggccctgctggccaaatgtggatgagtttggctgtgctaagagcttttgaactacactgggcttatggtgagggattttagtgtctattgattggttgagagctgtttagcctctttcccttagaagtacaggctgagggccggccctgtgtgtgaaggagtaggagataagtatggttaagaagagagacatgtatcttcaggtttccgtagtagctcaaacccttgtcagagatgtcatcacatttttagtgctgatttataggccacgcaattgcatactgtgattttaatagcccgtgaaattgggaaatcaagcgtttctttgtatttttgcttcgtacaggtgaaatgtagtcaggcaagtttggttaaacctaattttaataatcatcgtagatatcctaaatgtttaagaaaacaaaaggaagtccctccactctcaaaaattaacacataatttaaaaaaatctattctgttttcccttcagatagtagaagtggaaactgattaggatcagcctttgggttcttttcaagtgagtttcaaagttatgtgcgtcatttttcctctagaactatagcagtgatatgaatatcattcaggtttggattattttgagaaaagagattttgttttcttagagccttttctcacgatttttattcattcactttggcattaggtaagttctttttgttcgtttctgtggggcaaaaacatgagggaaatattaatattgataaggtttctgaagttgagagatgtcagtatgagattatcctgcgggtgtagacttcttttctcttcctgatagggttacaaattcccccagttgctctaggaactgtgaattaaactagtacagatttcagatgcttattgaatccacatccagttaaatgcaacccattaaaattttgtacatttgaaaatcagaagaatcttgatgagagcttgggagggtgggcagagatttgttaacattcatttttttttctgtgatgtttcttcattccctagagttctggagacacttttgttgtgataatatttttttggaatatgtgggtattcttcctaattaatatttttgtgtcctttggtgggtggttctgggccatgggaaagttgctaaggcccacaagcaagattttacgaataaagatatgagtacctaaagaagggactgtccagtcatgccaggggaaggtttgggttagaatcaagtagaagaaaaatgtgcctgtttaatgccactctctcaggtttttgatttctcactttctgttttcaaaaatgtacgcacatccctcgtttttccctatagcaagtggaagaaaatttttctagataatcagacgagtagggaactctgttaatagcttccagccacaggcattggaattgagggcaagtagaacgaggatgcttgtccccaaagatggcaattctcagtgctgggtgagaaggtgcagtttggtcacatgggggtgacgtgggaatctttctttagggtgctgtgggaccagtgactggccagcagaagccagccggggttatggatcatgagttatggatcactagcaggactggcagaattgaaccagggtgggggataacttgcttcatggagtggtctccccaggactcaataatgcaggataggaaaataagtaggatatggtttggctgtgtctccaaccaaatctcatcttgaattgtagctcccataattcctacgtgttgtgggagatcattgaatcatggggcggtttcccacatactgttctcgtggtggtgcataagtctcacgagatctgatggttttataaggggtttcccttttgcttggctttcattctcccttgtctgtcgccatgtaagacgtatcttttgtcttccaccatgattgtgaggcctctccagccacgtggaactgtgagtccattaaacctctttttctttataaattacccagtctccagtatgtctttatcagcagcgtgaaaatggactaatacagtgggggtgccctgtcgtgtagaggagggagacctatttttgtcagaagggtgggagcagaggggctgtcatttcttgggagaactgacacttaaggccttaaaaaagcagatagatttaggtgtgtggaaatagaaaaaaaatgtcattgcaagaaagagaaataaccagagaacttagcttcacagagaccatagcaacagcgcggaacctgagcacttcatagacacctttgtatagcgacgggaagaataatgcaatgtctgaagaggaaataatggaagttaaaacctgaagcaaagttgaaatcaaaatgacctaatagttagagcggggcaccagttttcattgtcaaatcgttgtttggtttagagtggaaacttagtacctttatttttcccagcacaaaaccaattgtaagaattaactggttgttctcgaggtcctccctggacgtcgggtgcctgtattttggttcagaatcactggcaagaggggctgctgaatcacctctcggtttcgaggataatggggtaagatttggtttggattacaccaggcatgggtacttaacataattggtcatttcatcagttcacagtctttattttaaatgccatttaggctgctacagacagtttcagcaggctagagagcacttcaattcttgtacaatggaaaccaagcagagcattagaaggggacaagctcatttttcagaggggacccagggcaggctgaacagaagagtggcttattcagagccctgcaggcgtggccagctgacaggtgtccccaccgtgccttcttcttgtgtctgtgtgtctctgtgttacggtctctatgtgtttgaaacgtgttctttattttattcgtttaattcatttactaatctctcttattttgttaatgaaaagaataaagtcttttttatattttcccatttccaaactccctgtccccctcccccatattccattcacccatcaaacttaaaattaggttactttattaaaacatcacccttggatgatttgttgtaatgagtcagtgattcataattaaagacattcctcacccctaatctgacccttcatctggtctctgatggtttcatcccaaaatgacataggcacctctgctcttggtagcttcatgccttctgctgaaagttgccacaagccatgctgattttatatcctacttctgccctcttggtcttggtaggccctgttggcctcagagctccccacggagttttgttcagagaggagctactgcctgaccattttggcctgcttttatttctagctcttcctccaagcaggcattccctgggcctaccctccccaccccacctgcaagcatttcttgatggtacatctctgtgtgtccagtcctgggttaggctggagatccccaggggaagtccaggtcccaccctctcaaccaggtcccaccctctcaaccactcacagcccgttctgtggtcagaccacgagtcctagcccttcttggaaaaggctgcttggcccacccactctaagaagcccagccactctcagcacagatgaaaccactggttttacaaacctttccagtgactcacttgacacccttatacccttctggtcattcttccctcttccttttctccgtcactatagtattgggcctctaattattatcaactctgtgtccctaggatgcggtggtagaattaaaataaattatctaacatattttatttccattcacttctgttggttgttgttattgttgctgttgttgagacggagtcttgctcttgtcgcccaggctggtgtgcaagtggtgtgatcttggctcactgcaacctctgcctcccaggttcaagtgattcttctgcctcagccttccaagtagctgggattacaggcatccactaccccactcagctaatttttacgtatttttagtagagatggggttttgctgtgttggccaggctggtctcgaacttttgatctcatgtgatccatctgccttggcctcccaaagtgctgggattacatgcttaagccactgtgcctggccatccgtttacttctgacaactcacactggacgagctaatgtaatggaaggacttaaaggcattttcagctcacagaggaggattgtgttgccttagactcccacctacccacccccacagctaaaatagggaaaaaggaaaccaggtcttctgctgtgagatgcatgctgttcctccatgtgcaccaatgtacacgcagtccgtagaatgtgcatgaagttgacatgatggttagatgacttgctttgaggaataccagtttcccatgttctaggttggcttcatatccaaacttacttgggagtaacagcgtttatcaccccttctccacaactcttacccctcccataactctgctacgaacttttactgctgaaatgtatgagatacctcaccttggttgtctttcatgccatgaaaggctcaagaggaagttatagtggaaggaacactggattatgagtcaagggacctgggttctggtctcaacccttcacttggtaaactttgtgaccttggacaagccacgtggcatacctagcgcttcatttgcaatttaaggagcagacctcagcgatggcaaagattccctatctagtaccagctctgttccactctagcaacttcccccaaaataggtcagaatggattttgatgcttagttctggctcagtggagaaagagtgttaccttcagccagctgtgtctgctgcgggtgcaaggagaggacagagtgggtggaaggctggctgaagatacccatccccaaacaagatgattttccaaggtcctgtggatcttagggagacaatacgatatattataggtttggacaacctggaagtgaaccctgtgttggtttcttgggcagctggcttaacttctctttaggagtcatgacaatgcttgtctcctggagtcctggtgaggatttggtggattcacattagtcaagcacataggacagttcatgctaaattcccaatcaaggttagctattgaaatattttacaaaactgcaactcttaggaaaatagggctaaaatcctccgaatgtggtttccttgcactcttcgccttcctggctcaaagtcctcttgcccatctgtttgggcagttctcaggatggggcaaaggctgaggatgcccagagcctgttggatgtatacataaatctgaaggagaattcgtacatatctttatctcagacacttttaattcctcataaataggactgcctccttgagaagttcacctagctcacaagtaccaagctgtactcgatactctcaaagtgtatattcacagcaggtgcacatatagctttgtgaaggagcacgggctttagcatcacagttaactggggctgaatccctccctctctgggcaccagctctctgaccttgtgcctcaggtttgattgcctgtaaaatgggcctgcgagatgtgtttctcacaaccccgttttacaatcaaacctgaggcccaaggtctttgtgatctttgtagtcttggtgaagattaaagaactgtgaatgtcagtcactctggtacctgacacctcacaaatgctccatacgaagtcagctttagccttcaatgtttcatgcctcaggtttctgaccattcattctcataggtatattccagttgaaaaaacttccaaaactctccaaacgagcattttcccaaataccttcctttctcatgatttccattttcagtgtcactgtctgatatgaccaggatgtcactaccagactcctgtgtctggccacagcctctggtctggagtcctggcaccccttacctctctgtaagggccaatgaatcccaggttttgtttgaatttgccctgaccctcgcccactcattgctttcccatttggttggagcttgaagcccctgggctctttggcctcttccatctaatctgctccgcaagctgactcttttgtccattttgcaaaggagggcatccacctaatgcataaatctcctgattctcaccctcaggcatacacattaaaaaaaattagcaatggcagaaaaggaaaataagaaaacctctctccattccccccaacacctaagtcctaattgccttctgtcctctttgggcctgcagaggccctctggtttcaaggaggggccctttattcttggcatcatttgtcttattgttctgcactgcattatttgtaaagatatttctgtaactacagtaatagagtcagctagctgcttttgcttacaatcagcggtgaatttacagggctgctggtctgcagctctgatctctcaaggttttatgtggtcagtgagaacatgcagaacacagtcttaagttactttaaaaatacaaggaaatgcaattttaaaagaaggctttggttgattctgatctttgccatctcttgaggttccaaatttgcccaatctccagttaccccccttcttccccagtggctacagcctggtgtggaatctgggaaaataccagtcagatatcctgtattttcctgtctgactttaatttcagctcttcccgctacccgtctatagtaaccattttaaccaaaatccagtgatgcacactgagaaaatggcagttttgtgaacagaaacagagaagtcaggaaatcgagggcctttattaagagcttcctccaggccaggtccctgctggggtgtgtgtgggcttaatctcatgtttcagggtaactgttcagtaggaggtggaaactgaggctggacttcggaagaggggaatcagggcggggaggaagcttatgggcataggttatgggcatagatgagctttgcaggaggttatagaatggaaaagaggaaaagggtccagagagctgacccatattcaagagctaggtttacagcagtgagagatgtagtagcaaacaacagtggccatgaagaagcagcggctcagtccgaaactggggaaatcactgaaatgaaaggtgcagagtttcacaaagaaggaaggggcaggagccccctcatagaagaataggaggccaatttcagcaaaaaatttcagggctctggggttttgtattagcatgcctctttctcctcaaattaggattattttatttttattttattttaatttttttttgagacagagtcttgcgctgttgcccaggctggagtgtagtgacgtgatcttggctcactgcaacttatgcttcccagattcaagtgattctactgcctcagcctcccgagtagctgggactacaggcgtgcgccaccatgcgcggctaatttttgtattcttagtaaagacagagttttcaccatgttggccaggctggtctcaaactcctgacctcaggtgatctgcccgcctcagcctcccaaactgttgggattacaggcgtgagccaccgctcgcggcttaatttttgtttctaatgtcagtccctcctgcccaccccaaataacatctattgcttttgttaccaaaataatatgtctttgttatagaaaatagacaatctaaagatataattactcctaattttaccatccacatgtaatacctatacctttttttttaattgaagtgagactcataaaattaatgattttacagtgtacagttcagaggcatttaatagttgcagcattgtgcaaccatcacttctttttttttgaaacagagtttcgctctgtcacccaggctggagtgcagtggtgcgatctcagctcactgcaacctccgcctcccgggttcaagcgattctcctgcctcagcctcccaaagtagctgggattagagacgcgtgccaccacacccgggtaatttttttgtatttttagtagagacggggtttcaccatgttggtcaggttggtctcgaactcctgacctcaggtgatccacccgcctcggcctcccaaagtgttgggattacaggcatgagccactgcacctggcctgcattatttctttgtactagccttatgcatttgatatggttactaccattttgtagatgggagaaacaaggcctgaagcaattgttctgctcgaagtcacagaaacctgaactcacaccagtctttacttcaaaatggcataaatatttctaaacagttttctactttagatatttgggtgttctacagtgttttgcagactagggctgagggagaatcctgttacgtttataagtaatttacaataagacaaaaagatggaaatgaaaactttgtcttctttcatttaagtaattaaggtgcttcattttccctcctcgttcctacacagttcactttatgatttttaaaaactagatagagaaaaaaggaaatcctaaaattagtcattcaaagattaacacagtgagaggaacccacccattctttaatagaatgaatattttattttagtctatgtgaattttatattagtagatagacagatgcagatacaagtaattttacaccaattataattcatgtataggaatctttccttatttaatttttgagcatttaaaaatgtttttctagtctattaaattatatcagttagattataaaatataaagattaaacaaccttggatcacattgcactgcagaacctgcttttatcacagtgctcagtcttaaaatacaattgaaaaagtcattccccttgaaattctgttgaactgtaaatggaagtctagaaatatttttatacaattgccaagagattttaatgaggaagaataactctttagaatatattctgagcgagctgtttgcatgacagtttcagacgtggacttaaaatcatccacctataaactgcaaggggtcaagtttgtgttcctgtttggttcccttgacaaccaaaaggtgtggctcagagtttctggggagtacctgctgcggtgcacgtgacatgggagtgggtgtgtgtgtgtgtgtgcaggtatgtgcacatgcatgagtgaatgtggcccctgccctcaggcctttaccagtgccaagtgtgaacttccagaatgaatctctcctgccatccctctgcccgtctttctccccaggtcccctgttggcctttgtgagtcgtgacacacaggcatagggtaaatgacctcagcttttaagtcaggtatacttgagtccattccacaccttgcttcctaattgccacctgattttggagaagttttctaaccctctttgagctgctatacaatgaaaaaaaatccctcttgcaagattactatgaggattgatgatgatctgtgtagcatccctggcacttagtaggtgctccaagagcaggtgccattgccacacttcactccagaggaggcagcataactaggagagaagtatatggaccttggagctggccaaccttaggttcaaaggccagcctctgccacccaccagctgagtgacctcgagcaactcatccaatgagtttgagcctttcctttccagtcagtcaaatagatagtagtacttacttcatgggattttgtgagaattaaaagataatgtatggacagagacctgcacagtgcctggtgatgattgggtatccaataaatagaattaatgatgcttatgatagcatttctgcaatgtcttgcaatttcctaagatgttcagtaccttccacccccgacagacaacagcaaaagcaatagtaacatagatccttccccagctgaaccgaagtgataccttcaggaatgtttcaaactgttttcagtctctctgaagctcctgatgcataaggcaaatacccacaggatggccatggaaggagtggaataggagtcctgactggctatcctttctgacccttctgagtgactaagatcctgcagaaatgtgacagaaaaagaaagttccttggagatgggctggaattgcttgtgatctgtccctctgattgtgttagaacgcttccagccaggtccaggtccgttctgccttagcacagcgaatcaatcactgtgacatggagggttttccaaaagagaaaagatttgttcagaaaggtaccaagtgaggcaggagaacagctctcaaatccacctccctgaagacaaggctcggggatatttatgggttagggaagcagggtggtctaacgtgtggggaaaagtgattggcaatggggaaaaaatgaagtaacaggttcattctgcacaagcatagtcggggttcatggcatctcaaaggaagtatgttcagtaaatggcagcattagcgtgatctgggggaggtggagcttttggccctccaatgtcaaaaggccacctctccggcacttgctcaggcccagttgaaggggcagtggtcctaactggtttgaactggacaggagcttgccctagtttctgaaaaacaactgttgcgaccattaccgtggtgacctatgaatgttatctgtaaagtagccagtgaaggtcaagttccagcattcagtggcaaggcctcagcttcatggaaaaaggaaaaaaaaaaacaaaaaaaacaaaaagcaagtgaccaaaagcaagcagtacaggcagatccgatcaaattaaccccttggtttcaagaatgcaaactagactaagacatttgcaaagactagtttcagagaccacagggagactgcaagacagccagccatacttgcagtgatacggaactttacaaagtcattgaagggcttgtgctgaacttctccctacctcatggtcaccacagcatacactggttggcccctctttccgtaggctgtgatttctaatggggcttgatcaggatgatctggtcctgctaatttgacacagttgcagtttggagttagaaccacaggtcttggtgttgatgacgtctgccagtagagatgctcccaacgtcctagttgtggattcatttcccacattttgaggaattttgtgaggatattgtgataagaaacaagaaggctgtgacatgtataaaggtcgattgtgtgctgatcatttgtgtattgtatttctcaggctctgggagacttttgtctctgtgttttgccatgcatggcctggaaaagaaatagttatgaagttttcactttttgcagctgtcatgggcccaagttgcggtggctcacatggacagtatgggttccaggaaccctgtcaggacagctttctcctcccacccctccacttcccatagattccaaatgggaggtgccagcttcttacagaaactccctggccttagtgactggtggagggataggcacgtggcccagtccaggccagaattccaccctaggcttcacatcctggctctgggagctccacagggtgtgctggcctcacgagccctgcacatggaatctgctggggtacgggaaatggcaccagcccagagacgcacagacaggggccactctctccttgccctacctgtggctggatttgatgggctcatcaattctcctttatacttaagccagcttgaattgggtttttcttatgtacagtcgagagtcatgatgaatacagtgtttctaattaacagtgttagttaaactaagtatacagcactggtgatttctgtgtgtcagtgtcatttcagcctctttgttgtcttaagaggcccacttagtggtttgactgtcccttgagagaatagaaggtgagcttggagagttttcagagacagtgacttgatttaaagaaagtaggatcatagtagtaatactcctcacatccacgtatcccccattatagctgcagagacctggcttacatgtaatttcacttacttcttgagaggtaggtggtatcttcctgatcttacagatgaagaaacagaagcttaaagtcgagcatttggctaaaccaagcagcatatatgtatatgtgtaaattaatgtgtagctgtatgtgtgtgtaggtgcatatatgtttaagtgtgatgagcatgtgtgtgtgtatgtgtgtgtatgtattattatgaaggattttcagagtcaggattcaaagccaggtccctcaaatgctaaattcaggtctatagcacaaatgctattttaggcaatccccatttcctccaagttcattgactcacatgtccaaccaatgccatttatagttagatggccttatatagagaagaactgtgttcaccccctgccacggcccccaccgccaacacgcacgcatactctgatcgttttggaaatggaacacattttctcttttaacatctgatcttcccctcactgcattttagattcattgtgaacaattttgagtctcattagaggtgtcttaattttaaaaattaagttgggaactagcaagtgagattgaagaggctatatctttggttctgacctggattttctttactcaattactcttcaaattatactgatttgagatgtgattattattatttttcctaagtagattggataatgagagaaatgcaaaggcatgctagactaatagtgatctgagtttctgctacctcacttgtccttccatttcccctcccccagccagagcaccgccccagcccctgcttcctggtctacctggtgagccacctaacctagcgaaggcagctgcttccctgtctttccagcgtcagcccagctatgaccactgcagcgccagggatcctggccaacttgcgcattgtaatcacgtgatgcagtgctcaccatcctgcagcagtttcccatgttagttcccagcccttccttatatgcctcatttaaatgtaagatttaaattgtaccgtctaccctgagaacccactgtgtagccaccctcatctcctcagggtcaaacctgctcacagtacctttatcagaattgcccctcaactgcttgaaacacatttctttcatctccctgtcttttttcctgtagggaagaagggaagaaggtaaactacctaaaagggagatggtgatgttttctccccgcatcctgcttcatcacttttcccctttgcttttacatacacacgtgtcatgctcaagtgctgtctgtgcattgactcatggctcgtgcctttggtatgagcctcattactgggtgagcttcgccaaatgagcttttggtgttgctgcaaatacaatggcgtctcttttgttttagggcctggagtgacattgtgatggagaagtgcacagttgaccatattgagccggtcaggagggtagatttaagagaggcagcaacagcagcctctcgtataagcagcagagtcttccctgacaccttacttatttcccccaggatctgagctcattcgccatggcaggaaccactaagattgtttggttatcccgttacttctgtcttccagccagactgtaatctccttgaggctggagttttcttatctctatctccagcaccttgcaggttacccagcacacggtaggagatcaatgaaggtttgtaaaatatatccatgtaacttactgttatggactgaattgcatctccaccgcccccccagccgcctccaaaatttatatgttgaagccttcaccaccaccgccccgcatgtgactgaatttggagatagagccgttaaagaggtaattaagatgaaatgaggacataaaggaggagtttttataaggactggtgtctttgtaagaagagataccaggaatgtacatgtactgaggaaaggccacgtgaggacacagtgagaagtcggtcacctgcaagccagggagacagcctcaggagaacccaaacgtgccacctctttgctctttgatgtcggacttctagcctccagaactgtgagaacatcagtttttgttctttaaaccacccagtcttagtattttgttctggcagcctgaactgacttaatatatttaccaactgtcctagcaccttgtatcccaaagctgggactgtaggggtcaactttggctgctaagggcagtttgggaagatcccaaggttggctgcttaagataaatccacagtaatgggcagctgtgtcccaccctgcactcctccttcaccaccagtgaggcaagtctggctaaggctgtttcaggcattcccaccctaccagggaacgtgaatgtcatcatcaactaagattctgggcctcttggaaattgttttaacttgacctacatcaccgtatgccccgagaccttggcagttctgtacacccatgaataatagcaattagcatgaaaagaaagctgaaagagtctcaaataggacgatctgcagtctggccttggaccttccacttactagctgtgtatacttgcatgtgtaattttacctttttggggtctatgatttgtttttaaaagtggacgtgctgctataatggacagttccttttccctcttttaggcattaaccctggcttgcaggtggagagccctccatccccccagttcattcatctgtgtgcttccaagtgacgtctctaccactagtttaagtcactctcattcctctggctacactggtgtgtctgggtggtcatgtgatagaggctggtctgattacagtgattctcagaccttttccagtgaacactggggaaatgctagattcaaagctgctgtttgtagccccaggggctgccggcagccacctgtgaacagaggagagcctgtccaagcctattttcaccagcagcgttgctgagttgggggacagagagtagggcttggtaaatgccatttgaaaggcatcactgttcctggttttcccagtcacaggcgataaaatctcttcaattcggtttttaaaaatcgctaaagatggaaagattactagctgataaagctattaacacctgccctgtacaccatacaggagctacaggagctttcataatacaatttctaaataagatcatgaaggcaaaggcaaaggttgtgacatacagtttgaacacagggaattattatttggaaaatccaaataataatttggtgactggtgcctcttggactcaatatcatgctctttgaacatctgtgaaaagatgtgtacattcttagcacagtgtcacctggtaaggaatgaatatatggaagctgttgttatcatcagtaagaattattgcagcagtgataggagggggatgtagaagtctttgagaattttgatttgatgatgaagatagctgcatggaatcctacttgagaaggaactgattctgtttcttttggggttaggtggtaccagcatcctcctgatgtggatggcacttgtttgtggaaactgagtagcgtcctcatagccaggttcctgacgatggaaactcatggggagccctttccttgtgagcccaccctgagggtgttcctgctcttcttgggcctgattctcatctgatcaccttggctgtatgttgccccagccaaggacagtatacaaagacaggccaaggttctggttatccttgtgatgtgatatagtttggctgtgtccccaccgaaatcttatcttgaattgtagctctcataattcccatgtgttatgggaagggaccccatgggagataattgaatcatgggggtgatttccccatgctgttctgtcatgttagtgaataagtctcatgagatctgatggttttataagggttttccccttttgcttggctctcttgatttctctctcgtctgctgccatgtaagatgtgtctttcgccttctgctgtgattgtgaggcctcctgagccatgtggaactgtgagcccattaaacctttttctttacaaattacccagtctcgggtatgtctttatcagcagcatgaaaatggactaatacagagtgcaaggtaatgattagggaggacaagaggggggctcctcaggtgccaagagccccctgttagttcatagggtgctgattacatggtaaattttctttctttctttttttttgagatggagtcttactcttgttgcccaggctggaatgcaatggcgtgatctcggctcactgcaacctctacagtatcctgggttcaagcaagattctcctgcctcagcctcccaagtagctgggactgcaggtgcctgccaccatgcctgactgatttttgtattttttagtagagacagggtttcaccatgttgatcaggctggtctcaaactcctgacttcaggcgatccccccacctcggcctcccaaagtgctgggattacaggcgtgaggcaccaccctggcaattacatggtaaattgtttgggaaaattcactgagctgtacacatacaagggctttgctggacatacgttattccaatagaaagtttcaaaactgattgggcagctgcaatttcattacacctatttgatttcagatttttattatgtacatgtagtgagcctcagaattcttacatggttaaaaaataggattgtcatagattttatcaaatcaagtggtaatttagagctgagcgaaacacaaagtaacaagaatttttatcacaattcaagcatattttataaagtctctccaaacctgcttgttattgatgttgttaatacaatatttagattccattttgaacattccagctggcaaagattactgaatgtcagtctctcccaagaatgagttggtttttttttttcttcaaaaattcattgccagagagttaggttcacaactgtaagttaagatgaacttatgtgactataagtgaaattaggaaaaaaatgaaaacccttcagcaaaaacttgagaaggcctttgccaaaacacattggtaaattatataagctttaaaattttatgtagacaaaagtggtttctctttccaccataatatcttgatggttaaatatgtcggtgaagtaattgttttataaactattgtttaaaccttgaaacttcatagcaagcgtttttctaggcagaaaacattgtgcttgaaaactttggagatttaaaaacaagcaggccaatttcactgcgatctataatttccagtggaatatgggatagccaagatctttttagtcgggaaacatatataattataccagtaccttagaggttcgctttgaaaagaatcctctttctctgcagaatttgttgaaatgattaaggttgcctgtcagttcagtgaaccatttgttatcttcaattaaactgaaagtctccatacatcagccctttgtaaatactgagtggttaatgctgcctcttaggtttccaaatgtcttaagaatgtgttgtaataaaaaaaaaattagcatcattttaatattaatactccgacatagattttatcttgagagtgtttctgaaccaaagactctgttagccccatattcaggggcacagggaatctcagatatgtttgtatttgttttcccgaaagagttaagacaatattttctttttttagttaaggttagttacccacatgtcctgattttgactagtttaactcttgaattcttcctctttagcatattttccctgttctagttgatcctttcccctctccaatgtctaataaaaagcttgttttcttggaacaaggtagtttaaatagtatttcctatgtgtctgggatcattatttttgtgatagcagcaaagtgccacagatcacactggcctccagtttgcatatttgtgtgtgtgcagggtctaagttaaatcatagcattttagaacgaggaggtttcttagatacctagctggccccatcctcaatgaatagacaagtaaactgggcccagagtcagggcttgccctgagtcacaggcaaactggtggtaaaacctgccccttctcaggtcagtccagctctcttttccagccatcaaattggaataaactctccttctcttcttcttcttctccttttttttttcttttgagacagggtctctctctgtcacccaggctggagtgcagtgcgcgatctcggctcactgcaacctctgcctcctggattcgagtaattctcttgcctcagccttccgagtagctgggactacaggtgcccaccaccacacctggctaattttgttttgttttgttttgttttttgagacggagtctcgctctgtcgcccagactggagtgcagttgacatgatcttggctcactgcaagctccacctcctgggttcataccattctcctgcctcagcctcccgactagctgggactataggcgcctgtcaccacgcccagctaatttttgtatttttggtagagacggggtttcatcgtgttagccaggatggtctcgatctcctgacctcgtgatccgcccgcctcagcctcccaaagtgctgggattacaggtgtgagccaccacgcctggcctaatttttgtatttttagtacagacagggtttcaccctgttggctgggctggtctcgaactcctgacttcaggcaatccacccacctcagcctcccaaagtgctgggattacaggcgtgagtcactgccgccggccctccttctcttcttaatatattcagaaatatggaaaggtagaaaagaaacccaaactgcagtatatatggtaataaaagcaggaatgtacagctgaaacttccttctcatcatactgggcccagcccctggccttgagtcccagcgtttctgcttgctagcagcacgtgtgtctttccgggtctcagtgtctctatctatgaattgggaagtcagacccacagtgatagatctcaggaaagacttcagtggtgttgctcccatgcctgccatacagggaatcactccacacctcaaagctaccactgaaccatttggtgggtctctctccttttaggttccttttgggacattgcaggccccagccaggcctgcctggacttggccccaacccactgctatgtgcatggtccagagtttgactgaggatgaccccaactccagggtcagcccaacccaaggctcaacctgtggttcaagatagtccgcacacatgcacatacacaaacacaggtagcagactgagcaatttacatatgctaacatgtaaattggggttattttgagctgtggaattgtgtggatagtttttaatgaattttatacttgccataataaaaatatattggttacacaactaaaatacataaaagaacaaaactaattaaatgttatagctgctcgtttatgtcattagggtaatgttaaaggttagttaagatctttaaaaatctgagcagcgcatgcaaacatacaaatggcagagtgattccgacacttgggctgcttaaatattagggggtagggaagctttcagttgggcccctctttgagcctagttgcctgtgccggagcattctacacttcaaataaatacaatccatatccttaagctgttacgtgaaagaaataacaactaatagcaagtcggccatcaggcccattgccgtacacatgaccctggggacaaagtgggctgcacccaggctgtgccagccaggagttctttggctggtcccctcccacctgatatagatgagctgggttagtgctaagaagagagagcccctcttttcttgctgattgccgggagcacaggggtgccagcccagagctctggtgcaggctgccgcagtggtcgggctctcccagagacctggcctcaccgggagtgatctcagcttcgtgcccgggagagcagatccccgtacagaaaagggaaagcaattcagtggcagattatgaccttgttgatcacatttgaaagcaggtagtatttggggagttagttcagattaaaactatggaggagcagttacgtaagcaccgactgtgcagggtgaggaccagtaagctatttggaattcccaggattataaaaatcattacgtgttgtttaacaactggaatacttttcaggtgttctaaatgatccattcacactgcccgacacgaggctgcagacttccactatctgctgttacttgtagagaatcccatagactgacctgatcagttccataaggaccagcattttagaagttctgtctgtggatatgctggttgagagtagattcagaactgaatgtcaggattccagaggttgaatgtgtgtagctgtttttatttcacttaagtctttttgtaatcttaaaacatatttaatatgcagttcagataggcctccagatgttctgtgacaaccaaagctggaaggaaggtttctgtcgggggagttgaccccaaagcctggaagtttctgccgagccctggtctgtactttggtgctcactaccatctgctttagagttgctctgctgtgagaggctgtatgtcaatgactatatttaattaatttgtctaacatatcccgcctagttccaaaaagaatttgcaatggcctacaaaagtgctgtatacctagaggttttattttttatcttattttattttattttttaaaggaagtgcagaaattataagggaaaataaaggcaagaaacccaagataaagttagaggataacattaatatacaaaattaatattgtaaattctaggtattggtttgggagtgggatcagtcatgaatttggctctgagcttcctagtgaccagagcaaagagggaaacatgatcatttgtatggtttaaatgttcagaagattaaaactgactcattacccaagagaaacacagaggtccgtaatactaaaacctgagagatgcttgtcctttagattctcatagaaagagatcatcagtcatacagcaagacgcatccttaataatatgcctggtttcaaaggcagtttcctgtaacatctctctaggcaaagcaatgcaacagagatgtagaagtcaattattcagtgatagttccaggaacattgccttcttgtctctgagtgactgggtctgaggtccggcccagaatctgtagtcttcaaagccaccaggtgattctgttgtatagacaggcttgatgctgtctgctataggcagtgagaaacagataactaagctaggcaagtggccagagctggaaacacagagttggtgagttgttcgtgatcaggggataaccgagcatgtgagaggatgtgagaggtgaagctcagaggaagtgagcctagtaaggaaagagggtgtggacgaatgagcctgataggaccccaaaagaggaaaagacctgggcacattcccaagggagaaccttcatactcgttttaaaccctttcacaaatgtggtttagaagaagctacatagatgggaaaggtatactgtcatgtgaagaagacatttgaaggtaaagcgcattgaatatatctttaattgggaccactgtaactattagttacatttatcttctgaaaaaagctgcttacattttagcaaataagatgtaggtgttttctgggaaaatacattttagaaaataagatgtaggtggtccaggtggtatcacaatgactactatttattaacctggcctgttgtgttccaggcatggagcttggcacatacctgcatgccttcacttgagcctcaccagagatctgtggaggaaaagtggcatcatcatcatcgtcatcatcatcatctccctatcagtgacagtgatttactcagatttgcccattccaagagaattcataaacttggcactctatctgtggttatgaagctttctttcccctttccttttctcctcccttccagggggttgaaataatatagaacatgaaatcagaactgttgtccattgttggtgaactaagggaggtgggaggctgagggtcacttggctcagcctcctcctcagccccctacagaaaagccaggcaaacaccactgctccagggtgttgctgcctctcagagcactggcccaccatgattttgtgatgcatttgtcatggctctagtgcgtgtgtgtgtgtgtgtacactcaaggatggttggtcattcccagtttcattctttatgatgtctccttttacaaagtagaaaacaaaaccatgaaggctctactctgctgttaggataccatcctcaagccttggtaaaaatgctcacaccattgtcttctgaggaaatgtcaccccttagagagtgctcacaggcacccatgccactcgctttgcattgctctgaggttaaaatcaaaatccacgggacatcgaggaccaagccagtctcacaccaagaccttaaatggacattagccaaagtctttgaaactttcatttttttgttttttggagataggatctcactctgtcacccatgccggagtacagtggtgtgaccatagctcactgtagccttgacctcctgtgctcaaatgatcctcctgcctcagcctcccaagaagctaggactataggtgtgcgccactatgcccaactaaacataatccagactctttatggtgaaaattcacctggtggggaagcccaaagaggattttgagagatttcctaatctagtctcttcccacaggatcggattatacaggaattggtacttacaggtggtaattagttctgttcttagaagatttctctagagggtaattcgactactttcttcagtagtatgtttcagcccaacttcgtggaaggaacttcttcacactctctaatttgaacctctcttcttatggtttgaatacaatttcctttacttctgtcctctatgacaaggaaaataaacaaatgggtctattccctgcatcttattgtaacaccttgaaaatgtcaccttgcccacaaacaccatgggcctcatggaaggtggtgggactcagcccctcatgatggaatggaaataggtccatgtgtccatatgagttgttgatggtggtggatggagccacctcctcctgccctagccctgggggactctcaccgcaacctgcaggataggtggttaaggaggggtttgttttccagctaaacaatggaatgtttctctgcccaaaaataactggtttatttcctactagctgacctgcagttcacacagaaaataatgaatatcttgaggggtctaaactatactgctttttatagcttcttctgattctttgaaaagtagacttgcagaggtctcacctgctcaggctcctgttggcagaatatcaaaccgtggtctcatagccagattttccctgaataatgaatgagccagtgtcgagaaagtcagaaatagaaatcaataaagctaaatttcaccaagaagaggcagctttgcagtggaatgatagagaacattgaggccaatggatgccaaactcaataatgcacatccttaaactctcacggattagggaaagcagaaaagaaaaccagtgtcttgggaagagtcagaagggatcagagcttgagaatacaccttgctcagtgggaagaggaaggatgggccaagcatcagaggctcagcttcttacggccgggacagcaatagcgtgatgcacaaacctcctgggagccagcgttaaacatcttcataaatcatatgtttgcagctgtgtgaccaaaatagacgtccacccagcctgtttgtcctggccttgtggaatgtggcgtgaccgtaggtcctcaaagacatctgtgattcctgcccctgcttccctcagtgccgttcatcaatcatctgtccaagcctaactctcccctctgattgccagtgacatggtcctactgattgattgattgattgatgattgactgattgattgattttcatatgagagagtttgaagcatattgtgtggagagccttttttatgccagttattcattgaaaaactcgattttccccttgaaaatgacaacaggtgtccttgaggggacagggcagtgtgaggagggtggcaggcagggaagggtggtgccagcacactcattctgacccgctggcaccaggcaaccatgagttcttttattagggcatgtcagatgtgcctctggggctggtgtcagacccacctccaccctgccctctagacttactgtgagcctctggcactcatggggaggtgtcttgttccttaggtgccttggtacattgcaaaaaaagaaagtgtgagagccactggaggctggttgtagaagggtaatgggagggtctctgtgcagagtggcactcctgcttcttactcctatgaagaccttttttcttgaggacagtcatgaatggtgtgcccagcggtttctcctggaaggtcagtttgctgaccccaggccttgttagtggtttagttggagtccgcttagaatgtcctgcgtgctgctttgaaaagagccctgggccaggagcaagggccttgggtttaaccttggcaccttttgtatcctcctttcatagccaaatagacatgtgcaatttatagtcaactccctgggcctcagatcctcaccaggagaagagtgttggatgggaccatttcttaagatcccatctagcctctggcattctgggtgtgagggagaagacttttgtcataggactttttgttcttaattgttctcgccattcctagagcctagtactgttgcgtctgacaccgagagaaccaatgcttgttgaatgaatgagtgaatgaatgaatgaacacagaccaacagtaattcatcttcataggcagctggtgcctgatttaaatacagagagccggtttccttgtgtttgactcaagtctacacagttggagatttgggcatcagttgaaatgccgcatttgtgaaaatgagaccggaaagtggcaacgtgggctcatggctggtgttgaaagaagtgttaatgtgtgaatttcttctaaaagacatttcacaatgcactgtgtccttagcgttctcgcccttcatcagaagaaggagtcgctgatgctgaggcctgtgctccctgtgttcagagagagctttatagagtagcccctggcctctgggaacttagcctctaagaatttgcactgcccccaaatgcgccgcacatgggaaatcctcatggggggaataaaaaaagctctgaatcgatacacaagtgtcattaaagcacttagctttcctgcagatctctgctaagtgctgctaagtgcgtcgttagtgggggagtggacaacagaaggcccatggctgggccgcagtggcaaaggtgtggtcagagaaggtggccttgagcactctgggtctgaaaaggtgagtaggactagtatctcttctcaggccccctaggaaggcctcatggaggagacgagtgttcagaggcagaacttggaggtgatcccaccccaccaggcagaggacacagattgatggccccgggagcagagccagcacactggtacacagatgggtttttttattgttggacagagtgattttgaaaatttgaattcattgccactacttaaaaatcaggaaattttacataaatatctggatttctagcttcccttgacatctgggagatggagcatccccgggcatgccttgctacagggcagcaactggctggacctgagcagccacactccgagctgtctgtctggccgtgcagttctgaccactcgctcctttccctgcaccaccccttctccccacctcccttacagacactcagccatttgaactgagtccctggttagggaacaagcttgctgacttctgttggggaaacgttccaggctcaggcaattcaagcagccttgcagaaggcaggatagcatggcgatgatggtggtgatgatgcagctaaaacatggaactttctactatgcgcagagcctcttctgagcactctccttgctttaactcattcatcctacagaaacgtgtgaggaaggggccattatgatcctgctttacagatggggagactgaagtgttaagtttcacaggggcaagtacctgctccatgtcatgttgttagtatgtgacacagctggggtttccatccaggcagcccgttccaagactggtgctcttgaccagggattaaaaaaataacagttacagggtgcagaatacaggccagggatggtgctgggtggtttgatgggccatggccatagatcccagcaacagccattgggacaggtaccatgtgccgatgaggaaacaaaggcttgaaaagatgagtgatctgctcaggcatacagctggagtccggaatccatcagggcagctgaattggaaagtcctgggggatttcaggaaagagattggggtcttgaaaaacgcagtgatggctagtgagaagggtacagattgactagagagggaggaggaggaggaggccaaagatttattagaaggccctagacacatatgtctgtacattctgtttttttaaaacaggattgaattttgcttctcttttaatttggcgtctgttttcttggtgctgtagcccaaagaaaggagcccccaccagccaaacttttcccttaagaaacaactccgggagtgaaataagacttgatcttttctgtgctcacaactaaggtttcttcagtccagtctatttgttgggaaagagccgtttgatctcccacgtgggcagcatcagggcaaacaggatggatcacgcctcacggagtggtgaaaactggaaccgaatctccaccttgaggccatgcaaagacgtgctggccctgggcagctctccctggggagctcttgaattcactcttccagaagcttcatgccctagagcgaatgccagatccctgccagaggctcttttccgcaatgccggtgagcactccctgaaaaaggaagtttccaaactcaggctccctccatttttggtcccctccccaggtgcaggctgtttcgcatcaggccttaatgagccctgacaacctggggcaggagggagccatttatagctaaactgtggtggctgcaggctgaccatcatgaggcagcattcttctccctggcacagtccaccaggatcagcaccgaggcaaaacaccagacacttagtgtccttgacaacccccttccaagctctcggagcttgtctcctttctctaaagtgactgcgcttcccactttggttcctgcagtcctgaatctacccaccctttgggacagtacctacccgccatgttgtgcacacactcagttgaaaacgcatgccagttttatatcctatttcacactgtatctgttgtttctctaaagataataatatctttgcatactttaactctttattccaagattttcatataaaatcgaggaataggtaaaatgtcccatttgcattttgagtcctcatatcttcacacacctcttcgagatatttatgtaaaatttcctgattttttttttttttttttttgagatagagtttccctcttgttgcccaggctggagtgcaatggcacgatctcggctcactgcaacctctgcctcccgggttgaagcaattctcctgcctcagcctccagagtagctgggattacaggcatgcaccaccacgcccagctaattttgtatttttagtagagatggggtttcaccatgttggtcaggctggtctcgaactcctgacctcaggtaatccgccctcctcggcctcccaaagtgctgggattacaggtgtgagccactgcacccagccaatttcctgatttttaagtactgcaatgaattcgaattttcaagatcaccctgtccaacagcaacgaaaaacccatctgtgtaccaggggtagtatatggcctactttgaaaagctcacatattaaaagtattaataatccttggctctatagcctggatctggctggtagtttagcaggttattagctgagtaacctttgtcaagttacttaatctctgtttcttcatttgttaaacgggcataagaatcactactttgtagggttgttgtaagaatgaaagatgatcatttaaatggccaagtgtaaaagtggcacctagtagacaatgaatggttgttattcaagacacagttcttccaaagaactatccctgtttcagccaaagcctactgtctgcagttgtagctagtttatcgcaaagcaaatgtctttgaatgctttaaaccttggatttgttatataaggttgagcatgtttgtgtcatttgtcttattgcttgtgctttgaggtcagggaccacatgtaaagacacctttgcatttcccatagcacatcattggtgttctgtaaatatgccaagttatttgtttatagtaatgattttatgaatccaaagcagcatgttgaattattgtacaaagaaaataaatttaaaatggaatatttcataaaggagatggcagttgagtgggatctttatatcgaaggaaaacagacattttaaatttaagtacttgattaggtccatgtactcttaatatttggaggctttttcctatgccagtaaagtaactgaaatccacccacattccacattaaatatcattatatgtaagctatgtaagagttgaatttagttgctcttgattggttaacatatgtttatagacatttaactgagcatttatttcaaatgtgcgaggtgcttttccagtgaattttgtgttttgggctgacccatttgcataggctacagaaagcttggaggcccaagcaccagaattaggggacctggtggatcaaacaactggtaaaggattctaggcagaaggggcagtctgtgagtcaggtcagctgcctagggtgaattccgggacagtacttgcatgggtgtgctgtggctgtaggaggcgtctgagaaatgtaggatatgtgggaagaaggctggaggctagaaaaggaggaaatgccaccttctaaggcaccagtggctcacaagtaggggcattttgttagaaaaaacacaaagcataaatccagcactttcaaatactaatctttttcttcagccatttcttggccaagataattttttccagtcagtgctgtggaactgtattagtctcttctcacactactaataaagacatacccgagactgggtaatttataaagaggattaatggactcacagttccacctggctggggaggcctcacagtcatggcagaaggcaaaggaggagcaaagtcacgtcttaaatggtggcaggcaagagagagagcatgtgcaggggaactcccctttataaaaccatcagatctcatgagacattttcaccatcacaagaacagcatgggaaagacccaccctcatgattcaattacctcccaccaggtctctcccataacgcatgggaattatgggaactacaattcgagatttgtgtggggacacagccaacccatatcgggaacatatatgagtttggggacagaagaaacattttcttctagaatgtgccattccccatggccctggcagaataacttgacttctcaggatgtgcttcctcatctgtaacatatgtgagttggtctgggagacatcaaaggctgcttttctttataaccaacaggtgtttttgcagttctctcagaattgttccattgctatcacatgaccaactagagtttgatattcttatatgtttatgctccactttagaaaacaaaaccaggctggatgcagtggctcatgcctgtaatcccaacacttggggagactgaggcaggataattgcttgagctcaggagttcaagatgagcctgggcaacatctgaagacccccatctctacaaaatttaaaaaattagctgggcatggtggtgtatgcctatggtcccagctactcagaagactcaggcaggaggatccgttgagcccaggaagtcaaggctacagtgagctgtgattgcaccactgtacttcagcctgggcaacagagcaagaccctgtctgaaacaaagaaaaccaaaaccagaaaacctccatcatgttcagtcaaattggttcagggtttggcacacttttcctgaaagggtcttacagtaagtctaatagactttgcaggccacagaacctgtctcacttctcagctctgcccaggcacccacaggtagcatgtcaactgatggatatggctgtgtccaaaaaagttttattgatggccattgaaatttgaatttcatataatattgatgacttttttttcaatcattaaaaaatgtatagaaccgctgttacctctcaagccatgcgaaacagatggatttggcccatgggctgaagagcctgtccctcctctgcagtcacaggatttcctccaagttcctgttgtagtcctatacaccaccgtgtcttttatggcattgtcccatcgttggatttgtgtttctttctcccgaatgagcagggactatgagaccttcctctacagccaagagtccctggcgtatcataggtgcttgctgaatgccttccaaatgaatggtgtagtaattatcccacttgcaggatggctgtgtctacatgaaaaatttggaagttattgtttcattcctagaaggcaacatctgtttggagagatccgtgctggaaggtatttagtagtatcacggtgtctgcgttgctgacttgccctctcagcatttcaaaggctgtgatgcttgtaaataaattctctttacctgacagtggctgctctaagagttactcagctgagaagctctgagtgcctgtgagtatgagtaagcgaagactgtcaggggaaaggggaaagggctttggaaaggaggatggagaagagacaggtatgacagcaacggaagcctttcctgctacaggtggcctgtaaatatactgtgtagctctgcaggaatttctagaatgttcctttccactgttggcaagctttagtgagtacagtgtatctgttgagtccagactctcaagagacttgatttgaatgagcccctgaaatacttattttataccttgtttataattttaaagcaagagctttctttataatttcaacccaggaatgatgtttggcattcaagtagcctggtttgtgcaggcacaggcttgtatacgtggagggtataatgccaggatgcacaaacaagaaattacaaccatttacttgtgtattattttctcaatttgaagcacttgaattccagagctcttaaatcaagaggttgaattcctgacattttaaagtattccacttgaataagctgtttaaaccattagaatggctttaaaaaaattcacctgtttcttggatcatttgctcttgagatttacttaattgaagtttttgccttttcattttacttcaaatcaaaatcatgtctatagcggaggaagttctaattttattcctatgggtaaagtcgatttcatgcctcagactgttccccaccaagtgaaagcaggcagttttccactgcctcacgtagcacagcacacgtaggcatgcacttatcttttcttccagaagaaatccttaaactctgacttttccccccagggcatcatttctgtaaatacagcagcttttacattttcagggtctctggcccatgtcagcttaaagctgaatttgactaaagccagtccctagggaagagagtagacagggatgggaagagtattaataatgaagtcacaaaattattctgctgggcattttttataaatcatttgctcctgttggtggaaagtgagacaatactaagatgcaaaagtatggaaggtggaactaaaactgaaatgatcagttcacatatttgtaaactgcgtattttatatcagtcgctggattaggcccctagagacagtggtggctaagtgataaagtctttgcgcttgtggcattttatagtgtagtgggaagacagaaagcaaacaagtagagaatcatatatgtaatgtgacctcaggtccagctaagcgccagacagaagaaaaaagtaaggtgaaggtagaggggttggagcaggaggaaggtgttattttaggtaaagtggccagggaaggccttttgaagaattgatatcgattccaaaatgatgagaaggtgcaattgtgccaccatggaggagaagagctttctaggcagagggcaggtgcaaagatggtaggaacaaacacggcttgttgaaagaacagcaatgtttgaggaatgagcaagacaaacagtggtaggacaggaattgggaatgattagcagaggccagatcactgtaagtcatgaagaagagactggattttattctaattgtgatgggaagccactggaaggttttgaggaagggcaaaaccaaatctggtgtactttttataaagatgactctgcagggtggagaacagagtaggttgacagggaacaggggttatgtgtggaatccagttacaaggctatagtcatagcctagatgagggtgatcatgatttgaccgagactatggtggtagcagtggtgagatatagttgactgtgcactagacctctagtccaaggtcttgtcttagagactcaagaccttgcactagacatcctttcctgtccccttatcataattctggcctatagtagaagcataataaattatctatttaattgagcctagaagtaaggttaagtttaaaatctactaatacttccctggcctttcatagctctcccaggttccagaaagctccactagcaacccagttttattggtcaaaattttcttagtccccaggcttgggtatgtaataacctttgactggttttaagctagggatggagaagagagggaaaaaggataattgtcatgttttatacaataattatacttaagctttgtgttacactttgcaatttacagaaagtactttatttgtatcactgtttttgcacaggagaattttgaaaaattatgagatggagggatggatggatgaatggacggacgggtgttcagatggatggacagactgactattgggtgggtgggtggatggatggatggatcaacagactgactattgggtggatgaatgtttgatggaagaaagaaaggaaagagggagagaagggaggaagggaagtctctttctcctgttgcccagattggagggatgaattgagggaggggttattattcatttaattagattttcttagtaatccagatctgaacttttctaaccgtcttgtcatgctctcttttcttcagccataaagccgcatccggctgggcacagtggctcacgcttgtaatcccagcactttgggaggctgaggcgggtggatcacaaggtcaggagttcaagaccagcctggctaagatggtgaaaccccgtctcgactaaaaaatacaaaaaattagccaggcgtggtggcggatgcctgtaatcccagctacttgggaggctggggcagagaattgcttgaacccaggaggcagaggttgcagtgagccgagaccacgcccctgaactccagcctggcaacagagtgagactgtctcaaaaaaaaaaaaaaaaaagccgcatcctgcaaataagatgagaaaggaggtgtgggcgctgggtggggcgggcactcagatgagattctctgcccactctgtagaattactcttcattgtggctctcagaactcggagcctgtgaaaaccatggtttcagggtgaggggtctctaccctaggctgcatttcctgatggcctttaaccttcccaggcctggaggaaatcatgccccgggaaaatatatgttttaacttaaagatgtaacacaattaaaatgtaaacaccagttctcagctttagccctttactgtgagggtgatgtaataagaaaggccactgacattttggggttgatgaaaatggtaacttttaaaggtaacatgggttttattgaaatataattcacataccaaacaattcacctatttaaagtacaattcagcggttttttttcgcagagttgtgcagccatcagcacaagcagttttagaatattttcatcacccagtgcgggggaaaaaccctgtacccttaagccatcacccgtcctcacaccaaatgatgacttattaaatcaagctggcaagtcgtggcctgcaggaaagtgagcaatgattctcagcactctgattagcaagtggctttccagcaagtgtcacagggctgcgggttggggtctgggggatgccagatgcgggatggggggctgatctcactacttggagtatctcagggggctgcctctccggctgcgtgtcctcaggagtttgtttgtttaacaagtcacttggcccacatagaataagctccacttttttggagaaaaaggaaaaatgtgaattttgaagcattcttttatatctcttttatctgaaaatttcttctttctcactcaaccacttttccaaatgctggtcctgatggatggaacaggctccccttttactttatttcataagtggtttataaccctgaggctgagaaacgatataaatgagggggaaagaagtatcccacaagaaatacccagttaaagaaaagaaaactggagaaaccaagcccccatttctttttttttttctccaatgcctttttgaagcacctaaaggccaaggaattttgaaatgagaactcgacagtgaaatgtttctcattttcaaacaaagaaacatttcttactcttgggtgttttgtgtgcagaaacacttttttgatatgtcatatttaaaggtgagaatgatccacttggtcagtagatccgtggagcgtcaggaagatggaaagaggaaagggccccgaatgacccacctgcgtatcttttgcatatgtttccaaaaatacaagtctgttcatcatactcgatttttcctttgtttttattcacgttttagcattccttttctgcattaaaaaaatgtatgcagtcctgctgctgccttcaaactagctttgtgatttgaagcttcactttctcatctataaaattcattcagcagcacccactgtgccttctgtagcacttccatccacctgacagtatgtatctttgttacttccaccacacccctagagtcgaaggtctgaggacagggactttcttcttcattcattgtgctatccccagcatatcgaacagtgcttggcatctggtaggttattggttaatatgagttgaaggaaatgaacgcacaggtgcccagtgcaaaaagaaaatttgatgatttctaaggagccctctagcttgaacattttatcatcgtgctgtagcctctctccagaaactgacactgttttgtacgtatctgaagggtaaccggattttcacattccctgatcttaacttttggtatgtttctcttctctgtaatcttaagcaagttaagtatggggaatcttcattcttgtagctataagacaaggtaagtggttttcctttcatcttgtttgaagtgaaattcttatactggtcttatcctgaagggccaatttctttttgtatttcagctttgatattagcatatgcccagaacctataggaaatcagtcaacagacctagaaaaagtctaatagctttgccttttcatactcttcacactttgcaaggttttcatgacagttggtaggtgaactctgagcatatttggccagaggcagattcctgtgtctctttgcttactaaggatacaataggagggcttatagatgacatttgtaggtatggcttagacggggaaatatttgaaggttcctgcattattttgggaacttgcctgaggttgcatttgtattataaggtcaaatttaaaggcagggaaggccgttaccaatatcatgtatgtatgtctaaggaaatattttgtcttttgcaggaacttgatttcattttgcttggttttctcaggggtgatttcacctcagttctgtgtaaagaggattcccagatctctagtattaagattgaatgcctgtcttgactagttgactaagagttgggtttgggggttggtttgtctgtagctgtttcctctgcaaagccaccttagcatcagtgcaatgagcttttcttgtggagccagggctgaagatagctttctattgttttcattctcctgcgagttggagcttaggggagcccttatgtgaactgatgcatcccggagggagcgcttatgtggtttcattggcgggcgcgatgcagacgcagctatgtttagattcttccctctcagttaccaggtgcccattcatgccactccctcacttccataggttgtggaaaatggtgaaaataggattgttgaggtaattttttgaagcactgttattgtggttgacattgatcatttgctacttcaattgtattccatgatgtcaaatttactgtatttacctgtagcagaaggaagataaaccctctcagaaaatgaaagggcagcattattatgtgttcatgaagtcatactgtggcctcattggctatcattgcagtcatcgaggatacattcttcataaaataacacaataaggctgatgtgtggaggtcacgggttgtcacaactgtatctaggttaaaaaatgttgctatccacccagccctccttaaaagaggctatttataatacaatgcgggtgtttgtgctgcttgcatcgggcaggcgcatcctgaatgaagaattagctctttaaaaagaacattaaaaataaaactcatgttgtaaagatctgacagccaaaagagattgtgggctgttgtaaatgcttgcttatttcccaaggttgctgagttacttgctctgggtcatgaaatattttgatctggcaagtaggctttgctttttttaaaaaaatttacatgttctagatatgaatatacctacctacttcctaacaatcacttggcaggccctttggggataggagccccctcctgggagggagggtctgtcttctctcctccctgcgttggccacactgctgcctcttattccaccaggctctggcttcctgcatgggccattccacttccgtctcccatcagggggcaggactcggggaagaaacttgggcataaagaatgtgtaaattacaccttaataaagctgttaagaaaaaataagcaccccgattaatggactgtgtcaccatcagatgaatattctaagtgatttttaaaaatagctctttcacgagagtgttttggtttggggtgtgtattcttggattgtttttattatttttctgcatagccttgataggaaaatgtagaactctgttatcataatacatgcagtatttagattggatacacttcttgctccccttgcattgatttcctacttttctcctttgccttttcccggtacttaagcattaagtcgcgggcattttcccagtgtaattgttgattaagtgctgcatatcccgtgatgattatgagaagattactgtattcagcttttaatcttgtgagtgtcaaatattttactttagtggtatcgttattattattattattcatagctctttctgtttgagtaatgcaatcaggcaaaataaaggtaatgccacaaattcagcatttttatagtaattctttgtctcagaatggaaagtgccaccttcaggccattctcaaatactgatggagatttatacagataggaatcagaatattttaggcttcttttggttgcaagtaacagaaagcaacaagtttaggaagaaatgcatatatatatatatatgagggcagggaatctattggaggaagtactgtgggtctctcaggaccccaaggccaagcatgtataatagctggcggtcatcaagactggaacctggaaggctgccaggaacgcgggcaccactcgtaccttctctctgtcactttctgtgttctctttgttttctctaatgccatgtgcaggatgatcagtggtcaccttgtggcattcaagccaaatatcctccatggaagagaatagctcaggtggcctggctgtctttcagttccagtgcccacttcccaggagcaacagaagttctgtgaatggagtcactgaaagcatgtgacctacctggtcctgacgccttgtccgggggagcagcagcatggagaaaaaacgtggtagccaggggctttctccatgggtggggagaggcagagctccgaggggaagaggccccccattgcgagtgggatagacaccccaaacagagccccattttctgttttcttgagagagacagagactccagattcttatctagcctccagtggcaacttctcatgcttctccagggttccacgtgctgtatcccagagccttgacactgagggcaggagcgtgggattctgaagagaatcccaaaaaactatttataatcaactgtctgttgcctagtgggagaaaaggaatcattggtatgaacaactccagttactgtttccacagaaccagcaggctttctggttctttcctgaggcactccgctttacataggaggaaactgagattggaaggtaagtgtatcacctgatgtcacacagccagaaaggaggaagctgggtcactgatgctggctgagcccaaaatgcagaacccacgtgtgtctgtctcattcagccaccatggtggctttgggttgaattttcacaagctcacggtggccacctcatgagcatgcacagagagcagtagatagttaatagggaagtggctgagtagaagttggcctgaaatggaaaatttgctgggaataatttacaggccaagtaatatttgtgaacattcgtgtgaacttaagcttggcatgagctatctatacagaaatctaaaatcggtctaaacgtttgggttgcacttggagccataggccatcgaagagcaatgccgttgtgtcactttgggtagggagtgtctggctcagccactacatgtcactcagaggatgccagtgtcagtgatatggggggtagcgctaattggaaaatggaggcttgtcagagtcactgctaactaataaaatcactgggaagtgggtgcagtttttccaagagtgattattgtgggtggcaagtattgagtgaggcgtagagggaataaaatcaaactgtctatacacatgctgctgcagtggaaagaaccctgggctgggagtcctgggagccaggcccggccctacccctgggccattcgtgggaccccaggcaggttactgctccactcaggccctttctccttttctttttagtatgttgtttaaaaaaatagtaataaaaaacattataccaaaagatatatagtgaaaagtacggcattctcttgtcaaggaagtacagcttcctaacctcctccccggaggtaaccacgatgaccagtttcctctgtatcatttgacagctgatgcctttacacagccctggatgtgtgtggatgtttacacagatgggcacaggccatgtgcattatcctgacttttttttatcatgtagctttctctgtatcagtgcatacagatttattcatccttgttattgatgtcagagtatttcactgtatggttgtaccagatgtattcaagccaccactggtagtgggcattatacaaacagtgttgcagtgaatactcctgcatgtatctttgcacacatgtcttcactattggttaaaagtgatattctgttgttatttatttccttaactggaaaggaagtccatttgtatttctttttctgtgtagtttctgttcatgccccatgctcattttttttttttcctattgaattgctttttcttgttacatcatattttccaaagagataatgatccaagtgctggtcagttctggggaaagtgatctgattggaggtttgctgagacccatcgtgtgtccatcgagaagtctgggtacccagtaaaaggcccttctccatgtttttgaggtgtggccatggcaagttttcagcaaggctcattctgtacttatctttttgatacttagtaaagggatgtgtctgctccacacagagtggagctttgaccagtcactgctggatgaacaagagggagagcatggccttgtgggacaagattgtctttacaaccactggtcttccagacataaacttgggtgcagaccctcttggctccagaattcatgggtcatgtgaccttctctgggtctcagtctcctcatttagaaaataggatcataagactggtgttgcaaggtggttgtgagcaatagaagaaccatatatttaaagtagctagcacatgattggttttcaataattggtagcttctaatattagtatcattgatatgactgttattatcattaccataaataaaacgattgacagtagaggcatgggctaagactgaacaattggttaatgcggcaaccatgttatattggactttgacttcaggaacccgctccaaaggatgcaatttggtgtgcaggccatctgcatctttgcaataaaagcttctttgcacctatgtctatttcatttgccttgtgactctataattttctttcaggccttgcacctctgttgctagacatagtacataaatcccatgcagtttcctggccttgaaaagggagagtgacttgaaagtactctacttgaattctaaatgggaaagatgtaaaaaccgctcctcccccctccaagaaatctgagggacagaaaatagatctttctctctggatctcttaaaccccgcttacgaaattaacaaaggaagatggatggctgaaataagacttccaaagaagagatgggaacctcctaattgattcccacaaaactgctggttatttacaactaggaaaattgcctgcttggagataccaattcagctcttgtggttccgctggcttgacaggaaacactctctgctccttgctgaaaaagctctgagggaagaggggggcggagtgaattacatctaactgtttaacactatctcattcatagatttctgccttttccccctggttgatcattcgcagtctcttttttagtatataattgttcattttaaatgttcatgtgtgctatagctgggtgaatgttaattactggcagtctgcaattatgttgtctgtttgtcatttccgtggcggcaagggtggtaagctagaattcttccaatagcaagaattgtagtttataatctaccccaaaaccatttagaaatggatacatttcactcacactcttgatgtagttgagtaaatgcattgttattgatattcattatgaggttttaagctcaaaaatcccactatacactaactgaaaggcacccagtattttggctaattcgttaaactcacaaccattttttgagtatccaatatgtactagttgcttaggacatacctctaaatgaactagataaaaaataaaatattctgcagttctctatgtaactgtagggacttcccaagtgaccccttaagccactgtgtggctagtggcattgagtgtgtgtcccgtaggctgccgaacactcctccattaccagcactgtaattgtgaggaatatggtaagaagttagaagccagtggcaagtgaagttcttattttacatttaagtcctcctccgtgataatggcagctgaaacagacttggaaaacataatttgaagatcagattcgttccagatgtccctggtatctgtgtgcaaattaaattgcggtacatcagtttgatccagtcaagaaacagagtgggattgggaggcatgtttgtgctgtagggaccgggtaaacacagttaccattgatgttgcctgaagccgcagtgcctcaaggggaggttccagcaacctagaccacaactcacctgcggggattcccagtgttgggcttcgttctggtgctgtgagtatacaaggatgggaatttggaaaagactaaagactaaagtttcctcctttaaaggtagagggtgctgaagagcaactccttagaggagatcggatttaagagaacttaggtagttggaaatacactgacttaaaaggctggagcaacattactgacttccccatattcatccaacaactttttttggtgcccataatgtgctagagtgtgaactaagacatctctgccatcgtacagcacacagctctatgggagaaacaagacacagcgtggacagatagatagatgtgatgtcatataatataatgcaatgtagtatcatacagctatgagtgctacaaagaattatgcagcagagtaaagatcaagcatggctgaggtactactttattaatcctttctagtactttactgtacttctcaatgtgagaagaaaaattagggggaggggtggtcagtttttgttttccggttaagcctttgctttgagatgatcctagattcacatgtaagaaatgatacaggcagagcctgtgtacccattatgcagtttctcccagcggtaacatcttgcaaaacagtagtgcaatatcacaaccagcttattgacattgatatagtcaagatacagaacatttctatcatttacgatgataaatgcttcggaatacaatcactagttcataagttgattgcatgtttagttttttaacaaaccgctaaactattttccagagtatctgtaccattttacattctcatgagccgtgggtgagtgatcccatttctctgcatccttgccagcatttggtgttgtcactattttttcatagccattctgaaggtatttaatgatatctcattgtggttttaatatgaatttcccaaatggataataatgttgaaggggtatctccatgtgcatatttgccatctgcaaatcttcttctgcaaaatgtctatttatgtcttttgctcactttctagttggatatttgtttttttttccctgaaatgatgacagctttgtatatattcagtattgccctgccacatgctctcagttgctgattttggttgtttgccaaatgatcatgtgtcagaggggggcctgaaacttaggtccagggggaatttgtcttctgttgtatgtagacagatggtggtgactgatggaagagagaggttcttagaagaccagtgagaatctctttctgggctaaaagagctgataagtggtggggtacatgtggctggaatttctccaggtcagctcctggcatcaggatgcaatgcttggtgggcagaagatggaattcatcaaagggtagaacttcttaaaggcttggaactgaggcctccaggccagaaaactagaggctttaagtgtccccacagctagagcatttttaatctttggggagagggcattaggcctccctatcaggacaatgaaaggctcagcttctaatcagcatgtgcaaattgggaacaaatgagcagaaacccccttctggcttactgttagctcccatagccccttgccaagatgctggccctctctaaagctccagagtcctcagtggtagaggaggtgctggctgcgtgctactttctttttatttttttgagacagagtctcgctctgttgcccaggctggagtgcagtggcgtgatctcggctcactgcaagctccgcctcccgggttcaccccattctcctgcctcagcctcccgagtagctgggactacaggtgcctgcctctacacccggctaattttttgtatttttagtagagatggggtttcactgtgttagccaggatggtctcgatctcctgacctcgtgatccacccgcctcggcctcccaaagtgctgggattacaggcatgagccaccgtgcccggcctgcatgctactctcaaaggctccttctggcttccagtcgctcttgtgaccctgaccagacttttgataggttgggcctctagggagatgtgcttctccttagctgagagccaggggcctagtgactacatccaagaaaggaatgtatttttcatagagcaaagcttgcttgacttggagccatagacccagccatgagcgccagctctgccactccttagttgtgtgacctcaggccaaacactccttaacctgcctgggcttcagtttctccatctgctgctataacaaatcaccccaaacctagtggcttcaaacaacacaaatttataatcttacagttctggagatcagaactccaaaatcagtcttggggggctaaaataggagagaagccgctttctttcctattgcagcttctagaggctgcctgcattcctcgacttgtggccccatcctccatcttcacagacaaccacagcgggtcaggttcttctcacatgaaatcactctgacctccctctttcacttgtgaggacctttgtgattacactgggcccacctggactatctaatccaggataatgtccctatcttaattcgagctgcaaccttaattcccctgtgccatgaaatctaacatagtcacatgtgctggagatcaggatgtggacatcctttggagaagacatgcttactgccatgattgccaggaccccacagatgaagcatttcacagttccaaagacctgctgggcgttcaggtgtcatcctcttttttggaaacctccagggtcacaacggctgatggtttccaagagccgctggtgctgattggggttggcagaagcccctcacacaggcacactcctatactttactttgtgtggttagcttatcttctgggctttcttttgatttcaaagcaacatggcatggggaaggaggtcacaaagagacagtgagggaatcagtaagccacaaggttctaacagcccctggttccaaagggccctctccatggtgatgttttcaaaacatcaggcattactctccattctgttcttctcttcctgcaggtttactttagcacatacttacagtcacctcctatgggcataaggattaaataagaaatagcccacgctctcagggggcagttgccagagagtgggcagaagtgaccatagttcaaggcataaagttacgagtatcatcagggagcagacaaaagccaggaaaggtcagaggcaggtgacttcatttcttgctgcgggaattagggaggttgcaagaagggcaaatttgagcgggcactcatagagtgagtaagacttcaacagctggggatggggcagccctgctggcaacgagggctaggtgggccaagacaggaaaacataagcatgttcagggtaagcacaatgcaggggtgtgtagggctcgactggggagagaactccactttccttaccagctcacacctgtccaacccttgaaaaataaagatcttctcctttactcatggtggaaggtgaagcaggagtatatgtgttgcatggcaaaagcaggggagtgggggagggaggggggcagagagagagagagagagagagaggatgccacatacttttaaacaaccagatatcatgagaattcacttactgtcacaaggacagcaccaaggggatggtgttcaaccattcatgagggatctgcccccctaattaatccagtcacctcccaccaggccccgcctccaacactggggtttcaattcaacatgagatttgggtggagactcagattcaaaccgtacaacagcagaggcagagagtagagcgatgcagccacaagccttggaacgccaaggcttaagaggaggcagggaaggagtctcctctgcaggcttccaagcaagcatggtggccctgccaatgccttgattttggacttctagcctccagaactatggtcattaaagttctgttgttttgaagaactcagtttgtggcactttgttgcagtggccctagaactaatacacgtagtacacgaaatacccctgtactagaggaatttcgttgggttctccttagtctttcagagcagtttagatgtgcctgttgaagtcaaccaatggctattaagtggtctttggggagaatctgatgatccgaggggcactgtggctttctatcctgtatgtaggttgacgtctctgggatctacacgagggacagagtgacctggtgaggggaggatggagtgaacaggcacaggctctttctgattccttcagggactacctgtacagccaattgtgacatggttccctttagaaaatagggacctagactggcgtcatggggtttaggccaaaggccttgagttcatttactccaactcctcctcttgacagatgataaactatcccagggagtatcttgggacctacccgaggtcactctgctagtagcagaatcagaacttgaacttggaacttgaatctcacatccagatcactgagatttctagagactccagattctgtggttctcacttctgaaaattttcttgggcacagaattttaagttaaaccattagactgtgtttactgggagtggagggggatgacagatcataaaaaagaaaaagaaaaaaagggaactgttgaccttcaggaaagggatttgaaagaatgatcaagtttatatgatttaaaaattcatagatacttagttttactatgtgtcactgaaaaataattttctacccagtggatgggaaattccagctcctagcttcttcattcatggactcatcacacctaggtattacagagtatagaatttacaaaatcagcagccattatgtgacctcagacaccaccaagttaccactttttgcctttttctgactttcctgtcctcctcctgcagggtgaagtagagcaactaatgttatttcagttagatttcagctttccaggcttgctttaaatcacaagagtgggatgccgggtaggttcatgatggtcgcagcattgcatatacagcatcttggtagctttaaatcaatatctctcctaagggttcagaagaaatgtcacatacaaggtacattgcttgcacaagtgtcctttgtgtcggatgccctcgaatgtaatttctatcagtaagacataaaggacacatggagagggatcattttgctcggcagcacaggctgaaaggaaggaggggaggtggttattttttgttgttactatgactgtttcttgggttcctccaacaaagaaatgctgtgtggctttcaagtatctctcagtgcaaatgcttcctgtcacaagtgatcagtgtcctgccattttgaaatggcagaagtggctttagcagcattatgaaattatcattgccgtgctggatagctgagaccagcctctcagagaaattgacgctctcgccagctttcctcaaattatgtctcgtaaggctggcgcgctgtcactttaacaaactatcaccctgaaatggggttgctccatccagggctgtggaaaaacaaggttagaagagcagaggacttgtcgatggtgagtaagtgggattagttaaaccaatattgaaaaatggtttgcacaactctgggctgctcatgttccctctgaaaacgtgtgctctttcagcccgcgtaggcacggagacagttaaagctgcatcaggacctttgttatataatccttcccggttatataattaagggtcctgttttttcttgccctggtttacatcgattgaaatgtggatagaagattgcaacagttcatagtctcctgtaatagccgaggcagtaatttcattgattaaagcactcggggtctattggtcatcagtaacactatctgcagaatgaactatgtataggcgaacggtttgtgtttgtagaatattaaataagtttcagacacatgtatcctcctacagatgagcagtttgaaagaactggcctttggagtctgacttataggaaccttctgggttctgcccaggttactagcaggtcagaatcttggggcaggcctagatgtggaaaagtccaataaatcagtgagttctacatccgccatgaggcagctcctgtggctttttccagtcttggcccagtttcggttaggaaacgtgacaccctgaaggcagatagtattcttggggcttagctccacgccttcccgcaacactgagcttacctgtccctgaagcagtggctgctggcaccattggggcctctcccagctcttgcaaatgtcatctcagtggccataatttgctgccctgccatgctcccagccaatcgctttgagcagacctagagattaattacccgtgtgttccccgccaccacctgcttccatctgcttggtcttggaaggattgaaccatgggcatgtctgccttgtgccccagcatagaggcaccgcaaggtaggcaggtccgatttggagcacagtattgcatggagcggctgtaccattgcgtcccctcctttttctccagatgcgaaggttctgtgtctgtcccttagggccctggctgagaccttctgaatagctgctggtgcccacatcccgctgtaacagaagtccaggcaacagaaccacactcctctgtcatactgcctggcaaatcagatcatatccctactctgcccttccctccatagtggaccgagacccctgcattctttttcagtctcagccaccctccctcttggatcacctggcttgttagctcctggcagccctctcctctcctgaggctgggccggctcttgactcccagaatgctgtgtggccaacaggccagctagtgtctctcttggccaaacaggaattgtttgttgcaagtatttcctacaaagcaagttctaacattatatgggatatgggtaattttgattttctttatactcttactgcttttgctgaagttttccttggcgaacagatacttttttttttcattagaaagaaaagagtatattttaaaagagcagtttgggataaggaaaataaaaacacatcatcttttatgttcagtagaacaacaacaaaatcaccccaggtaagtcaatgcaaaaaaattaggcaggcatgcttctcctcatcaagtaataaatggcctgtcacaggtgagatgggtgggatgttatcattatcatcaacctcaagtcctgatgttcccgcagagctagtggctatgtgctactccagtagacgccatgggggatttatcacagggttgctgcgaggctcaaatgagaaaatagaagaagtactttataaatgaaagctattttttcaacagaaaaatgaaaaccttcatctccattgagaaacaaggctgaacactgtaaggagggttacagaatttaaagcagatgtgacctctactatccaagaatgtttgtttatctatttatttaataaagagtgtgtggcgcctgtcgtgtgcgtagtgcagttcttgatacttgggattcatcagtgaaggaaacagacacaaatctttgcccttgtggaactctgcgtgagatagacaagaaacaataaatatgataaataaaaagcaagttgtcaaaataataatagtagctagcacttagatgtgcctacttagtgctaggcacaagtctaagccctttatgtatacttaatcccatacaccctagcagggagataatagcaataacccattgggagaaaatgatccccacagagatgaagtgacttgcccaggggcacacgagtgctttagctggaattccatttcacacagcctggctttcatcagagcagatgctcagcagaggatggtggaggtgatgagaatgtgggaaaagaaacagagtgaagtaagagggattgtccattcagcagacgttttctgagtgctctgtacctgccaatgagttagatccctgggatatagaaatgaaagaaatgaaaagggtgtgtgttatccctccatagagggatttacagtgttcttgggttcacagacatataagcaaatcacatgatagcatggtgggatataccttcctccctggtttcctatggagataccatattggaagagcattggtttccatgaccctttggttttggactagtgaattcatggcattgagggccttacctttttctgaagtccattgatcagtggtgttgtaccctgtctctcactgcagagcttcaagggtaagaggccagtggggccattcactgctttgtttggattctgggccatggagccagggacttctgccatcctgagctgttctcctctgcctgtacctgcagggctggcccaggtcttgtggacatccttcggtttggtcggtggctgtactatagctcttttttgctcttttgagtgttgccctacctccttttatctcttattggcctcagcgagtgtcaccagagggacaacctactgcatcttaccacctgtacccagcactgcacacggacttgcactccaagcctggcagaggattggctggggagacacatgcctactaaagaaacaccatcggaagtgtattttctgctagggaagggtcagtagcatttggttcctgcccaaacagcaacacgttgattctcacaactcatctaacttctgcaactagggtgtcattacagtgtgtacttgggtgaagatggatcccaactgtcttttggcaaactttgttgtttttttctgtccctcttgtgatcccacagccaccaagatagaagagtgttctcgctgctgagctactttaatcccgtggtcagagtggcaagagcttaataaatacttttgtgcaataggatattttgattgtttgttttagggttatgtttgtttctctagttcttttgtacaacaaaatctttgactaagtctgaattgtgtttggtattggcccggcaatcaatgtgacgaattttgtcatgggtgacactcttatctattttagtccctgcagctaccactcagacctctttttccctagacacgagtgctggagagcagccatcctcaactcctctgttcccttctccctctctggggcagtggaataaaccccatttgtcagggctgtattggttgttctgattgcttattacgaggcctggtgttgtgcaaggctctctcatgactattattttatctggtcctcaaaacagcccgtttttacagccagcatgctttggaaagaggcgggaggggaagcaacaacccattttatggttaagaaaacacagaatcagagaaataaggtaacttcctcccaagtacacagctaggaagtaatagaacaaggacttaaatctacagttttttatttgtttgttttctttctaatatatcactccaaaggacatttggattaggaaatcagtttattccaggtgttatattcgttctgaacaagtcctctgtcaggaaatgaactgagcccatcttcctaaacatgtcctttctaaaactcacatggtttctacaaactacagctttttttattcctatagttaatctagaagaggcaggattgaagatactttcctaataaaataagaaattgccttctcttcaaacctatgcttttttatcactctacacaagttgaatatggtacaatattaaaatgtggtcctatcttacaggttaagaataaaacaaattatttaaatttacatttgaaaactgttgaaatggcccagcaagccattcttagccattcttacggactgtgaccttgttagtttcccagatgtcaccaagttttgcagtaggttttattgactaaacaaaaagaaacgttcataacccagaacgtggaagaacatcttgagggtacattgaagagtttagaaggtctgacaaatccctaaaatcaaattcaaaacgtgtcttcctgagctttgctaatgagagatcgcctcttttatcagaccatcaaatgacatcctcactgtattagttttctttgttgtataacaattaccacaaacagtggctttaaacaatacactttaatgataccagattctgtggcttaggaggctgggtgcagctttgcagggtcctctgcttaatgtctccccaggctgccaccagtgagtaacagtctccctggccaggcacggtggtgcattcctgtgatactagcactttggggggctgaggtgggaagattgcttgaggcccggagttcaagaccagcctggggagaccccatctctacaaaagcttgggtttccctttaagctcataaggttgttggccgaattccgtgccttgcagttgttaggaccgaggtcccttgtttttggtggctatcagctgggggccgttcttagctgctggagcacctgccctcaccagccctccgattccttcaaggccataggagactctcttcttgcagtctgctaagacggagccttctgtgatgtaaggtaatctcagggtgactgtgctttatcgtgccggattttattaccagaaggcagttacaagtcccatctgcattcaaggggagagagatgactcactgggggtcatcttaatgttcacctgccacaatcaccccacaaaaattcagaagaaccgctggtctagaacctttgaaaacaacatgactgacccgccacatttcatgagttcaccgactattatattccatccacaggaagaaacccaacatgaccaaatggaaaaaattgatcagtcttattttgtctagttggagtaaatgccgtgaagggagtccaattgatgaagaattaaatgagagcaaagagcttattccaagctgttgggaaggagatccgctgtgaacatgtgttacggtttatgtcaatattgcagcctcattcactttattttttgagacatagaaaaatcctgatttggacaaatgggagtcagccagaccccagaacagcttaaaattcctccttcatgggtgctgaggggtaccagcatgttgactgagatcattcttgttttacttggagtctaattcagggtatataaaaaagcctgaaatggaatgagttggtctttgtataatgtaataggctattcctgaaattgcttttttcttctggctctgtttgcttagcatgttagtttgctagggctgccgtaacaaagtacccagcacggagcggcttcaacaacagagatttattgtctcacagtttcagagatcagaagtctgaagtcaagatgtgggcagggctgtgtccccctcgaaggctctggggaagaatctgttccaggtctctctctgaggttttggtagttccttggcttgtggccacagagttccagtcttcagatggtgttttcctcgtgtttctgtctgcgtccaaatctccctttttcataaggatactgcttatattagattaggggcccatcctacttgagtatgaccatcttaactatttatgtcagcaacaacctgattccaaataagaccaggttctggggtactggttaggacctgaacacatgaattggggttgggggaggcacaggtcaaccaataacacttaatgaagaataatctgaaattttcccactagtcatactactctagcgagtaaataaaagtctccctggccaggcatggtggtgcatgcctataatcgcttgaggccaggagttcgagaccagcctgggtaacatagtgaggccccatctctacaaaaaatttaaaacttacctgggcgtggtggtgtgagaccccatctctataaaaaatttaaaacttgtctgggcatggtggtacatgcctgtagtcccagctactagagaaggtgaggtgtgaagatcacttaagcctaggaatgtgaggctactgtgagctatgaccacaccaaatgcaccccagcctggttgacagtaagattctctctctctacctttctctctctctacctctccctctccttttccctctccctgtccctccttttttttttttttatgtctccttggtagatcaatggtcagaaaacaactagatttccttcccctcccctccccccgcccccatcacttgggaatttactaatttctcatcagaatggcattcttgccttttggacttaattttagaaataaagctgctcttattcttcatttaaaattggtcagggataaacctacttatagaagaatacttgtccagaggccaattatctgacaacctcacctataagatgggtagagaatggagaaccaaggtctcaaaggaaatggaaagagttctgagtgaagatgttaaaacgtttgtgaaataaaccctttcagagagcctgatgggccttcactcacatcctgttaacctttatgttacacacgatcctaacagagttgtgaaagctgagtttccagttagtaaaagagcagaagcgtgaacctgtgtgtaaggcaaactcaggtcagcggatgatgcttcaggacagtgagggagggggtcaactcaaaaagtaaattgcagactagatctagttcaaatattatttcatatttttatttttatttttattttttttgagacggagtcttgctctgtcgcccaggctggagtgtagtggcacgatctcagctcactgcaagctctgtctcctgggttcacgccattctcctgcctcagcctcccaagtagctgggactacaggcgcccaccaccatgcccagctaattttttgtacttttagtagagacggggtttcaccatgtcagccaggatggtctcgatctcctgacctcgtgatccgcctgcctcagcctcccaaagtgctgggattacaggcatgagccactgtgcccggcttttgtattatatatttttcagagacagtctcactctgtcacccaggctggtgtgcagtgacgtgatcgcatctcactgcagcttcgaactcttgggtccaagtgatcctcctacctcagcctcccaggtagctgggactataggcacacatccccacacctggctcttttttaagttctttttttttttttttttgagatggagtctcactctgtcgccaggctggagtgcagtggcacaatctcggctcactgcaacctctgactccctggttgaagggattcttctgtctcagcctccctagtagctgggattataggcacgcaccaccacacccagctaatttttttatttttagcagcgatggggtttcaccacgttggccaggatggtctcgatctcctgacctcgtgatccgcccgcctcggcctcccaaagtgctgggcttacaagcgtgagccaccacacccgtccttaagttctttttatagagacagggtcttgctatgttacccaggctagtcttgaactcctggcctcaagcaatcctcctgtcttggcctccaaataagattttattatgatgccttcattgatgtatgttctttgaatttctgtagcattttgtcttccttagttgattgtcacccgttttctaatgtagcagttattcatgtagcacatatttacatctctcctaccagatgattgttagaacatacccagttgtgcctggtatagtacctgccacacagtaggtgcctcaataagttgttattgaagatggaaaactaaaacatatcacatcatatgggcaaggtagggttccaaagcatttggggcagaaaaggtaattctgatatttactctttgaaattaatttttatgaaagttatgaaatctaaattctcacctctccttaggcttttgacaggtgttcacagatctcattttatttataagcctatcagtttttaataatcacttttaaggaggccttttattaatgtttggtctgatttgcaaacttagttaattaaactcctttaaacattttaagctgcatttgtaaaggaaatcgaacttattaaatttataagtactcaattgcctgactcaacaaacaagcctcttagagcacttaagcaattcttataagtctaattaagctcataagtatgttacaccttgtggtcttttaagttttcttgtatagtatatatgaccttactgagattttgacttcaaatcaaaatctaagttgattatttaatgccacattttaagttaaagtctcaaggctggtctgttattctaatggacagattctcttaatcgttataaatatttgaaatactatgtttgaaatacagtgagtatttcaaatagttagaacaattgatacattgatctgcatcgatatgttgatctgcattgatgtcttgtttaaggaattcattctacagacctgatttccttaagcatttctctgctttattctaaatgttcctgggggtaaaagatgctcacacaaattgtccaagcatggaaagacctgcttcccatgaggacgcctctccccctgacttccacacctcagggatctttggaaacgtctcttccccagcaaccagcgccgcacccggcccacctctcaccctcgactgcccagtgggagaattgctataaattccaaatcagatgctttctgaaagggacctaccaggggcttctggcaactttaagaaggaaagtctgagcaattggaggctcctggaggctgcccaggaatgcagttcagtcctcggaatttctaattcttcttcgccctgaggaagctcacaaaggtggacaagcaggccccttctcacccgaaatgtaggaagccatcagcaacctgcaccctgggcgatctcccaggagaacctgcccctggcctttgtggtgacctttgctgtgggaaaggggaggcaggaggccatggggtctggccttggaaccacagcccgtggtctgcacctgcccacccagggactagtgctcttcccactggaggccgacttcaggaccacccgacacagcctcgccagcttcccttccaccctcggcctcccatcctcatagatctagcatacagtggctcaactcaacttgtgcctcagtcacaagcctcacggtcattgagattgcaggaaataacagaccagtaagtaaatctggctctccagttcacattttttaaaaaccaagcccaggccagttgcggtggctcacatctgtaatcccagcactttgggaggccaaggtgggaggattgcttgagcccaggggttcaagaccagcctgggcaacatagtgagaccctgtctctgtttaaaaagaaaaaaaaattgaggccaaattgtttcttatcctacagaaacactaaaggcagattccatagtttagatactctcagcaaaacttttgcccccaattatttccttttttaaaatttttattttattttattttttaaaggaagggtagagggaggtaggagagaagagcaaagaaaatgatgtttatttcactaaagaaaccatcaattgtgtcatcccaggtagttttgggcatcgccttcctaggtgaatttgggtgggaaggtggggctgccttcccggcttgctgagatgtttcggtgaccaacaggtgtcctcctgagctcggctgggtgtctgtgcccctgactcctgggttgagctcctttttatagtcatttgtaaatgaggccacaaaataaagaggcagatttcatgtggcccacactccttagattcacggtaaacattacggatttctctgtccacttgtattagtctacgtcccctgccctctggctgtcactagactggatttacatttttttgtatcttaatatatgtaagcgtctttccattagaatccaaagaccttgaaactctgtggaattgtgcataattttcatgtatttcctgtcttgggggaccaggcaacgctgacagatgttaaaatgagctggtatattcccagctttagttgactctgtccagagctccccagccccacagtgggcataggcagggtacttctcaggtgacatcagctctggagagctctgtgtgccacagcaatggccagtgatgggtttccacggtgacaactaagttctcaagaaaagattgtgtaggccgggcgcggtggctcacgcctgtaatcccagcactttgggaggccgaggcgggcagatcacgaggtcaggagactatcctggctaacgcggtgaaaccccgtctctactaaaaatacaaaaaattagccgggcgccgtggcgggcgcctgtagtcccagctacttggaaggctgaggtgggagaatggcgtgaacccgggaggtggagcttgcagtgagccgagatcgcgccactgcactccagcctgggcaacagagcaagactccatctcaaaaaaaaaaaaaagattatatagacagggaagttggtgtatgatgtgattttttaatttggttaaaatatttaaaataaaaaatgatattttaagaggtgatgcttcttgtattggaaaattctcttagaggggatactttacttcccagccgtgtcactgagagagatcttgctgcataagacaaacagtggcgaaagtctgacaaaggcctttgatccagtgaggaagttggcaaaatcaagttctttatgactgtgttgaagaaaaatcagaataatacagtttggttatcctttatttgttagaaaatgttaagggatttgcaaggctttctggcttttgcttcatatatcacaaatctgactgtaaccaaaggtaaaggttatatataatatggcatagtgaataatgcatggggagtgataacagactttaaaagagagaaagaaaagaaggtggcttttaagtacagtatggcatttccttttctgccgtggtgatacatgatatagtgctctgtggtgtgcaaaatgttattggttgtcatagcaatagaacaccatccaagagaaaggaggaaatgctagcctaagacacttcgctggaatagaactaccattataacaaaataatcattgttaccactatgtttactgtcaaataataaaatccacgctacatttagtggtaattctcagtggcccttacaccacactagggcttgtattacacacacaggcttctgccttcgtttgagagttttgtacctattgcctctgctgcttgttggtgtaaaaataggttctgtttttaatgcatccctgaactcactttcagctaccagcctgattccataagcttcagggtttgaacaccttctccatagagtgctgtaattaatttttatttttttccttgctgtcagggttgcctccccttggtgatttttcagtcatcgttctatcacgttagcctgtgtagtagaactgcctcacctggagctaatctttgctttctgatggttctcagggcattcttctggccgtctttcaaagcatgtattaacacttggatacaattgagaaattcgtctgataggagtactgatgctcagttgcctggcaggtcagccccagagagatgctgggggaccaaggacagggtaccatctaggtccagatcagacatctttaccacagtcatggccaccgctctcttcccgatccagcccatgaatacacattcgtgacccaggctggtgtacagtaggtagtatgaagtaggtagtatggaaagagccgtgtgtgtatttgcagccaggaaaaatcagtcgtatcaccagcacacagcttgcattgcgggtcctgaaaatggtgatgctttagttgtatcatttagatctgaagatggtgcagcactattcagtgctgtgtgccagctactctgtacatgctttctacacaccagctcatttaatcctcagcccattttacagataagaaaactggagcacaaagaggttaagtatcttgactgtggtcacactgctggtaagtactggagccgggatttgaacccatgccacctgaatccagagcctgcatcctcaactgctctgccactttccatggtctgaattggaaccaagggaggccgcaaatgaatccaaagcatgtggcttctctgggagatctgctgggcctcgcaagaggaagaagaataatgtgatgagaagaaaggaggaggaaggtgtggcttgcaaaaagcatagcaaaatggagcaaagcaaacataaagttcagctcatcagttgatatcagtatggaattatatacatcattataattttaaaaaaatagtcaactgcagaccgatgattagttctgtaagtggcaaggatcctgcctgagacttctctcctaacagcttctggcaaacctagcccaatgatacctcagtgctgcatcccagcaatctcaggggcgctgctggatacatatcctattggtcaaatggaatatccaaccaacacagctttaatgacaactgtaatagtagctaacattcattgacaatgcctacaaaccaggcgctgttctaagggctttgcgtgtatcaacttgtttgtaagggaagggggtgctattatcacattttccaggtgaagaaactgaggcacagagcggttacgtcaaattgccccaagttgtacttccagtacgtggtaagagtcgcagccatccactcgccagatgtttgatgacagcccactgcatgtggtgccatgctctcggggaacacgggctaaggaaagacaaggccctttcctcatggggctgacattcatgggaacacatgtgcaaacacaaagttagaagctctgagcatctccaataatgcctttattagtccgttttcacactgctataaagacatacctgacgttgggtaatttataaagtaaagaggtttaactgactcacagttccacatggctggagggttcaggaaacttacaatggtggcagacggcaaaggggaagcaaggcatgtcttacatggaagcaggagggagacagaaggggaagtgccacacttttaaaccatcagatctcgtgagaactcactgtcacgagatggggacatccacccccatgatccagtcacctcccaccacctccctcccctgacatgtggggattacaattcgacatgagatttgggtggtgatacagagccaaaccatatcagtgcctgtcaagtattaagcaggaatttcttaggggaagaagggagttgacaaagatgcaggattgagaataacaatctgttaaataaaaggagaaaataagaataaatgagctttgcttatggaagaccttggaaggttagggaaagtcttagcgggtgctgaattgagaatagagtttgtgtatagaaacaaaggcttcctacgttggttcctaatgccacaaaacgtacaatagaagtagggtcataatggtgactgttcagtccagacctctcatttcacagatgaggaaagcaagacccagaaagtctcttttgagtcactttccctagaaaagcagccccacatgtccacagccagacgtgtgcaaggaggctcactacagcattctttataaaagccaaagattggaaacaacctaaaatgttcatgaccagggaaatgttgaaatagattgaatttcagcaatgaaaaggcatgagccatatccctcttgaatagaagacaaaacttatcattgaatgaaaaaagcaagctgtagaacaatgtatacgtttgtcttcacatgtgtaaaacacacacaaacttaatactcaattgttttgaaagacacagatgctcatcttcatagaaaaaagctcaggacaggtgcacaccaaggttgtaaggttacctttagggaaaaggcaagggaataggattgggtgacctctcttgtgatgacctgagttttaaaataagcagttgtagtcttgtattaatcttgtgattaattaaaaatcacatgattaaaaaggaatgctccattgacttgtccgatcatagtcactgaattagttgaaaaggcaagtctaggaccagtcaagtcttctggatcccaatccccacccacacacccaaatattacacagataggtgcaggcatggcggagaggggcccagggggaattaagggctttgtaaccagcagtgaattgccaaggaatcccaggaaccataaaaatgtcagtgagtgaaaccgggttttgctaaaagagtatgtgtttttcaaaaaagattccaatttctaatggcattagtattccaagcagctgaatcccaggctggaaaaaggtacaaatgatgattgctcattagcaaatagaatacagatgttcggttcattttgcctgagtgcaccagcacctcagggagccaccagcatagcgagccaggcccggcagcagtgctgcaggctcagcattggggagggctcccacaaacaggagggaagtgggtcactgcaaagctggcggggactggactttgttccttccctttggtagtttgttgggacccatgggtgggcatgggaagctgacatttccaaaggaactaccaagactattttaaatataatttttaattgtgcttttaaagaagatgtaattcttcaccacctccctatgaactagggtgcatggtcccctttggagaggaaactgaagctcagagaagtgaagtgggttgcccaaaagcacacagcaagtgaatgaaatggcgaattagaacccagatgtgtttggctccaggactctgagtctttggcactcttcttactagcagctaggcgtggcagaggtgaagaacacataaaaacattttgaggccaggcgtggtggctcatgcctgtaatcccagcactttgggaggccaagacagtaaggattgcttgagcccaggagttcaagaccagcttgggcaacatagagagaccccatctctacaaaaaggaaaaaaatagccatgtgtggtggcaggtgcctgtagtcccagctacttgggaggctgcaatgcgacaggaggattgcttgtgcccaggaggtccaggctgcagtgagctgtgatcgcagcactgcactccagcctcgatgacagagtgagaccctgtctcaaaaacgaaccaaaaaaacattttgagatctcacacccttgtcattttcctaaaacaactgtttcttttttgagcagcttccagatttacataccccgtttacccaggatcctcctaaaagagaaattaaagagttatcttcaacagaatcagcacagcatagggccaggctgggggaagggcagatatagagaataagaagatgccatttccacactccttgccctcaagaagcatctggcctggttgtagggtaataaaaatggaaaatcagatggctgtggaaggttttgatgacagccacacgcagcagggaacaatgaggattgtggattgtggaaggtggattttcattaaggggtgggaacagttttcttaggaagaaagtctggggaagtgattctagatgggtggcatcatggataaaaccgtctaagaccaaacctggcctgaggtcagtgagaacctggctgggggacatttggttcagcaagggccacaagccattgggctttgaatgctggagagcagagttggaccatcttgaaggatggagaagagcctacagaagcttagaaggaaaaaggggcctgagtgtggtcccatgaggagagtgggatagcagggagggagactgaggcagggagacctgttggaaggtagttccagaggttctggcactaaatgttgggcacccgggttaggttgtgggagagtggcttagatgcattctgaatgcatctattctatgatggtgttataaactccttacctgccgagacattttcccctttgacctatgccttacagctgattctgccttgggtaaacatttgggtttttgtgtttatctgttttttcttttttatcaagcagggatgatggaaagtttgtacccgattagagcataaagccttttattgctggaatgattcctccttgagctacctcctccctcccagcccctaccctacacctgtgtgcgtgtccacaggaagtcctctgtaagtgcctgttaaccaactttcctatcactaggatacatcagcctaggcacctgtagccccatagggcactggactgctcagcttaactctttgctcctgggcacaaatggtcacttctgacttttgatgagaaaaggtaggcattcctctagaacaacacttggcaaattaatatactttatcaggaggtcactgaggttcttttcttaagaatatgctggcttgtctttaaggtgagatgaagagttttagatacaaggagccatttcattattccgtcatctgcccagctgttaagattttaagatagcaagtcatcaaattttcagctgtcttgccgccgccgccagacgcaggaatgttgctgtaggtctcttgggccaacaaattctcctgactgccacactgcagaaattgcacagaagagccacttttcttctgcatttcatctgatggggattcacaactggagacatgccatatgaaaaacaaaaccagcttccagaaacaactgactttgacttcttgttctaaagactgagagtttttctgccactttcaccaagtccccaccttctttaaacgggtagaattcaatgtggtcggatgcattttgcctcaggggtataaaattaatttagaaatgacattttaaatagtggaagccttttatataatgatgtgaaaattattctgcttttgaaaatcaaaatcaaacatgaaacagtatgtctctctgtaaagaagtcagatatcttgttgggatattactttggctttctgccaaaaaaaaaaaaatctctattctcctaactctgaagaaatgaagcaaaaaagatatttgaggaaggaggaggggattgtgattgttttattgagactagaatccagatttgcaaagcagcacttcttttttttaactctaacccagacaaaaaaaaaaaaaattgggttccttccccaaatagaatctctaaactgtatctaatgaaacttgaataactagtttggattttaaaagacagaagaccctgcccattgctgactgcagtttaattatgtaataaaccaaccaatcctgtttttgtctggtttagacgccttgcaaaatattttccatagaatatactaccctcgcctaatgtaccttctcccttttcttgttaaccatctgatggtaaattcttttaattctgcttatttaaagcacttggcttgcctcaccttacccggtaatagttttatagtcagaagcagcatctggcctgatgataagaatcagaaaatggaattgtattactcccaaggagctagttgtagcctgtgctttttctttcaagaaaatactctgcttagatagaaggcattcacattacgtggtccccactgggctgagaaaaaaacagtctgacaaagtgcagaaaatatggttagctccctcaaagtcgagccacttccagggtcgatgccagtgaaaggaaacttgggtagagtgggtcagcatgaagtgcctgccctggaaaagggtcctttccatctctccctcttttcacggccgtaattgagtgaagactatcaccaacttgacttacaaaagctgctgtttgcttccttcttgtgccccaaagtaaacaaaataggcaggttcctgattcggagtgagtggcatggagcccaggcctttgtttgctgttaagttgtcggggcagcggagcaaatagatgtgaagagattaaccaaacaagaaggcctggcaagggtgaccctttctgtccagccaagggagtgcagtcatccgcacggtgcaggaggcagggacctggtctctagtagggacttgcacgtacaaacctggtcctctttcaacatcgggtggagctgaggatgacggagcttgcttcacagatgatagaatccattttagaggtttagtccaacccccttcttttacagataaggaaacagtggccatccgaaacctgcccagactggttggtaggtattttaaacaaacaaacaaaaaagatatatcatcaaagttgagagagaaggcacactgaattatttgttcatctttgggaactttgtaacttcttccagaacattttgccacttttttttgtttgcatattgccccaagagacttagtttttaaactctttaaagatccgtgagaaaactcattgagtaaagacccatctgtcaacaatgtacatggtaatattatctttgttactgttacagtgagtataaaatttagaagaaacaatagcttaataaattattaggtatagccttaagcaactgcaccacaatttttgatatttgtatgccttctttaagaaacatagttgtcaaatttcctctggggtgggggcagtcttactgcctcccccaggacaaatgggaaagggccttatttattacctctcttcagtattttccacacagggtgggctgaaaggctcatgtcctcaaaccagtagctagccaaaaacaaatacttaagttttacttatctgtatatttcagctgtctcccaaaacagagaggtgacttataatgataaggtgcaagaaacaatggaatcagccatccttaaggtagggttttgaaacagtagctatatgtttcaaaaaggggagagagggacagtcactctgcagggtctaaggaaactagagtgaccgattcaaaacccatcttcgagtttcctagcagctaaggcaaaaagagaaatatggtacacacagctcttatttctggtataagtacacataccagtgaagtgcctgcctctaagaatgagcccctgtcttggggctttcaatgagtaaggtaagaaatgtctttaacagaatttaatgtagttacgaaggttccacagatacccttttcttatgaggcccttggtgaaaggcaaggattcagagctgaactgaggttgtctccaggcaatgctgtatggaaggttgggggagagatgggcagcaggtgtgtggtcacattctatccatctgctctgacacttccctgtgcctgggaaggatgttggacggggaggccttagctggcagccaggagcatgcccagatggtatctctatgtccagaaaaacaaaatgaggaaattccccctccctctactaaccttgtaaaactgcagaggcctggtctgcctttgagtggctttttgaaattgtcaacttaaaagacctgagttttttataacgtatctctttagcaacaatgagctccagaaagtaactgctccttagcggtgtcaaacctgatcctcattaaaccagcagagccctcctggaggcaaacagctctttgggccctccagacatggaggattttaatgatgtgcctggttctgtggtctgagatacagaagtgataagtagtttaaggggttgaggcagaaagggaggcaatacaaagaattaagtatttacaaaattgttggaagggccaaaggagggggacccaggccagcctttcagaaatgatttccagaatcctaaggagccagccaccaggcaggctgccatcgccggatctgtgtggtcaggaacacacctcatggctgtgacccagagcccactgccacccctgcaactgcctcttgacacccaggcactggagaatgggcactgggaggtcacggcaggaaaacccagcctttctgcagcattgcaggccactcacacagccaaagggggcctcacctcacctcagcctgacttcatctaattggcagaactgaatttacccccagaaccccagctgcaaggaagtctggaagatgaagactgtagcttcccaacctccgcagtttgaaggagcaatccacagtgcccccaacacacgatccttgtgaattgtgagattctgataacataacactggccaaagaacatgtcttattctattccagctgccataacaaaataccacagactaggtggcttaaacaacagaaatgtattgtctcacagttctggaggctggaagtccaggatcaaggtccagcagggtatggtttctggtgtacagactttcacgtctggctgtatcatcacctaccctttttttctgtgcttgtgtggagagggaagaggagatctctcttatgtggtcactacttatgctactcttatagggccacgaatcccatcatgaagaacatgacctcctctaactctatcacctcccaaagggccctatcttcaaataccatcaaattggaggttagggattcaatgtatgaattttagggagacataaacattcagtccctagcagaacacatcttcctgttatagcaaatatttcaggatcatcccagaccaaaggatcataatgcttccttttagcaaggggagagaatttcgttctgttctgttgatgctctctggggtgagactcaacctaatgatgagtgaatctgaagccagtgctacccctttctgtataatccactcctaaaagaattggataaaagctatggaccctttccagaaacatgcacaaattcccagtgtctacatgtactttctgcaggtttaagtcttcctgtggactgaccacctaccccagatccctctttgtagcctgtttcctgttctttcttcagtataagcgactctttgctcctccagaaactgcttttgtttgggtggtcatcagcaagccatggtactgttgatcaggtcccaggacactaatgagattcagtggttggagttgagaactttctgtccacatccagagagagaattggtttctacagttgcatacactgaagctctgattaggatctttcctattacctttagttaataaacatgaccaagataacttggccactttggaacatgaagattgtgataaaaatgaatttacttgcaaagcttaatctccaaaattgctttgaatctgggctcaggtccctccagaagtaaaaactgcacagtgaaacgtgtagagtgacatcagctggcttgggtgggacacagtatattctagttgaaaggtaatgaaactttttaaagaattggatgaattaacatctttatgtgaaatggaatcaatacaataaatccactatggctttgttagctattctcttttgttttttggtttttgcaacatgtctagatggagaaaataagctgccagagagtggagaaatgtaaaaattaattgtgttctgtagtccaaactgtatagtttctttggagaataaaataaagcaaaatgaagtgagccgaatttgccactcagcagatgccaggattttaccctgtcgatggagtgtttcactttgataacctgtctgatgaaccacccaaggaaggggctgactcgatagcacctctgtttttaaccctttccattactgggtgctgaggttgtccttacactgacaaataactaaatgaaatgtgcagtctacaaccaaaatgtaactaaaataggaaatgatggtctttaaatacgtggcttgtttgtgttaattaatgctgcaaatgacacttagggataaatatagtagaggctgatttactgagcagcaaagcaaaactctagagaatcagggcttttatttaaatagagtatttgagtgacaacagtatgtgtcttagtccattctcgcattgctgtaaagaaatacctgagactgggtaatttataaagaaaagaggtttaattggcttacggttctgcaggctgtacaggaagcatggaggcacgtgctcagcttctggggaggccacagaaaacttacaatcatggaggaaggtaaagggagagctggcatttcataggagggtgagaggggcgggggcaggcgccacacacatttaaacaaccagatcttgtgagaactccattgcaagagcagcaccaaagggatggtgctgaaccattcatggaagatccacctccatgatccaggtacctcttgccaggccccacctccaacactggggattacaactgaacatgagatttggtggggacaccgatccaaaccgtatcagtatgctaggtgctgtgtcaagccacagttctgggactgtgaaaagtaggcacatattttgcaaaatacttgtgtagcatggaattggagtttctcagccaagtaagtacatgaaatgttccaataaataatgtaaaacatgaagaatttcccaccgaaaagtttctccttatctgttaacaatggtggaatgaagttcatcagtgcatccgcattggtatatcatgcagtgactttatattgagatgcaaatgcactaggcccaattaaataccgttgttgtgatgtatttagacttgttcctttgtgttgttttactgaaccaaaaggaaatagtcatatttcttagtagtgacatgcctagaaaaggagtaaagcaattattcttttctttaaactctagttttggccatctctgaatagtgggtaagttttgcttttctgaataaagaagtgtttacaaatatagagaacatcattcactcccaggttctattcaagaaaagcatattggtaaaaactgtatttctcagggccatttattcaaagcccatgccttcaagcaggaatcgtcactccgctgtgtaaatgttgtggtgtgacattgtctgctatttatctgaaactgtttatgtcacactttggaattttctgttcctcctttcagccgggaaggaattagctggtgctccaatatctctcaaatttttctagtgttggctaaggatttgaaatatcattggaaaaatattggccattcgtcagggttattgaatacctattggggaaaggtaaaggagcagaagctcctaatacgtaaaggaatgggagaggcacagattagctgcctgggctttgtgttggaagcaagaactggaattaacgtggccgccagataaggtggtaactacagctggttctgtgagttcctcacccctgtgattttatcatcacatttgtttatatcattcatatatatggaatatccagtgagtccgaagtgttttagagtaacaaaaagtttattcttccaaatatccgtggaaggtaggtgagtacctcattttattttagtgtgtttgtcgttgcgtggttaggaaatgaggcctttgagaggacttgtctaatgttgttaaaaaagaaaaactgggagatcttctgtgtttctctggaaggcatcactgggatgtagcttctttgatgtttaagagacaggtggaggggtcgagcagattgtggctcaagaccctggttgaacctggctcctgtctcagcctccatccagcccgctaattcaagtagatctttttcacactgttcatcagtaagatgatttcagagggtctcttttagctcaaaaattctattattctgtgcttagaactgagagagtctgtctatatgaaaatccaggcaggttgcatttccccacagacagttcagtctatataatggtttgggctgtaggagctcgagatattgctaggtggggccaattataaggtataatagtataataagtcagcatttttaaagtgaaagagtctctgtagcaatcttacaaaatactaaagtggaaaaatgatcagaaattgatcttttcaacttggtgattccatggatagacagtagatgcacatcatcactggcatattaatttgagtcgttgcttttgccttttccccagtaaaaagccctggctagtctgtgtctatttaaagaagtaaaatgctactcagtgaaaaatgataattagtaaaccctaaacagattgaagttccccagggaataagcgcggatgcctgacctcagaagttgcaaagggaccctggctgcccatcattgtcacgccaatgggtagggcccgtacccgcctttttttgtacttcccagcatgtaggccagcctgccacaagaggtcaatttggatactgtggtcacattttaaaaagagaactataattatgacctctcattatgtacagtgatgcctgctgagttaaagataatggcactccctgcctgaaagtatcagttaattgcctgcaggggtcagaagggtgctcatgtctgtcccctcccgcatagactcccccaaccccaaccaggcatgcactgaaggcagacacacttgggcctgctgtgcttctcacgctgtttaagcaccaggtttaaccactgtttaacactgattatagtggaaggtcaagtttaactcatctgcaagagggaaataaaacttcaatgagcttagacctagcctgtcttccctgatggcattcttggagcacagtgtcacctggagctccatgttatgggccctgtctttgttgacaaagggtacattccacatctggtacagtacgtttagtatattttgctaccattttttccccattaaaactttttactgtagagtatttcaaatatatcacaaaaaacagaatcatgaacccttgtatacttttcacccagcagtcatcaatcctggccaagtttatttcatctgcccctgtcccactttccaccacctccttcacccccaagtaatgaggattttggagcaaatcctcagttatcatataatttcttctgtatgtatttcattacgtatttcaataatttacagattcttaaacatacaactatagtaatatcaatagcacaccttatagtgttaacagttccttagtatttatcccatcggtgtttgtatttccccaaaagcttataattttttagccagttgttttttttttaatctagactcaaataaagttccatacgttgtaactgatggatgtgtcccttaggtctcctttaagctggaggagttgtgttgttttgttttgttttgctttattttgttttgtttgagatagagttttgctctttttgcccaggctggagtgcagtggtgcgtctcggctcactgcaacctgcacctcccgggttcaagcgatcctgctgcctcagcctcccaagtagtggggattacaggtgcctgctaccatgagttctccttccatatttatctaccactgtctttttctcttgccgctactgctactactattgttgttcttattgttaaagaagagattgaattgttggcttaaaaacagatactcatttttatttcccctctgctcccctctaaatctcttcccctaaacattttatggccacactgtcctttggcatagtcaaagtctgaaggctcccaggcacggcttaggcttaaagcaagcttagtttaaaaaaagaagaaaaaaaagtcgaaactctttctagaagaatgttgaaaggatgagagaaaaccgcaggcatgatggcagttacggtggttgatttttccttctctgttttccagttttctttgtttcgttttgcttgtataacactagctgtaatttttttcctattgaaagatgaaatatggttttcatggtacggaacgaacccagttgccgtcatgaagtaacctgatccaccagcttgccaggcgggcctgcagagcgcctctccagatgtttttgtccttgctgccgccccactgggaacggaaacctccgctgtccacgccatcatcttccgtcgatcttacccttccaatctgcctgggtctgttcatcatattttctggcgattatcaagccctcttggtttttccaaaaacaagtatgccccagatacaaactgaagagctctatttggcttagcatttacagttttgtctggaatgaatacgcagcatccacaagaggagaccacgtttggcccgagctcacctcctttaaaagcatgtgtccctgaccaggctctggccctcacgcttgggcctcctttattcctcatgacacttacttagtgtttgtgcttatgtacggggcgttttacccactatgttagtccattcaggctgctataataaaatacctcaaaatgggtggcttataagcaacagaaatttatttctcacagttctggaggctgggaagtccaaaatcaaggtgccagcagattccgcgtctgatgccagcttgctctctggttctagagggcatcttcttgctgtgtcctcccatagtggaggggacgggcagctctctagggcctcttttatgagggctctcatcccattcattgaaacgggagaagttcccttaacccgctcccagggcgcgtgacagggatgcagcttgcttcttcagtgccccattgctcaaacccctaaggggagcatgcagacgggaaggtcgtggggagcgtttttggcccctgacctcacagcagcatctagggttgagtgtttacagctcccgaagccccggtgggcgtgtgttacagggcgctctttcagttttgccatctgcaggcggcttgtgttaatcagctcagttagactctctgccttatcacagaggtggatggggagccagaaggtggtcttcccctggcatggagcagactctcctccaaccacctccagccaaattccgcgtcgtcccgccgtcgatggcctgctggtgtctgttggtgtcggtcgatgtgttgttctgctcctcttaacgtccagccgcttacgtcagtgcctactagggtcttgggtttttgtgggcacacgatgggagtgtggcaggccagaaggcaactttttgggcatgaaagcagaaatgcctgtcctcatttaggtccttgggcacaggcccaagggtggagccctcgccagggaccccgcccttctgtacccggcacttcccgtgtcatcatgagggcccctccctcatgacctcatcacctcccaaaggcctcacctcctcatgctttcaccttggtgattcggtttcaacataggaattttgggggacacacacattctgatcacagcacccacatagaccatgtggctagaaagtaaggaacttgcctttttttttttttaaatcaaacacattcaaaaaagaagcatctttcaaagtagactcctgacatgcagaatacttgtccagggatgtagccattcttaataaccattctagaaaattctgtggagattttctttagaacccatttcccattcgctcaccagaaaatcagctcttgcactataattcttttatttccatgatacctttatgtatagtcttaatcctgaatctacatttccatacttaattgtgtctaaaatgaaatactcattaacagcataacgatatcttttgttctcaatgatggatggatggatggatggatgcatgaatgcatggatggatggatggatggatggatggatggatggagcctatgtctctttgtatcaaattgaatatgcactattcagggaaagcaaaagcaatggcagttatattatcatagccttctcattgtaccaatgtaggacttcccaggaaccaggctctgctttaggtgtgaggcagacagtaggtgaagggcccgtgtaagataaaggaaaatgcaaatgcttttttggcgctttgttttatttttcaactgataatatgtgagggttatttctgaatcaacacatctcagaaaactataaaaaagttttttaaaaaaaataccaagcatttgattggcttttctatttttttcctagtctatttttcggaggaagaatttgactagagagagtaaaaggctaagtgttgaaactgaggcctggacagagctcggtgcccatgagacctgctgtgagaattgagaatcagcagcccccgaattcactttagaggaatagctgaggagggcagcccagccatgcaccatcatttcccgtgaagagtgtaccacagccaccccaagatgggagtggctctcagtgtggacagaccgaagccagaataagtatcccaagtctccactgggaaatgtgctttcatgtcctttggttcctctttgtgcctgaagctcgggtttctaagggagaaagagagagatcgctcctgtgggtggttgtagtagtagttgtgtgtgtgtgtgtgtgtgtgtgtgtgtgtgtgtgtgtgtgtgtgtaagggagtatgcctggttataccggtatttctttctgaccttgggataagatggcccaaatatggcttaaataaaccaagctttagtagtacattatgcttgtggccttgtgacttttagtctgggagcagggtaaccagagcaccaatgctggctttcttagcactaaaggcgtgcagaagtccctgctctgttggctcgttaccagcttcccttctgtggggtgctctgggtggatgaggaccgtcagactggctggaggaaaaccatagaagattatagtctcagcttaaagtaaggagccctgggagcggaagaaatgtgtgacatttgcccactcttccttgccctccaccttgtccagccccagcccagcagcatatctgcctgccccatgcacatgctgtgatctgagtattcataccacacgcccccgcttccttaaacactctgcccgctcagcgcatgactccagtggggcagcctggtcaggactggttcttctgccctccatgccctccttcccagaggagggacatgctccaggcacacctagcctggcagacagcctccctcgggtgccacagacacagggcactatgaggcttgctggtctatgtgggagggagaacagatctgggccttggctggatatccagagcctctctctgaagaacgccctagactttgatttggaagtccactgtagcaaagggagggaattctgcgatgtttgcttgaactgctcttaaatcctgtggtgcaggcataaagagtcaaggtgagaaaccgcacatccctctgaagtcccctcccctcaacatctctacctattgcattctcgggtttcagccccctggagtacctattgctggggatctgtaactgattacttgatgggctgtaaatagttgaattattttatttttaatatgttctcctcactccccctccccccaccccccccacattccctggttgcagatgggttcttagagcaccactggacctgtcttaaagtttaaaaaagggaaatggtgggtcactcctggctgtggaagataaccattgccccagagctgtagcatctcacagctgcagaatttacgtgatcttagagatttaggctccaaagttctgtggggtttttttgtattactagaaaggaatacctgagcctgcgtaatttataaagaaaagaggtttatctggctcatggttctgtaggctgtacaacttcatggcgccagcaccagcttctgatggagatctgagactactccactcatgcgaaatgcggaggggaggaatcacagagtgagagggaaagcacgagagagatgggggaagggagggaggtgccaggctctttttaacaaccagctctcacgggaacacatagagcaagaactcactcatgaccacaaggacagctctgagccattcacgagggatcctccccgtgaaccaaacacttccagtgaggccccacctccaatgctggggatcaaacttcagcatgtgctttagagaggtcgagcacattaaactgtagcacattacaaatccccttccagatgtttgagaagcagctttctagtaaggaaatcaaaaggcaaaaccttttgtaacaaagagattgcctcagcagaacagtggtttatggcatagtgggaccgggtgtgtgattcaatatggtagaagtctacccagaaagaacacagtgaggttttgttctcagactacgtcctgtgtctctataatgagaggcaggtgtcaggtgtgggaacatcactggctccatagttcctttttaaattattttgagttagtataagacatacatccccaggcaaagtgagcctatgttcagagtcaccctccagttcttcagtgctcgagcattagggaggaagacagtggagaggtgggcacgcagttagtgtgtgccttgaagcactgatggcagggttctgcgtggtatttactctcactaacacacctgccagtgtcactctgagatggaatctttccttctgtaaaagattatttgcacattgacccagttgaagacagagttaatgaagatgccgtgcatgtggaaatactcaattctcagcactgacaagcactgccatgcctgctggggccaagccactatgagcacccccacagctgtgggaaagttggtgcaggggttaccagcaaccacgaacccttttactagaggaggaagtggcttctggcgtgggaactgggcaggagctatcttccaataagtggagagaagtgatggttggggaaagccaatcactggggaagatgaccttatagcatagagagggggaaaaacagactcaagaaagatgcactggtggtccctggctggccgtgcccaggcccctatactctgagcatctccctgggcctttggctgtggtctcaaggggcttcctggtcccacctctggcttctggccgtggcacatcctttctcttggacaccagtgtggccaggctctgaggtgctctggggtctcttgggagtctccattcctgttcctgccctgtggaagccttcttgcacctgaggctggctccagtcccctcctgggcggtgagcttcagctgtaacactggatgaagaaaccaggagcaagcaggacattttcaaagcaaagaatgccagactctagagggcttcggcattaatcgccctctcctccctccctgcagggtcagaatctcttccacggcaaccccaaatgtcccctgtgcacatggctatgagctactgccatccccagagaggggtgacccaggagacagaaaccagagaatgcagtaagcagagattcacaactggatgagatgcaaaggggaagagacttgagaggaatgtgtagtttctcattcatctatagggagctttaaaaaatttaaaaaatatataaactgacctcagacaagtccagcacagttaacaagccaaacagaaccaaatcaaaaccccctgcctcttcaataatggctctgtcttattacccatgggacaggatcataacttggtctgggtcatttgtcacctttgtcctgggcttcaaatctagaagtttagattttttggtattctcagtttctgtccacatggttctttgagttttttcctaggcagctgctagaaagattttgatcaactggtcaaagatattaaagaagtcaatgttgatcagtaggaaaatttagagtgccagataaaagaggtgtctgggatggcagtgtcttgtcaaagggctggaggtgatgcgttcacttgctttggaatcacagattcgggaatgtgacggcaatgtgacgcagacctcgctgctgaggcgaaaaggacgttagaattaagggactcagaagacatcaaagttaaagcggttcttgttgcccggagaaaacagaaatacgaaagcatctgcctggggagtatcaaggtactcctttcatttctccagcagaggagcagcagggacagtgatcgactctgaggaagtgagaggcccggagagcttccagcccggccatcctaacaccaccttagaattggggcgcctgagacagccctcagcaccaggctcccagcccaggatgctctttgagctctgtacttaccttccagtagcttttcctagaatccccttcctgattaagtgaaatgaggggtaatagatgggcaatttacacgagttagaaagatgccccctgttggggagctgacttggacagatgtattccgaatttgcagggttcactgtgatactgttcctcagagcccgtacattcttcatttagagtttaccagtcactgtatttaagctggaaagactcaggaaatgtgtgaatgggagcctcatacccagagtacccccaatgaaatgtagagcttacttggagatgtgtgtgtttgtttgtttgtttgttttcatctgttcttatccctttggccctaaaaattatccaagcacagtcatccgttgggtatccatgggggattggttccaggaccccctaagataccaaaacctgaggatgttcaaatctcttgtataaaatagtgcagtttttgttgttgtttttgttgttgttgttgttgttgttgtctgagatggagtctcgctgtgtcgcccaggcttgagcgcagtggcacaatcttggcttactacagcctctgcctcctggattccagtgattctcctgcctcagcctcccaagtagctgggactacaggcacccaccaccacacctggctaattttttgaatttttagtagagatgggatttcaccatgttggccaggctggtcttgaactcctaacctcaagtgatccacctgccttggcctcccagagtgttgggattacaggcatgagccaccacaaatagtgtagtatttgtatagatcattcatcctttcccctttccccccgagtcccccactcacctaccaacttaattagatcatcttttgttccaacaaacagctgttagtttcagtttgcttaatcattgctttgagcttgcctcatgtcttcagagcagcaagagtttggggtgctctttgattcattttttggagaagaaaggcccctcttggtgttctccgtctccaacttccatcctaaagatgatgcgtaaaatcacaacttggtgtccaacttagtgggagatttttgttccctaaaatcctgctcatcagaagcttgtgcaccgggctcactggcgtcactttgtctcctgtctcactgtgacaagaacccctaaggtgtttgcagttcatgtccacagtgaatccagtctcctgtttcccacttcatccctcctgctcactcgggcaacttctttctcaataaccttcagccaaaagggaagtggaagaaatattcatggcaaatgacgtcagtagagctgacggcaccccgtgttctgctgccttcaagatcagaggcggctgttatagatatcttgattgattgcaacagaagccaaagggtatggctcttacttacttcagtgatttcaaagcaacaaatgtagatatcctatctgtcttaaccgatgcctagggattttgcaaaaaggaggaaaagaaagacgtcaacaacaaagtgaattgtatatctgtttacttttgatgtgttctattggagatagtttggtttgaagagctgcttttcttgatcataccacatgtatctgtgagcttagtgtgaggtttctcagccttagcactattcaccttttggactggatcgttctttgtggtgagggctgtcctttacgctgtagaatgttgagcagcctccctggcctcagcccattagatgccagtagcaccctccagctctcacccagtcatgacaatcaaaaacattttcagacattgccatacatccttgggggaaagaagtgcaaaattgcctgcagttggaaatactggcttagtatacaaggtgtgcgttaatgcagatctactcagcatttccccacaaaatccacagcttacttggagttttgtttatttgtttgcttgcttgttttcatctgttcttatccctttggccctaaaagttatctaagcacagtcatccctcggtatccatgggggattggttccaggaccccctaagataccaaaatctgaggatgttcaagtccctgatataaaacagtgtagtatttgtatgtgatctatgcacatcttcctctgtattctgtattatctctaggttacttataatacgtcatacaatgtaaatactatgtaaatagttgttagatggcattgtttgggggaataatgacaagaaaaaagcctgaacatgttcagtacagacgcggccatcatctcactacatagtatacatgtcagcaacagtgtaacattttctggaattatttttccctaatatttttgatcctttgctgatgaaatccatggatatggaaaccacaggtacagaacccatgggtatggagggctgactgtattttttcttcattgtagggggttaattaatgccccagttgtgtcattctcatgcagagttagagaaaatggacaaagatatttcaaagcaaagaagtctagtaatgttacagaagatctggcagcacttgtcttccttgatggcttctttggatggcatccttcatttactgcgacagccgttcttcgcctttcaaacacttcagaattccctgacagattcctacaaagattccttcagctagggtggagcctgatgtttggttttctggggttcccgtggaatttcactgcacatctggaggcttatgccctggggagcatccagtacttctcccccaagctgggtgccaggcctcaggcagctggattcacccaggagcagattggacaagccatccatttacttgttcactaactatccagcactctggatgttgcaggcactgttctaggtgctagggaacaccctagtgtatgtatctgaccatgtacccgtgctctttttttttttttgacacagtcttgctctgtcgcccaggctggagtgcagtggcaccatctcggctcactgcaacctctgccttcaggttcaagcaattcttatgccccagcctcccgagtggctgggactacaggtgtgcaccaccacatccggctaatctttgtatttttagtagaggtggggtttcaccatgttggccaggctggtcttgaactcctgacctcaatcaatctgccaccttggcctcccaaagtggtgggattactggcacaagctaccactcccagcctacccgtgttcttatatctgatcatttctgtctgagtgtgtgtcatctattatttggtatttttgtttgtttgtttcttgaatttcttttattcagttaaagagatttcatcatcctataagacccctcaggtgtgagggggagcagagagagctggagaaacaaaacacattagccctgtggaaaatcacatgatttctaagaaagtaatggttatgattcttaggctttctctataggaagtgtttcattgtcattgttttgttaggttggtcagctcagaggtgctgaaggcagtgcttacatttttgcagcaggtatatatcgcagtgtggattgaaccaggggcttcctgctggccttgtattcttagtttgttaaagcaaatggcctctccaagtcacttcccactgaaactaaatcccagaggaagcggaatgaacatggttagaaaccacaccaggaacccacagaatacccacaccaggcttgatggattgctgtgaaacagacctggcagggacccatcaggacaggctatggctttctggaggcaatagtgtattctcccagccttactaaggctgttagctgcccctaaggtctttggagtagatgccccatttggtaggtgttccttggaatccgtagctctggcagccacaagtcacaaagggaggagcaaatcaagggacattacagagcaggaactatgtggaaagggatgaaaaaccaaaccggccccttccaagtctgcagccacccacccatcattttaaaatgagtggactcaggcacagcaaaatgaaaggaaagtcagcagacccaggacttaaacccaagaatcctcatgtctagtgcagtgcttttcccgtcctgtccacggaggagaagcctcttccacaacccatggaaccatctcaacagtttgagaaactgaggctcaatatttttcttcacccaaatagctggaccgttgattctggaaactgtgttacctgtttgtctccctgcagcataatataactgtgtgtgtacattcaaaagaagaggatttgaaaacatctttaagacgtgtgaccgttttccagtctcgtactacagagaagaggcaatgtgataagacaactacattaaagatgaaaattgaaataggctgctgggaaccggtccagaggagaagtaacatttgttactgaagcatgggcgaaggaggaatttttttttaatatgggatttgagattggctcagtctggatgatggttggtcataactctattcagcacccatgacagcatgcttggtgtgatactgaattaaccagcaatcaatgatttaggtactgatgggaatgctgaattaggtactgattgctgaattaggtactgatgggaggaccctgcccatccaaaaatttaaaaggtggcacttgcttgttctctcgtacccccctgtctcacttcattcccctgagatataacgtgaagcactcctgccaagtgggtctccattcctagaaagagttcctggccaaaatgcctttctcttttcttttgctgataaactgggttggaccatctagggaagatcctacaaagccaatccactgctcccctcctggagatcttgtcctgggccctttacccttcacaatcagctatgcctctgaagcagaagcccccgctgtccaccaaacagctacccagttccctgaaatgcttccagccacaaatctccaatgtctttggtccgaagcatcctaccacaatagcgtgcctgcatcagaaagttcctctgctatctaaagaggtaaaccaccagtagtctctcttgaccacagaaaatttggacttttttatagagacccagagtgtgctgatgagaagtagcacatcacctaaggtagagagtgggagtaagccccagagagaggcacaggaggaagagagtggggcagcactgtgtcctcataggaaggggtggggtagagagatcaaagggaggggtgtttggggtgaggggactgggagaagtgtgcagaggcagtgcccttaggtgcccagaatctgtaggttggagtaccgtgctgagcacaagttatttaatcagcccaaacactttctttctaccttctggtagtttgcaatctaaagaaaaggcaatgcctgtacaaacagtgcagtgtgtatttatgcacaaaattctcaccgtagaaaaacttttgatagcatatactaatataaaaggctgacgaaataagtgaaaaaaattttaagttgcaggaaactattttccatataaagctattttttaaaaaaatagatttgcatgcatgagtacgtatatatatgtgtgtgtgtcttagtttttcaatgaatatgtacatatatgcttattttcacatacataatttttggacatatatataagaaagtatgattttgaaagtaagcttatagggaaggcatttctctctcaaattatatccatctagtgtttttttttttacagtgagcacatattactttcatgacttttaataaaaagggaaaaacttaagtattttaataatagataagagcaagcattatagtatctcttatctttggagaggagagacaggaggctgttggctctgaagacagaagcactcacagggtgtcagggtgtgacaaggagaaaggcatatgagacgttctagcagagagtccaggacacttttccatagaaggatgtcagactcattaggctgcttggtgttcaacccaggagccaaagagggtcctcctggcattgatctacagtgctaggtctgtgcttaaccagcttgctagttaaggaaagaggtctgagtgattacttctatttttgtttgcctgtaaatctggatattggaccaagaaagtgttatatctagtacactcacaaatgaaaacataaaagatgacacttgggaaatctttgcaattttagggtaggctaagatttcttagaacacaaaagacattaagctataaaagaacaaaatggtaaactggactaaaaaattaaagacttctgcttattaaaagacactcttaagaaactgaatagtaaaccatggactgagaaaaaaaaaccatgtatctcacagaggacttatattcagaatattttttaaaatcttacaactgaataatactagttgaaccacctaactaaaaaatgggtaaaagactttaacagacttttcatgtaagatacgaatggccatcaagcacatgaaaagatgctcaaggttatttgtcattagggaaataaaaatgaaaaccccagtgaaatattactatatatcccctagatggctaacgtttttaaagattgacaatttcaagtagtggcaaaaaaaatatggagcaactggaactctcctacgtggtacaccctctttggaaaacaatgtagcaattctctataaagctaaatatacatttaccagcaattttccaagagaaatgaaaacacaggttcaaaaaagactggtataaaagttcacagcagcttttttatcatatcccaaactggaaacaatccagtgtcaacctaccggtgaatggattgcggtatttccgttcagtgactaccactcagcgatagccataaggaatgaactattgacaccccatctttgatgaataacagaaggtgggggggtggggggtcataggtggatgctctacagatccaaagcacccccacaagtgtgccttgggaatgtcccacttaggttctcccacatgtgtgattattgatggaatacttttcctttaaggttttctttctctctttctgttttctttctttcactatgtcttctttttatttgtgtccctctacaatttcctttaatgtgttttggaagaatactgaaatattttctttaattttctggccatataaataggaaaagactccagacttcctccctgtgtttcttcttgttctgggcccagcaaacctcctggccaccgagaaaaactttgggtacgagtcacctgcggaggcagggaccatgtagccaggccaaccatggtcacctgtagcactttcgttctcaataatggcagagaccttttgcttggcaggaaaaaatcgtttttcttggctaccccctgagaaaggaaaaggccctttctaaaacgaggggcaagagggaaaggcctgaggccttaacagccccccttaggaactgcttgtcccttgtgacttgtgagatgccagcaagaatgctggggctgtgagtgctgcttgcaggcaacaggccctgtgggggaccaagggacccggggcagtgggagccacaggggcagtgggaagaacttttagttttttagctgaatggttttatatataaatatatatatttttctatatcttatatatttatatatattaaatatataaaattcaactaataatatataaactattatatatgatagtatacatatattaactattatataatagtataaactattaaccattatatatagtagtgtatattaactattatatataatagtatatataaactatataagatttatatagtttatattatatagtttatatagcttatattatatagtttatattacatataacatatgtgttatatattgtataattcatatgttataaagttatatacaactattataaactaatatatagtttataaaatgttaactattatatgtaatagtatatataaactatagtttatatataatatataatttatgtattataaactattacaactattataaactgatattttgtagtttgtatattaacttatataaaatagttaatatataaactgtatactattacatataactatatattttattaatgatcatatataatagtatgcatagtttattatatagtatatataagtacttaatatatactgttatatataatggttaatataatatacttaatatataatattcatatacatatttaatgtgcattgtagttaatatattaatatataatatatattaatatcagtgggaaatggtgactgtttaaggtatttcacccctggagttgccaaatatataaactgtatatatactattatatataatagctaatatagtatgtatattattatatataatagtttatatatgttagttgatgattaatgattaattatattagctaatatatattatatattatagttatatatatgtgtatatatatatatactaatatcagtgggaaatggtgactgttttaggaatttcacccctagggttgccaaataagttaatttacttgtttctcatataatgtacttattaaaataaacttttagtccattatggaatgtaagtaacaggcctcctgcaggcaaaatagaaaaaaaactcttcaaagtcaagttctatttttttttttttttgagaccctgttttcgggaaccagcattatccatatcattaatcgcttgtgggcctctttttaccaatcatgttactcctttggaattaaaccacacatataaagtatgaaaaatgtacttttttaaacattaaaaaagtaattttctagcataatatccaaaataaggtgccatggagccattagtagcaaattgaattttttggtatgtaatttgtacaaaaactgacaagtgcgagccccttgtcccccatcattagtcattgggtttggcggacacagaggcagtaatctgcaagggaaggcattttgatgtcgacttcaattgcacacttcatttatttggacagggcacaggcggcagcttctgtcacgcggcatcaccgcactattagtgaatttcgccccagggcagctgggacgctgcgctggggcagatgttcttttcagcctattcagtgaccattcttgggggttgtttactgttgccatggtgaccttcatttccatagcagcagagctgctgtttctcagaggaaaatgaatttagttataaaaggataatatttttctctgtctctatataacctgccatctgtcaactggtggatcagtaaggattcagaaacctattaagaattatagcaatggagtgatgagtattttttttttacccatattaaaagcaataatagaagtggaagcaaacattgtgccctcaacatgacaactttacttttttctttatattttaagtgcttttttttaatgccttcaccacatccacaccactgttacaaacacataacctcgtgaaacacaatttacattctgctgacaaatggaaatgaccacatgtcttgtttgtatctcactagatgcaggtgtatttaatgctttcttgatgctgtgagctttccccagttcattaaagattcatatggctgaacttcctattgtcactgactctcctgctccccaccccacggtaaaagctgtgggggtgcatagatcagcaatttatcaggaacatacagtgcaaattataaaattaacaaaatgagaagaaaccatgcttgtgtgatgaaaaatttactaacatgatccttaaatctcattctagaataccttttcttcttctcaaatcccactgggaagaaagtcgcctttgggatagctcatccagttgctggatattttttttttctctgttgcattcataaactgtaacttgcagggggaaaaacacacacacacaccggccccgttgtaaataatgttatttattggttgatttttccagatcctgacattgatgctgccagtgccatgatgcttttgaatactccccctgagatacaagcaggttgtgagtagatatttctatagcctacagcaccatagtttgtgaacttaaccttctcatttatacaccaggtcataggaagaactaatgctaaagtagaacttcccttatagaatcactttaaaagctacataagtgcatgattacatgcatatgcatataaacatgcagccatgcatatgtatgaatgaatgcataggtgtgtttccaagatgagaaagttcttatataatttcaggacttaagacttggggaaagggaaacagatcctttaatgagtcccagtgaagaggccttccttgctcctgcaggtattgttcctgtgagtttgtagtttctcctagaagaggctacatggggtcaacttaaccctaatggacctgagcagtacccatttttagaaatttctttctcttctgggacctcatcgccaggctgccattttggagaagagtctagtgaaataggcctgttggagcctggaatatctttgaaatgaaaccacgctaccagcttggaccatttctatccagcctcccaggctgccccagatagcagggtagggctgtttagctaagcaggactcccatcctcaccttctttttgttggccttcaacaatgtcaagtttgagacaacatttccttactgagacttctcttctcaccacctgaggtttttaccatctctggagatagtctaccatggttttagaaagatctcttcccaagggatgaagagtgacttcaaacaaagatatctgtcccttccttctccccactcgaggtcagtaccagtgcccacatcccatacccagctagaaccctgttgaacacacagacagctggtttaccaaggtctgctcagcttgttgttaggacattgctgtgttacagcctcttactgatgaaacacggtagtgaggaaatagtgacatgaagcagcagacgccactacaacaccaccgcttaggggctggcactcacctgtctccttcttatggctaggccttcagctcattttgggttctggctctctgagggccacatggcttgctgagcagtgggaagtccctgcctttggagtggatgctacttcacacaggaaaacatccatcctcagacccaaaacaggtgccttttgttagtattggactacgtggagttccaggccatccgtcatagcccctctgcttgtcccagccttcctgacaactttaggatatttgactccaacctttcttatttgttcctattttaaaagacccaagaaattcagctgagcattctcagggagacttgttcctctgcctggagctgccattacctgttccgaacagtctagagttctgattctctctttccaaactcagacctccagccattgcaatgttggactgcctacacctctgacatgcaaacaccactgctaagcaggtgtgtcactggcctagctctataactagcagttaacctggagtgtggtttttaaatgatgtttcatatttcagagaaatgtatatgtttttaaatttttttttttaaataaacttccattcttagatggcattgcaggaaaagtacagaccagattgtaatcaagttccaggctgaaaagatttctaaaattaagttgcataactcaacccagtggaaacatactgatttcatcagagccatgtaagattcgagcaccttcctttgcacccagccactacacagtgatcattagtttcacaaaaatacttccagctggttgctgaagttcagagggaaaatgggaccatgaccttctgctagaagaggctatatggggccagcttaaacgtaatggaccggagcagtacccatttttagaaatttctgtctcttctgggacctcatcaccaagctgccattttggagaagagtctggtgaagcaggcctgctggagcctggaatatctttgaaatgaaaccaagccaggcaaggggactgattgatccttcacagatcctcagcagcttccataaacgtccatgattactggattcttgagcataggtaggaaaggaaaaaggcttctcctgatgagttgacaagtgagttgttttcagtgttcgcctcccctctccaactctgtaatactcagactgtaaatacttctttttccagggtagccacggtcctatttacattgaaatgctgaatttgagttttacaagctcagtgttcatgttttgaagctgtaggctcatttttagaaggcttttttttagaaggctattaccgctgtgtgagaaatccagccacagccttcatgaaagccccaggccaagaacggggctccaagacagtggaaggaaagaacccggggtgcctacaaaggtcacagaaggagacgctcatggacaggaataacagagaagtaaatgtgaagactgggcagaaagtagggagtctacctttgcattcaccgtcccatctgaccgccagccctggttcaatgccctggaggtcaagggcaagtacagtcaaggagcaggttgtaaggaccccaaggattggagcagttccttagcaagggagtgaagatgcatggagcgtcttctctgtgcacttgggaagccagctggcccatcctccccataaacccaaccagaggaatgtatctgcagcttgtggttagctctttctggcttcactctttctccgtgccccctacccccgccacctttcttttcattttatattgcataacgttatttgccttgggatttgaggcagtcctttgccttcttaagggagaagcattacaggcagaatgattaggcagtcatcccctgccctgccggcatcgcccaaggcctggaaaaagtgagaggctattcctgtgcaaaaatggttaaaggcaacagccagccagccacagtgatggtgtgtgggcagcctatgtaggggtgtttgtgtgcctgtgtcccagtgtggatatatcccaggtcttctctaggttgaggggtcctgccactgcccatgagtggagagtgtggcttcggagagcaacacatttcctgtctgcgcagagcctgcctgtattcccccgtgggctggtgctatggctgggctctgttgatagagcttcctcgtgcggtgctatttatagccccttgttttcacctcttgggctgctagatgcccctgcttgcatgggggccaccaacctagtctctgctgctgttctgctcccagcagatagaggctggcctggatagctggaaggcttttcctttgtcctcacccttcatagccactccaggtcaccagatggcagccacttagatcttttctcttcctcctacccttgctcagcatctgtaaaggtagctcaaggccggcagactggccacagtccagggtctgaagctgactaggttgcacaaaggaaatggctcagactctggtgagagccccaggcagagcaagcctctttatcattggagggtccgtgttgccccaagggagcccagcacaccatgtcttgcttgggctggagtccctaggggtccctccacctctcatttcagtctaatgcttcacttgcagtgcagcggcagtgtgcacctaataaaaacctcaggctacaacattttgtcctcctggcagcatccgctgtgcatgtgacattagcccttttagactttgcccgtttgcagcataggaaacattctgcaaggagagccaccatgtctcacgcgctctataggatgctgccttcagaacagtcagcatgggacatggctggctcattaccccctggactttggattatgctccagtcaaatccatctgcctaccccaccctctccaccctcaaaatggctatgtagattcattccagcttctagtatctccttcagtacctgctttgcagttcccgtttgacaagccccgtgagtcagctttaaccccaatggaggacttgttagtcaggagaagccagatctccattactcatcttcaaaggcttatataatccctggttggaaggttcccagagacaaactagataataaacaaaacaacaaaatggaacgagggaaggggagggattgggggaaggcgttcctccccctgcctggaactgggatgtatgtcagacacaccaggcacagcagagggaagacaactaggaaataggctgtgtctccccgtgccagccccctccccagtgtgcttccaagtaagcaggtggaaaggctgactttaggaaagggaaggattagcggaatcacctgctgctcagcttatggcctctgagagagttagccagggctgccctccaaaggcagcggcaagagctcagaggttaattttagaagttgtgaaaaaccaaggaagctaagcctcaggaggggagctggggaagtgctgagggacaatgtagcgtggaggagtttgtcttggaccttagacttttttctttttaagattctcaggattgcgttatcccatttagaacatagcatctacaatgagcagtgctgctctgtttggctctcttcttatgtgtgaaggttgccttcttgctagttaaaaccagaaagcttaagagtccctctctaactgcagagaacgtggctgatggcaagtgtggggaagtgtggcgccaatgtccctcatcctgagagcctcaggggtgggtattctctcatctaaaagataaatacgtaactggcctaacctgcaaggatgatgctagaggcctgggccttgtctggagagagccacaaatccgaggaagaagttgactttcaacgtccagcccttttgatgtcttacatagctggaggccagtgcacttcagtacatcaggtgcgtcagattggctgtaaaggttttggtctttcggtgtcttaatatgctctgagggaaacagagtaaaaggaagggaaagagtagatttgctggtagagaaaaggctgaagaatggactcatgttcccaccgagcttcctaatgtagagtagtgaactgtgggcctcagaatgcctttctctaacagagccattttagactggctgtgacttgttcttcagaagccacgttcctgacacttggggatggggacagaaaggagaaagacaggggtatagttaagtgtcacagctggcttctggcagctggtgagcaaacacgagcacatccgccatctctccatggagaagactgccaatgatgaggacggagaagtgccagggttggcagaggcagcatttagttgcagctcatttgagaacaagctgcaggattcagaggaagagctgagtctacatgccaggagtcttgtgaggttcaggaaatagctcagggaaagcctattaatgctgcaagagagctttgtccatgagattctctttgaagtgaatgctgttcattaatcaggaagatgttttaataggtaaatgcagttaggaataactacaaaaagcataatgggctgaaagtatttccccatgtccggacccctttcagccctatccttgtagatcattagtaagaggatgctggagaggtgatataggatggcagaaggatgacggtgacgatgacaatgatgagcttacataacgagccagccactgagctaagccgttgacctagcttatcttatttcatccccagagcaatcctgcaaggtatgtttaagcctccttcaccagtgaggaaatggagacccaggaaggtgaaggcactaggccaaggccacagagccagtaacggggcaaggccaaactgaggctgtgtggctcagagctcacactcttaaccactgcagtatacctcatccctgagggttccgtgagacaaggaacatccaaagaacgtggtctccagtaggaacttggtgacgactggcttcctttcctagttttcctctctgctggccatgcgcctgatgcttacatgttctgagtatttgggcagaggactctgtcatgccacactctccccaggggtgcttttcttccttgattggcagatggcttgacaaccatgctagggttaagaagaacttgcgctccctaacttggatttgctctgctcctgttccagggcttccctcatctttgtccaactttacgtgttttgggtgtttttgctgcaagggtggctctgatatgacatgctatgcacaaggggagcagaagcaccataacagcatctgttgctcttccagcaactctgtcaccaggaagatggctacattcttccagcatggtctggtttctgtcccattctgttccttatgggttttcagctcctctgaagtagagaaagcacaggccgcctcaggattcctctgtggatgttgatcatgttgatgatgacgatattgatgaccaacatgtattttccaaatactcgtgccttccgtaactcagctaagtctccagagaccctgggtaaatatcatttttgtcccccatcttacttaaggagtttaagtagcttgctcaggggacacgatcaataattgacagagatgagatgtagacctaggttggtttgcagagcctggctgtcagctgctgcagcgcagggcacttctctgctcaaaaccctttaatggttttcccactacccataggataaagtccaaacacatctcatttctgctaggattgtgtgctgtccaaaagcagccttttagttccttgagcacattctgcatcattaaaaaatcacttccaggtctttgtatgtgccatttttctgcctttgaactccagtttagttgacacttcctacaggaaggaagccttcccaaataccccttagtttgggttaggtgtctccatcctttctgcctctaggccccctgtcctagcatgtaccatagtatattttcattgcctccttaattcattctctctctctcgctctatctccccctccctcttgcttgtagttaccttatatccccatcatctaatatataggaaagtacttggtaaaagttttagtgactgtatatgggagtgtaataatttttactgacgtgaattacaactgtattagagattttaaatatttctgttatttatcagcatggttcattatatcagactaagttgttgctctacctgagatccctagtgacggatatattagatcagaattcaactgaacctgtggctatctgaccatttctaggagactgccgtacaccacaattatggaaaccctctcccacaatccccaaaacaggcaaacaaaaagcctatcgttttagacaacacacatagatttcatccaaaggatctatctacaagagttctgctgtcttctacatatgtctgtccttgagaattattgctatttttcctcctatattttcttctggaagttttatcgttttagttcctacatttaggtgtatgatccatttctaatttttatatgtggtatgaggtgtaaggctcaaggttcatttttttcccaaatggatctctggttgttctaacacttgctttcccctccttgcattatctcagtacccttgtcaaaaatccgttgaccacatgcgtgtgagtctatttccgaatgctgttctgttcgattggtctatatgtctagacttacgccagtatgagagtgtcctggttcctgtaactttataggaaatcttgaaaatcagataagataaattaggtaatataaactttagacattcttccttatagagaattcatcaactgtgtaagacatgataattcgctgcataccacattctaacagttctgtgatttaaagatacttggtaagtctcctgcctcagataaggtggtctgttagcggaaatcaggctgataatcaggaatggtaggagctactgatctgggtctgcctgctctcacaattaattagggtaagtgacgggggagattatggaaccctggactgtaatagtagtactgacttaggcgagagtttccattctgtcacccatcccaccttttgtaagacctagtaacaaaggccttacgcaaaccaggaaaataaatggcaaaaattattagcaagaagtgcagaatgcccaaagaattgacagtctgtaaaattaccccgtattcaatagtggacattcatcctacatgatgtttgattcaaggtttgaaaacatgtccttagatacctaaaaattatgtaagtaaaaagtatggcaatgtgttttatgaaaagcatttattctacctatataatattggcttacacacctaatgtccagagtggttttcattttggaatacataattttctagagccttttcgacggtctttgtttgaaaaagcactatttacccaccttgccactatctgagactgtgccagggactatatgggcacagccagagctctggggagtcttgaacccatgatggtagacagggtcttagaagaacagtgttcggagagggaaacagagatccacagacctgcacagagtcacacaagagaactcagatgaaagctcacccgtgttctcacttagtgatgctcccctgcccctcagacgtagggagggtttttggtagatgtagcagatggcagaatattagcttggaccagatgaaattgctgtttggagggttagaaaaggttacatcagggattccctgcggttctcctcttaggtaaccctcagacaaaatcaggctggtgtggagatcttggagtttgtatggagaatggacaagatctgatggtcgctggtgaaaggggaacttagggttgctccagggatgcgtgtgtttaggagaaggtgggatgaggagcgacttctcaggagatttgcttgagaggataccccggggaggggcctttcctcaggccacgaggatcgcctggggggatgaactgtgtggtgcatgctgagatgccaagtagcttttaaaatcggcttttacgagagataatttgggtcatatttttccccttgttggattaaggataaatggaaagatgttctgagcttctgcccatggcaaagcatggggaggtgcttttgttggtcaccaggtgtctttcctacagtgttggggtttttgagttgttgttaggttctgactgaaggtaaaaggttatgtttaataaatgtgagaaaatactatttgaagcctacttttgaaaactcactttttttttttaacctaggcattaatcctttggttgcgagctactagtctgatttttacttaccagattatctttctgtctgtcttactctctgggtatctttttctgtctctgtttccccgtgtgtgtgtgcacgtgtgtgtgtgcatgtctgtatgtgcaggtgtacgtacgtgtctgcatgtgtgtgtgtgtgcgcgtgcatgactgtgtgagtgtgtgtctgtgcatgtctgtgtgactgtgtgtgtgtgtgtgtgtatgtgcacgtgtgtgtgtgtgtttctctctgtctctgctccatgcatgttctctctctgctctctctctctcttattggtctatccagaatttctgacttggaacggaaatcttcacagttgaattcacgtgcggtgtctttctcccctttgctttttcagttcctccaggagtgatccaaaatggagcgcgggtcctgagccgagggctgtttcctggcgtgcggccgctgccaatcactcccattggggtgacagcggccatgaggtaagtggggagtgcgctgggcagagccagcctggggagtgggaagggcagctttctgtccacggggtcccttctggagacagagaggagctgcttcgaactagtgacagcaataaacctggtttgcgtgctcagaaatgtgaaagtaaccccaagaactcccaatccaaatgcccccttctctttctcgggccaccagatgatcctggtctctttacagatgaggagatggaggcaagttaagttttttattctaagaaggcagggtaagaggtgggcagaagaaaacagaaggcaggatattaattggattctaggctaacgggcctagcgcaagacccagtcctgtccctcccctgtcctgtgactctgggctcagttccttcatctgtgaaactcctgcctcctaccaggggttgcggggaaaatcaaatgcaaaatcagatgtgaggcgagctttggtacgtggtctataaatagcaggtggcatcattcccctgcttccaagaatgaggccagctgccaaaccgcatgaacccttccttgggacatttctctcctccatgctctccatctccactgtcagccccggatcagggtccaccgccagcctgcggccctcataggcaccattggcggagcctcctcccatccgccagctgcttctacacccactcctgcccatccatccaccactgccagaccagtttcctaactccgtgcccctctagctgtctgcagaagcaccttctgtgactgcccctgcatcaccctgatagtccttccttctcctcgagccaaatgtgttccccaaatatgcccagtattggcccatcttattcatacagttttgtctgcatagattcccctcaccctcatatgtaaggcagcacgtccttcaaaatctgacacaaaagatgatcccttcccaatgctttttttaatgtggtctgggaaccagcatcagagaaacttctctttgccgtgaaccgattagccccatgctttagcccttcaatgagtgaccctgtatggtagcagtttctctgtgtgtccctttctgtcctgggtgctttgtgtcctgaggatgagggctagctctcaatcagttgtctgatgccgcatcactattgcatgtgccaggtcctggttgcttgtttagaaaaagcctgtctcactgagctgcatcccttgaaggtaccatccctctccttctgcgtttacggatcaagtttgcacctgaaggccattttgctttcatagtgtttcatgtccaaaaggaaaccaacccagaaagtgtgtttagctgggcctgagggagaagcaaggtcaaactcccctgccgcgtgcagcttctccacgagcttgtcttttaactcctcctgctgttgtcaggacaagtcgcataatcttcagagcaaaggtctataggttctgataagatgggaagttgttagcaattagaatagcaacaaattataaaaccacttatcatttctactaatctgacaaggggatattttccaaaaatacatggaaaggtttttcttgtacctccccggtatctttcctggctactctcaggtcaataattcttgagttcctaagtggtaagcctctttccatgaagccaaaattccaatgctcttacctcacatttatgaaaaagacatactctgtttttcattctttcttaaaatctttcctgtgttgcctcatagtttaccttcttggttgagaagacttggagactgtgaactatttttgcttggagcaacaatgtatttttattagcagattctaaatatagacttacagtttatcctcttgaccattttttttagtgccttcaagagtagctttcactatgggcccagccatgccttatagaagggcacagaaaagccaggcggacaacaggtggaccttcaacaggagccgccttctcattttaattcttactctcatggcatttatgatgacaaattttactgattagttccctcttgaggtgttatttcaactaccgatggtttctttctagttagagaataacaaagcactgcagcaaacagtcttgtttctgttgaaagttgccactcatgcagtccactgagtgcctcagctgggctccttccagagtaaaagaaaacaagacagcctctgagccaaacttgtgtatcagacaggttcagtagggagacagaaaccacaccaagtaattgaacagagagactttaatgttaaccagggctgggtgtggtggctcatgcctataatctcagcactttgggaggctgaggcaggaggatcacttgaggccaggagttcaagaccagcctgagcaacatagggagatcccagctctacaaaaagtttaaaaattcgccgaggccgggcacattggctcacgcctgtaatcccaacactgagaggctccggcgggtggatcacttgagctcaggaatttgagaccagcctgggcaacatggcgaaaacttatctctatttaaaaaaaaaaaaaaaatgacctgggcatggtggcacacacctgtgacctagccactctggaggctgaggtgggaggatcccttgagcctgggaggtcaagactgcagtgagccgagattactccactgcactccagcctgggtgacagagtgagaccatgtaaaaatcaaaatgattagaaagaaagcaaagctgtgaaccaggtaggaagttattaactaggtaactgaaagggtaaaagatgactcagggtatcatggagagagtcattgcaggaggcagctaccacctctagggttgacggaacaaagggaagaggttggaatgatcaccccatggagctgaaactcacctttgcgtggggggcagggactaggaagcagcctctgatggtgctggtgcccctaagggaacatagttctgcaagtgctggaaaaactgcaaactgggtttggcacctccgagaatgaatgctgctgctgaggtacagaggcattgctgggtggcacaagaacaggaaacaggcaggagccagttctatctttctccaccaccttctcagtctctctatggcaccccctggtggcggagcctcacatggaacccagtggtaaagtccagccccagccccagccccagccccagccccagtttgggaaacagagtagaagggtgggtttgagactgagtggcaatagctttgtaatggcacagcttgcttcatctctgtccactacaaaaggatgtatagtctaattaaggagtgactttcctgagcatcataggagttttgaacaaaatcattttggtaaaatgtgaaaccatagtttgcagaagctaggcaagttacgatttgcataaacagataaccagtaaagaggccgggcacgatggctcacacctgtaatcccagcactttgggaggccgaggcaggcagatcacctgaggtcaggagttcaagaccagcctggccaacatggtgaaacatcatctctactaaaagtacaaaaattagctgggtgtgatggtatgtgcctgcagtcccagctactcaggaggctgagatgggagaatcgcctgaacccaggaggtggaggttgcagtgagccgaaattgtgccattgcactccagcctgggcaacagggcaagactctgtcaaaaaaaaaaaaaaaaaaagaaagaaagagagagagagataaccagtaaagaaaaccattgtgcattagcagttaattgtccaaataccaattctgaacttgcccccctcagttttaagggaaattaggggaagaggggtagtaagctctggaacattaggggtacttgcttgtagtatctttgccctctttttgtagggcaggtagtagacactgagatgcttttggaaagaaggaacacaaacatagctatggaggcatctgcctaatcagtgtctgtgtaaaacccattaagaagtgcttggggaaaaacatcttgttttgcattttcacattcatcataattttaacatttttaatttggccacatgtcagtggaacccaaactcagccaaggctaaaaaggaaagcagtgcagtggagactagaacaacacagaatgttatctcccagaccacgtggcagtgcccaagtattctgtgtgtgctcagatgtttacaggggttgctgccccagtctgttcagctggggcccagggagggcgggagagtcattagcacccactaaagaccaatttcccactctcttttgtgtgacaggttttccttgtgaatctaagcgacttctccttaagtgaaaatatttgtctttcagggatttttttttcctccacagagtggcaaaggccatgtttgtttgtcttaactctgaaactgttattgacatagatgaagtgttacttttattagctgatcattacacagcttctatttgccaggttcctttgcatataattatgatgtgaaatctccttgtaagagtatctgtcaatagtgtaattgactttacggtgttgactttttactcaataacctccaagattggcccatccttagacgttggaaacctgcttatttttaaatttgcctgggcgtcaagtcctcaagacacatcatcctcaaaataactactcacacatcttaaagttttatgcctgtgtcttcggctgctttcccaggaaaatcccttgcagagattgcattgaatggaacccatgatggatagccctgggagagctgttgctggccttcttgggaaggaggagtcccaggtttcttacattcacagcatcgtgggctgtcccacaccctgggttgggtcacagcaacctccctggatctcagccaccttgcttttaacctttagggctctttttgatccctacatgcctcatcaggtggcagaaaagaatgacatgtccagggctcgctggaggattgggaaaaagctgatgtggggaaggcctgttctgtagcaactgaaccaacaaaatacgtacgtgaactcaggaaccacatttcctcggtccatctcctgcagccgtgtgacctcagggaagtgcccatgggcttctcaagaggaaacgtgtgtctgcctcatgtgttatttggattcacacacagctgtgtgcccagcacatagtcagcattctgtaggtgtttgataaataagtaacatggaaagcctcatggattcacctagcctgtctctcacagaccttcccaggtttccttcctgagcactggaacctcaggtaccccaaaaccttaggagaaggcttaaattaaattcatgccacctttcagcacagagtacatttgttggcaaagccattggctttgaagagtgctggccataatctggactacaagtctagatcaccctatttgttgccaaattatatgagagtttcatccaatcaccgtctaaggctgcttaattttatttggatctccagcaacctcaagtgaaaaactgcacttcccatggaacatgaagcaagtcaggcattaatggtctgactgtagtagcaaacattaattcttaaggtcatgtcaaaatagaatcatcgggaaaacccatctctcagcctaagttctgctccggatcagctgtctttatctcctcccttgagaagatgtttgtttcagtagtgtaggaaggtggcaacctttagtattaagatagggttgtagtccaattatgtaacttgagggtaaattggctgctgatcttttctagtgttgtattttgttctgtatgtaaagaccaaacacctgttggcctttgtctttgaaatcatggtctttgaaggcaattacaaaactcagtattagattttgctttgtagtgggaggagaagagaaaatactaaagagctaggtttaagggaaagtggggaaagaatcccagttacacaaagcatgcactgaattccctcctgggcccatttcagcgagcgtagtttttgttttgggcccttctggtccagaaatttaaacaacgaccagcaaactgtgaaatttgatcaacattctagagctgctcctcatatttcatatcaatgacgttcgttaatgcctttgaaagtcctggtggctccttttcatgttgtacctagaaatcctccaaactcccaatgattctggactgttgtaaatgcaaaacaattcatggaggagagttgtaggatcactcctatttgtgttgtgtgatctcttgcaaaaaggaaatcatgtttatctcagtggtttaggggagcagtttgcagctcatgggagaaaattgtggtccccctggatattaccactgagttagaactcttagagctgaccacctggcccctggacgtcctttacctttttagccatgcatctgccagattgcagaattctagggctgctggaagggatcttaaacctcaccttgattttacagccgaggcacaggtagaattagactggattttgtgaaaaaggtagggaagagctgtaaattaacaagttaaatcagtttaatgacctaaatggcatctctctcctaggtagaatttgatacctggtgagaagtattttatgcaacttgtattaaatgattctctgcatgctccttagtatttcctatcattcttcgtagtgttcatctttacagtttggggaggctactgtctttttatttttatttatttatttatttgagacagggtctcgctttgtcacccacaccagaatgcagtggcacaatcacggctcactgcagcctcatcctcccgggctcaagtgatcctaccacctctcagcctctcaagtgtttgggactacaggcactcaccgccactcctggctaattcttctattttttgtaaagatggcatcttgccatgttgcccaggctgatctcgaactcctgggcgcaaacaatccacacacctcagcctcccaaagtgctaggattacaggtgtgagccacagtgcccagccctgagttttttaaataactagaataatactgtgtctttcttaactttgtttttttaaaaactcatattaggtttctttgttttgtgacatctagctgtaattgagtcattttcactgctatataatatcccattatgtgactatactatcatttttttaaaaaagacatttggatcattaatagttctttgatattacaagcagtgctactgtggaaattcttatacatgtctcagattcatttaagatgtctaggagtgaaattgttgatttatagggtatgtacatgctcagctttacaaggtaatgccacattgttttgtaaagtgcttgtttccaattacactgccaccagcagagtgtgatggtccctagtcctccacatcttcacacacatttagaattgtcatgctttgtcatttcaaccaatctggtaggtacgtaatggtatctcattgtactttaatttatatttccctttttactaaagatgttgcacagtttttcatatatttaaggggctctttgaatatattattttatggatttcctgtttagcattttgctcatttttctactgggttcccttttttcttctcttcataggagttcttggtatagtctacatatcaatcttgtattgactacatatgttgcagattttctaagtttgcggatggtcttttcactctctttcaatttccattcttattaatcacatttatcaatctttttatgaaatctggtgtcttaaaaatttatttccctactctatggtcatatagtctcctatagtatttttctaaaagattgaaagttttttgctttcacatttaagtcttattatttgagtctctaatccatctggagttacagtgtgagataaagatacacttaaatatttttcaaataataaacagttatctcagcatcacttattaagtagcccctctttttcccactgatatgaaatgctagctctgatatatatcaggtttctttctatttgtgggtttattttggggactcttggtcctatttcatattttcctgtaccatggcaataccacagtgtctgaattatgatatctttgtaagttcttaagtctgggagcacatgttctctcaccttgttctttttaaagtgtctttgctattcttggctctttgcagttgcgtataaactttataatcagcttgataaactgcaagggggtgcgcgaacaagaaaaacaaagaaaagacaccctattatggttcctgactagagtggtatggaatctctacatcaatttgttgtggattaatactcctatattgaatgctaggtgcagtggcatgcacctgtagtcccagctactcaggaggctgaggcgggagggttgcttaaagcccgggagtttgaggccagcctgtacatagtgagaccctgactcttaacaacaaaacctcctttttgcatctttcagtccatgagcatgtatagttctccatttacttaaatcttacagtgcctctcattgtagctttatgatttttttccctaaagttcttatgcctgttcagttagatttattctacatggaatagattctttttcatgctgttataaattttacaaattaatatgatgtattttctacttgctgctaatatatggaaatgcaatttatttcacattattgatttttttccagcaaccttgctaaataaactgcattagtaactctaacagtttatagattcttctgtgcacaaatcatatcttttgtcaatactggtggggtttttttccctaattattgtatcttttctttttcctgtcctattgcacagtccaggacctctgaatagaagttatgataacaggcatctttgtgttatttcatattttaaatggacccatgttactgattcacagttgataggacattagttaaaggtttcttaggaaatatgctttatcataacaaaattattctattcatactttgctgtgatatttttatcatgagtggttattgagtttcataaaaaaaagtttgcattgttaagataactataaaatttttctttcttttttttactgtggtgaattatactataaatttgtcgttttgaacaaaacttgcatttctgaatatacttgcttatgatacttttttttacatattactggagttgccaagctaatgttttatttatgaattttgtgtctttgtttataacccaggtttctctagttctgtctttatctagtttagtgtcaagattacattagcctcagaaaaggagttgaggcgtattcattctttcagagtttatctaagactggaaatatctattgcttaatgtttgttggaacttgcttgcaaaatagtctggcactgatgttttccttgtgggatgatttttaactattgatttaatttacgtaatgataataggatgacttgtgtttttaaatttccttttgaatttcttttggcaactctaggggtttttcttttcaaatatattggcaaagagttattcataatataccttgtcatctttcaaaacatcttttgtaactatgtcccttttttattccttatttcatttgtatcatttcttttttgcttaatttcgccatagattttttttcaaagaatcaactttttaaattagctctactttgcatttattctctattccattgatttctgctatttataatttcctttcttttttggatttattctgtttttctttgtctagattgtgtacttttatttcaagcctttcttctttttctatagaagtttaaggttataattttcctcaccctactgcttattacattctataggttttggtatatttattttaattattgttaaggtataagtattttctaattgccattttgattttttctttgacccatgggtatttttaaaatgtgttttttgaatttccacactaaagagaagatggttgtttttaatttttgttttcagttatctctcaacattgactattaatttgaatacattgtggtcagagaatttatctgtacattattgcttctttgaaatttgttgacatttgctgtgtggtctagtatatatcagtttttaaaaaatatttcagccaggcgtggtggctcacaactataatcccagcactttgggaggctgaggtgggagattgcgtgaggccacaagttcaagaccagtctggtcaacacagtgaaaccccatctctatcagttataaatgaaaaataaataagtagataaaaataaaaaagatgtcatgtgtgcatcagaaaatatgtcttttccattattagcacatgttctatgtttatgtcaaatcttctccatatgaaacttttgtgtgtgtgtgcgtgtcagcttgatcaattgcatactgaaagggatgcattaaaatctcccattccaatgtagatttgactgtttcttcttgtacctctttcaattttagacatatatattttgaaggtattttaatgaaactgtgaatgtttagaatggttttatcttcctgatgggttgaatctttagactgttgaatgactgtttatctggagtaatgatttttgccttgaaatctatctgatctcattttaatattgctataccagcatagcacaacttgttccagtcttacttttaacctgtttttctttatcctgttatttaggattgtctcttgcaaacagcacatggcttcttttttcttttttaaatttgagctaatgatctgtaccttttagctgaagatttttagcgcatttttattgacatttttgggtttggttctatcatctcgttttacgtttgtgtttgccctattttttcagattcttttttgtttctagcattattttaaattgattctcctactcctcattccatttttcccctttctaatggtttggaagttacccattctgtttttcttcatttagtgttgatcctagaacttttagcatgaatatttttaagtatttaaagttaatcaatatctttaaccttctgatcaatacagggctctgggaatgctttaaattcagttttgtccacctcccaattgatatgctacatttctccagtactttggttctggttttgtttctttgtgtgtgttttgtgtgtgtgtgtgttttgtgagtgtgtgtgtgtgtgtgtgtgtgtgtaaccacttagtcattattattattgtattgtacaatcaatacttggccacattttcttttcttttttgagacagggtctcactcctgttgcccaggctggagtgcagtggcacgaacacagctcactgcagcctcagcctcctggtttcaaatgatcctaccaccttagcctcccgagtagtggggactacaggcatgcaccaccatgttcagttaattttttgcatttttgtagagatggggttttaccatgttgctgggctggtcttggaactcctgggctcaagagattcacttccctcagcctcccaaagtgctgagattacaaatatgagctacagcacccagcctacattttctgtactgatcatttctgcttacatctcagatcttccattttggatcatttttctctttcctaaaatatattcttatgaaattcctacagtaagggtttatttgtagttaaagtcctgaatttttgcctgaaaagttatattttgcccttacccttagaagttagtgttactgaatataaaattctagatcgacagttattttctctcttgagaatattgttccactttcttctgcttcacttgttttatcttaattagtactttaggcgatacgttttctttctactactttaaaaatctttttgtcttttttgtgtctgctctaaagtttgactgtgatgtgtctccgtatggactttattttttttatcccgcatgggacgtgttggctttctgaatctgaagattggtaccgtcatcaaaactagaaaattctagccattttctattcaagtattgaatcttctccattctttcttttcactggaactccagttaggtttccgttggttcttctttctgtgttccgtctcatccaacctttcttccatattctctatctctgtgtctttctgctgcattttatgtagtatcttcaggtccatctaacaattcactaatttttctcttcagctacattgagttttttaggagaccttcagtgtagattaattaatttatttttgaggcagggtcttgctatgttgcccaggctagtcttgatcccctgggctcaagcgcttcctcttcagcctcttgagtagctgagattacaggtgtgagccaccacactttgcattgatgtttttaatttccaggattatatgttttatctctagaagttctgtttagtgctttccaatatagcctgatcttcctttctagtatttttcaattccctcctttatttaaacatactaactttacattctgtaacgaattatttcaacatttatagtctttgccgttcagattctatcatttctctgttctcttgtctctttgcttatggtggcttattcccattgtgtttaatgtttttaatttttgtttttttattatgaacccatgttcttgaaatcttatctgtggaaattccttgtggcttgggtttaaagtatgttctttcagagaggatttgcttttaaaacttcggtggggagcctgggggaccagtatacctggagccacttgaacgcccttagagggtacacagtaagcaggaagcagccagcatcaaccttcctgctgctcccttcctgcctcccactgagtgagtttgggttcttgttctactgcgagggcagacgttcgctatagagaaactttggctttcttcgttgcctagttgcctgattgctcacactgcaggttactttaaaatgttttatttgtgtgtatgtctctatgggtctctgaatatcccttattttctagtgaactcagcaatgcctttaaaacaagttactgtacttgatctaggatcttttatattatagtcagaagagaaccttccaaatgtctttctaccacttggctggaggtggaagtctttggtcatctcttctcttccatgtctacttgcagttgattttcaaaagaagctttgaacttgctccagtcccctgcttctacaatcccattaatcccatctacttttcacatttggcaaaagatcagagtcctcaagtaaatccctggggaggacaactaccctacatgatatcctttagaattagagccattagttccagagagactcctagtgcaccaggtaagaggcagagatgacacatgctcattatactgtagtggaacccctaattaattggttaaacaaatgaacaaacaaacaaaaaatggcagatggccatgtcgtaaacctacaccttgacttgttagctgaaagcctgctcattctgggtttgaactaatgtgatttctctttttatgtttgatattttccaactatttgacaagagaatgagtaccaggttttatctgagatgaatagcacgtggttttgttgagccacatgctttaaacttttagaggcccagtaaaatcaggtggctctgatttatgctaattgcaatatcgttacacataaattcagctaaaactgaaaaattgcaggcatttcggatgtatcacatgttcattttaatgaatgatttttaagaaagtggttagaaattcaccttccaacatgttcagaatggctggtttcttttaagcatttgttgtcctgtaatggcaatccctgcggcgggaaacatttgacaccaagtcagtgcagctggcttgcaccatcgtgaataacattgcaccaagttattaataattgaaggagcttttcacttcctgctgagttttgtgtgtaacttatggattacataatcccaagctaaaatctcagggaaggttaatttcatcaaatgagaaagagagacatttatattttaattctcactccctgaagttatgtctgtgtacctgttttcatccagaaatattatcagtggatgtattggttttctgtcttcatcacagtaaacttccttcttcaggagtgacagggagatattttgaattcctgcttgaaccatctttgagactgtccgggccaccccactcaacaaccatggggctctctgagcttctgtttttctgtgaaatgggttaagtaggccagtgttccaatagggacttgggtcatggactctgttggcatgcagtctgattctaggtggtaccggaaactctgccccacacagcatcaaatcaggggctgtggaatcattctcttttctattctccctttaatccatgggatctctttaagaagaaagtttccatttggatccccctctttaatgctgctaatctccctgtttaagaaagaaagagacattctcaggctcgaaaccattcctcttatgatagtgtggagctcacgtttaacatcattgctttggttctagagtatttctccccctccctaaaactttgatttaaaaaatgttcaaacttaggaaaaaagggaaagaaaagcacaatgaatagcacagacccttcacctagattcaccaggaatcagcactgtggagcacttgctttatttctcactctcccactcgtgattctccccatctgtgttcagagagggatcatgttctgcttaactgtggtagtgacgtgagttgtaagccccaagttattttttaaaagaaacattcagaactgaatccatttattaaaagctaaatatagcccactttactctttcaagtatacttagatttactatgaaactgtttgatgttagttcagtgggtgaattatttttgtattttacagtagttccctcaaatggcaaaaattaaaaggaccatacaacgagactttcattttcgtttgctctaataactattaatagctagctgtatgattaattacatttaccaagtttcacatttggtgacacctcaaagtaatcttatcccagccatctttatgcacccaagacacagccaagaaataggaagtctgcagaaaacagatacggaggaggccaaaccccaaagctcaggggctgtgttcacaggcaagccctggaggaactcctcttgaagggcctgtttcctctgacttggtgctgggttcccatacgcctcccgatccagaatagaaagagaaaacaagactgctcagagtgaacaagtcacagcagcaggaagtcgcaggaatcggaccacaagtaaaaaacatgatcaggcaccacaaacagccttgctctgtgctcaggacagttcatttaatcctcacgcagccccacaaggtagatgaggaagctgagtcttcaagaagtaaaacagcctgctcaaagtcaccagtaagcaacactgggatatgagcacaggcgtgtgtggcttgcaagccaggctctgtctgtaaggatttaggggaggtggtgtgtatctgggatcacggagcacaggacacaagctgggacccttctgggtctcactgggacttccgtgtacaaatgcacacattgtaagtgttggggttcatcaggaggctctcggacatctagcaaaggctgagttttgataatgaccctcatacattttgctggtggacacgacagtacggagtctctcccccagcctaaatttagcaaaataccaccggccctggggccccaggagagcagctccttcgcctcactccctactgcacccttttcattagggactctttcccttcccctttcactttctatgtgggatgcagctgaagtctccctgagcctcaaggcccatgagggtgacaggagaaaagccagggtagagattgtcactactgttatctcactggtggtcctgaccccacagcccttctaccagtgccgtatcctcagcgtgtgcccggtgagtcatggtggtggagacccacagtcatttcccaagcttcatgctctcagccacgtgattccacctgtgccgcacttcctcagtttatctgctgtgtccaccgtgctgacacggcgatagccactgggggcctagcagtaaccacaccctgtctcatggagctagctctctaatgggacacatgaccacacagttcataatgatggtggggagtgccctctatggaggggatgtaagagtacttacagttggggtcatctaggcaggaaaagtatggtcatgttccccagaactcttagaaatggatcacgaggtagatgagcttacaggaaaccgggccagcatggtgccatagaacagttcccatccctgccaaattcttcagcccttgtgtccaaggtcagatgccttgtcttccacaaaacattccctggcgtccacccttcgtccccttcagctacaagtgaccctcctctcctgcaagtattcatccttctgaaggctgggcgccaggcactaacagacaggcagctgcctcccagacataaggagcatgggtcctaaccaggaataagcttcacagccattgctgtcaggccaagccgtggtccaggcacctgcaggcattaattcgtgtcctcagccccacacccacggggagcaggtgtagttactattcccactttcgcgataaggaagcacaaggaaagtacatcgctcagatgtaaagacacaaagaaataatcagaggtgtgatgagtgctacagacgccttataggcatgggtagcagggaccttgttatagggaaatcacaaaggagggtcggtctggtgatgtagctaagacctcaagtctgagagtcagactttgattccagtccctgctccgcaagtgatcagttgtgtgactttaagtacatcactgaacttctccaggcttcacttcgagccactgtaaaataaggatgctaatatccaccttacggagttaaacatggtcctctgcacagacttagcagagcgcctggcaggtgttgagttcgggaagtcgtagtttattgccctctggtctgtgatgcgaccctggcttgcctctctgttaggctgcaacatcgctgtggcagtgtctatatccgatccaaccccgtgtccctcccccagaaccctccctaaggtcatgcatttctgttaggcgctcagtgagtatttgtagattgcatgaacgagggagggaatgcatgagtgagtagctgtcaccacatggcaggtatctttgctgaacactggtttagtcttctgacaaaagcctcctaatgtagccgcttcagacgagagcaggcttttttctctgaagtacccagccaacatcgtctggcggtgtctgactccgtggtgttggcggggacacgaaccaagcacagcttgatttttatggtttaatgtaagagatggagcctccaccactgtcgcttcagaagattgttgttttgacgtctcagccacacaaatggagtgaaactgccattataggagataagcaggggagactgaggtgtcaggatttaggaccctgccttcaaagcagatccacctgttgcccccacagtttgcgagtggctccattgaacacaaagggactgatggttgaatgcaggcgggctgccgggtgcccccatctgaggacgtctaactgtgtcccttctttgtctcccgtccctccccactgtcctcgctctgcaggaatggcatcaccagctgccggatgcggactgagagtgagccatcttgtggctccccagtggtcagcggagaccccaaggaggatcacaactacagcagtgccaagtcctccaacgcccggagcacctcgcccaccagcgactccatctcctcctcctcctcctcagccgacgaccactatgagtttgccaccaaggggagccaggagggcagcgagggcagcgaggggagcttccggagccacgagagccccagcgacacggaagaggacgacaggaagcacagccagaaggagcccaaggattctctgggggacagcgggtacgcatcccagcacaagaagcgccagcacttcgccaaggccaggaaggtccccagcgacacactgcccctcaaaaagagacgcaccgaaaagccccccgagagcgatgatgaggagatgaaagaagcggcagggtccctcctgcacttagcagggatccggtcctgtttgaataacatcaccaatcggacggcaaaggggcagaaagagcaaaaggaaaccacaaaaaattaaaaacaagtcactgatttgttttgaacttacgaccatttggtttcagcatgtcaggagatttctaatgatttgtggcaatatcagcaattttttttcttttttcttgtttttggtttggttttctttcttttcttttccttttattttgttttaatttgccccctcttctttgttttggacccttaagaattttatttttaaaggagattgaagccatagaactcatattgacactcagctgttttacaaaagcttttcattatctgaagacaaaaccgaaaaagccaaaattaccattgcttcctccagcttgtcagaaacctgtggctgaatccgcagggatgtcaacgtcaatatcacaggaacacacattcggcacctagaaggcacgtgggcaaagtaatcatcgttcaggcccaacccttaggtttaaaaagtcaggttgtccatcccattgggttcactgagtgaaggcacataaagcaattgaggaggaggaggaacccctcgtccccctaggagcagacccaagcttgtggcaccaggcatctgatggtgccaggaaagccactggaattgtcacacggcgagcacagagggccggccaccagtcctcgatgcttctgaaccctgaagcccgatgacatcttacgaggtggacgttggactgttcatgcgcatcgggtgtcagtgactcatggagaagaaatggggtaaatttttagtgatgttgctaatcattgaattctgttctctattaaattaagaaaatgttccaaaagccataagcctgaagattggccctgtgcacgcacgcacacacacacacacacacacacacacacacacacacacacgaaggagagagagagaaaactgatggggaaaacaagctgtgtcttcttaactgcccaagtgaaaagcaaccaagtccaggaaattacaatagctgttaaggaaaggaaataatggtacagatctttttctgtctatcaaaactatttgatccaagtgaaaaaaaaaaaaaaactagaaagctacggaacctgccattagtattgtggtgtatttttaagattaaaggtacactgatggacaaaaaaaaaaagtaaaacatggcaaaaaataaaataactcctatactgccctcaaaatggagtttgcaattaatatcaggatttatctttgcaaaaatcagtgatttccacattcagccagtatagccagcagaaatttctgatccacaatgcatggattcctttgaagaaaaaaaagaaaaagagaaaaaaatcacaaaaacaaactttttttattcaaaagtaacaaagttcttgtaaggtaaataatgtatttagcatgaagcatgaattattttcatataaatatagaaaatagagaaaaggctatgcctgtaatttttaagcccttaggcttagagtttcttttggttttcttcttttttctttccttttctttgctttctttttttcctttttgtttttgtttttgttttttgtttttgtttttttttcgggttattttgttttggttttttgaagcaggtgtttaaggtttaaccttcttcagggacaaattctgactgttggggaacttactctgcaatataaaaatatcttcatgctctggtagggcttggatggttgaactctgtactgccttgtgtgcacttcagccccgaccccctctgattctctgttgaaaagtgtgtcctttctctctgtctgtacatgtttaacatgacgcaataatttgagggcaaacttagtagtgagtgtgtatgatagaatcaagagaattatgggacgcttacttgagaaaatcattaccatgatttggttctaggaaaaaggcagtgaataattatgcaaattagccagaagaaggggaaccgtgctaatgggccttattgggtgaggggacgagatggggttcatgtgaaggaggaagcgatgccgaggtaggaaaggccagccccagacatcctatcgccacaatgccatgtcgcaataggaagcaggggccggccatcgctaccttcagcacactgaccaacctggaattaagaccacctagattgcgagagctgaatttagaaaccagacaacgtcatgcagcccagaaactcctgttgttacctttgcctaagaaattttctttaatggcgggggcggggggtgggggtccaaagagaaatctctaaaagaatatgatcttccatccaagtggagggaaactttaaaacaaaaacacccagtactgtggctcaggatatgatgcttgaggagagggagggaacagagatgaccttaacttttaaaaaagggactgctgtgggccaaagccaagcccatctgccaggacgaggtaatgtcagagctccatcagcccggacagtgggaactaactggtgcattccccacacttaccttccggtgggttgctgatgagagaacctgaaaaaacctacacctctacagcaggtcgaattcatgacctgaagctgaatacttccagcatatttattcagggtgtaggtgggaataaagtatcttcgcagtgctctgttccctccgtctccccagacatctgacaccctaaaagccatccacagctatggaacctgagcgacaccttgatttgtgttgtcacctgaccaagcctaaagacctccagctcagtcccccaccttcatcccaccccacagatgataaaattcagacctctctcctgaaaggcagaggttcaacattcaggactgtttctggccgaggacttcttccaattaaaacccccaccgtgggctgtctcccctcatttcatttttctaaaggggcagaggcctcttttagaaaataataaaatgcaatgtgtgtgatttacttttctgatctctttgagaaatagagaaatataaaagtgtgttcttaactccagaaccactctttttgcataaatacctcatcgggcagctttctaagtgtgattttcctgagtctcccttcgttggatctgccggaagacttgtcggggaacctttagtgagggtacttcttcctatttttcttctgtttttggaggcatacacattatgcataaccaaaacaatggctcaattgtgtttaactttgtattttgattgttgagaacaaaaacaaaaagtatcaatgtgtatgtggctgtttgtagtgaatttattggagaatgaggttgtccgtgtccttaacaagccaaggggcaggaggcaccctctcttatcccctcctccaagagcagtagagaatttaagcacaagcctatttgtgaaagaatattttgcttaagtgtcattcactttagtcttggaattccttcccaaacgtcaggtgttcttttagcttccaaactagcatatgtatccattagtctgacagatcgcctgaacaccattaagaggtgtggcgtttttgctttcatttctcctgctgggagaagtggcggttcatgtgtcattccagtatctcacatactcacacggggcaggggggagggggaaacggggaactatagcaatatttaaagatgctttggaaaccaaccgtgaacacatcaacaccacgacgtctacgattacttgctattggccctcggatacatttaagagaaagagacagtcactcttttttttcttaaatgatatacatataaacagttatttttatcctattataattgtcttttgtctttatctagtactatgtggaaagggtttgcatcatagatttttcccagccttataatataccataagctcctacttccctgcccctccctaatcagtattctttcaagagttctttggtgaagccatctatctgaaactaaaatgaaccaaacccatatttcactggtggttggagaaaaccatggccaaaacgattgtggcaggtctcaatcttgggagtttttaagaaggaatgtgccagaggccgattcccaagaacagagttttcttttgttttgcagaggcattcaatgtgtctagtgcttgctggccacagcagttactaccacagagccttctgggaggggccgttgtgttgaaggaggctcctgcctgagggacagcatcaggcagtgggctctgtagagtgagaaccaggtggaggccttctgtgcccagctcagagttctgcaccacgccaggactgcccaggccaagggctactgacgcaagttccactcattccactctgtggggggcgccttgggcctctcctggaagggctcttggagaaggaattggagttacgtacaagtgacctaaatgggaagcttttctagatgagattggattaaattccatgtgatttctctttccctttaatccaggttgggactcgtttctttctggtggatcacagctgcccagatgttgcaattgatttttatgtttctgtagagaagtatttttctttcatcttcaggattttttttgccaccaaaagaaaacattggaactctgtgtttcctcttgattgtgacttcccagtgttgacagttaagtccttagtgtcgtaggtcccagcccaccaatactatatcaaacactgttatgcacataatgcagcactgtgatctaatttaaataatacttttttattatttatactactatatataatatacatcaacacttttgctatataacctaagtgataaccctcttttagttacctgccaaactctggacttggtttatattgcagttaacacagttacaaagctgtaatggtgtctttttttcctttgtaacggaatgtgtaaatcaaagtatatacattgtgtggtgttcctgtttctggagtttcatgaggatttacacatggcattcagtgttctgtatagatctgcctacctttgtgaattcatctgttaacccctcttcctttgagagagcaccggcgatggtggttaactccttgtgttttctctctctcctactggttattcttgaattaagcacagactcgtcagctcggttgctttatcatgaataatgtgtgtgaccttgcagttcttccacagttcagcaaacaagtgctagcttcactgaccaaaaattaaggaaggaaaacacagtttttaaaacgatccatcttttaacagccgaaaccgatgtgtctatggtgctgcaccttgctgttgtacttctgaaatcagacgtgtgtgaacgatcatttctgacttaaccgtgagatgctcacgagtacccttcctgttgttttgttagcattgaaatcgagactatttatttggaatatatacaacagtgtttttccactgtatttcatttgcaaaagttgagaactgctttctctaccttttgcaaaataattgatattccatattggattctcaaagacttcgatatggtgaacctattaaacctagaaattgtattcatcctttcatgactgtggcctgagttccccagcccctctcctccttttttttagatgagatttagcacactctcagttatttaaacatgcaacatttcttgagtatgtatgttgaggccatctgagctcatagctgattcagtaaccagtttcatgctgtgtcattcacactcactacttaatactgccatggtgaaaatgtggaggaaaaatgtatccatgtgtgtctgggaagcatatacacttgtacattttttaatactctgattctgtaacatttctgagttttgttttgttttacagaaaaaaaaaaaaagtgataaagcaatcagaagaccaagaggtttactattgatgcttagggtcgtctgaccttggctggccaatagacctacacggccaaattaatttacgagagtaataatttttcaaaagccaattttttttctgtattttctgtatgaaactgccaatatcatgaatagaaagggagaaccataaaggagaaagaacgtgatgttctgttatgttcatgtaaacctaaagaaacagtgtggaggcaggcgcgatcagccgaactctagggacttggtgttgcttggaaggcatccatacctgcattttgcattcttcgtatgtaatcatattgccaaagacaaactatttcatcatttattgtaaataacacttttccccagacctaccataaagtttctgtgatgtattgtcttccagttgcaataaaaattactgagttgcatcaattgaagaaaaacaccacgtagtgttatgtgtgctgcgcctccctgtgcagatgctggtccacaacgtcatttctgttccttacctgcggtcaggcgtgtgtgcagtttttgcagtctggtttcggggttctcagctgcatttattgtgcccatcctcacacgtgcgtaggcttgggtgggcatcacacactgctctgcaaacacaaatgcacattcggaagctgggcttacccgggatctcaagagaattccagctttggtgtagctggtggctggccagcctcccatcatgagccttaagacttgtggtttagacagagcttccctttcatttggaagttgtcaaacaataaactgcaattgtactttagtactggagcctgccagcctatcccagatcctgagggtttcttgtaatgacattcctagccctaagaccttcatctgccagggtttattacgtcatcactcaagtgcccaccccagaccctcgcacacacatcccccaggagccaacaaggagctgatgggagagaggggagtgggaacaaggaagggatcacagggcaccactcaccgtgctggaggagtagaaagaggatgttctcgtgcatctctctggttccttttgtgatggttttgttttcagcatgtcctgtctgcaggtcttgccaccaacagtaaccgtagtgtagagttggccttggacactacccttctgctgggcccccacatccactggtgtctttgttctccaagatgcttgggctgcgtctcctgtcctcctgcagttatggtatcattctgaggtcataggcccatctgtcctggtaagcttacggggataaattcctccccgttacccatctcaaggtggtcacctctggatcctgtgggtttggcccttattgctgccatatctgatcccactgttggaatcactttcaaagctgtgatgtgtcctccagggtacaaatcaatatttgaggagacttgattgggaggaagagctaaagtcattgggagctgaatctgatgaatcaagtaatcatctaaattgggtagtgcttgaggccaaatataaggtggggccaccttaaaacagcacctacaacaaccattttcaataagtgactctcgagactggaggagagaccccacgtggatgatcagcatgcctgagggagccctgtctaaatgatcacacctgcaaaattctgatcaggtaacactgtcttcaaattcctatgggttcttagagaagggaacttctccccatggtgtcagggaccatgaaggctcttctgggtttgaagctgagtctggatgggtgccagtgaggggcactgcagaccctaaacagttttctccttaccttttgactgcactgcctgatgaaagtatgaaccaagaagtcaccatccttctagaaagttatgaacagatgagggcattttcgggagtctgatatgactaggaggtttttatgagctaaaagctcatgttctggttaccctaattccagatcaccaaaccaaatggccctacatatgccagcagaagtgtattttgaccttttttttttcattgataggaatacaaaaccagggtttgtgggctgggtgtggacaattttttaaaagactcaagtacaagggaataagcatttaataatattaaataatatgtttattcccttgtactcaagtcttttaaaaaattgctcctttgttttgtgtgaacagacctttctagagcagtgtgtctaaataatgctcatagcagtcataccgtaatttgaaatcattcttgggcatttttggactcagtaacttttgtgagaatcgttttatgttactccataataaagtaatttggagtatctatggctaaatctccttcaaatacggcagcttacttgagagagtcaggaattctactttttctcacctggtacacatttcaaactgacttctaaaaagatataatatggacgaagtacatattatgtctggtggggaaagtctgaaaccaagatagtggctgatttctagctccccccaggatacggtttcttcattaaatgagtccagtctattcacattataaaacaggaaggaatattagagaccattggtccaaactccccattttatggaccaggcagctgagacacaggaaaatttttgcccaggataacacgcctagctagtcgtggagctggacttaaagagaagaaattttctgtcttttctattgtatccatttatttggtatgtaattataatcatcagatctgtaggatttcatagctggcaattcaccacacgtacacacttaccatatcctatgcattttccatatagctatagtgaaaaatgattatcttttgaagtaatacataacatcctgttgaatgggtgtcctgccatcttcaactgttaccttactcttcaatgtttatattgctttcaatttctccattataagtaatactgcaatgaacatcttcaggtatgtggcaatttacattctttccacttgtctttcagttagattgcctattggactattgaaacaaaagtgttatcaatgaggtagctatttatacgcagactttctaagaggcaccaatgccaacagcaatgaatgcaaaccccagtttcatgacactctcaccagtattggatatgattttactctttaatttttgctaacagacaaaaatagtactttgttgccattttaatttaaatttaatttctagcaaagttacattacttttcatatgtttgctgactgtttattatttatcttggtggaatcatctgtaagtgactctctaagagtttaaaagagagaattcatatttatagactccttgctacaatgtccccagttcaccattaaatggtgtcaagatgcccaaacatcacctgcctccagaggtttttaccgtattcagacacttctaattgttcctatattaagacaaaatcctgctccctaagacttacctgaaggtgcttagactatcctaaaaggccacaaacatgtaaacttaaatcatcttgcacatggcaacaataatattgttgaaaacaacaataatttctaagtctttttcagaataaacattccaacttctgcctcctatttgctttcttctgaacatgttcccatttgtgatcagaactgagaactgacaacagaattccaggtacagttcaatgatgagaaactctccccacctcattctagatcctctatttccattaatataaccaaaccactgattcacattgaagttgctattagctaaaacaagtaagtcctgtctattgatgttcttctccagatacccattttgagtcacggcgagggactacattatctctgtcaaatctccttggatttggtccactgtcttaagccagttcagattggcagtgggctgggggtatgaggattcagattttgtcatcaaaaacatttgctttccttccaggtatcatttaatcacaaatttgaaaatgtcttttgtataaggacaaagctggagccatgtggcatgggtctagagccctccttgtaggtcaactttcttctcagtcagcacctttcattgtcagtcattcatcattcaactagttatgcaggcaccaggctttctgaagatgcaatgtacatgtctccatccagtcaaaagtttgtcaagtacctcctcattctccatgtataagtctgtagtcttcctttataagaaaggaaatgaagttgcactctatgctaaggtaaggtctgccaatttgaaataaagcaatgaaaaggaataaaatttcactaattgcataaacattgaaataatgtgaattctactttattcctatgggggaattagccttgacttatgtagttattatatgaagtcttgaggaacataccccgtacatgaaaagaaaccacaattcattcattcctttactctgtcttagcccaagatggcttccttgccaagagcttgcaaactattctcttaataatccacccaagattctcactcagagggtgacattgaggctatggattgatatggtttggctctgtgtctccacccaaatctcatgtcgaattgtaattcccaatgttggaggagggacctggtgggaggtgattgaatcatggggacagatttccttcctgctgttcccatgatagtaagtgcattctcatgagatctgatggtttaaaagtgtgtggcacttccccctttgctctctctctctctcctgctgccatgtaaagatgtgcttgcttcccctttgcccttctgccatgattgtaagtttcctgagacctcccagccatgcttcctgtacagcctgaggaacttcacagttcctcttcaaacctcttttctacataaattacccagtctcaggtagttctttatagcagcgtgagaacaaactaatacatggatctgtagtgtgcagatattgtctgctgtttacaacccggaagttttggtataatgcctagtagtatttcttcactttatttacatgcctatttaggggactgacctatctagcatgtacttagcctttaagtatagtcaaatgaatttgtatagttagcttcctttaaaaatattatcaggagtttggtaacttctggcacctacttacttttaaatagttggccctttacccaacatggcatatatatttaagcatccagaacttcagtagactaaaaagactatccaaaaacacgaaagaataaagaagttaaaaaaacagtttggaaagggttgttttatttacttatttatttatttttgagatagagtctcagtctgtcacccaggctggaatgcagtggtgtgatctcggctcactgcaacctctgcctcccagtttcaagcgattctcctgcctcagcctcctgagtagctgggattacaggtgtgcaccagcatgcccagctaattttgtatttttagtagagacggggtttcaccatgttggtcaggctggtctcgaactcctgacctcgtgatccacccacctccacctcccaaagtgctttgattacaggcgtgagccacctcacccagcctggaaactttttaaatagattctctcctttattgtcatagtcaattcacacttgtttttcagcaactgctatgtgacaatcctgttaggtgctgggacacagataaaaaatttggctcttaccttcaagcatgatcgtgtccaaaaatccagctgtgttgattaatgggcatctcactggcagctggtatatccttccccaaactttttagtagttgttggtcttttctagacataagcatgttggttgcaaagatgaatccagcctttgtcttcttctcctgccagtctcccctcttctcacctgttagctgatgagacattggataagagcctgtccactatctgcagacttagccatccctccaatgggtggattatttcttaatgaactaatccttgctgcctggcaccagctctgtgataaaaagaatctgggacatttcttctgcacgatgcttgatgttcttggcttataaacaaacatttgtctcccatacctgccctgctcccggctttttctccccaccaccttacttttatcactcctttctcaaaattgctctaagagcaaaagattggagaacctgaatggtagaggatgctcttactttatcttaataaccctcctgccactatcatggccaaacaagggtgtgcagagagatgcatgaagccttctgttgattatcaggctagacttccctgcaaaactcttattcactgaacatgctgcatagacctgcaggagttcatcacctccagccttctgcctgaatgtggaccatggcagcaaattctgctctgagctaagagggaatgtgttcatgcatgctgattcacagggatcttgttgtattatacaaaaagcatgcctttttgatgcttaatcctttctgctaggccatttcttgtttttttcctttctttttctttcttttcttttctttttttttttttttttttttttgtttgtttgtgtgtttgtttttgaaacagggtcttcctctgtcacctggctggagtgctcagtgcctgattgtagctcactacagccttgccctcccagacacagacagttttcccacctcagacccccaagtagctggaaatacaggtgtgtgccaccacatctggctttttttttttttttttttttttttggagcaatgggattttacagtgttgcctaagctggtcttgaacttctggcctcaagtgatcctcccacttcagcctcccagatttctgggattacaggcatgagccaccatgcccagcctagactatttctcttaggctaaaaatttcatctaacccatcagacccagtaggagggaaacaactctatatttttccacctttactggcagtaactaatccccttgggagtaaaaatgtcaattggcaactaagaaaattctgaaggagggatatatattttacacctgagttaacttttttacgctgcaaaggcagaagttttcttctctgtctaacgacttgtaacttaataataacataaacacactgtgtttaacattcgtctttcatgtttacaacgtgctgtgaagaagtcaacctgtccatcccaaaccaacccttctaagaagcctcaaatcatccagagtccctcctgctctgtcagctcctccatggaacccaacacccagtctggccagttgtactttaaactcacctttgatcatcctttgtcctccactcctctggccgccatcctggtcaagtcccatttcctcttgcccagatgatgaccacaggtgctggtctccactgaccacacattcctctgcaggaccatgagacttctctttccaaatcacctctgattctgtcatttctcagacccacctgaactgcgggcatcctcaatgactccagtcaccaaactcttcagccttttgtggctcggggcctcttcacattttttccccttcctgggatgctctatgcactccctacctctctcctcctgaaaagtctctgtcagtccttcaaggcccaagtcatatcgttctctcaccaagttccagaccaccaaagtcctgtctctattggtggctgtcatcacaggctgttaggattttaaatccacctgttggctcccctgatggaggtgatctgcttaggggcaggcatcagatggtattttatgctgaaccccagtacggtgcctgccacttggatacttaaggtgttctaaatttaaggtgtgtgtttgtttttcatatcctcagttagctaaacagatagttggcaatgatacgtccatttcaccaaatttttctttcattcagagccagcaagcggtatatctctgtctcttttccacaagaaacttgctccagcctgggcaatatgacaaaaccctttaactacaaaaatttcaaaaaaattagccctttctccccacattttgccatcaaaccctatcaattccacctcttaagcatctccaagttccatcctcactgcgatagtaacctctgtgcaaacctatatcattgctctgttggatttttgcagttagaaaacttgcattaattgcttcccctttctccatttgtacaagtcaggccccaccagggaaatggagacactctaagtatattatcagtgatctccagagaaacagaaccaataatagatagatgatagacagatagatagatgatagatagatagatagatagatagatagatagatagatagatagaggtctagatacacaagcagagatttattatgatacttggcctacacgattatggaagcctagaagtcccataatatgctgtctgcaagccagagacccaggaaagccggtggtgtaattcagtctgagtctgaaagcctgagaaccaggagaagacagatgtcccaactcaagaacagagatggaaaatttgcacttcctttttgttctgttcatgctctcatcagattggatgacgcctgcctacattggtgagtgtggatcttctttactcaatttactgattcaaatgctaatctcacccagctatggtctcacagaaatagtgttttaccagctatctgggcatctcttagcccagtcaagttgcacgggaaattaaccatcacaccaagtataggttggtgcaaaagtaattgtggtttttgccattaaaagtaatggcatcacaatagtgagttctcatgagatctggttgtttaaaagtgtttggcacctcccctctctctctcttcctcttgctccagccatgtgaagtgcctgctccccctttgccttccaccatggctgtaagtttcctgaggcctccccagaagcccagtagatgccagcctcatgctccctgtacagcctgaggaaccatgagccaattaaacatcttttctttataaattacccagtcttaggtatttctttatagcagtgtgagaatggactcatactcatgcagagctaagcctagctgagcagaggaaggccaaggaaggaaactgagggcaccaggaacccccaggctagcacgctggtcctgcccctcttttatccattcccccacaacccactgcagccaggatgaccgtccaatcacccatctgacactgtgcccctgcctaaagtcctatgctgtgccctgtgctctggctaagctcccagccagccctccagtctgatctcccatcccctcccaggcccactctgagcctcagctgcttggtaagttgcagttcccaggatgttcctagtgccttctgttgcttcgcatggaccaccctctctgcctttctggaatgtcttcatgtcttccctctgtgttcaacttctccactccctgctaccaaggtaccttgtggttaacatgctttcattctagcacttgctatgtttctctgtggctattgatttcccagtgtctgtcatgttctcctaaagggcaagctttttgccctgtacatctgtttattcccaggacctgccttagcatctggctgcagcagtcactcagctagcattttttggatagacagatggatgaacaagacttactgctcagatcctagcctgcatactataaatgagagcattgcaccctcttccccaaccacagcaagatgcaggacagagcaggagttggaattgtattcaggagcatttgacagcaagatattccctcccacctaggagagctctaggggcatgaggccttgctcactgcccatcttggggtctcagggataaataggagatggtttggcttgttttatctaggccatatccatggccaggttctctatggccagcaggctgaaggaatcatcctccttcccctgaatgtgaggcccagaaatgtcacagttccaaaggcttctaaagtatctggataaagaggaacagagaggaagggacaggacccacaggatctaccatctcccagtccagccagtcctcctcctttgctttctgtctacagggcatggaggtggagcaggagaggcatgggcagagctctggctgctccgtccttagcttcatgcttgttttgtgctgactcgccatgctggagcccatttccacatgagaaatcacatcaaaacgtctctgcaccaacgctcttggcctggctaagtcaaaattctgagatcatcactggggagacgatcgatgttcttggccagcttttaatgacaatcgattctctccctggctctttgttaagtgtcattgagaacaattgcattttgtgaacctggtcactggccttgaatttgcagcttcctacagttgacgagaggcagagcatcttgttgctgttcttttctcactcaatcacacaatatgctcagctgtacaatgaatgttctttccagtctggtttttaggca

SEQ ID NO: 1035 - DNA, 2636 bp, Homo sapiens
actatagcaatatttaaagatgctttggaaaccaaccgtgaacacatcaacaccacgacgtctacgattacttgctattggccctcggatacatttaagagaaagagacagtcactcttttttttcttaaatgatatacatataaacagttatttttatcctattataattgtcttttgtctttatctagtactatgtggaaagggtttgcatcatagatttttcccagccttataatataccataagctcctacttccctgcccctccctaatcagtattctttcaagagttctttggtgaagccatctatctgaaactaaaatgaaccaaacccatatttcactggtggttggagaaaaccatggccaaaacggccgattcccaagaacagagttttcttttgttttgcagaggcattcaatgtgtctagtgcttgctggccacagcagttactaccacagagccttctgggaggggccgttgtgttgaaggaggctcctgcctgagggacagcatcaggcagtgggctctgtagagtgagaaccaggtggaggccttctgtgcccagctcagagttctgcaccacgccaggactgcccaggccaagggctactgacgcaagttccactcattccactctgtggggggcgccttgggcctctcctggaagggctcttggagaaggaattggagttacgtacaagtgacctaaatgggaagcttttctagatgagattggattaaattccatgtgatttctctttccctttaatccaggttgggactcgtttctttctggtggatcacagctgcccagatgttgcaattgatttttatgtttctgtagagaagtatttttctttcatcttcaggattttttttgccaccaaaagaaaacattggaactctgtgtttcctcttgattgtgacttcccagtgttgacagttaagtccttagtgtcgtaggtcccagcccaccaatactatatcaaacactgttatgcacataatgcagcactgtgatctaatttaaataatacttttttattatttatactactatatataatatacatcaacacttttgctatataacctaagtgataaccctcttttagttacctgccaaactctggacttggtttatattgcagttaacacagttacaaagctgtaatggtgtctttttttcctttgtaacggaatgtgtaaatcaaagtatatacattgtgtggtgttcctgtttctggagtttcatgaggatttacacatggcattcagtgttctgtatagatctgcctacctttgtgaattcatctgttaacccctcttcctttgagagagcaccggcgatggtggttaactccttgtgttttctctctctcctactggttattcttgaattaagcacagactcgtcagctcggttgctttatcatgaataatgtgtgtgaccttgcagttcttccacagttcagcaaacaagtgctagcttcactgaccaaaaattaaggaaggaaaacacagtttttaaaacgatccatcttttaacagccgaaaccgatgtgtctatggtgctgcaccttgctgttgtacttctgaaatcagacgtgtgtgaacgatcatttctgacttaaccgtgagatgctcacgagtacccttcctgttgttttgttagcattgaaatcgagactatttatttggaatatatacaacagtgtttttccactgtatttcatttgcaaaagttgagaactgctttctctaccttttgcaaaataattgatattccatattggattctcaaagacttcgatatggtgaacctattaaacctagaaattgtattcatcctttcatgactgtggcctgagttccccagcccctctcctccttttttttagatgagatttagcacactctcagttatttaaacatgcaacatttcttgagtatgtatgttgaggccatctgagctcatagctgattcagtaaccagtttcatgctgtgtcattcacactcactacttaatactgccatggtgaaaatgtggaggaaaaatgtatccatgtgtgtctgggaagcatatacacttgtacattttttaatactctgattctgtaacatttctgagttttgttttgttttacagaaaaaaaaaaaaagtgataaagcaatcagaagaccaagaggtttactattgatgcttagggtcgtctgaccttggctggccaatagacctacacggccaaattaatttacgagagtaataatttttcaaaagccaattttttttctgtattttctgtatgaaactgccaatatcatgaatagaaagggagaaccataaaggagaaagaacgtgatgttctgttatgttcatgtaaacctaaagaaacagtgtggaggcaggcgcgatcagccgaactctagggacttggtgttgcttggaaggcatccatacctgcattttgcattcttcgtatgtaatcatattgccaaagacaaactatttcatcatttattgtaaataacacttttccccagacctaccataaagtttctgtgatgtattgtcttccagttgcaataaaaattactgagttgcatcaattgaagaaaaacaccacgta

SEQ ID NO: 1036 - protein, 60 aa, Homo sapiens
MRIYTWHSVFCIDLPTFVNSSVNPSSFERAPAMVVNSLCFLSLLLVILSTDSSARLLYHE

SEQ ID NO: 1037 - DNA, 3455 bp, Homo sapiens
cggcgcgacccggcggcggggccacccgcgagtccagcgtcgccgcagccccccaatgcggccgcgagaagcagcgggggggcaggcgatcgaaggagccttcacgtaaatgggtccagtcatgcctcccagtaagaagccagaaagctcaggaattagtgtctccagtggactgagtcagtgttacgggggcagcggtttctccaaggcccttcaggaagacgatgacctcgacttttctctgcctgacatccgattagaagagggggccatggaagatgaagagctgaccaacctgaactggctgcacgagagcaagaacttgctgaagagctttggggagtcggtcctcaggagtgtcagccccgtccaggacctggacgatgacacccccccatcccctgcccactctgacatgccctacgatgccaggcagaaccccaactgcaaacccccctactccttcagctgcctcatatttatggccatcgaggactctccaaccaagcgcctgccagtgaaggatatctacaactggatcttggaacattttccgtattttgcaaatgcacctactgggtggaaaaactcagtgagacacaatttatcattgaataagtgttttaagaaagtggacaaagagaggagtcagagtattgggaaagggtcgttgtggtgcatagacccagagtatagacaaaatctaattcaggctttgaaaaagacaccttatcacccacacccacacgtgttcaatacacctcccacctgtcctcaggcatatcaaagcacatcaggtccacccatctggccgggcagtaccttcttcaagagaaatggagcccttctccaagatcctgacattgatgctgccagtgccatgatgcttttgaatactccccctgagatacaagcaggttttcctccaggagtgatccaaaatggagcgcgggtcctgagccgagggctgtttcctggcgtgcggccgctgccaatcactcccattggggtgacagcggccatgaggaatggcatcaccagctgccggatgcggactgagagtgagccatcttgtggctccccagtggtcagcggagaccccaaggaggatcacaactacagcagtgccaagtcctccaacgcccggagcacctcgcccaccagcgactccatctcctcctcctcctcctcagccgacgaccactatgagtttgccaccaaggggagccaggagggcagcgagggcagcgaggggagcttccggagccacgagagccccagcgacacggaagaggacgacaggaagcacagccagaaggagcccaaggattctctgggggacagcgggtacgcatcccagcacaagaagcgccagcacttcgccaaggccaggaaggtccccagcgacacactgcccctcaaaaagagacgcaccgaaaagccccccgagagcgatgatgaggagatgaaagaagcggcagggtccctcctgcacttagcagggatccggtcctgtttgaataacatcaccaatcggacggcaaaggggcagaaagagcaaaaggaaaccacaaaaaattaaaaacaagtcactgatttgttttgaacttacgaccatttggtttcagcatgtcaggagatttctaatgatttgtggcaatatcagcaattttttttcttttttcttgtttttggtttggttttctttcttttcttttccttttattttgttttaatttgccccctcttctttgttttggacccttaagaattttatttttaaaggagattgaagccatagaactcatattgacactcagctgttttacaaaagcttttcattatctgaagacaaaaccgaaaaagccaaaattaccattgcttcctccagcttgtcagaaacctgtggctgaatccgcagggatgtcaacgtcaatatcacaggaacacacattcggcacctagaaggcacgtgggcaaagtaatcatcgttcaggcccaacccttaggtttaaaaagtcaggttgtccatcccattgggttcactgagtgaaggcacataaagcaattgaggaggaggaggaacccctcgtccccctaggagcagacccaagcttgtggcaccaggcatctgatggtgccaggaaagccactggaattgtcacacggcgagcacagagggccggccaccagtcctcgatgcttctgaaccctgaagcccgatgacatcttacgaggtggacgttggactgttcatgcgcatcgggtgtcagtgactcatggagaagaaatggggtaaatttttagtgatgttgctaatcattgaattctgttctctattaaattaagaaaatgttccaaaagccataagcctgaagattggccctgtgcacgcacgcacacacacacacacacacacacacacacacacacacacacgaaggagagagagagaaaactgatggggaaaacaagctgtgtcttcttaactgcccaagtgaaaagcaaccaagtccaggaaattacaatagctgttaaggaaaggaaataatggtacagatctttttctgtctatcaaaactatttgatccaagtgaaaaaaaaaaaaaaactagaaagctacggaacctgccattagtattgtggtgtatttttaagattaaaggtacactgatggacaaaaaaaaaaagtaaaacatggcaaaaaataaaataactcctatactgccctcaaaatggagtttgcaattaatatcaggatttatctttgcaaaaatcagtgatttccacattcagccagtatagccagcagaaatttctgatccacaatgcatggattcctttgaagaaaaaaaagaaaaagagaaaaaaatcacaaaaacaaactttttttattcaaaagtaacaaagttcttgtaaggtaaataatgtatttagcatgaagcatgaattattttcatataaatatagaaaatagagaaaaggctatgcctgtaatttttaagcccttaggcttagagtttcttttggttttcttcttttttctttccttttctttgctttctttttttcctttttgtttttgtttttgttttttgtttttgtttttttttcgggttattttgttttggttttttgaagcaggtgtttaaggtttaaccttcttcagggacaaattctgactgttggggaacttactctgcaatataaaaatatcttcatgctctggtagggcttggatggttgaactctgtactgccttgtgtgcacttcagccccgaccccctctgattctctgttgaaaagtgtgtcctttctctctgtctgtacatgtttaacatgacgcaataatttgagggcaaacttagtagtgagtgtgtatgatagaatcaagagaattatgggacgcttacttgagaaaatcattaccatgatttggttctaggaaaaaggca

SEQ ID NO: 1038 - protein, 488 aa, Homo sapiens
MGPVMPPSKKPESSGISVSSGLSQCYGGSGFSKALQEDDDLDFSLPDIRLEEGAMEDEELTNLNWLHESKNLLKSFGESVLRSVSPVQDLDDDTPPSPAHSDMPYDARQNPNCKPPYSFSCLIFMAIEDSPTKRLPVKDIYNWIHFPYFANAPTGWKNSVRHNLSLNKCFKKVDKERSQSIGKGSLWCIDPEYRQNLIQALKKTPYHPHPHVFNTPPTCPQAYQSTSGPPIWPGSTFFKRNGALLQDPDIDAASAMMLLNTPPEIQAGFPPGVIQNGARVLSRGLFPGVRPLPITPIGVTAAMRNGITSCRMRTESEPSCGSPVVSGDPKEDHNYSSAKSSNARSTSPTSDSISSSSSSADDHYEFATKGSQEGSEGSEGSFRSHESPSDTEEDDRKHSQKEPKDSLGDSGYASQHKKRQHFAKARKVPSDTLPLKKRRTEKPPESDDEEMKEAAGSLLHLAGIRSCLNNITNRTAKGQKEQKETTKN

SEQ ID NO: 1039 - DNA, 2786 bp, Homo sapiens
gtttttgctttcatttctcctgctgggagaagtggcggttcatgtgtcattccagtatctcacatactcacacggggcaggggggagggggaaacggggaactatagcaatatttaaagatgctttggaaaccaaccgtgaacacatcaacaccacgacgtctacgattacttgctattggccctcggatacatttaagagaaagagacagtcactcttttttttcttaaatgatatacatataaacagttatttttatcctattataattgtcttttgtctttatctagtactatgtggaaagggtttgcatcatagatttttcccagccttataatataccataagctcctacttccctgcccctccctaatcagtattctttcaagagttctttggtgaagccatctatctgaaactaaaatgaaccaaacccatatttcactggtggttggagaaaaccatggccaaaacgattgtggcaggtctcaatcttgggagtttttaagaaggaatgtgccagaggccgattcccaagaacagagttttcttttgttttgcagaggcattcaatgtgtctagtgcttgctggccacagcagttactaccacagagccttctgggaggggccgttgtgttgaaggaggctcctgcctgagggacagcatcaggcagtgggctctgtagagtgagaaccaggtggaggccttctgtgcccagctcagagttctgcaccacgccaggactgcccaggccaagggctactgacgcaagttccactcattccactctgtggggggcgccttgggcctctcctggaagggctcttggagaaggaattggagttacgtacaagtgacctaaatgggaagcttttctagatgagattggattaaattccatgtgatttctctttccctttaatccaggttgggactcgtttctttctggtggatcacagctgcccagatgttgcaattgatttttatgtttctgtagagaagtatttttctttcatcttcaggattttttttgccaccaaaagaaaacattggaactctgtgtttcctcttgattgtgacttcccagtgttgacagttaagtccttagtgtcgtaggtcccagcccaccaatactatatcaaacactgttatgcacataatgcagcactgtgatctaatttaaataatacttttttattatttatactactatatataatatacatcaacacttttgctatataacctaagtgataaccctcttttagttacctgccaaactctggacttggtttatattgcagttaacacagttacaaagctgtaatggtgtctttttttcctttgtaacggaatgtgtaaatcaaagtatatacattgtgtggtgttcctgtttctggagtttcatgaggatttacacatggcattcagtgttctgtatagatctgcctacctttgtgaattcatctgttaacccctcttcctttgagagagcaccggcgatggtggttaactccttgtgttttctctctctcctactggttattcttgaattaagcacagactcgtcagctcggttgctttatcatgaataatgtgtgtgaccttgcagttcttccacagttcagcaaacaagtgctagcttcactgaccaaaaattaaggaaggaaaacacagtttttaaaacgatccatcttttaacagccgaaaccgatgtgtctatggtgctgcaccttgctgttgtacttctgaaatcagacgtgtgtgaacgatcatttctgacttaaccgtgagatgctcacgagtacccttcctgttgttttgttagcattgaaatcgagactatttatttggaatatatacaacagtgtttttccactgtatttcatttgcaaaagttgagaactgctttctctaccttttgcaaaataattgatattccatattggattctcaaagacttcgatatggtgaacctattaaacctagaaattgtattcatcctttcatgactgtggcctgagttccccagcccctctcctccttttttttagatgagatttagcacactctcagttatttaaacatgcaacatttcttgagtatgtatgttgaggccatctgagctcatagctgattcagtaaccagtttcatgctgtgtcattcacactcactacttaatactgccatggtgaaaatgtggaggaaaaatgtatccatgtgtgtctgggaagcatatacacttgtacattttttaatactctgattctgtaacatttctgagttttgttttgttttacagaaaaaaaaaaaaagtgataaagcaatcagaagaccaagaggtttactattgatgcttagggtcgtctgaccttggctggccaatagacctacacggccaaattaatttacgagagtaataatttttcaaaagccaattttttttctgtattttctgtatgaaactgccaatatcatgaatagaaagggagaaccataaaggagaaagaacgtgatgttctgttatgttcatgtaaacctaaagaaacagtgtggaggcaggcgcgatcagccgaactctagggacttggtgttgcttggaaggcatccatacctgcattttgcattcttcgtatgtaatcatattgccaaagacaaactatttcatcatttattgtaaataacacttttccccagacctaccataaagtttctgtgatgtattgtcttccagttgcaataaaaattactgagttgcatcaattgaagaaaaacaccacgta

SEQ ID NO: 1040 - protein, 60 aa, Homo sapiens; identical to SEQ ID NO: 1036

SEQ ID NO: 1041 - DNA, 3360 bp, Homo sapiens
gagccttcacgtaaatgggtccagtcatgcctcccagtaagaagccagaaagctcaggaattagtgtctccagtggactgagtcagtgttacgggggcagcggtttctccaaggcccttcaggaagacgatgacctcgacttttctctgcctgacatccgattagaagagggggccatggaagatgaagagctgaccaacctgaactggctgcacgagagcaagaacttgctgaagagctttggggagtcggtcctcaggagtgtcagccccgtccaggacctggacgatgacacccccccatcccctgcccactctgacatgccctacgatgccaggcagaaccccaactgcaaacccccctactccttcagctgcctcatatttatggccatcgaggactctccaaccaagcgcctgccagtgaaggatatctacaactggatcttggaacattttccgtattttgcaaatgcacctactgggtggaaaaactcagtgagacacaatttatcattgaataagtgttttaagaaagtggacaaagagaggagtcagagtattgggaaagggtcgttgtggtgcatagacccagagtatagacaaaatctaattcaggctttgaaaaagacaccttatcacccacacccacacgtgttcaatacacctcccacctgtcctcaggcatatcaaagcacatcaggtccacccatctggccgggcagtaccttcttcaagagaaatggagcccttctccaagatcctgacattgatgctgccagtgccatgatgcttttgaatactccccctgagatacaagcaggttttcctccaggagtgatccaaaatggagcgcgggtcctgagccgagggctgtttcctggcgtgcggccgctgccaatcactcccattggggtgacagcggccatgaggaatggcatcaccagctgccggatgcggactgagagtgagccatcttgtggctccccagtggtcagcggagaccccaaggaggatcacaactacagcagtgccaagtcctccaacgcccggagcacctcgcccaccagcgactccatctcctcctcctcctcctcagccgacgaccactatgagtttgccaccaaggggagccaggagggcagcgagggcagcgaggggagcttccggagccacgagagccccagcgacacggaagaggacgacaggaagcacagccagaaggagcccaaggattctctgggggacagcgggtacgcatcccagcacaagaagcgccagcacttcgccaaggccaggaaggtccccagcgacacactgcccctcaaaaagagacgcaccgaaaagccccccgagagcgatgatgaggagatgaaagaagcggcagggtccctcctgcacttagcagggatccggtcctgtttgaataacatcaccaatcggacggcaaaggggcagaaagagcaaaaggaaaccacaaaaaattaaaaacaagtcactgatttgttttgaacttacgaccatttggtttcagcatgtcaggagatttctaatgatttgtggcaatatcagcaattttttttcttttttcttgtttttggtttggttttctttcttttcttttccttttattttgttttaatttgccccctcttctttgttttggacccttaagaattttatttttaaaggagattgaagccatagaactcatattgacactcagctgttttacaaaagcttttcattatctgaagacaaaaccgaaaaagccaaaattaccattgcttcctccagcttgtcagaaacctgtggctgaatccgcagggatgtcaacgtcaatatcacaggaacacacattcggcacctagaaggcacgtgggcaaagtaatcatcgttcaggcccaacccttaggtttaaaaagtcaggttgtccatcccattgggttcactgagtgaaggcacataaagcaattgaggaggaggaggaacccctcgtccccctaggagcagacccaagcttgtggcaccaggcatctgatggtgccaggaaagccactggaattgtcacacggcgagcacagagggccggccaccagtcctcgatgcttctgaaccctgaagcccgatgacatcttacgaggtggacgttggactgttcatgcgcatcgggtgtcagtgactcatggagaagaaatggggtaaatttttagtgatgttgctaatcattgaattctgttctctattaaattaagaaaatgttccaaaagccataagcctgaagattggccctgtgcacgcacgcacacacacacacacacacacacacacacacacacacacacgaaggagagagagagaaaactgatggggaaaacaagctgtgtcttcttaactgcccaagtgaaaagcaaccaagtccaggaaattacaatagctgttaaggaaaggaaataatggtacagatctttttctgtctatcaaaactatttgatccaagtgaaaaaaaaaaaaaaactagaaagctacggaacctgccattagtattgtggtgtatttttaagattaaaggtacactgatggacaaaaaaaaaaagtaaaacatggcaaaaaataaaataactcctatactgccctcaaaatggagtttgcaattaatatcaggatttatctttgcaaaaatcagtgatttccacattcagccagtatagccagcagaaatttctgatccacaatgcatggattcctttgaagaaaaaaaagaaaaagagaaaaaaatcacaaaaacaaactttttttattcaaaagtaacaaagttcttgtaaggtaaataatgtatttagcatgaagcatgaattattttcatataaatatagaaaatagagaaaaggctatgcctgtaatttttaagcccttaggcttagagtttcttttggttttcttcttttttctttccttttctttgctttctttttttcctttttgtttttgtttttgttttttgtttttgtttttttttcgggttattttgttttggttttttgaagcaggtgtttaaggtttaaccttcttcagggacaaattctgactgttggggaacttactctgcaatataaaaatatcttcatgctctggtagggcttggatggttgaactctgtactgccttgtgtgcacttcagccccgaccccctctgattctctgttgaaaagtgtgtcctttctctctgtctgtacatgtttaacatgacgcaataatttgagggcaaacttagtagtgagtgtgtatgatagaatcaagagaattatgggacgcttacttgagaaaatcattaccatgatttggttctaggaaaaaggca

SEQ ID NO: 1042 - protein, 488 aa, Homo sapiens; identical to SEQ ID NO: 1038
